United States Patent Application Publication US 2011/0014706 A2 - sequence listing, part 32

SEQ ID NO: 75673 - DNA, 509 bp, Arabidopsis thaliana landsberg
  unsure (1)..(509): unsure at all n locations
tcaattttgagtctagagttcttttttttttttatgtttttaaagacttcaagaggcagggattggttaaataataatactggaaatctgaaccaaaaaaaggctcttaaaataaccgtgcttaaaggactaacctctctcctttattgggagcaccatttccatctgccaaaacagagctccctgctataatctctgnnggnngantggttgggattgatgtggcatccgttggtttcccattgtttgcatgcgtactaccaacatgtgtattgtttaaagataaatcctcatgacggggggaggaatatacgtagctatcataactggggctggcaagacttgaatcatcatcagatttatccctgaccaaccaaaatattagttgctcagtttattcatctgtagcagttccagataagtacataacgatatgaaaattccaaatagacaatcacagagtttaaaattaggagatcaacctcgcgatacttagactttcgtgaatc

SEQ ID NO: 75674 - DNA, 609 bp, Arabidopsis thaliana landsberg
  unsure (1)..(609): unsure at all n locations
acgcccagatatttgtgtcggaaaatagtgtcgtaatatttgtgacaatgtcgactggctatgtttctctttgcgacaacacgtttctatccagaaattgctaatttgctttggatgcgcgatgcctaaaatccggtttgcagccgcaaaatcctgttttcttatagtgcgggctttgttgataaccttgaggaaaaggttcttttggagtatagatggggtcaaagaagctaacgttttactaagcaaagcaagaaaaccaatgaagaaaatggtagactgagtaatgaagacttggtccaggaattttgttagtaagtggaagacttggaaaatgaaaaataacacagctgtttgattgattgacttgagtaaagtatgtgccgtattatatgggatataaaaactccataaaagacaaccttaatgaccttggaatcttaattagtacctgaagagtaaattagtttaaaattatttggaatcttgaactaaattagatgtcagatatatagcttataatacaaataggggctagagaacaaaagcttcaccaagatggagaatngtatgattcgcaacactggttattttctaactattttcttc

SEQ ID NO: 75675 - DNA, 525 bp, Arabidopsis thaliana landsberg
ctatatttattctttgctatatgaaacagtatcacatatactaaaccatttttctaatctttgtcgttacaaactactaataacttggattagaatcaaacgaccttgtggatattttttttttataaaattaaatttattttagttggatatttgtctaaatcaatgtattcttttataacttgatgtaaactgttagtgacaaggtttatattttattttgaaacatgtaagtaggatacaagcttctgtaaaaagtaaaaagtaggatataagtaggatattatattcatgggtacatcatttccatcactataattcgttttatgatctacagttttttctcttcatacaaacgtaagttatttctttatgcaattttctaatttgcaaacattattagagagattattgggatgaatcaagttaaggagatcatcactattgcttaatctttagtttaaggatcttgggtaatttttatttttacctttagttcatgtgtaaattttttttcgtttaacc

SEQ ID NO: 75676 - DNA, 554 bp, Arabidopsis thaliana landsberg
  unsure (1)..(554): unsure at all n locations
aataacaaccaaaaaaaaaaactagtttttaaaattgtttattaactaattaactaatatctactagcaaaaagaaacgaaaaatactatatggatcaactggtgtaatgactttagaatggttaagacttaagaatttttgtttttttttaatggttaaaaatacctccggaaactctgaaggctttgtgagaacatcttcaatacaagaaatacatgagatatattgagaagctatgatatgattatgaataactcttggacatgtattcattgttttaggcgtatctgctaaatgacgaagaatcaatgcacgaaacaacttggagaactcctcgaagaagaatcaaatcaaacaaatatcagatgaaggagttattcaatttacaaatcagngtgatcctccagtttaccggattcagacatgcgcgcattcaacgaaagattccgattataccagaatgaattaagctacaaaccgaattagtctattatcttgatctattagagatgcccaaaaaagtggaaatagcccaaaacaatcaaaaagatct

SEQ ID NO: 75677 - DNA, 434 bp, Arabidopsis thaliana landsberg
  unsure (1)..(434): unsure at all n locations
ggggggggaaaatggggagggtatcccaagcaaacaagtgatagctttatcgaccctaaaccttttctggggagggttttttnnnnnnnnnnnnnnnnnnnnnnnnnnnnnnnnnnnnnnnnnnnnnnnnnnnnnnnnnnnnnnnnnnnnnnnnnnnnnnnnnnnnnnnnnnnnnnnnnnnnnnnnnnnnnnnnnnnnnnnnnnnnnnnnnnnnnnnnnnnnnnnnnnnnnnnnnnnnnnnnnnnnnnnnnnnnnnnnnnnnnnnnnnnnnnnnnnnnnnnnnnnnnagagttggggcgggaaagggggagaannnnnnnnnnnnnnnnnnnnnnnnnnnnnnnnnnnnnnnnnnnnnnnnnnnnnnnnnnnnnnnnnnnnnnnnnnnnnnnnnnnnnnnnnnnnnnnnnnnnnnnnnnnnnnnnnnnnnnnnc

SEQ ID NO: 75678 - DNA, 337 bp, Arabidopsis thaliana landsberg
tcattcatcattagactgcacaccacggttacatttatggagctgccggaaaccgggaccccattgttacccggaccatcgacattatccggggaaagcaaaaggcgatcccggcaccgccgtgctaccactactttatctctaactactgcacactaaaggacagcttcgatctttactaacaggaatacagtcacaccgtcgcttcaaaccataacgggcccaacactactcaaccctaggagccccgagagccctttaattataaaaggaactgtacacctcggaagctagcacgaaacgacgacaactctcatggtggggggaggctcagact

SEQ ID NO: 75679 - DNA, 608 bp, Arabidopsis thaliana landsberg
  unsure (1)..(608): unsure at all n locations
gatccaagtttgataagtgtgcgtatgttgtagacgaaaattaaacattgtggtagataggaaatgtctaattgaacttactatattgatagtactttaaaactttttatctaacagtatagtaaatatttaacatattcaaacaagatatgacatttaagatccgtttaatgggtgtgtgaggtacaaatctcttattgcacacaaacatataaagaaaaggaattaagaagcaaatggtcggagctcagagaatacagcagtgacttttccggcgaccgttcttttctttgtattcagcagaattgctactacgctttgttgtcatagctctcttccctcttctcctaataaattacaaacattttaaaataagtaggtatcaagattcgataatacataaaaggaaaagaagaaactaagccttataccaaaaaaataaaaataaaaatactggtttaccaacaaaaagttcagtcattattaaaggtttgcagattctcatttcatctatttagctnttgctacttaccatccatttttgattttattccccaaaacatatctgccttttaattaaacaattacgttctacctcacgaataact

SEQ ID NO: 75680 - DNA, 515 bp, Arabidopsis thaliana landsberg
aatatgagtatgggatttgttgattaggcaaaataaaaaatctggcgtgttgctgagtcatctttcattttcatataaaaaatatcatcaacatgattgctttttcatctctgcaacttcctctgtttctgattaccaaacgtcgtcaatacatttcttcaaattacgtttctttattctttcgttactctcaacaaattttgatatctgattggtgttgattccaagtaagaaagatcaaaactttaggtaaagtatggatatgggtttccatgaaaatgagcaaaatcaagaatttgcgaatctaatggagattggatctgggcattacgggtaaataacatcttttgagtttcttttgagttttgaagctaaagtttcatttttttttttttttgaattcgattatccttgtgtgtgtgcggttaggtgctcacattatagaagacgatgcacgattagagcaccatgttgtgatgagatttttgattgcagacattgccacaacgaagcta

SEQ ID NO: 75681 - DNA, 563 bp, Arabidopsis thaliana landsberg
  unsure (1)..(563): unsure at all n locations
cgaaatgacttttttattgaaaaaaaagaaaataacaaagtggcagaagagaaggtgntgtgttctttttttcgaacatgtgcataggtttgttgtcttgtgaaggacgaaacaaattggatttggaccattgagacacttacgtgtctttttgttccactttagtctttccattaggtcattatttctaatctaacccttcgtgtcttctaagttgtaaatttataattcttatatataaaattaacttttattttaattaagtacgtactttggctttgtcatactcaaattcacttgcaaacttaagaatggatccagacacagatagtatagttgatttatgagtggatattggatatcagaaaagaactgcatgtcaaattttgataaagaataaataaattgatatcagaatagctatgattgtgttttttttctataatttatacggacatgcactatcagatttaaaattaattttgaatttgataaataagacataccgttgatnnnnnnnnnnnnnnnnnnnnnnnnnnnnnnnnnnnnnnnnnnnnnnnnga

SEQ ID NO: 75682 - DNA, 367 bp, Arabidopsis thaliana landsberg
gacactgcttgttctgacttttaaaatagacttctctataaagatatcgaatctacaacacccgaatttattattttaaacatctaatatttcctgttgaaacaaattctagcttttattgagaaatactcttgttgccgaaatgaatgcagcatgaacgttcacttcaagatcgataagaataaaatcagcatcagctccaacgtttaatgaacctttttgatcttgaaggcctaataatgaagctaaaaaaaggctctgtttataatgaaaatgaataaattggacgatttttgtgagaaaaggttgcaaaaaaggtgagaaatttggggggtttaaaacccaccaagcttacctggattcaatg

SEQ ID NO: 75683 - DNA, 335 bp, Arabidopsis thaliana landsberg
tgcttgaccactttcgagggcgtgttgtagaacacaacaacacaaaccttgatgaaaacttcacaacctcttacgaacaaatgctcaacaaatcctacactgtggtaaatttcaattgttggcaacacctaatatccgctcaatttcttcctcatgttccgaaagcaagaacggaatcttatataaatgtcccacatctcatggaaattcttaacaaattcattactcggggattcattcgcacgtgatggccgcgggggaaaaagaacaaaggaataagcagtcgcgggccccctatgatagacaaaacgaaaacgctgaggagtgggggagca

SEQ ID NO: 75684 - DNA, 517 bp, Arabidopsis thaliana landsberg
aaccggccttctccgtgtcacgtaggtgttctcggaggtggccggctcgggatcgttggcgatcttgtccacttcggcgagttggcgcttcatgccttcctcgatcgccggctggtaatcgccatccttgatcttgtcgaatggcggcgcctggaacggcagcgtgctggcggtgaagaacgggttggtggcactcacgtcggcgaccggcgcagccgcagtggaagctttggccggtgccgtggcggcagctgccggcacggtctttccggcgtcgttggtcggctgcgaacaggcagcaagggcaatcgaagtggcaatcacaagcaggcgcatgcgtggcatggacgtttcccgaagtggatgcagccgcgacgtgcggccacgtgagtcatgaccgccgactttaaccacagcgcttgcatcttccaagggcgatcgcggaaaagcgcgatgcgcccagcctcagccggggcgtacgtcgcgcaactgccagttcgcaccaatcagccagttc

SEQ ID NO: 75685 - DNA, 437 bp, Arabidopsis thaliana landsberg
  unsure (1)..(437): unsure at all n locations
cgcgccgaccttgctgctgggcaccatcgacgaggtgaattgttccggctgccgggctggcaggcgccggcgatcggcacgccgggcggctacgtgatccagacgttcaaggcgcacgggaaggtgcgctggatcgtggccggaaccacgccgcgaggcgtcctgtacggggcgttcgcgttgctcgaaatactgggtgatgacccgtcgatgcagcggttccgcgaggtttccgcgccgtcggcgccggtgcgctgggtggatcagtgggacaacctggacggtagcatcgagcgtggctnnnnnnnnnnnnnnnnnnnnnnnnnnnnnnnnnnnnnnnnnntggatttgacgcgggtgggcgcgtatggacgcctgctggcctctatcggcatcaacggctgcaacgtcaacaacgtgaacgccagccccaaaat

SEQ ID NO: 75686 - DNA, 454 bp, Arabidopsis thaliana landsberg
  unsure (1)..(454): unsure at all n locations
taacattcggctagactgtaccggctttacgcattacatttcctccgctaaaacgtactattatgactcctgaagaaaacctacaggagcccatttcattaagtttaacgccctatacaggtgcctggacaaaagcagaagctgctcatttgttaagaacaaccatgcttggtgcaacacttacccaaattacannncctgcagacacacgggatgaatgcaactgtagctcaattatcgacactcccaagtgattctccaccattagctattccatccggacgaagctgacactgccattggggccacctggaacaaagacgcgtatcctgcaagtcccggaccaaccaataatgcgcgcccgtattcactgggagcctgggtcatgcaacgcatcaaccaaccaacggctaacattcaagaaaaaatgtgtctggcccggcataatcatttc

SEQ ID NO: 75687 - DNA, 595 bp, Arabidopsis thaliana landsberg
  unsure (1)..(595): unsure at all n locations
ctacagtgccgaggatccgacgactcttccgatgcgccatcagttgcatctggtcaatgcaatgaaaatgctacgcaagctcggcgaggcagtcgtcggcagcgtccctcagcactttggcctcgtcagctcccgagatatcaagtataataaacataaaggggcaactctgcctaccattaccgcccagaaccagtcttcgaacattgtctcagcacctctcttgccgccggctcccgggagagatgaaagcaaatctcccgtccctgcctggcagcgcgagagtgtaacccggcggccgacgttgctggatccaacgcaatcagaactgggcaacggccgaagtgactcggagaggtttttgaccctggccacggctagcaacaccatcatctggccactgtacacacttggcctgtcatcgtcttgcacccacgagacgagcgcctacatcgttgacagactcatgtcaatctatcgcgagaccggcttggaacaggcccgagttgtcgcaggcatgatgcagaacanacaggagtctttgacttgggctagcatnccaacaactcgtctaccgtctttgtctgatgatgca

SEQ ID NO: 75688 - DNA, 517 bp, Arabidopsis thaliana landsberg
tcccacagaagcagatgagggaagagttttcttggtaacccttaacgccacggccagttgatccaaattgagggataagctggtctcaggtatggctaggaaaggctatgaaaaagacttcgccgagcgcatcttcaaacaactcgaaggcttcggaagctacggtttcccggtaagccatgcggcgagttttgcattgcttgtctacgttttttcgtggatcaaatgccaccatcccgatgtctttgcagcggcgctgctcaatagccagcctatgggcttttaccggccagcgcaaatcgtgatcgatgcgcgaaatcatgacgtgtaagtaagggagatcgatattaatcactctttctgggataatacccttgaaaacggttccggcgaacgatgcgcattgagactgggtttcaggccgggcaaaggattaaaagaagaagaaatgcattttctgatcgccgcttgtaccacgccatttacccacatttatcaattgctcgaagcggggatt

SEQ ID NO: 75689 - DNA, 651 bp, Arabidopsis thaliana landsberg
ctctgttattgttgattttggaatcagactaccgtacagtggtacaaaatatatgtttaaaagcatattaaattttaatagttagttattcatgttttcttcttgttttttttgtttttgtttttgttgttattaactaaagaaatccatgacttttattaatctatttatgtattagttctaactttgagagcaaacttcaatattgtatgtatatattggttctaacattgagaggaaaactctaatcaaataaaattgtaagtaagctaaatatgtgtgtcgaagtaggaaatctaaggaaagtgaagaatgcaaaaaagttagtcactgaaagagacgtgtgattgatcacttgtctccttccaatttccctgtgggggcagtgcatgcacaaaagatggaatccatcctatagctcctcctttcttcactatcttttcaagtttctctttttgaatatatttttttaaaattgattttgatttaactcaaagcccacacttcttaatccatcttctctataattagtatgccaacaaatatatatgcttgttctgtctcaaatttcaacaataaagcgtgtatagctcccaaaaagctatgttgatgaattatcacttttttttatgattggactaatagtttgtc

SEQ ID NO: 75690 - DNA, 385 bp, Arabidopsis thaliana landsberg
  unsure (1)..(385): unsure at all n locations
gattgggtttgtttgaggattttagaatataaaactgatatgtgggttttggggaatgagcagaaagcgtgggaagttgcgcaatctccatttaagaattagatgatgatgggtttcatgatgtggatgggtggaaacacagttcatctttttagtattggtattacttgctctgatgtctgtcagcctatcagtgctcttaagagtgtaggaaagagtaagttttctttagtgcatcttattcgtctttgtctaannnnnnnnnnnnnnnnnnnnnaatgagcttgtcagcccacacttgtctgtaggttatcgtactgcgatgacttcttgactgctaaaaataaaagttaagtgaaatggtgtatgaacttgcaagtagcat

SEQ ID NO: 75691 - DNA, 213 bp, Arabidopsis thaliana landsberg
  unsure (1)..(213): unsure at all n locations
aaaaaaaccagagaggcaaggaacccgaagaggcaagaccgaaagagaaaaagccacaaaacaccggggaacaaaaccgcagaaggggccgggagacaaaacaagcagcacaagaaaangccaaccgcacaagaggcaaggaaacccacccaaaaaccgaacaccggagccgaacaagaaaaccacagagaccaccggcaacaaagggaaagg

SEQ ID NO: 75692 - DNA, 199 bp, Arabidopsis thaliana landsberg
  unsure (1)..(199): unsure at all n locations
aaccgaagnaangnaaaccaaaggccaaaaanacagacaaganaaanaaaagggccaaaacagnaaaaanacggacaagcagcggaaagcccnacggccaaaaggaaggagccaaagcaaccgancaagaggagaccagnaaaccaaacacaancacncaggnccccacaaaagaaaganaagaaaaggggggcaacac

SEQ ID NO: 75693 - DNA, 336 bp, Arabidopsis thaliana landsberg
  unsure (1)..(336): unsure at all n locations
ggaacaggcggaaaaaccacccgggcgggncnnccaggaaggcgnccgcctcgatccaaaggataaatccgancgngaacnggcgcacgccggaggggncgngaggngggngcacaggggccgaacaggngncagaccagncnncgggcacaggggccagaancagcaggaaggcgccgagcacggccaccgcgcgaggggcaangggggcgaggccgccgcgcaaagcccaagacagcaccgagnaancaacccaggaancggacncggacacaccaangcgnnggcaaaacaggcgaagggccgaaggcgngaagccgcgccggcgcagcccga

SEQ ID NO: 75694 - DNA, 130 bp, Arabidopsis thaliana landsberg
tgcgagatgaaaggaacgcacaagaaacaagggacatgttaaagataaagagtaaggggacgaaaaacaagacagaggtggaacgagaaaaaaaaacaatcaagaggaaacgagaccaggaacgggaaaa

SEQ ID NO: 75695 - DNA, 603 bp, Arabidopsis thaliana landsberg
gaggaaaccgagagattatgtctcgtaactgtttttttgtttttcttgcagaaagaagacgacgaatgaagatagaagaagagggagagaggacgtatatataagcaacgatctcggcgcgtgttgttcacgtatgctgaccatattgatgttaggaccatactagaggatacttcaatttgtttatgtgtgcatgtacctaataatatgttgtccaatgcccaatttatatgtcattttcctcataatgtgagaaactaatgattttatggagattatatctcaacatttttctatagaaatgtatctcagaagttgtttcttgattctttataatcaagtaatcattaaaatttgtatatttgacacaattggagatgaatgattgcattggatcaatgaaacaaaaccatctcttttagaaaaataacatcaacaattgtttctcaacgatttgccgaaatcttgatgtagccatatcattacggattgtctcatattgggtagacagatctcaagcgtatataggtttagggaaaggatgtgattaggaacaagtatggttttaataatcaaacgattaatatgttaatataacaaaat

SEQ ID NO: 75696 - DNA, 436 bp, Arabidopsis thaliana landsberg
  unsure (1)..(436): unsure at all n locations
ttcgccaaaacatagacaatnngagatggaggctactagaaacccgtacagaggggaggactatccatcatggtttgaaagacgaaaccaatgagtcggacaatgaacaaaaaaaacacagtggaaagaaaaaggacgagcagaagaacgcaaaacacaacaccccaagaaacaagagcagaagataaatgctaagaaaaggcttgaaaaagaacaagcctaaaagcacaaaaacaagaatgaatggggccagacacagaaaaaggaccatggctgtggctaaaggcttaatcaaaaatgagatatggataaaggaacaactagacgaaacaatggcactgggcggccaaaaaagaaaacgggggcaaaaaactgggcacttcgcgatttcaccaatgataggggtacaggaaagtcggcccacaacaacacctac

SEQ ID NO: 75697 - DNA, 597 bp, Arabidopsis thaliana landsberg
gtgttcttttaaaagaatgagatgaaatattcatgattaaatttaccaaaaatgcgcttaaacgtgttagattttctcattctttgttattattttaggcatacttctgattttcatcaaactacttaacattttcgggattaatgataggtttactaacttagtgaattcttatattagtacataagtgagcactttgtagacttgttgtctattcctaaaatggaatctcaaactcaattttgtcttaaaataagtttcattcattatgcttgatacatgaattcaatattctctaaactcagaacagaatccaatattctctaaactcagaacagaatccaatattctttatccctaatcatcttagatttaagctaccttgctaaatgattaagttacttagcaacaatctccaaattctaacagtaccaatcataaaagaaaaagcgacttgagaagaaaaaaaagatacatagccagaaacaaaccattaaacttttaatcattaagaccaataaacttgagaaacaagaaaagagtcttgaccaatcctacatttaccccatatatagctcaaaatccaacaattgcagc

SEQ ID NO: 75698 - DNA, 596 bp, Arabidopsis thaliana landsberg
gacgtcaaagataaacgatttggtcaacaaagcaacctaatatactattttggataacgcaacaagaaattcattggcaaggatatattggttcatctttagtttaaagtattactaaagctgagtgaatcacgagagtattaaaaatctcaaaaatcacgagagtgcatatatatcgtcaaacattttttggttgacatcgaaacattctctataaatatttttttttttaatgaaactaaaattttgtgatacacaagattaagttcatgggaactatagagttatgttaaataatatttaaaacctgtatcttttaacaaatacaaatattctttagtaagagttcttaatttcgtacagtacaacatcttagaaggtttgattaatatcaatcttataatctactcgggaggatcataagatatacgatgattatgttcaaacatatacacgtcatattacaatcaaacatattcataataaaaaaacaaacaaattttgatatttttatttgaaacacaacattttcacaaataaacgaataaaaaatagtagtagtaccctaaatggctaaaagatacctgaactcgaag

SEQ ID NO: 75699 - DNA, 114 bp, Arabidopsis thaliana landsberg
gtttttttttttttcaggatcacaagcgagtgttatatgtggaggcgaatgcatgatcttggggggccctcaaagagatgggcaagtaactatcggccctgcctggatcacaag

SEQ ID NO: 75700 - DNA, 534 bp, Arabidopsis thaliana landsberg
tgttgggccagaagggcgcatggcgcagctttcacctgtggtccatcccggcgctcatcctggcggcggcggtggggtattggctgttgtttggttagagaaccgcggttaaataacaaaaaacccggctgtttcagccgggtttttccattcttagcaaatcgaaaaaagcttacgcagccttctcggccagcttcgccttgatctgcttcttcaggcgacgggcgcgtaaggacagcgcctcatcgtcggccttgaccagaaacgcatccaggccgccccggaagtcgagcgtgcgcagagcggcgttcgagatcttcaagcggaaggactgacccagcgcatccgaggccaggtcatgctgatgcagcgacggcaggaagcggcgcttggtcttgatattggagtggctcacgctgtggccgaccatcggaccgacaccagtgagttcgcagcgacgcgacatgggacaccttcgtataaaaggctgcgctctttagaagcgaagcgaaataagctgtgcgcgacatcacg

SEQ ID NO: 75701 - DNA, 575 bp, Arabidopsis thaliana landsberg
  unsure (1)..(575): unsure at all n locations
tgccgcgaggatggcggcacgcttttccatgtccttgggacgtccttgaccgggagttttggcgattgtcacgggggcggcttcacaaatacctgaaacctgatttattatacgccgcagttcatttatttgcagcccctgcgccgtcactctaaatcatgtccagcgagtttgccgtacctcacatcacattgagttccgcgtaccgtcaagcccagcgggccactgcggcgtggctggaactggacgacgcggcgcgaccggcgcgttttgccctgccggccgtctggtccgcactggacgccgtcgagcacggtcgcctggcgcgctggctggcatggcagcacgtggcggccgacacccagggcaaccaccggttggccgcgcgcatcgagcgcctggacagcacgctggacggcgtcatgtcacgcgccctgagccaattgcccggccagcgcacgagcctgcggcgccacctgcgggccagtgcgtgagtggcgtgactgccgtcatgccggcgtggtgactttccgcacttcggcgaaggccgncgacccgtcagtctatgccatgga

SEQ ID NO: 75702 - DNA, 535 bp, Arabidopsis thaliana landsberg
  unsure (1)..(535): unsure at all n locations
tccgttctggtcacgacatgagaggctttgcttctttagcatctacaatagcgacggcggcagcagcttgcaagtgactaatcgcttgcacatccgtaaaccctaagctctcaaaaaccctaaactcttcaggtaaacccaccaatcctctgaaccagcgttacatttcgcaagtcatagagagaaaagattggtttttgatactgaatcaagaattcaccactcatcgaattggactcaacactcgattcgtcatcagcgttttgcagaatcaagacaacccattacactccctgcgattttacctctgggtctccaacttcgacccggtttacgctaaggatcagtctctgaagagtgttctacggaacgcactttttcgcacaggccccttattgttgtctatggaactgcttaaagagattagagattcagggtatcggattagtgatgaattgatgtgcgttctgatccgcagcttgaggagattatgtgtagctaagtactgtaatgatgttnttgctcagatatcttt

SEQ ID NO: 75703 - DNA, 572 bp, Arabidopsis thaliana landsberg
  unsure (1)..(572): unsure at all n locations
tagatatccgagtccctgggagtccttggaatccagatcgtgccctataaccaatgctccgtatctcagccacatgatccaagannnnnnnnnnnnnnnnnnnnnnttgcgcgactgttataaaccagggtggctttgaacaagggcgccttgatcagcatatagccaccctcaacgcggctgattgagctcaagcttgagcacttgatcaacccaaggatgggactttggtccgaccattttggcgaaaggtgaggaatgatgggaagaacgtgtttgtagctgtgctgagtgacttgggggcgactggtacgtgccgagattggccaatcaccaaaggtttgtttgcgtgttctaacaaaggcccttcgctgtgaacagcagctgagttcctcttagaattatgaaaatcgagatcaaagttgattttagagagcgacttctgactctcgtcggctcagtggtgcgacatcgttatttccatgatgtgagagtacagtacctagaggcggctgattttaagcttaaaacttgttttcttagcttgcgtcctatgattgccaccattggca

SEQ ID NO: 75704 - DNA, 587 bp, Arabidopsis thaliana landsberg
tggagtaataataagaccaatttcctacgcatcgatttttagatgaatcataaaccaccaattaatccacatggctgttggctgctttggacattaaaaagacgaaatgtgttattaaaatggatgttttgtttcaactatggtttactattttgatttctttcaacgtaagtctttatttaaagaaaatcactgtacaaactattccttgtttaattagttgaatactatacctgagaagattatagagaaaacactaatccagtcattaattaacgtataaatgaaaaaagtgtatcatagtataaccttttatcgttttatctatatgatccctaggacttggcttttcttttttgttatgaaatgtggggattttttgttcatgtagttcccagctacatgttctaatgaaatgaataaagactaatctcatgcttgttcgttaatcatatgtataagtgatataaggtgatgattacaatctaagacctggcctttaattgtctctttttggcatgaaaactggtcggtagaatttatgtcaaaagtctatggggggcccgtttttcatcgggatttcccct

SEQ ID NO: 75705 - DNA, 248 bp, Arabidopsis thaliana landsberg
tgtatcggtgactgatgagttaatgagagagacaccagtcaacggttcaacaaaacggaccttcttcattttgttgcccaacaattactcacttctaaaagggaacgatgtcttgaacacgggcagcgtctagatctatttgacttatacattattcacacaaagtgatgtctttcatgctggaggtattacaaacccgtgttcgattgttgcacaacaaaccggatacgggaggcgtgtgacaagct

SEQ ID NO: 75706 - DNA, 578 bp, Arabidopsis thaliana landsberg
gtttgattcatgtgtatcattgtatatcaacgtttgcaaggttttgaattcctgtgaggttcttataagttgtttatttaaagatgatttatgtgtaacaaatgacgtaaactgtggctatgtgaacaactacaaaaatagaataacgatatttcaattatttgcagtttgcaccattattcataaacatatggtagatcatttggttaaagcaattacgttgtacccaatatattattaaacaatataccataagcgtatatctcacagcattgtttaactttgaacacttgacgttatagagatcgacgtcgttctaacgaaaaggccctatagtcaactaaattctttagatcgtaagatcttcattattttatcatcattatcatgtaacgtgattacgtacagatacgagaacatattttcccataaaaaattcacgtctccccgtaatcttacagtaataattaacattataaattattctttgtaaaataaacagctcattctccacataggttgaagaatttataggtcgtgggatcattcacttacttgggaaacttcttgtaaactac

SEQ ID NO: 75707 - DNA, 510 bp, Arabidopsis thaliana landsberg
ccttcgggtagttttcccttatactggagctgttggttgaaccggataattttatcggcaaaggttttgagcattgtggcgtattattttaaaatttgtttcacgggttggtgtacaatggcggctaagcttccaggtataatgaggatgtgcaacataatacctggtacacggactcaagacttacaataatgttgatacgaaaatcgtcagcctccataacgcaattcatggcaatacggtgcaatgtgcagcaagaacctgcttttatagtatatgctcttgaatacctgatgtaagtagctgttttcttctgcttctggcacaggggtggtccgcaaagataaaaatattgggttgagactggttatgctttcctgatcaaaccggaggtactataaaccatgtatatatccggcagataccgcattagcaaacacattgatgaacggtcatcgaatactccccgctgttcgggatacctgcccaccgcaagtaggttccggaggg

SEQ ID NO: 75708 - DNA, 486 bp, Arabidopsis thaliana landsberg
ctactccacatactctcgctgcttgattctcctttctgtcgttctatgcttacttatgtgctcgtgatagtaatgctgccgcgattggaaatgtccaacttatcatgaaggtcctgtatccggatgctctgacgagttccatctctacacgtctcagcaacgcctttctgatcggcatgatcattggcatgctcttcttcggtctcattgtcgaccagtttggtcgcaagactggtgctgtcgctaccacgattcttctagtgttgggaattgctctgtctgctggtgcgagtggcggtactgatgtcggtctcttctggatgctcatcgttgctcgtggtgtagctggtgttggcgctggcggcgagtaccccgtgtctggtgctggtgccgcagaggcaaccgatgagagttcccagtaccgtaaacaccgaggcttcatgtctgccatgcttgctgaatctgccgcgtccctgggctacgtct

SEQ ID NO: 75709 - DNA, 567 bp, Arabidopsis thaliana landsberg
ggcttccgctaccgcgaggtcccgatctcctacgccttccgggagcacgggcgctcctttatccgcctgggccgctacctgcgcgaggtcctccccgccatccgagccgagctccgctcagaccccacccgccacgcgtcccccgtccgtcacgcgccgggcgacctggccgccgccaactgagcctgccccccgggcgtcgcgtgcgcagagcgacacgcgtgcgcagaccgaccccgggggtgcacctgcgcacgccacggtgaggcgggggggcgtggcacccccggacgtggcgtgcgcagagcgacacgcgtgcgcagaccgaccccgggggtgcacctgcgcacgccacggtgaggcgtggggggtcagtcctcgacgacgaagcggcggaagcggtcgcgcgccgcggcccaggcatggcggtcgagggtgccgtcggggcggagggcggcggcgaggtcgcggcccatggccaggacgtggtgggcgttgtcggcgacgaaaaggccctggcgcccgaaggtgacgacgccgggcagcccgtgacccagtcttgaggac

SEQ ID NO: 75710 - DNA, 571 bp, Arabidopsis thaliana landsberg
gatcatctatccaagtcacgaatgctgtcatcggatccaaaaagcacatggatcctcatatattggctcgaccggattcggatcagtaaacttcgagatgatgtgtggtcatgatcctagcgaggtgttgtccaaacgatgatatagagtatgtcttattcatatagttatgcacgtatctttttaaaaaaaaaatcaatctcttgccttaatcacatagttacatgatattattgatatacagttatgccttatacatatgttagtttcattaatgcatttgttgcagatacacttttctcttctaccatatacgaaaagctatcataaccaacattggatctcttgctgctcattctaatcacgttgcgaaatcgatatccaaggtttctctctatttttcagtatttttttcaataaattatcagaaaactttttgaaaacataaaatggaacttacattgatatagcttataggtgctataggttttcaatatcaggagatttttaagtagactctaaaatcacttaattcataacatttttatcatgaaaatttaaaaatctatga

SEQ ID NO: 75711 - DNA, 630 bp, Arabidopsis thaliana landsberg
aagttactctacgaaaaaaacccatatttaaattacatgataatatgcggctacccgtcgattcttatgttttaggcaaaagatggaacacataactgaagtaactccagccttctcgcttagggttgtttgactttttattattgtatctcacaccatcaacaaaatgatgactagtggcattttctcaaattttcgatctaacttcttcgaatcttttttgttgttcactgtaacttctaaaacttgtatcaccacatttaccttcttctttgtttttgttaagttttttcatctttatgagaaacaacacaaatataaagaagaaaagattcgagttattcttcttcattttgcttaagtgaaaagaaagtagtttttgtttatttctgttccatatctgaatatttccttatggagaaactttgatctgttttgatcatcactttcaaaaaagtttttgtaagaatatttttctcctcttgttctacaaaagaaaaatcatattctgcaaaaacaaaaacacgtttatcttttctttcaacaaatcggacgtgacttttaaaaaataaaattcattgatactttttcttaccctcttttaatctttatttcttgataaaataaaac

SEQ ID NO: 75712 - DNA, 575 bp, Arabidopsis thaliana landsberg
  unsure (1)..(575): unsure at all n locations
aattcgacgtaaaattgcttacttaatcttttatatgttttaatagtttattgttttagaatttcaattttgtttgcaatgtttgttttcgaaaacatttgccagaatttctattctatatataaatttctctggtgatatcagtttattcggtatttcaattaactcgagttgtatatttttttgaaataaacaaattattatactgaaaaataaataatttagaagagcttattcatcccatatgtaggcaattgtttttctttctaaatatccaactatccaaagataacttcatgccaaattaaactcttccatgtagacgacaaaaagatatcttaatgataaaaccacaaaaagaaaaagaagaaaagcataaatgannnnnnnnnnnnnnnnnnnnnnnnnnnnnnnnnnnnnnnnnnnnnnnnnnnnnnnnnnnnnnnnnnnnnnnnnnnnnnnnnnnnnnnnnnnnnnnnnnnnnnnnnnnnnnnnnnnnnnnnnnnnnnnnnnnnnnnnnnnnnnnnnnnnnnnnatcaaaagaaatcttattccacatatagttgaaagagaca

SEQ ID NO: 75713 - DNA, 648 bp, Arabidopsis thaliana landsberg
tgtccaaacctcgaattgtcgaggcggcccattaaaaactagtgttctcgaattttcttcaggtattttcactttgacgcgcacacacactttacatcaccacatcagcatgtaatcaattaaaacccacatccatcaatcatcattacctaaaatttgctaaattaaacttcaactgtttctccattttgtttgccgccaggctacgctattgaacttcaattgtccagttagatttgtttctcttctagcataatctcatgcatgtacatttatatatgtgtactctggcaactgactttttttcttctttctaaccttcaatataaatattatatgaaacttgaaagtaattatatatatcaaaagaaatctaattagaaccattataagtaataaagaaaaatgttgacaaaaacaaacttgcaaaagtaataaagaaaattttaatatttttaattataggctagtcaaactttaaattaatgattttaacttttctggacattagttttatatatactacacacacacctatgacaaaaaagacatgtatacgtaaacatatacttacagggaaaaaattaaaggaaagaaactaaaaaaaaatggagatgaagaaatggtagatgatcatgatgataatga

SEQ ID NO: 75714 - DNA, 172 bp, Arabidopsis thaliana landsberg
aagccaccggcgttccccacagccgagacacactcgccatgcacgagtgtccaaggcacaggcgccacgagagctgactaggacggaacgcctgccaagcgtcatacgaaagatggcaccgggataagcaatgaaaaaaaaaaagccagcatcgagaaaagagatgcaccag

SEQ ID NO: 75715 - DNA, 564 bp, Arabidopsis thaliana landsberg
  unsure (1)..(564): unsure at all n locations
gccctacgactggcgctaaccaccggatcgtcagtcggaaacgcggaagtcttgctagccatacgccctgcctaagattgaaaaactcaccttagcaatatgtctcgatgcgcactgtgcgcaatgccttaaatcgccttcgcattgcagcgcgccgtgcaggatgtgagttactgcacattactttttcagcgcatgccttacattgaggatcagnnnnnnnnnnnnnnnnnnnnnnnnnnnnnnnnnnnnnnnnnnccgctttctttttgtagcaataaggctacagcttgctcggaatggcggatgaaattacnnnnnnnnnnnnnnnnnnncattgtgcaaacggagaaacgcgcaatgagaatcgcccaggtttctccattgatcgaaagcgtaccgcccaaaggctatggcggcaccgaacgcgtcgtctcatatctcaccgaagaactggtagcccgtggccatgaggtcacgttgtttgccagcgcagactcgacaacccaggccacactgatacctgtcatccccaaagcgtacggagccgcggcgaggagatgc

SEQ ID NO: 75716 - DNA, 584 bp, Arabidopsis thaliana landsberg
ctcacactacatcacgtgatcaacatctcttactcaattgatactataattcgaatagaaagtaattcatttttttttttccctataaattctaagacatgcatgcttgtactaaaatcatttaaagatttcgtagtatatgcataaaatgatattttaatatatgcatgccatacaacgaaagtgtttagaaattgaatgattgtattacttgtagtttcaaagatccaacaagaatgtgtagatgccctatacaatacataacattaattagaaatggatgatttattagccttcaaaatctaaccgttacttttacataccacactgacacactggtctggttaataatttcaaattgccattcttatttttacggaaactaaacaacaaaacaataaaatgtaatggctgtcaaaaaaaataaaaaaaatgataaaatgtaatgtgtaattgcgattttacgtaaaacgacaaaacatagcattttaatacacaagcaattgaatatatatattttttcaatttttcttatttatatttttttttctgttttcaagtatttaatttatacttaaattttg

SEQ ID NO: 75717 - DNA, 798 bp, Arabidopsis thaliana landsberg
catctccattaccatcagtttcacacaacggaaccggaaaagttcttggcttctctgttttctcgatcgcaacagtttcatggtttgttgtttcttcctgggtcttgggagaattgagaggcggctctgttgcgccgtcgacgaatccatcgggtaaagaatcgacttcagggagcaaattcgagtgcggtgactccattttttgagtctggatctgatgaaacctaatacgaagaaaacccaaatatcttacaacaattctgataggtaagtttaaatttgttctttcttttagattcgtttgtaaaattttatttggtataaaatcttaacaataaaaccaaaaaaaagaaaaaaaaaatctaattttgactaaattaaatgttgttcgtcttatatttttgtcggaaactttaatgttattcaattaataacgttaagtgttaataattgatttcttcatagaaatgttgaaataaagtgttattggttttttaaatttgagtatcatcattatcacgtgactttgaaattcaattttatttgattaataaatgtttggaaatgatcaactaaagaaatggtgttacattcaagtttgataaattcttattgatgcttcgtttacacagagaaatgtcaattcgaaccgaaagcatataaaaatttggtctcgcaacttagaccaacttcgataataattttttattagaaactcatacaattaagaaaaattttttttttaaaagttaagaaagagatgagagaggtaaaattttttaattttaggatcggttc

SEQ ID NO: 75718 - DNA, 574 bp, Arabidopsis thaliana landsberg
  unsure (1)..(574): unsure at all n locations
gcgcccacttttcccatgattgttgtctgcgtgttttttaagtttggggataccagctttgccttgtttaccagtgggcctgccctggttcgttgtcccacactcatcaggctcaggttgccccaaatccctctgccacagattattgacgaatttacattataccgttgtgatctaaaaggatagctgttatccggataattgtaataagtaaacacttgcaagggtatgatgccgttatattcattggctatagtacgcgtggagttggccctgaattggctatagtcaccataatcagaagcaccgttattcacgaaaaataatttccccgcactgatggtggacagtcccatcagggcacgggcatttcagtcaggtcaatttcaatcacaacatcaggattgtatcgcattaatgccaccatggccttttttacgtacaacggcagtaaatatcggtacctggcgatgacatcctttttaggatcttngtcacttccatgaaatccgtccgtacaggaagaataataagtaccgatggcattccatttgaataccgcacaccctgatct

SEQ ID NO: 75719 - DNA, 521 bp, Arabidopsis thaliana landsberg
aactgagaagacgtttgtggcccgtgttgttttctttaaccaagattctttcccttacccttaaagtactcttgcgagtgaagatgacacatgatttacaaacccagggactactagtcgacatggggagtctttgtcacctcttgaagatcaaccaatcgatctagatacaagactagtgcgattcagacacaggaccgatcgatcctgatacacgacagatcgatccaagctctgctgaagtcacagacacgacccgatcgatcgatccatgagtccagatcgatcgatccaacacttttgcccgatgacgtagaaatcctaaacacgacgcgatcgatcgatccagttatcacagttaagcgaaacagatacattaaacactgatcgatcgaacgatccggtgactcgatcgatcgatccctgttaaccaacagcatcatcttcaaaggaaaagaagtcggtcaaacagaaactgagactccgtctgagactgaaatagaagaacctggggtggcaat

SEQ ID NO: 75720 - DNA, 366 bp, Arabidopsis thaliana landsberg
caccaatccataccgaactaggtgggttaactctacagaggggacgtttctgcagggttggaaccgccgagaagtagctggactcccggatgatgaaaggcttaacaccggtaatactaagtacgttccgatactgtaacaaaagcgacaaacgcttaggctgccttatccaaaaccacaattctaaaaacgtactgattcacacgctgttgcggagcgggcttatctagagaaaggcactttcacattcgtaacggatgtagagaggtaaggcctatggtataagggaactggtgtgatctgatccagtggcgactgtgggaggctggccattgagaggagtagatcacgtttatacacaccacg

SEQ ID NO: 75721 - DNA, 338 bp, Arabidopsis thaliana landsberg
ccctttttctatcgatgcgaaagtaacgaatgcgattttcttttcaatagaaaataaatgcccaaggaaagaaaaaatagtgaaagtattgttagaaggcttagtgcgacgcgctctcggtcatctcactttctaaattatgcgaaaaagcacaatattctgggttatagtccccaagttttgctctcacgcgctattagtgcgactggatttgttacttgtggtctcggagacacaaagaacgtgaattataaatacatatcgttactgcaaatgaataatatttactccgctaatccatgaaggcgatggagaaatacttaatctccccaatccct

SEQ ID NO: 75722 - DNA, 1754 bp, Arabidopsis thaliana landsberg
cccttgggggatgggatagatctaatttctctgcgcctctttcttttagacgtaaaaagcctcggtttcagcgttttatgaggagtgtgagcggaccaatgaaaagtacattagcaaggacattttctagacgatctggagggttaagttggatgcatcgcttcttcttgcatccagagactagggtttcctgggctgttggaaaggacggtaagctacatggtgaagaccctgaaagttgtctagagagcaaccgtaacttgcaatgggctcatgggaaagctggagaagatagggttcacgttgtgctttcggaggaacaaggatggctctttatcgggatatatgatgggtttagtggaccggatgctccagatttcgtaatgagtcatctttataaagctattgacaaggaattggaaggtcttctttgggattatgaagagccatctgaagataatcaattgcagcctgaccaggaacctcctacagaagagaacatgtgtgatccagaatctatcagtgagcagcattcaaagtcagtagtggcagaaaatgaggaggttatgattgatgatatcagtagccttggaaataccgatactcagattgctgatggtccacctggagactcagctggtcctggcaagaaaagcatgagactttacgagctacttcaattggaacagtgggaaggagaagaaatcgggcttaaacgatatggagggaatgtcgctctaaacaatatgaccaatcaggttgaaaatccatctacttcaggtggaggagctggaaatgatccttggaccaccgaccgtagtgctcttgatgggattccgaactcgggacaaaggcatgggacctaaaaaatcacagataagctctaagataagaagaatgtatcaaaaacagaagtctttgcggaaaaaactgtttccatggagttatgattggcacagggaagaagggatttgcgttgaagagaagatagtggagtcatcgggaccgattaggagacgctggtcagggactgtggaccatgatgctgttctaagagcaatggctagagcactagagagtactgaagaggcgtacatggatatggtagagaagtctcttgacataaacccagagctcgcgctaatgggttcatgtgttcttgtaatgctaatgaaagatcaagatgtttacgtgatgaacgttggggatagtcgggctatcttagcccaagaaaggctccatgatcgtcactctaatcctggttttgggaatgatgagggtatcgggcataagagtaggtctcgtgaatcacttgtgcgtattgaactggatagaatatcagaggaatctccaatacacaatcaagcaactccaatcagtgtgtcaaacaaaaacagagatgtgacctcttaccggttaaagatgagagcagttcaactatcaagtgaccatagcacaagtgtggaagaggtatatctctgactaattcatctgaatagtagtgaaagtgcaagactttggctctggtttgccaaaaagcaagtttctttacctgtttcaggaaatttggcggattagatctgaacatccggaagatgaccagtcgatacttaaagatagagtcaaaggccaactaaaagtcactcgagctttcggtgctggatttctcaaaaaggtacatacaaactttgataaccaaatcacattaagactagttcatcttctaacgatttccatgctgtgcagccaaattt

SEQ ID NO: 75723 - DNA, 333 bp, Arabidopsis thaliana landsberg
taacatttataagcttatttacgtacgctatatttttattttacccgccagcacataccccatccggcgcacgatcatatcccagttgataacaaaaaactaaccctaaatcatatcatagctctctaaaaatcactacaaacatgaccttgtaattccttgtcaacgaacatatcttaattaagattatcatatgtatcaaaaatacaatactataatatatacatatatgatctattaaaaaatctaacactatctgtattaatatataagacaacatcttatatccccagcaaacatctatgcatacgagtgaactacttcactaatgca

SEQ ID NO: 75724 - DNA, 532 bp, Arabidopsis thaliana landsberg
  unsure (1)..(532): unsure at all n locations
cagcgtgcgccccaacacccggcgcttgtacgagttgaccgtgggcgcggcgaatgcacacatttccgggccatgggccaacagcccggcggcgaagggataggccagtttggacaagcccatgccgctgctgtcggacggatcgtggaacaggttcttgttgctgctgctggccagcgacaggtggaagtgcatgccgttgccggcgcgcttgggatcgggtttgggcatgaacgagcagatcatccccaggtcgttggcgatctcgccggcggccatgcggaaaaaggtgaagcggtcggccgactccatggcatcgctgtacgtgtagttgatctcgaactggccgttggcgtcctcatgatcaatctggtagatgtcgaagcctaccggttgcagggccttggtcagccgctcgnnnnnnnnnnnnnnnnnnnnnnnnnnnnnnnnnnnnnnnnnnnnnnnnnnnnnnnnnnnnnnnnnnnnnnnnnnnnnnnnnnnnnnnnnntcgtcacggcgaaacaagctgaac

SEQ ID NO: 75725 - DNA, 235 bp, Arabidopsis thaliana landsberg
tttgtgtggagtggccattggggcggcttctgtgttggcatctcggcccttgctcatagaagtgcaggcactggtgagcacagttgcttatggaacatccgttaagatcggccacgggttctgataccaaaagattaaatatgttgctggcagtgctggaaaaatgatgcgggttcaggctggcggccatagatgttttcctgaatatttgatgaggcattcaggggtgatgacc

SEQ ID NO: 75726 - DNA, 377 bp, Arabidopsis thaliana landsberg
aaacgacactacacacaactaaaaaaaatttttttaacagaaaacccaaattacacttagaaccgtatacatataaatcatatcccctaccattaccttccttattcacatccaaaaataataacatccaatccctaaaatcaaaatcctgacacaaaccaaccctgtaagccatctgtaacgaatgactcaacccagataccacaatacacaccaccatatttaaatttatctccaactctacaaatagaaacaaactaaaccaagcataaaaactgcatattaaactacccacatattcgccatcataccatacctactgtctgattgagatgcagaaaccaacatacatcttccttactccactaaaacaacac

SEQ ID NO: 75727 - DNA, 565 bp, Arabidopsis thaliana landsberg
  unsure (1)..(565): unsure at all n locations
tacatgaccatnnnnnnnnnnnnnnnnnnnnnnnnnnnnnnnnnnnnnnnnnnnnnnnnnnnnnnnattttggatcacagctaactgaccgttgcctgcggctctatcggcgccacttgaggtacaatgaatgtgttgggtgcataaatcctggactacagataggtggcccttcattgcagcattatcagcaccatctgatgtacaatgaatgccatgagcacgcaaatcatgaaccacatctaaatggccattactagcagcataattagctccttgnnnnnnnnnnnnnnnnnnnnnngcgcgtaaatcatggatgatattcaaatggccattttgtgcagcacggttacctccatgaggtgtgcaatgaaggccatgtgcacgtaaatcttggattacagctagatggccatttcttgcagcaccatcagctccaccctttgtacaatgaatgccatgtgcacgtaaatcttgaactgcatctagatggccatttcttgcagcatcattggcttcaccctctgtacaatgaatatcatgtgcacgtaaatcatggatcaca

SEQ ID NO: 75728 - DNA, 530 bp, Arabidopsis thaliana landsberg
acatcggtactgacggaaactgctcctgatgatgatttggtaactcaaaaggatcaatcaatggttgatgtgcatttccattgtttccttcctcgatctgttgaccaatatctatctggttcatgcaaaatatatttatcaaaaacttaactgaatccttgagcaagaaaattaatattaaaacaaaaaatttatttaccattgtagaattatttggttcttgaaataaatccgtcgcattttgattcgataagtattgctgatctgattgtatgtttgataagtttccttgtacatgcccatgtgagttgcacaacaattgttgttgttgctgcttagcaaaaaaaaaacaaaaaacaaaaacaatttcatatggcttatgactgtctaagtatcaaacaataattaaaagtgactgatcattggaaaaatttgaaatcggacttaccgttgtagaaacatttgccccttgaaaagaattcatcatgttttgattcattaaatttggtgatctgattgttggaaatatc

SEQ ID NO: 75729 - DNA, 401 bp, Arabidopsis thaliana landsberg
ttgtttttttcgcaaattatatcatttctgcttgtctatgtaatttatgacaaggggatttcaacaagaaacaaaagttaaaagttgaaaactatgatattatatatgtaaattttttcagttcttttgtttttatttaattaatttacatttctcaatgtcaaattcttcatatgtattttgcctttttaatgactttaataatatatttattcccattttaaaagcgtgtatcatatgttgtttattacatttaaaataatcaatagctaataatcggtgtacttattatatatatgttaatcagattataagaacaataatcttatcctataaaccttcaaaaaatcaaaatatattatattatttcaaaaaaaaaaaaaaatttttattccaaaaac

SEQ ID NO: 75730 - DNA, 513 bp, Arabidopsis thaliana landsberg
cgggaggggtaaaggaaagaagatcacctatctttattccctctatctcgggagagccaataacgtggatgaaggtcgacggaaggtgctggaagcacttgacgcataactggttgaaatgaaacgttgccgaacaaccggattatgctgtggcgctggaggcgcgcatatgttcaaagaacctgaaccgggcaaaaaagatataaatattgaacgtactgaagaggcgcttgcaacaggagcaacaactatcgccgtagcatgttctttctgtatgacgatgatgagtgacggcgtataaaataaagagcgcgaatccgatgtgaaggttaaagatttatcccaactaatcgccgaagctcaaggtttaaactcctaagtacaactcgtagcgtatgtttattcccttcgatcaaatttctctaaattccagaacttggatttatcaatcaaattaacccctcactactcatcatatcggttttttcaaaaaattactaaaggaattttgtt

SEQ ID NO: 75731 - DNA, 253 bp, Arabidopsis thaliana landsberg
  unsure (1)..(253): unsure at all n locations
ctttcaacggatttcacttannnnnnnnnnnnnnnnnnnnnnnnnnnnnnnnnnnnnnnnnnnnnnnnnnnnnnnnnnnnnnaaccgggcggacgacaaagccaggaggggagaacggccggggcggcacaaaagaaaaaagagcacgcaggcgcaccaagaagagcacaacgagaacagaaagcccgagaggaacaaaagggcaaaagcagcgaagaacccgaaccacagaacgaagacaaaccgagaaagc

SEQ ID NO: 75732 - DNA, 248 bp, Arabidopsis thaliana landsberg
  unsure (1)..(248): unsure at all n locations
ctacaagcatcaagaacctcgtgaagaattactctcagctcgtatggtnccctatattacacggcaggagaaatcaaggactatagaggtgaggatgaaagttctgtttttgcaatcatattagtgcattcacattgctaatatggtttaaaatttgtaacttgtggtaggtcgaagaggacgaaccagttaaggaaggagaagaggtaaaaaaattatgttgttttaattgtgtgtatcaactatca

SEQ ID NO: 75733 - DNA, 369 bp, Arabidopsis thaliana landsberg
acaagagctgatgcccgaggtggccattgaacaggtggacgtgggcgtcgtctagctggcgatcatgatattgctgactgaagtggagtgctttttgttcgcagccagtccaccggtatttgcacccaggtttccgacgcaatccacggactagcctccgcttcgacagcttccatgtggaaacggttcgctgaaggcgagcgatatcagcgagacaaccggctgcgagctgcaacctgaaagcgtgatggccctgtagatcaccccgtgatgatggaggaggtgatgatgatggtgaaggtagaggtgatgcgttaacttatggtggtggtggagatcctcatagagcaaatgatggtgctcccgatc

SEQ ID NO: 75734 - DNA, 655 bp, Arabidopsis thaliana landsberg
atgcaaaccttaaggtcttgtcttcttgatacattcggtcgctgcaaaagccttggtaaaaagtagtttcatcacacactcattgtcactttatgacatcatttttatgtaaaaatgagatttttcacttggcttctacggaccgacccaacgatatagattttaatttttttttgcgtttaggttttgcgagatttacagttgaattagcgttatggattttcctcttgttttccattgaccacgtccccaatgtaaaccacgtgaattcgtgtacttatgttcatttctcacgtttggtataacaaacataaagttaaataaaattgttgtagattgtagtttaatcaagattaaaagaaaacatatttattagctaacttttatagtatgtattaaccaaccacctgttcgaaatgtgttttcattagtacaatctgaaattaagcaaatgttttcattatcctcaaaaattcatcttaaataaatgcttaaaatagaataaaaaataaagatacgtcctacccaaccgctttctcattatagagaaaaactttaaaatagactagagacgtgcttaattattcagctactaaagtaagggatttgttagaaaaatgagctattgacaaaacaagagaattttttgggagat

SEQ ID NO: 75735 - DNA, 596 bp, Arabidopsis thaliana landsberg
ttttggccaatttttttttttcctttttaaaatcccttttaaatttttaaaaccattttattattttttgtaaatcttgtaaaagggaatttaaaacgggaaaaatgtcataaaaatcatcactttacaaaaagtggtgaaaaaagcttgaactttactcctggtaaattaaatttccaactttcattgactttctaattaaatcgttaatttttattgactttgccaaattagggatgtcgttaagtcaactgacggactaatttagtggagttagtcaacgttaattgattccgttaaaactgtcaaacgacggacttttgtaattttcttttgatatttaaaaaaaaacaaaagtttgagatcacaaaagttccaacctcccaccttaacgatttacgatttgatatactgccctctgaaccgaaacatttctatgaaaatattacacaaactcattcatattggtagttttagcatctctctctctaaattacacaatacgcttgaaaccataataatcccgatttcattttctaagattgaatccttagctttttaaaacccttcccttaaacttaattttcaatactttt

SEQ ID NO: 75736 - DNA, 550 bp, Arabidopsis thaliana landsberg
  unsure (1)..(550): unsure at all n locations
tggttaaacttatttgcgttgacatcacttgtagatttgtggtcttgatgatgattatgttgtgatataatcaaattatgtgatgggtctcttcttataaactttgtggtgttatcagggaaaggtggtgtgactcacaatatgatagatgatattcataaccattggaagaaagctgaggcagtgaggatcaaatgcttgggagtaccaactcttgacatggacaacatatgtttccacctcgaggtgtctattattagatctccagaacacggctctgtttttctttcggttgatcttactatagttgtgttcttgataggaaaaatccggtggaaagattgtatacagaaacataaacattctagttttgtaccggggaaggaattatgatccgaagagtcgtcccatcattccactcatgttatggaagcctcatccgccaatatacccaagacttgtaaagaatgtggctgatgggttagaatttgaagagaccaaggagatgagaaatcgtgggcttcattctnctgccttaatgaaacttagt

SEQ ID NO: 75737 - DNA, 459 bp, Arabidopsis thaliana landsberg
gggaaccctagccagtggtacttcacagtgatcccatcccccatgtactggtttcgagccatgttggtatagggtttcttgatgattgatatttttaaaaaatataaccattagccgtcgctagacactagtaagaaaaacattagtttcttttaaaatgtgtttacaaaatttattctaaatcacgatatgataaaataattatgaaacttccaaaaataataattagattcctacactaagtaaagtctcaatttgggcaaatgcaaatgcaatactagaaaaacaattcgaaacgcaaatcagtagagaagaacagctcataactcctatcctccactgaaactcatgtagaagtttggttggaaatttgaatccatgtccatcaaaactaaaaagttttctcatttagatataatcaaatcaaaaagaccgaattcagaaactaattttttttat

SEQ ID NO: 75738 - DNA, 632 bp, Arabidopsis thaliana landsberg
  unsure (1)..(632): unsure at all n locations
agctggggcagcatagttcgctcgcatgggtcgatagggccgagtctagagaccagacttgcacagcaagggtaactcttgtaactaaccctttccgcaactacctcgggtaaccctttccatccagacaatcgcacagcaaaatctggggttttcgttgacgagtcatgggagccgctcccatgttgaccccgatcccagatccnnnnnnnnnnnnnnnnnnctatgattcagagccatctgctagctaggtcatcgtttgtgtcaggggtatgtgcacaatccaagttcgacagatgattctttgtggaactcgacaaaccactatgccaacagcaaaagcagaaggtaccttctaatagatatcaaggcaatttatgccgtatatgctgcttcatagtcttgctattctgaatggtcctatttctcctggaagcaggcctacgatctaatgtattgcccagactaccctgtatcagacacggatcacgtgaggattgctgctaaccccaacctcaaccctaaccctcaatattaccacttgaacaggatcatctttccctacagcttagcacaagctactcttgtctagtggacgggcgctgagccggtttccatactggaaaggatct

SEQ ID NO: 75739 - DNA, 530 bp, Arabidopsis thaliana landsberg
aaatgctaacactgcaggaacagaatcgatctgcacattactcatttgacaaatggcgtcaagggttttgagcttctaggtcagacatgcatcccttgtgcgaccactttcagaatggggaaaactcagaatggccaaagacatggccgagctggaactagcagtgggacagaatctatttcccgtggaacaactcggagcaccgtacagagctcttagagcgtttaggcctttggttttcctggaaacatctcaaatgggatcatctcctctcatcaatgatctaccaccgagcatcgtcatacatcatctctacacaagaggcccagacgagttagagtcaccgatgcagaagaacagactaagtcctaaacagtactcactgtggcttgataaccaaagagaggatcagatctggaaagggataaaagcaactttggatgattatgcagtgaagatcagatcgagaggggacaaagagtttagtccagtttatcctctaatgcttcacattggttcatctttaacac

SEQ ID NO: 75740 - DNA, 647 bp, Arabidopsis thaliana landsberg
cctcatcaatatgttttagaaaattatggaaataaagattttggacagaaagagtttggttactgcagaatgggtaaaaacgtatctaaccaaaagttctaactaataggaaaacatttcgagttatatagtagagtattgtttccagaagtaagactactgatcaggaagggtaatccacataactataaattaaataaaatttgaggtaaaagacatgaatctatatatgctcaaccgcacctttacatagacaacagtacaaattaataaaacagttttaaaaaaaaattgtggttagactagagcaaaatagaaaatatgtgactagtgatctttgttgttccaatagcattatcagatgattatcatttatatcattcagttttcgttaatttagtttttttttggttacagtctcctcacattaatgaaaatattccttataactatcatataatgaagtattaataaatatttacagcgttttttttctcttctttctcatattctttttttttttaaatctttatatgttctatatattggaaaggaaggaagaagactttcaactcattgtcatggagttgtttcttaggattggtctaggcagtaatagataaacatgcatcatgaaaaatataatc

SEQ ID NO: 75741 - DNA, 503 bp, Arabidopsis thaliana landsberg
agaaaatcttaaaattgcttcacgaaacaaatttttttttctaaaaaatcaattaataagaaacagagattataatagttactaccgaataatgataattttgtgactcatataatctaccatcagagaaagaaaatttgtaggaattaaaagtcaatttggaacaaaatgttttaaaccgtggtatataagaatatttttttttcaagagaattgtttttttttatctttaggcgacattttcctaattcatccataaagttaaaaaaaaaagttttatgtatttaatttgtgttactttggaactttggagatgatttgctaaatttggaattaacttattttttgtgttatttgtaagaactgccataaattttaaattaatttcagtaatttaacaggagaaatttaaattaatttcaagtatacatgtatgggtccttatctagttttacaataatattaaacatgtccatatataccaaataaaacgcaaaaaaaat

SEQ ID NO: 75742 - DNA, 323 bp, Arabidopsis thaliana landsberg
gcctggatggcggcaccagaccaatgggggaacaaacgcattgtccatgcggagggattatgatgtggaaacccggtgcaatgcaacttgagatgcagctggtcatgaataacaaacctgcctgttcggttgttgggctgggaatgcctgactgagctgtcaatctgcgaaacagtggggaacttatgtcgcgaatggcggatcattgggctgctgcaccgtatcaataaagataatcgaagcggctcattaagcggcagaaaggcccatgtctgagcagggatttatgttactggcccacctactcactttaggatgggggg

SEQ ID NO: 75743 - DNA, 570 bp, Arabidopsis thaliana landsberg
gtttgtagtcttaaactgattttgatcttaactttttaatatttaagattatttatccagttattaaaatttaatctcacaactttgattggtaatttttttagttctggttttagttatacacttatacttgctttataagaaaaaaatgattgatatgataaaaattttatgtgtgtttatattactaaaatgaagacttaagattgtctcaatcaaaaatcttatttgaaaaaagaagaactaacagagttcttacaaataatacaaaactttgatatgtaatacaaaagaagtaatagctagggatgaaaattaatatttcacagaaccttgcctcatatagcaaaaaacaaaattgatatttagtttaatattaatggataataacagaagttttaaggggaagcccataaatgtaggatggtttctaatttttcatataaaaaattggtataaacttcaaaaacctaagattcaaaaacaaatttaaacactagaaacatgtttctgtcagcctttctaaattggcacactttgatgattatcttgtagattatgcaacatatc

SEQ ID NO: 75744 - DNA, 543 bp, Arabidopsis thaliana landsberg
cccagcacctgggaggctgaggccaggcgatctccgagttccaggccagatgggcctatgttacatattgactttctgactcagagagagagagagagagacagagacagagacagagacagagacagacagagacagacagagacagacagagacagacagagacagagagagagacagagagacagagaaaaccagatccacaggtttaggcctcagtcccacaagacttccaatgccagtcacatgccagaggaggagattcgtagtcaaaaacctaagtgaaggagtcctgtctctgggcatatatactaccttgtcttagtttgcctgcaagaattcaagtcagaaagctggagacaagaactgaagcagagccaaagggggagtggcgcttgctgtcctgttcccagtggatcgctcagcttgctttcttatacaacccaacaccacctacctggggtagaaccacccacattaagctggaccctcacactattaatcattaaacaagacaatgcctcccagaattggttacagaaa

SEQ ID NO: 75745 - DNA, 529 bp, Arabidopsis thaliana landsberg
gacgcgcttcacctggaagcgcgactctggacaatggccatgaccgcgctgacaattgcgtagatcaaactctgaactagcggcagagtcaccgccacgccaaagatgctgaagtacagcggcgtgttgcggcagtgcgcgccgatgctgtcgatgtcattgcgaagcggcaggaactccgcggcccagtcgacgtcgccctcacaaggaaagcgactgcgcgaaggaagatgcaatgaggccatgaggcgccatgcacagcgacgcagccattcactttacctgcgaatctcggacatagcatcaccgagtttgttgcccgtcgtgtgcagccacgagcagatcgacaagatggcgacaacgacgagcaggaggccgatggcagcggacgtttgcccgctgttgatgtcgggcttggagaagctcttgtagacgaggccgaggatgaagcacaccgagaccagcacgaccgggaccacgaacttggacaggcggtcgctcgcagctgcgcacaggcacgacaaaaagt

SEQ ID NO: 75746 - DNA, 325 bp, Arabidopsis thaliana landsberg
  unsure (1)..(325): unsure at all n locations
ggaagcccccgagaaggcggagaatgtaacggccaataccaagggaggcgccaaaggaacgacaaggggaggcagggccgggagcacaacgagcccaccgacccgcaaaaagagggcccagccgccggggaggcggaaacacacacaagaagccaaagcagcgaacaaacgcgcccgaggaggcaggaagagagacacggacgaaacgaccggaccaagccaaggagcgcaccccgacaagaccagacagaagacgacgcagacgagaccgagcagggaagaaccacgaaacaccgggacgacagncaggacgaaggggaaacca

SEQ ID NO: 75747 - DNA, 552 bp, Arabidopsis thaliana landsberg
ggccggcgttgctgtcggcgtgctccaccggcacccagcgctcatcggccaggctgacggtgaccttggtccagtcgaggttttcgctggccagctgctcgaggaacggcaccgggctacggccaccggacagcaccacgcaggcctggcccttggcggcaatggccgcacgcaggcgctcggccacgtcatgggcctgggttgcggccagagccttggcatccgccagctcgtgtaccttcacagccgctggcagtttcagttcagatatccccataccacgccctcccatcgcgtgtgatcagtgcaatcgagctcatcggcccccaggagcctgccgcgtatggcttgggcgcatcgcccgcgttacgccagccggcgatcagctggtcgcaccacttccacgcatactcgatttcgtccttgcgcacgaacaggttctggttaccgcgcatcacttcgagcaacagccgctcgtatgcatccggaatccgtgcactgcgccaggtatcggagaaattcagctgcaacgggccgctgcgcagttgcatg

SEQ ID NO: 75748 - DNA, 570 bp, Arabidopsis thaliana landsberg
  unsure (1)..(570): unsure at all n locations
aaaaaactcaccatatttgattgttagaatctccaagagattcttaacaaaattatttcattattctacaagcaacattgtgaacatggaccataaatttaacttgtacagtactctacataaacggtaaaaaacaataaagcgcttggaaaaagagagtaacaccagaaagcaaagagctttgaagaaacccaaattcaaannnnnnnnnnnnnnnnnnnntagctctgaccccatttcttcaaaccaaagaatgatcacaccaaatccaaaatttcccctataaattacctatctcacataaatataaagcttacttctcttacctctctttcctctttttatcatttacttcataaactttctagatatctgcaaagcccttaatttgaattcatcactaacccacatgcccaaaactttagcaacacacaaccctaataaatttttgttggagggttcgatgagttaattcattctttattggtnttgatcttctgcgttttcccttagaaagtgattatgtgtttaataggtttggtgggagatgtgtcagtgacatcaagaaga

SEQ ID NO: 75749 - DNA, 489 bp, Arabidopsis thaliana landsberg
ttataaaagctattcgatcttttatctgaccccaacctttttccattatcaatttaaccccttaatatttacgcaaaaccactgagaggagtaataaattcagtttaaccccaattatttagaaaatgttaaattaaacccctaatttagaaattgccaaaacagaagaagatagatagctttatttattgatcattatgaaaagagagtgactattatagctataggtgatcggctgatcactcttattgtaaagcttaaacttgcttttgcttctaagttgtatgattcttctatctcctcttctaatttacatgacaacggtctctctttttaacttccggccaaaacacctcaaaatcaccactgcggtcttgagatcgttttgttcatatcacagtaccgtctttaatggtggccttttcgacaaccacagtgattccagatcgaatgtagaatccttcctctggtctattagccttcttaaca

SEQ ID NO: 75750 - DNA, 321 bp, Arabidopsis thaliana landsberg
cacacatcctagggttaggataaagccactgatcctacatcattgtaaacatttcatgttccatatcaaccgcaccgtgatggcgagatggcgaccgtattaacgaattccatgtcctaatattaggcctcgaatcactccatctctgtagtttctctaacacctgtaactcttcatccaactctccatacttaccaaacgtatcaataacactattggatatcttccccttccttaggcaacccatcttcctaatctcttcttccattccttaaaccttctttcaccttcccatattttttttaattccaaataaccttc

SEQ ID NO: 75751 - DNA, 552 bp, Arabidopsis thaliana landsberg
  unsure (1)..(552): unsure at all n locations
aactaaactcgagttcgggcgtcagagaaaataagtaaaccgaactttaataggctcaacagatatatattcaaatgcttttaaaaccaaccatgcctatcaatcaagtgtgtataaaccccatttaccaacattatgttcttcacataccaacaggttagattggaatatcgtaagaagcagcctctatatatataaagttttaaaagtcttctctataatccatagttatgcttctttcttccacattactcagcaatctcttaaaaccaccatgtgttgctttcttatggaatctgttatagtctgaaaacgttgtnnnnnnnnnnnnnnnnnnnnnnngcctcggcttgctctacacgagatttaggacgacaacaagttgagttccatgactgtgatgtgattttcaatgtaaaatgaccaagcatacctggagtcggtgttttagatacatcaagaagagatgaacaaagacctgcaaattcataaatgatgtcagcttaatgttccataaaatcacaagtaaggcgaatgagattgaaataagcg

SEQ ID NO: 75752 - DNA, 555 bp, Arabidopsis thaliana landsberg
  unsure (1)..(555): unsure at all n locations
cctttttacagttccaagaccaagtcaacgaagaacacattcttatatcttgataatattattgaactttaaacttcagatagaaccacaaaacaccaccccagaatcgattgtaactgnnnnnnnnnnnnnnnnnnnnnnnnnnnnnnnnnntagacaattttaactcggttaaatattaggagacttgctctcaacctctcaaacatacaaaaaaccttggaagtaaagaatggtcctgctccatcatacaggatatcgtgaaagcaattgcctagtcgcagcaaccgcatcacctttgtgctcccttagagttctttccgccacattcttttctatctgctcatttacaatggtgacaaacttcagaactttgtgaacacatgcatagaagaagctaataaaaagatgcttacctcaagttcgtttacaataaactcaacatctgcaggattgatcttcacagaggccagttctttctccctgcataaagatccaattctttgtcaatcaattacaacgataagtctaatcttttccgaagatgattttgac

SEQ ID NO: 75753 - DNA, 558 bp, Arabidopsis thaliana landsberg
gagctgcacatcttcctatatagccaaaaaaaaaattctttgataactaggtcaatgccaattttgcttggtgaatatataaacatgtatagacagagaaagaaccttgtatttgtgatatccatcacaagctatgtctccgttatccttcttacctgccaagtataaacatatactttttctgtttcagtttaaataatgttttaggtctttttttttttttttttttttcttgaaaactccataaccatcatagtccattaaattttattatataatttatcttagtaaaattaaataatattttctaaatatttattttggccaacaccgatcaacggtggattttggcgattaaatcaagatgattatggtgtttgcaacatgacttatgattgttaagggatgtctccatgtggcggtaatattgtgtaactaattaacaaaatatttaaaaagtgtgcgtgtgattatgttattacattcgtatagctaacaatcattttcctaaattaaatgaaatttatatgatttcttgatataaaaaagaaaaatggg

SEQ ID NO: 75754 - DNA, 347 bp, Arabidopsis thaliana landsberg
caagaagaagagaggaccatgacgactccctggggacagaagacctccatttcattaatcaaagcacgacagctaacggcgggtctgcagccacatcccttgagttgaggtgcattcatgaccgtggcttctgcagttggtgctgttacgacttggtttgagatccgtgagctagaaatctagactgagcacctgccactaagatattgtaaacacacctgcaacagcgaccacaatcggaaagctgaatgatacctccatctggagctgcttggagctactgaatctgtactgctgattcctagcacacactccccatctctaggatatgccgatctcacaagagc

SEQ ID NO: 75755 - DNA, 112 bp, Arabidopsis thaliana landsberg
agggttggcgaattgcagacattaaagggtctaagaattgactactgcgtgaagatatgtagagattgttggttggtaaagaatgctggggtaaattcattgtgttctctat

SEQ ID NO: 75756 - DNA, 321 bp, Arabidopsis thaliana landsberg
  unsure (1)..(321): unsure at all n locations
ggcgaaatcaaacaacagnaaccattcaaattttgtaatangggtggcaaatccgcagtaaaacatttaagacatggttagtttacaagttttgggtggggagtggcgttttcgttatattgttcaagaaaagaggttaaattggagaaagttagttacacagtttaagcaccgacagccaaggcacgtgcgtaactttttttaattaaaaacaacaaaaatagaaatttaagattgaacggctgagatcataacaagatctgttcagtcacaccacataaaacccgtgatggacggataacgaccttccttccaagatca

SEQ ID NO: 75757 - DNA, 395 bp, Arabidopsis thaliana landsberg
gttttaaggtagcaaagactccaaagtcactaggctggagcttataagaggggtattaataaaatgccttgaaaacatagacttatttcagaaggctcgttaaaagctcgctaaaactcaggggctttggtcgctaaatattaggctgtcaaacctactctggactctacggcgccttgtgggttgcttacatctttcttttcttccttacggcattctcattgtcttcaaatattagaggaaacgacccatggttcacttttcgttcgatttccgaggttgacgggtccgcgctcagttgtagaagagagaagcaggaaaaagggtcagaaatgcggcggcggggcatcagtcgagttagattcgaatgtagtaagtcggcagctgaaaataag

SEQ ID NO: 75758 - DNA, 443 bp, Arabidopsis thaliana landsberg
aaaaaaaccatgttgggaaagcggagtagtcatggcttacacaagaccaggtttacacattatcctcccacccggaccaggggggcccgtgtgaaagtgataaatacaaaatagccagcgaatacatcaaccgcctatcatacaggtatgccgctggaggcatgccctaccatcaaatctgccatgcgcaatcttgcattgacgaggatataagaaaagcttctcaccggtccttccccctacaatacctaccgtcgaaagggattaccgtcggggactacacgaacaccctctcccaaaaccattgatagtgtgctggatgcccagaaaacggaatacctgtattcagtagcgaaaagcaatatcagcgggtaccatcatatcatgaacaattatggagagcatgaaccctttgaccgggaataccagaaagcactggatgc

SEQ ID NO: 75759 - DNA, 355 bp, Arabidopsis thaliana landsberg
gaaccgtcgttgtcgggctatgttcggggctactattatgaatgtacttatcatcgaccatcacaccactctctttctcgggatgcgtgacctttttaacacgctgcccggcaggtatcggctgtttgaggcaacggattttgaatctgcgatacatttgttaaaaactaaaacgctcggcctgattattactgaaattggtattggtaaaataaagacactcggggctgtggccgaactgctcaggtatcagcccgatgtcccaatccttttctattcgtcatttccagaaaagagttttgcattgcccttgctaaaagccggggcttgtggattcatttctaaaagatgcgcc

SEQ ID NO: 75760 - DNA, 154 bp, Arabidopsis thaliana landsberg
caaacggcatgttttttttttttttttaaacaatcagaagtgtcattctcctcacataaattaagctggatagtttttgttaataaaggcatttttaattatatcgctttgatcattggattaacttgtttaaatgttcgtgtgattatagggt

SEQ ID NO: 75761 - DNA, 432 bp, Arabidopsis thaliana landsberg
  unsure (1)..(432): unsure at all n locations
tggcgtatctcttattctcttttgactgtgatcccatattccattggaagaggctcggaggaagattcggctcgtggattcaaaggtaacttatgagatgcggattcatgtttgttttgcatgtacttaaatctaagtacaccatttatatctatgtatggatcgagtgtcagactccggagagaatccattcaacatttgaaaaagccctgggctcatgaccatgaaccaataagggaactcgctgatgccgacaaggagtgttggctgccgttctgnnnnnnnnnnnnnnnnnnnggcagaagccttttttagtcaactgagcccttgttctttccttctttagcttcatcaggcaatcgagccgtctgttctgatcggaacatctagtgtaggtgaaacattcactcaacacgtggaggaaaccatggc

SEQ ID NO: 75762 - DNA, 655 bp, Arabidopsis thaliana landsberg
aactttttttttcttaaaacactcaaaatatattatctttatgtttacatatatatgtaaatttacaagattattattttatgtaattaatgagaccatatatttatatagagaatataaaattataatcttattattttatcgaattttgtttttttctaactaacccgatttgggacaagaaaattttgtaaaatatgtagaatgattttcttcttttacaatgcttcttaacttatctaacttatagaagtttactgtagttcttcagcgcttcatctaaatactatatacatttattttcatgggtaacttttttaattaagtttatcttagtctcaatcaataattaataataattataataagttcatttacattttctcaagcaaaataaatagctctttagcttacaacaatttccactctcatcaaatatcattaaacatatttttgagttttattcgtgttatgactattatagatacaaaatatttacacacaatgacccaaattaaattaatattattatgagatgagagatgcttttttaatttacatttgttaaacattaacttccatgcagctctgtattttatgcttacaatagttgataaagtaaaaataccacaaggaacttgaattgtcttggtga

SEQ ID NO: 75763 - DNA, 587 bp, Arabidopsis thaliana landsberg
  unsure (1)..(587): unsure at all n locations
gtcttctatctgattgattcttcctttgttcttagctgaattagagttccactgatcgatcgttctctgtggtgtgtgttgcaggagatttgtcggatttgtgtttggttccaagggtacggacgtgattctttctgtggagtatttctgctgcgatcgtcctaatccgattctgcaagtgagttcgatcttcgttttgtttgatctatttaaggaacagaagaatccattgctctagaatcttctttttaggcattgtggtcaagaagagtaagttgttctaaaatcaattatctactgggttatgtaggtcatatatatagccattatgggatcaacctactttnnnnnnnnnnnnnnnnnnttcatctatatacctggatattatcttggcgatgttcacaagtaaggcctgcttcttttttttcctgtttcaaatttcaactcctgaaattatatatatagtcccccactttaacatcgtatttgattttgtaggtacacaagctttctagcttgtattgttgtgtcatactttttctattaacatgctttttgatccagtactgtgaacgctgagaatgttt

SEQ ID NO: 75764 - DNA, 111 bp, Arabidopsis thaliana landsberg
gacgaacgctagcggaggaacacctcgaggtttacggggcatatggattgctcaccaagtgtttgcggtgagctcagggccagacattgctcgcttgccgctatagatcca

SEQ ID NO: 75765 - DNA, 564 bp, Arabidopsis thaliana landsberg
cttgaggatgcgcaggtagcggtggttaccggtgaggcttttggcgatgagaactgtatccgcctttcttatgcggcttcggaaaccgaattgattgaagcaatgaagcggatcaaacaatcacttgcaaaactgagctgacgtggaccaatcttccctgcagaaattatttgacgggttcaacggcaaacacctgctgctgatcggtgatgtaatgctcgatgcttatgtatggggaaaggccgacaggatctcgcccgaggcgcctgttccggtattgaccgtaacgaaaaaagacgaacgcctgggtggcctggccaatgtggccattaacctgcgcaagctgggcgccagtgtaagcgtttgctcggtagtgggcaacgatgaggcaggcagaaggctcattgatctttttcaatctttgggaatcgattcttcacacatcattagcgcttccaaccgcattacaaccgtcaaaacacggattattggtcatacccagcatgtggtgcgcattgatgaggaacaaaccaacgacctggacgctgagctcgaaaagcaatt

SEQ ID NO: 75766 - DNA, 151 bp, Arabidopsis thaliana landsberg
cacaacacgaaaatagagagaaggcataaaacagaaaatactgaataaatccaaacgccacgataagggtacaaagcgacgaaagacaaggcgaccgcacaacaaccaagcaggggaccgaagagaggacagaaacaggagccacaggaga

SEQ ID NO: 75767 - DNA, 511 bp, Arabidopsis thaliana landsberg
agtggtcctcggtgtccccttcgtgtaggtgatcccgggatgctgctcgctcgacttctcgaagatcggggcgaactgacggcagggaccgcaccaggcggcccagaagtcgatgagcacgatgccgtccttgttgacggtctcgtcgtgcgtctccttggtgagtgcgatcgtggccatacgcaatccaaccacgggcatcgtccgtgcattccggccaccgcgggctaccgggcgcgccgctcccggacccgcatgttgacgacgatcggcgagccctcgaagccgaacacctggcgcagtcgccgatggatgaaccgccggtactgcgggtccaggaagccggtggtgaagagcacgaaggtcggtggccgggtcgatgcctgcgtgccgaagaggatccgcggctgacgaccgccgcgcaccggatgcgggtgctcggccgtcagctcggcgaggaaggcgttgaacttgccggtcgggatccttgtgtcccacgactcgagcgcga

SEQ ID NO: 75768 - DNA, 396 bp, Arabidopsis thaliana landsberg
caaactagccacaaagtcacgtcctgcatcaagatacctgtcgacgagtaatttgcattgtgcaattcagtagtgtgatcatctttggatgaagaattgaaaaaaatataactaattaaattggtgacctgggatctctggtagctttgtacaaccagtatgtactcttaattaattccggccttaagggataactcttttgcccatactgtaaggaaaatgaagaattgatatgaagctgtaacatcatagtgccatcagaccttaatagggacaagggattaccaggacacttaaaattaaaatagagtacctggacacttaatgtagccaggtttaaaccccttagggtggaaaaccatattgttttccagaccttaaaaaaggagtgtgagt

SEQ ID NO: 75769 - DNA, 354 bp, Arabidopsis thaliana landsberg
cacaagactacaagaatcttacttcaaaggcacgtaacaaacatattaacctatctatttttgctgagactaatacggagagggagttaacattacaaaagatgtgatgagtctttcagaggagtgaagaattagaagagaccagtgatgaatactcaccacggttacttaagagaccgggactcgggacactatcttcattggcaagctgaaaagatcgtaaagaaaaagttggagatcgaaacagtgagctgaagcatctggttcctccatacgtgaaggtgaatgaaaacaacattactgtcaagacagggcggaggtctgaccaatggaacttcaatattaaggcaaaaa

SEQ ID NO: 75770 - DNA, 596 bp, Arabidopsis thaliana landsberg
  unsure (1)..(596): unsure at all n locations
aggaacattcattgactattaatcgacgagaagacttgacttggtcttctagtatctttatctttttggctcttgatttttttttcacatcaatggtttcaataattagtgcagtcctacatttttccatttacaaaagtaaaaaaagattcttattcacacgctgttcatcaaaatatttttccaaagtataaatgttactaattattgacattttttctatcatttaagttaaatttaagtgtgtgatagacatcaaaatatttttatcaaacaaagcaattaatacttctattaatgtcacaatatactaagtctgaattcagaattaggtacatgaaagtcaaaaacacatttataaaaattctacgaatctatggaacattctatgtatcattgaaaattatttcccaaataattttattttgatattctatgcatatgttttatttcatgaatttttttaaacagtgtatatctttgtgttaatacatttatcttcaaaatcatatttaatccaatggtttgctctttgaacattcgaaaatcttcataagaaaaatcnaccacaatcagatcagagacagagtatgaag

SEQ ID NO: 75771 - DNA, 512 bp, Arabidopsis thaliana landsberg
tttgatagagcaacagtttgaagttctacaaaaggcattgaagattcctcacaaagcatccgaagcaaggttaatggtctccaagaaatttcttactttgtttaggacaggtagacttggtccctttatccttgacgatgtccctgaaactgaaactgaccaccccaattcaaaacgggtagttgttttgtaaaatcttaaagcaaattgtaccacattatgcgtgcagcttaagatgatgattctatttgtttacatttgagattcaatggcgttgctccagtaactccaaagtatttgaatgaacaaaattgaatcatgataagatttggcatctgccagaaacaatatctatctggtgtcctcatttattggcctcaatgaattctcggtactctttcttcatcttcacacccgatatagtcctacacagactcggaatctttagccaaacctgaacacaataatctatgcaattttaaaactgagagaacgtttcctaacctgagcat

SEQ ID NO: 75772 - DNA, 305 bp, Arabidopsis thaliana landsberg
agggaaatacgaaaaccaatgacacaaaacagacccaatcgctttaacagattaacgggcggaggaaacgcggggggcctaagctgaaaaagcgggcgcaaagggtgtcgaccagacatgcgaaacagaagactctcaatgatagaaaaggcaaggggggactcaggggcacctaggaagagaaatccaaaaggccagcccgcaaggaaactaaacgagcaaaaactgttgagccgggaaaggcgatgcagaccctagggaacataacgacggaggcaagacaagacatcgagacgatcacaccg

SEQ ID NO: 75773 - DNA, 630 bp, Arabidopsis thaliana landsberg
  unsure (1)..(630): unsure at all n locations
gtgaggccatcgagtaccggctttttgactgtgcttacttttacgtacatnnnnnnnnnnnnnnnnnnnnnnnnnnnnnnnnnnnnnnnnnnnnnnnnnnnnnnnnnnnnnnnnnntcaaggtcatttggtttttcgacctatcgacatccagcgcttcttgggagagtatgagccacaatgggatgagttgtttctggcttgtggtgatgaaaaaggggtttccaatatcaatgatgtggtaagtttgctggcttttcatctccttctctcctgcttactgaatcgaaatagtaatctgaattgatgatatgtttactatagatgtaatatgagtttgggtttcctgtgttgttggtccaggagaccatcatggggaaatgcaatgttgtatgcacatctgatgaccgaagaaacccacgaccaggaaccaaggagctgcggagagctaaatatatcttctcccgcacttttgatacaagactcagaattatatcaaaagactttgcagatgctatagccggaattggaggtttggattagaacaaatgactatactttattgttcaacccctacactcttcgagtatggatctaatgaagctaattttagtttctactggctctaata

SEQ ID NO: 75774 - DNA, 553 bp, Arabidopsis thaliana landsberg
tgctgacagagcactcatcaataggctcagttatgtacactacctcaaagccctgtttccactcactctttcacaaaggcagagttggccacttgctctttgttttcaccagtggtatagtagatggacttctgtgtctccttcatgtgagacacatattctaacagggaagtcatctcatctccagactgagaggtgtgaaagcaatgggactcagagaggtggaaatagttagtggaatccatgtggattccaagcttcaaattcttggagaatgcttcacaaaacttcttgtagttctcttcgtcttcagccaactcagagaagagctcggggcacttcttcacgatgtttttgcagatgactttcaggatcttgctctggtggaacatttctcgggagatgttcagggacaggtccttggagtcaactgcactgcagataaagttgaggtactcaggtatcatctcatcaaagctgcccatgctgaaagaacaatggacatagaatttggtgctgttcttcttgcttcaaaaggccaaggggagctcac

SEQ ID NO: 75775 - DNA, 559 bp, Arabidopsis thaliana landsberg
  unsure (1)..(559): unsure at all n locations
agcatctgctcctttctcctcctcaaatcacaaacaaaacaagaacaaacaaacaaacaaacattctcacagaaaagagggctggagacttgactcaaataataaagtgtaccaggacctgagtttgattctcagaacttataaaaaaactaagctgggcatgatgtcacactgaaatctcagcagcggggacatctatccagctcaccacccaattcagtcgaatcgcctccccaaagaagacagagatttctatcagcaaacaggcagagacttgctgttcaacaactagctttctccatgagctacaggccaatgagagaccctgcattaagtaaagcagtgaaaataataatgataataataaacaataatagtgcctgaaaatgacatttcaagttggcttcacatgtgtgtgcattcatatgtatgtgtnnnnnnnnnnnnnnnnnnnnnnnnnnnnnnnnnnnnnnnnnnnnnnnnnnnnnnnnnnnnnnnnnnnnnnaaactctagagaacaggactcttaagctacgcagtttctagtccctaaaataca

SEQ ID NO: 75776 - DNA, 511 bp, Arabidopsis thaliana landsberg
ccggattgtttgtacaaagttaacgttgacttgtctaccaaattttatgaaacaatgaaaatggatgcaaaaaggggggtgccttattatcttaaaccaaaacaaatttgacacatacaacgatctttgcattatttaacaaaaataactaaaaatttccacacgatatcaattgctttataatcatggatggtctaccaaaacaattaatataagcttaatgatctttattctcaaagaccttgttactttcggcagccttttattatttgttgcaccaaccactcataaactttaaatactatatatatagtgtatagaataattggaatatatatttccaaaaatgttcttcatttgagaactattattttatgtcattttggagtaactaagaattaattatataatattagtgaaatatagagtcggaaatatgttgcttactacatgaattattaaaaagttgttatttaatacgtaaattttatatataaacatttaatatatg

SEQ ID NO: 75777 - DNA, 118 bp, Arabidopsis thaliana landsberg
  unsure (1)..(118): unsure at all n locations
acaacaaaacaaaccancataaacaaacaccaaaatttattttttcacctacaatatcacacaaagcaaatgttacaattaattcctcaaataacccatacccatcactaacttaata

SEQ ID NO: 75778 - DNA, 149 bp, Arabidopsis thaliana landsberg
ttaccttacctgacgaaaggaaatagtctctactgatgatatgaatagtatagcagattggaaagctgtaataaaaaaggattacgaagatgagtgggatctgggcatccaacctatcaatgtgattgatgcgagacatcaactgcgag

SEQ ID NO: 75779 - DNA, 487 bp, Arabidopsis thaliana landsberg
  unsure (1)..(487): unsure at all n locations
tccggacttctactttttgccaagactggttggtatggcaaaggctttcgagttgtgtacattaggcagtaagatctcaggcagggaagctgcaatgatgggattggttaataagacagtttctgcagcagaacttgataatacggtgctcgggtacgcgaacctttatgcaaatgcaccgacgaaatcgattggaatcatcaaaaaaatgctccaaaaatccgcaacctcaacgcttgatgaaatgctggattatgaggcatactgccaggaaatagcggggaatagtgatgattaccgcgaaggcgttgcggcgttcctcgaaaaaagaaaacccgcctttaagggtaaataaacttttgatcgtcatgcaatattagccccgcaattggacctttttgcaaggattgtntttgtaattttggcacgagatgtggatactagtagctaaaccccgagtttctgtgaaacacttgattttttttct

SEQ ID NO: 75780 - DNA, 330 bp, Arabidopsis thaliana landsberg
gatatcggaatcaaagtcaactaaattaattttattttataaaaaactctccctttcgttgcaagacatcggatcaaagtattatagaaagactccatcgaccaaagatctatctaatggaaagcaactcaacaacttggtcacgcctataacaattaaggatagaatgttatgtgcaaaaaaaacacgtcaccatttacaatctaagcatatgtattaatgaacgtcgacctgcaaacaaatgaactgcactgcatcacaatgatcagcatggacctgcagtgtaccgatctcacttgagcaaaacacaagcataaaacaaactcatct

SEQ ID NO: 75781 - DNA, 504 bp, Arabidopsis thaliana landsberg
gtcaaagccaaccagacgctggacaaaaatgaattcatgccaatgtaagcaattgaactatttggcgtggactcaccatatcatgagctcgaggattcacaatgcatttgggacataccgtatcatctggcattgccctttcccgccattcgagcgaacctttcatcttttgggcggcaaccttgaagtccttgtgggcacgcaggtaaaaaggcgtattgtccacaatccactttttagccttgttgctcagcaattcagtttgatccaatgattgttggtttccatgcaccgtttgtgggtgcatgagatcaagtagaatcgattgcacgagcttgagctcattttcagtcatcattggatcaaaccacacaaaactagatcctcttcgaagattcgcaaaactccacgcagcttcaatttgcacaaaggtgggtcatttctcatcctctttgcgcaatatagtcaagttttcgtttctctttgggtctcgtgtacctttag

SEQ ID NO: 75782 - DNA, 610 bp, Arabidopsis thaliana landsberg
  unsure (1)..(610): unsure at all n locations
aaaacatagggaataaagcgaaaggaacaagaaaactacatcacatggaaagtagatattttcagggagaaaaaagttgatgatttgacgtgaattttgagtcttttcttcatacgatacttcttaatatatagaaaagaaaatgatttttatagataggcaacacttacatacgatacttcttaatatatagaaaagaaaatgatttttatagataggcaacacttacatgtaattaaactatatggggtttatgttttattaaattgtaatttgaaaatctgatcattaatgactggtctatagtggtagggtgtagggtgtagtgtagtaccagtagttagctcaacttttaggggaaaaagattgcactcttctgattttgtgtatttgagtttgattcctactgtatgatggttccttgttccggatataaaaaaatttggtatttgaatactcgatactaattaaacaaaatatctgcagtccaaaaatgagattttttnnnnnnnnnnnnnnnnnnnnnnnnnnnnnnnnnnnnnnnnnnnnnnnnnnnnnnnnnnnncacacaataatttacgtattatgtgtgattttttttttttttttt

SEQ ID NO: 75783 - DNA, 623 bp, Arabidopsis thaliana landsberg
gcccagcgtgcagcgtggatgtgccggcggtggcgatgcggtctttggttgaaggtggcagcgagccgaacttgcttggcatgggagcgcgcagcaccgacgcgctgccttgcaattggcccgtttgcaagccttgtttcaacccctcttcacgaccaagccgttcaatgctggtgacgtaggccatcttgtgctcctgttcgataaggtcaagctcatgccggtaggccggctccagttcgggtggcagagcgatcatccagtcgatgagccgaaacaactgccagacgttcttgcgcgaatacctgtagcggtacagcagccgggtgatggcggtcttcgaggccaggcgggtttggccgcttcggctggtctgtgcgcgcaactgcgccatgacgaccacggcaaacgggttggtggcggccagacgctccagctcatcccatctgatattccattgtgccaagtgtacgacagggcagcggaaatgcacaccgccgcccagataatggctgtggtagtccagatacggcggacctcccttgctttgggtgagaatgcccaggctataaagtgcggtgcaatggccccgtgcgtcgccgccgcgggctcggtgtatgccc

SEQ ID NO: 75784 - DNA, 564 bp, Arabidopsis thaliana landsberg
gacttgttcgacaagactacaatacaatacaaaacttggatataaagaaggggaaattaacatcaaggatcactattgacttaatttcaggaaaagacattagattagccaaatctctttttgttaccttttgagagtttatgcatcaacttgacaaataatagcaattaaggcgtggaacaaaagtctttaatcacatcttaaacaactctttcagtggaaaggaatctgataacaaattttcatgtctaaagctaaaattaatgatacctatatccatttctcccaaatatttcaaatttgatatttgtaaaaaaataaaaaaaatcaggtttcttcaaacataatacaatccaaaagatatgatcaattaatcaatcatcaacctacaagtcaacaaagaaaaaaaaaaaggccaaacaacataagaaaacgtgttaaccacaaaaggcgaaacataagacattactagtgagttaattcataagattgggcacacacaaccaacaaagaaaatctcaattaattaagcaaaagtaataatttagtacaacaacatgagtc

SEQ ID NO: 75785 - DNA, 358 bp, Arabidopsis thaliana landsberg
atacaatcaaagtggtgcatcccatatcacagcgggattaccacttaccaatcaaacctttcatgtagactgtagacaatgttatattagctttgtgtttacttgtttccccttataccacttttgtatattcttcatcatttcaatcttgtttgattaaagcaatatcaactcatttatgaacttataataaactaatacttgacaaagtaattattatatttggagtacaaaaatacttgaaaaaagtgttggatcatttttataagttttgaaaagtattaataaactaattaaaacaagcggcgtcgaatttgcaatgatcggaagacgatggacaacaattcacaaggcgctt

SEQ ID NO: 75786 - DNA, 611 bp, Arabidopsis thaliana landsberg
  unsure (1)..(611): unsure at all n locations
agaaccgggctagggacatttaaagaacgtcggcggtgttggatatcagggttggtttggatctgaggatattcctttggatgaacaaggcaaccaaacaacgttgcaagacgaccgattcgttggcgatcaaatccttcctataacggctcctacaccaccacagccagccagacaaaataatagcactcaaggacgccaccttgctcgacaaggctcagctgtagatcaattggcggatcccgttcgaaagaacagttttgggaacctcaacacgtcgatgaggaatttggtccgaaaccagcaaagggatggagtgtttagttttggtagaagcaacactgtcggcgacgacatcaacagcaagaagacagactgggatgaattccttaggatattggaggaccgcacttttttcaagaagatgagtgcttttacagttcgagagttttgtgcagagaacacgaggttcttgtatgaggtttctcgattggagaagagggcgattcaatacgaacatttgaggagcctggcaatgaatacngatgaagcgtcacaacagcagcagcaacagcagcaacgaggagatactaccgcgcaacggactgaaa

SEQ ID NO: 75787 - DNA, 504 bp, Arabidopsis thaliana landsberg
tagagttgtttttgggacaatattctaatgaattccgagtaaattaataatgtctttaatatgtatgctccattattgatgctttacgctgtcatcgacatccattgcctcaacaaacaatggttgataatgatgatatttgttttatttattatttatctgattttttagtaaatttgatctagtttgtatccttggttgtcaaattcaccacatgtattttcttgtttgtagaatacttagttcaatataaattggctgattttgctctcgttgtgaattacaacttgtaacttaacaagtacaaaatgcacaaaagatggttctcaaaaaacagattcacaaaagatgattacaagaagatgaaagatacacaaaaataaacaagaagcacagcttcgtcccaacaataattaagtaatttggggggaaaaacattttgggccatggttaacactagggaaaaaaaattggggccttacattttctcataataatgggctt

SEQ ID NO: 75788 - DNA, 231 bp, Arabidopsis thaliana landsberg
cataaagaaaggtaagactctttgaaatagagatagagatattgttttctcttatcttcttctcatcagatcttggtttctttaccctctttctttctttttttcgctttttatggttatgttttttctcgatttagacaaaaaccctacatttgatcttctaaagggtctcaaatggaatctcttctcttctcatatctctccctctgtccctacctctctttgattctt

SEQ ID NO: 75789 - DNA, 543 bp, Arabidopsis thaliana landsberg
cccagggcctcgcgggcggctgtgccggtgacatcgcggtcaacggcgaagagcgacggttcgccgcggccgcgctggtattcacggggggcgagatcgccgggtcccttgggcgcaaccaggataacatccatgtcggcgcgcggcacgacgcggccatagaggaccgagaaaccgtgggcgaacagcagggccgcgcccttgggggcgaagggctcgatgatgtccttgtagatctcggcgtgcgacatgtccggggtcaggatggcgatgatggtggcgtcggcgatcgcgtccttgatttcggcagtctgcaggccgtcatgggtggccttttcgtagccggaaccgcccttgcggacaccgacgatgacgtcggcgccggaatcgcggaggttctgggcgtgggcgcggccctggctgccgtaaccgataatggcgatgcgttcgcccttcaggctgtccggcgaaaccgtcgcattggtgtagatcttcacagtagtctccaaggtatgggtattgaagattaaaaggaaccgtcgc

SEQ ID NO: 75790 - DNA, 560 bp, Arabidopsis thaliana landsberg
caaactcgaacatatatttatctccaaatcaagacatctatcattatcattctcacaacacctttgtaattaagcaagaataatcttaggaccaatctcttaatcattgtcaaggattggtcgtgtcaagatcatcaagatctgatgcactctttttatgcttcttctatgttatttgatttcttcgtgtggaaaatgggttatgttacgatcttcatttgccttagagacagatacgcgaggaggcgataaccgaatatcatgacaacgagtgcggctacttcagttagtccgttgtctattctcatcccgttgatggacacagcgaagtcctgatattgtactttaagaagaagcttgtaggtgtggtaattgaaagatagataacgtatccacgatatgaaaaccggcactttctgtgtagacacagaataggaaatcagtacaacaggggaaatcaagaaacaggggaagttaaaaacagaggaaatcaagacacagaggacttgccttgacgaagaatcctccggcgagcatgaatgtcatgacagttactgaag

SEQ ID NO: 75791 - DNA, 599 bp, Arabidopsis thaliana landsberg
  unsure (1)..(599): unsure at all n locations
ccttcgatgtcccgaggcacgcaatccgctgtacgcgaaccagtcggatggctcggagtgtggcatccatgctcttgtagggactacccggtgcaacgcacgcggcgtcggcgctcgaaatctgcgcgtcgctaatggctgccgtcgagatccattgagtctcgatcacgatccccatcgctgcgctggaatgagccagcgcagcatccgtcacctgatgcgactccagcgagggcgagtattccccaagcaggataattcgcgtcatggttcgggattcctgtcatgaacgggggcaagggcggcccccgttcgcgaaggtgcggtcattgttatgggcagccatcagtcaggttacttgagttcacgaatcctgatgttcttgnnnnnnnnnnnnnnnnnnnnnnnnnnnnnnnnnnnnnnnnnnnngattccttctttaaggccagttccggatgactgtccgtgaaatccagatcagtntcccgttcatgtaatggctgatgtggnnnnnnnnnnnnnnnnnnnnnnnntcgnttcattcattcagcttaaagagctngtcccagcctgcctgatcgatcagatcagacttgatc

SEQ ID NO: 75792 - DNA, 370 bp, Arabidopsis thaliana landsberg
accgttcgttcatcagcgcgtcgtggcgtgaccttggcgccgccgtagagcttagaaacgcttgcgttcgtgggggaattgcgggggtcgtgaagaatgcggagaaatttagcaaccttctggcccccttatgcggtctacgtagtgtggaacacagggatggcggggccgggggagagttcctccagtacgcgctcgggcgatcggcgcggttgcatcagagcgcgtacgtcctgtgcggtgactggcacctcgcccgggacgtcgtccggcagacgctgctcaaggtgtatttgcactggccacgcctccggcaggcgcgcgacccggacggttacgtccgccgggtcatgctcgccgaggcgcgcct

SEQ ID NO: 75793 - DNA, 401 bp, Arabidopsis thaliana landsberg
tagatactctatgggctaacattctcgcttaaacgtcacccacattctgttctttaatgtaatttttaaaaaaaaagacagcaccaggagcaaaagggccaggcatgacgaaaccagcaaaataatggagaagggccatataacgcagcatgagagcgaaaaagccctgcgctaagaacgcataagcaggcaaagagtacatgcgatgagctaccaaggaagcaataactcctaaggaggctagagcaaggccaaaatgacaaatgaaaaaaaagattgacaggagcataaaaaccctaatgcccacgcccaaaccgtccatgcggaggaatatgcgctagtacaagaccataaataccgcgaccgcaaccaaaagggcgaccaatacaaacgacccgcaa

SEQ ID NO: 75794 - DNA, 498 bp, Arabidopsis thaliana landsberg
actcattaaactagtacatatcaatatatcatatactatcataataaatatgagtaggactcagtgatgtattgtcgcattgtcgtaattatagcataacgctagctctttattattccacgtcttacatattcgcaagtgcatgcattatttctgtaactttactgtaaaaatatagtaattttgaatcttgtttaaaaagaagtggatatatgtttcttttctatttgttaagagaagaagaagacgtggtaaagtggatattaatagtaacgttttcattaggagagagcgatcacgaggccaaaataatatgcctgctccacccatgttatatgtcattttcttagctattacattacctaattgtttttcttgttcataaacaaaaggtttgaagaaaacttaaagttgggctcatggatcatgcacattgttccaaccataattcgttcatctttaatatgaatgtatatcaacttctaattaaatttatca

SEQ ID NO: 75795 - DNA, 575 bp, Arabidopsis thaliana landsberg
  unsure (1)..(575): unsure at all n locations
ctataccatcatatcgaagtgagatatataagttatgtaataacaaaacaaaccgattgctctttgttttctggatcatccgtacgaatttttccgaatggcaaaggtagagatccattagattatttaatattgtaggtagtctcattaggcgtttattgcgtacacacccaaaaaaaacatagttatttacgtgatttctaaaattcatggctattagcctattactactctttcaattttataaatgtgcccggtcactgtctcctttgtttctcattctctggaatctaaacaacatcttttctttgactgtgtatttgatgatattgtgcattggttaggtcacctacgtctaaagccaggctcaatacaatctgtaaattgatcttcatagcccaagagataaatataatttaccaataatgtaaaattaaattagttatttaattctaagaanactcgtggaatatgttgaaaatagatatgagaagattttgtttaaatacaaatacattagttactagttcagaatcgtatgctatgtagactngcttttcagatctttttgacta

SEQ ID NO: 75796 - DNA, 425 bp, Arabidopsis thaliana landsberg
  unsure (1)..(425): unsure at all n locations
cgcgctgatagnncaaacgccccgctcatccaggtcgccggataggtgttgagatagcgatgcggctcgtgcgccagcccttgcggacagcagatcaaaacgtgcgtcccgtcgagggcaaacagatccgggcactcccacatatagcccgcgtccgacagcccgttgacgccgtgaccggcaatctcgccgcaaggctgccagcgctgtaagttactggatgtgaacagcagcactttgccgtgcttttgcacgtcttgcgcacccagcaccatgtaccactccccgtcgtgttgccacaccttcgggtcgcggacgtgtccggtataaccgtccggcagcggcagcaccgggccccgttttttaaagctttcgtccggggtgttcgacggccaggcactgcagggcggtgcggctgcccgtca

SEQ ID NO: 75797 - DNA, 453 bp, Arabidopsis thaliana landsberg
  unsure (1)..(453): unsure at all n locations
gctacctccgcgccaagcgccgcaacggcttcatctccttcatctcgatggcgtcgattctgggtatcgcgatcggcgtggccgcgctgatcaccacgctcgcggtgatgaccggcttccagcgcgagatccgcgaccgcatgctgcagatggccgcgcacgccaccatcaccgccgacggcgtggcgatggagaactggcggcaggcggtcaccgcggcctacgaggatccgcgcgtggccggcgccgcgccctacgtcgagaccgaggcgctgctgcagggcgcgcgccggcaaccggcgggtcgtgccgcggcgtcgatcccggcgaagagggcaaggtttctggtgatcggccagaagatggtgcagggccggctcgaccagctcgcgcccggcagcttcaccatcgtgctcggcagcgagctcgccacctgctncggcgggggcgtgg

SEQ ID NO: 75798 - DNA, 372 bp, Arabidopsis thaliana landsberg
  unsure (1)..(372): unsure at all n locations
acggaaagatgaattgaggcgcataccactggttagggttatatccttatatctaacacatacacctatgaccatgtggtattggatgacagatagcacacaacaagtgtgcacnnnnnnnnnnnnnnnnnnnnnnnnnnnnactaaacattgctccgaataccctaattttgcagcctacactctatgctttaaagccaccaccctaactcctaagagccaatcccatagcctaagaccatactccttaaaccctaatcactacaccctaaactctgacaccctaaccctcaaccattgtaccacagactgtagatgccgatacactattttcactcttggtgccccgatgcggccttgacacgtatgcta

SEQ ID NO: 75799 - DNA, 121 bp, Arabidopsis thaliana landsberg
cgataagaagagattctgaattcgcacaagcttttaatgtcctatgagtatgcaaatggccttccctctggcgccggggtgaatctatctcttttaagaagtctactcgcttccttattca

SEQ ID NO: 75800 - DNA, 234 bp, Arabidopsis thaliana landsberg
ctaatgtagatgactaatattataactctttggttcgacaccctgtctgtatatgggaaaattgaatatttccaaggcccattacatatagaagttgtgataactaatacatacatacaaggctgattaaggctatatgctgaccaccacccgtacttataccagacggaaatgtaaaaagttgagctacttggaatcgaaattttttatagagcgcttccgtttataaggggg

SEQ ID NO: 75801 - DNA, 531 bp, Arabidopsis thaliana landsberg
  unsure (1)..(531): unsure at all n locations
atgggctcgtgaaacagtccggcgatcaatacacgtttggcggtgtaagacattttttagctcggttcctgttagcgtcagttccgggaggacttcgtcggcgacgcgaatacaatgttcgatttcttcatcggtatgcgcgccggagatgtaccacaggccgcgaccgataaggcggataccgcgctcctgcatggcgaaaacgaacttggcgtatttggccttatcgtaggaaagcgtgccgcgatagtcggtgactttctcggcggtggtgaagccggcatggaacatcggtcccatcccctgcaccagcagcggcacattgtgcttcttggccgcttcgcgcagcccttccatcaggcgctgcccctggcggaacagcttctcgtggacgttctctttttccaacactntcnatcgtcgcgagcgcggcggcgaccacgggttgcaggagttcatcgttccggcgtgaatcacggtgccgtcggcgatcaacttcatgtacttttccttaccggccagcacactgat

SEQ ID NO: 75802 - DNA, 536 bp, Arabidopsis thaliana landsberg
gaccacagccggcgctcacggtgcttccgttttgtttctgtcccgtttcagcatttcccgctattactacctgttgggggtgggggaatattctatcataacttctctcataatttacataaaataaaatgagcaaaaaagcagcgaacccgagcgccattcccagaatgttgacggcgttgtatcctttgtttttccaaaggttcctgaaagcaatttttaaatagtttctaaacataatttttgatttatgatctatactacctgatttgccgtcattgcgagcgcagcgaagcaatctcataactattccatcaaatcttctaatgagattgcttcggaaagccaacccacaatgccaacgccttttcctcgcaatgacgaacggctattctctattaaatattcaacccatcttcaactttccccgtcattgcgagcgcagcgaagcaatctcataactattccatcaaatcttctaatgagattgcttcggaaagccaacccacaatgccacccctttttcctcgcaatga

SEQ ID NO: 75803 - DNA, 564 bp, Arabidopsis thaliana landsberg
agctatttatgcacaatagcgagagagaaacaacatactttactcgaacacgaaatctattcaatatttttgatcaagtgattcagaatgcttgctataccaaatatatacaccctcaatatatcataatggatatatatactctttctttgtggctccgagattcactctcatggtaatcttacttcgttgatccgctataactaactgtagtgtatgatggttccgcaggcactcatatattttcctaattctcatgtaatcgtctttattaagaaaaatgaattcagaaactaaaaggaaattagttggcgttttaacaagtagtatatgttgggaacttaccgtcaccaacagatgaatgggttacgaaatctatctaatataacatctgaaaaaattaaaagctacatgaagccgtaaaacgttagaattgatctaccatatgtgcaaccctatatactctagtatatacgaaaacactcatggaaaagatgcgatgtgcatgaacgtctcatatatttcatttaaccataacgttgaatgtcttaataattttgttca

SEQ ID NO: 75804 - DNA, 511 bp, Arabidopsis thaliana landsberg
tatgtcccttcgttttacccaaattagaaataaatcacttgtataaaactttagagataaccggaatattagttttatttgcgcagaatcatcacgagcggcatgagaactcacatcttcgggcggagaacgaaaagcttcgaaacgacaacctaagatatcgagaggctcttgcaaatgcttcgtgtcctaattgtggtggtccaacagctatcggagaaatgtcattcgacgaacaccaactccgtctcgaaaatgctcgattaagggaagaggtatgagaatcaactattttaaatgttcaaataatgttaagagttttacacttaaatgttgtcaagaagataaaataaaaaattagaatttgtttttatcccactaatgttttatcgttttaaaaacaatcattttcttttttcataaaaaaaaaacttttttagattttgtttgaaattagaagaatttaaccttttttttttcttgggaaattaaaaaaattttttttttaatt

SEQ ID NO: 75805 - DNA, 111 bp, Arabidopsis thaliana landsberg
agtgacacttaaggttcttggtctaagaagaagatggtgggaggttgtgattaggttatgagcatattttttttttaagcacatgggggtccaactcggccaagccatggc

SEQ ID NO: 75806 - DNA, 506 bp, Arabidopsis thaliana landsberg
actgatgacttgcttgtgctatgagcttggtaagctgaaaatttgtcattgtgttgtgtactttagttagagtcaagtatttttttatgagtttgggctaccaaatctctacggagtgtggacactctagaaaaggacatcgtcaaggagaagtcaaaattatattttaaagaaaggaaaaaaaaatcttacaaattttaaaaattaaattctctttcaatgcacaaaatttcccatctctctctttctctatacaactttttagaaagaaagtaggacctgacaacgatgaagatgatgatcatcatgatcatggagattcctctttagttcttctctctagtttctttcttcgatcatgtatttccatcgatttctctatctgtcattgatcaacgaatcttctctgttttgcagattggtccaaaccaaaaccaaaaccaaaacctaaaaagtctcttccttttattcttttaccatccgtcgggtttttctaatcgtctttt

SEQ ID NO: 75807 - DNA, 599 bp, Arabidopsis thaliana landsberg
gtttagcatttgtaccaaaaaaaagttaggtcagaaaaaaaaccctaaaaaaaaccctattttagaataattagaatgtaacctttgatcttgtgggtaagagcaagatactgagatcttatagctctccgatcagcaattccttgttcttcttcttcctgaatcggcggttgttgaggccgtaatgaagcaattacggtcttactacgcttctccttctttacgatctttggtgtctccgaggactcatcggcttctcttctcctgctgcgatctccggttaattccgtttcccatttcaccgagtttctcatgatgattttagaaaaaaataatctgagagacggaaaggaaaaaggtgaaacgaagagattataaaaataagaaagaaaccctaacggcggcgagaagacgaagagacgtcgataaatttcccgccaacctcgaagtctctgctatatatttattggagtatattttttgatgacttttttgcctaaagattaggtttcggttgactatcctcttgactaataaatacttggttaactcaggctgagctatgttctgctgctctaatggttggtcatgattcatga

SEQ ID NO: 75808 - DNA, 570 bp, Arabidopsis thaliana landsberg
  unsure (1)..(570): unsure at all n locations
gcccacgcgcgcgcgnnnnnnnnnnnnnnnnnnnnnnnnnnnnnnnnnnnnnnnnnnnnnnnnnnnnnnnnnnnnnnnnnnnnnnnnnnnnnnnnnnnnnnnnnnnnnnnnnnnnnnnnnnnnnnnnnnnnnnnnnnnnnnnnnnnnnnnnnnnnnnnnnnnnnnnnnnnnnnnnnnnnnnnnnnnnnnnnnnnnnnnnnnnnnnnnnnnnnnnnnnnnnnnnnnnnnnnnnnnnnnnnnnnnnnnnnnnnnnnnnnnnnnnnnnnnnnnnnnnnnnnnnnnnnnnnnnnnnnnnnnnnnnnnnnnnnnnnnnnnnnnnnnnnnnnnnnnnnnnnnnnnnnnnnnnnnnnnnnnnnnnnnnnnnnnnnnnnnnnnnnnnnnnnnnnnnnnnnnnnnnnnnnnnnnnnnnnnnnnnnnnnnnnnnnnnnnnnnnnnnnnnnnnnnnnnnnnncatccgcgccagctcctgaccatccgcgaccgcatcgccggcctggatcgcacgcgcctgcgccatctggcgccgcgcattctgcgcgcttnctcgcgcgaagaagtcgaagccatcct

SEQ ID NO: 75809 - DNA, 564 bp, Arabidopsis thaliana landsberg
ctatctgctgaagcccatcacactcaagcgctttctcgaagctatgcagaaaatctaacgatatttcatgtttaatcaggctaataaaacgtctgtagcgccaggcggcaacgagtatttctttgtgaaatccggcaaggtgttacgaaagatattgctgggagaaatacaatatttcgaaggggaaaaggaatacgttcgcctggtaaccccaaatgaacaattgcttatttatcgccgcttaaaggaaattgatgaacagctcagcccgccgtttgtacgtgtgcacaactcctatatcgttaacaccaggcaaatcattaaaatacaggataatcatatttatatcggggccaaacgtatccccatcagcgaaaagtttaaggataaatttatggcggtaataagccagcgtattttttgattcaccgattttttacctgcaactgcctgctgccaactcaagagacgcacaggaaacatcatttatcatgatgaagggatctgagagactaataaagcgataaacgggctacattgcagaaggcacaaaatatttttact

SEQ ID NO: 75810 - DNA, 127 bp, Arabidopsis thaliana landsberg
aaaaaaaaaatgtcgaaatactctagactctctcaaaggtaaaagcacaaaccaaaaaacgtatcaaaattacacaaactctgcacatcttttaacttcaaacacatacaccccattactggggaat

SEQ ID NO: 75811 - DNA, 557 bp, Arabidopsis thaliana landsberg
acatggcccatccaatatattttatagtgacacatgatcctctcaccattccttgaatctgctttctaaacaatatattctcttaaacaaaaatattacattgaggaaatgaaaataacatattatatgtcacaaaatttttatatcaaagtctacttcagttcatataatttgtatattagttaagacgttagtgtatgaattatgattatagtacaaacaaacgaatataagttgatatattttaaataaaattttcagtctcataggtctaatcaagactaagagttcgtatgaaaatgtgtcatcactggtctaatcaagaccgtagaatttgatatctaatttctttgacgatatgaattatgcaataccaaaaagttacacagacaccatcacaccaataataagaaatataaaattaatcatttaagcatggtgacaggagatattggatccgcaatttcacgattcgtttgctttttttttgttgttgagatttagcatttttgtccaaatgtatcatcaaatatagcccaccaaaaaaaggtttttta

SEQ ID NO: 75812 - DNA, 571 bp, Arabidopsis thaliana landsberg
  unsure (1)..(571): unsure at all n locations
aataaatagctgtatgtatatcgaccaacctaagcactcttgatttgattctcatctacttgctttttcacctaaatacctaacaaaaagaaaaatcatggattagcatgtgcccattgttcaatgtcttccaatttttatatatagcaaattaaaataatccacatgctccacataagttcatgacataaaaattcataatccttttttcaagatatgtgaaacaatttaaaattgactattgcttcaatatggataaaaagaagtgttatactatattgaagctcaaagaattatctaacatgtactattacaaagattacagaggaaatatagataaaggatcaacctcattgtctctataatgggtttttgatgtttattccctacgattgtcacgaactgtctcttttctccaaattacaatcatcttatgaactgtttcttgcggtagtcatgtccagtttcagcaccatctcttctagctcaagccgttngatcttcctaagttcaaggatactcggtggcatttgtttactggacccatagagctcaacaagagtgaagaatt

SEQ ID NO: 75813 - DNA, 405 bp, Arabidopsis thaliana landsberg
cctgtttccgtcccacccatgttagaacctgatcatgaggaatggtcaagaggtcttagtttcaatggtggttacttccctgaaggagatatgggatgggaccagatatttgatgaagataaggagttaactatgtgggatgtgatagttgatatgtaacttgcagcgcgtgatacagcgagtgctcttagttctgtgaacctcgagagatgtggcattaattttttgtcgggacatgttcttgaacaagcttggcaagatattgatcatattgctactgaggctaactttggttatgcaagaaagattatggagactgaaccacccaagtggctaacggattgcggtgcttctgataatatgctatgtagtgtaaagaggaaaccaattatgatttttcgactt

SEQ ID NO: 75814 - DNA, 280 bp, Arabidopsis thaliana landsberg
cccccttcggggagagaagtttatcatgaaaccgtgagctacccgccgtgggaggagccctcgggctctgaccgcgtgcccgaagaagaatgagctgtcgactcatatgcagaggcttggttattggaaccctccggacctaattgctacgcgagatgtgatatggcctgggttactgcttatggacccgaacatgggtgatctatttatgcccaggatgctgctagtgcgaaactaatgcgtggatccgacccactgagcaatccaaatctaattatga

SEQ ID NO: 75815 - DNA, 510 bp, Arabidopsis thaliana landsberg
  unsure (1)..(510): unsure at all n locations
agccgcgcgcggatgcgctgcatgatcgtcgacttgggcttggactatcgggcaggtcaagaccaatacccgggtggtggacaccacggaagcgaacctgctcggttcgggcaccatcgatctgaacaaggagcagatcgactatcagattcatacccagcccaagcgcatgaatatcggctcgctggcggcgccgatcaacatcaaaggtccgctgcgctccccgcgcattctgccggatcccggcgcgctggccgtgcgtggcggcgttgcggtggcactgggcgtgctgctgacgccgctggcggcgctgattccgaccatccagctagggctgggcgaggacaatgactgcggcgcgatgatacatgatctgagnacctcgcagccagcgtctgctgcgagtcattaggcgcaaggcttggcgaaccagtcgagcagcagcttgttgatgtcatcggcgcggtcgagttgcaaccagtgcgaggcgttgtcgatccgctgatagcg

SEQ ID NO: 75816 - DNA, 530 bp, Arabidopsis thaliana landsberg
ttaccacctaatcttattgctaataacttttgtgtatttattaggaggagacccactcttatagttttacattaatgacttctatgatcagtttagataaatatttttcctcaaccggactaaatgtattcttctatatatatataattaggataaacattttatgtaagaaatctaaatattgtttagttgaatgtaagaaagttttttggtgtaaatgttacgaaatgaatgtaagaaagttttcttccctatacatttttttgtcttaactttggtgatttcatgatatttatttcatttaagaataggaaatcgcttgtgaaattggaagcaaattaagaaaatacatgatagagctttaaaaagtgtggatgacctttcaatacatatttgcttggagggatggtgaaaaactgaaaatgacatcagatacacgcttgtgaaccatctttaaagtattgatggactcttcactatgaaagctctctttaaaattaattttctttgtacatgtctctaagcaatgt

SEQ ID NO: 75817 - DNA, 592 bp, Arabidopsis thaliana landsberg
  unsure (1)..(592): unsure at all n locations
tatattcttgtttacaatttttttgataaattaattatttttatttttttccttttcttttaagatccatggcatggagtaatatttttatttgtatcatccccattactgttggtctaagtagtattcttcagaattcatatacataaataataaacatagcataaatcaatgattacatacatatgtaaagatctctatataagatgtataattcagtcgatatttctgtcattcaattatttcattaaataatttttctgtcagctatttttgttcgtaatgaaatatattttaatgggttgttgactgatcaaaactatacaactactcaaccaaaaagaatcattcaaaaatttatatttttcgaaaaatactattattattagtcataataatggattaagaatcattcaataactaaaaaaaaaaaggagaaaaaacaaattgaaacttactaagaaaataattgataacataatctacatttgaaattattatttggtttgtagaaaacattatatttaaatatcaaattcgtttgtnattaatatagaataataaataataaaatttacagcttttacaactt

SEQ ID NO: 75818 - DNA, 469 bp, Arabidopsis thaliana landsberg
gtaaatagaagaattgtggagctctgcttgatcgtttttccctgtcaacttaataatatgtacatgactttggccttctgtggtttcctttcaccccttcaactttcaaaataatacaaaatataccctaccttacgaaattttctaaattaattcctaactctcgaacactaattagtaaatcaaacaagtagtttccgaaaagtgtacatggaatttaagataggataagtgtagtcagtgaaatagttctgactcttgagttatataattagaaaagtagttaagttcatatggataagatcattctatttgactaaaagtcgttaatgtacttaccatattccataagtgcacatgggcaaatcacatgaatccatttagaaattacaatatagcaaactggcacaatttcgtagcatattcatgcattaaactttcactgttattttagccgagtttgataact

SEQ ID NO: 75819 - DNA, 529 bp, Arabidopsis thaliana landsberg
  unsure (1)..(529): unsure at all n locations
tgagtaaacccgatcagcgactagcacaaagcagtttggttccctttttccacacggtatctcattcataacttggctagtgaattgggatcggatgtggcagctcgagtaagttgcgtcttttgcagaaaggaagtagagacaagagatcacctctttttctcttgcccttactattctcaagtttggtgtcatctcgctagaggcattcttcaaaatcgatacacggaatgtaggagcttaaactcctcacatcttacttgacacttctcagccaaaannnnnnnnnnnnnnnnnnnnnnnnnnnnnnnnaattacgattgatagtctgtggcgagaacgcagtgggaggcgtcacagtgagactcatatcctatctgccaagctaacacgacttaccgataagaacgtgagaaaccgcttcggctacattcaattgtcaggaaaaaccgagacgaagagggactttgctaatggtttagcactcgatcagtcttagttctcaattacactttctatatgtcatttc

SEQ ID NO: 75820 - DNA, 416 bp, Arabidopsis thaliana landsberg
gggaagagaaactggtacggtactgaattattaacatattgattatttgtaaaattaacaattcattaaggctaaacatgtgccttttatggttaacaaattatataagaaatcacactagacaatatttgtcaccattaaagggacttatacattacaagcagaaccaccacacacgtgtaatgaatagaataaaatgacaaattggaaattaatcttgagttgaaatgggtagaagccaatccttgagatcttttttgcctcctaccttaaatcatcatcatctacaacactctcatcaataatactatacttaacaaaacgctaaccaagacaatccctctagcaacataatcacacaaaccaccagagagttaagatacttacgcttttccgacatagattcagacctagga

SEQ ID NO: 75821 - DNA, 567 bp, Arabidopsis thaliana landsberg
  unsure (1)..(567): unsure at all n locations
cccggactgacattctgtcaaaacatgaaaccctgtagacgttaagcagacttgcgctctcgcgttgtcgaccagcgttttgccgagcgagcagatcgcgcctggcacctgatggcttgccgcgatggtcgcgtcgaatgccttctctatccacttgcaatcgtcggcggtgacagtcagcgacggcagcagcttgacggtgtagctgccgtggcccgctacctgcgtcaggatcttnnnnnnnnnnnnnnnnnnnnnnnnnnnnnnnnnnnnnnnnnnccccttgttggcgctctccagcaaattccacgccgccttgagccggaacgatttcggcggcccgaattcgacgccgatcatcaaacccttgccgcgcacttccttgaacatctcgtagcgcgggatcaacgcggacagcgcagtgatcagttggtcgccacgctctgcggcgttctcgatcaacttttcggcttccatcacctccagcgtcgcgatgccggccgccatcgccagatcgtttttggcgaaggtcgagccatgcaccacagcgcgatccatgcgattgag

SEQ ID NO: 75822 - DNA, 930 bp, Arabidopsis thaliana landsberg
aatgttttggatacttttttctggtgcgtcttttacctttcaaccaacgaccacgaccacgacaaggataaataaagaaagatgataagtgctacgaccgttacatgcatgtagttatttgttagacgtgagaaaatcagaacaacaaaagtcactttgatacatcataacattttctccatagaaaaaaaaaactttcagacaaaaagacatatagccgttggaaaaacccacgtggcgttacacatctctctatccacttgtctgacttcattcgttgtcgctttggattctcttttgctctctccatattattctttgtctcttcctctgctttactttactccaagcaaagtattgccccaatacactacccgtgactttcatcaaatctctctttctcaatctctcaaattaagattctttcttcttcttctccaatggcccttctctgaaaaaacatttcttcaactgatcattaatgtctctctttctctccttcttcttcatttcaatcttgctctgtttcttcaatggagctacgacgacacagtttgatttctccacgctagccataagcaacctcaaactcctcggtgatgctcgtttaagcaatggaatcgttggcctcacacgtgatctctctgtacctaattccggcgccggaaaagtcttatactctaacccaatcagattccgacaacctggaactcactttccgacaagcttctcttcttttttctccttctctataaccaatgtcaacccttcttccatcggcggtggtctcgctttcgtcatctctcccgacgcaaactcaatcggcttcgccggtggctcgcttggtctaaccggtcctaacgggtccggttcaaaattcgtcgccgttgaattcgatactttaatggacgttgatttcaaagacattaa

SEQ ID NO: 75823 - DNA, 145 bp, Arabidopsis thaliana landsberg
atacatccctagcctgctctttcagatgttctatactaataagagattgaccccgaataagtcccctgataaattacagaagcaactttatgtttttgggccatatattcacatcattccaacactcttaaacccgagaattatg

SEQ ID NO: 75824 - DNA, 651 bp, Arabidopsis thaliana landsberg
tgatttataattgaacgtagaatatattttatttttgaacaattacgtagaaatatcaactagattaaccagttatttcacgtgaattaagcaaaagaaaagtcattaggagacttttgctattgattttaaaatatttgtggcgctctgaatgtcttggttttgaatatgatgttattcattatataatttaattaaacggagaaatatataacctttttttgtcaaaaggagaaatatataacctaagtaatcaaatgtgtctagttttgttatttttctaaataattatgaccaggccttgtcgaattaaaagttaacaagttatgatgaatgtgtccgaaaaagtttgagatacataaatcaataaatcacatcacgtagacatcaacaaataatttgtgtatttctaaacgtgcaaatatttcctctgtcgcaatttccttgaatcgtacaataaaaaaaaaaaacgcatgtgttaaaaaataagtgtggctgagaattgataggtagaagttggtgttaaattattgaacaagccagcttcatcggtagtgtgccatatgcacccgcaaaaaagtgattatcaactacgatggttaaaaaaagaaaatcttctcttacattaaaaatataaatttttttggttta

SEQ ID NO: 75825 - DNA, 614 bp, Arabidopsis thaliana landsberg
tatttttataaaacgtgttgcgttcttttttttttttctataattgtagttttagaattgtgcttgagcactaatcagattcacagcaattcaaaaatccatttagaggtataattccttttagatgctctttgatcttttcgtgcttgagtcagtttgtacttttgtccttgactctttctaaaacaggttttgtgttaatcccttgaatctgctttatcgcttatgtctcttgaaatctatctatgttgctctctttgtgactgtctgatcattagttgcaaaatgtgaaattgtctgtgtaatgatcaggtcgagttttatgaaatgttgttagcttgcattgagtaaggcttattgtggattggtggattgaaatcttcatgtaactataagtattgaggagctttgaatgtggatttaaaactgttctggagtgtcattgactttggatactattattatgtatttgtattaaattcatattatgtatgccacagacccattctctatttgcttcaacaagttgacagagagcaaaatctttatatacgtgatatcaaagggtttaatttccacattcttctcacttctcaggctttaatctaaacttt

SEQ ID NO: 75826 - DNA, 757 bp, Arabidopsis thaliana landsberg
gtgaacatttaacgttttttttgtcatggattcgccttgagagtctttagatcaaagttttttacttaaggtttaattgatgggatgaatcttcaatggtttatgctttcatatttttttatgtgacatgccaccatatttttaggatttgcattctaaatgacatttacattttgataaataaataaaatatatataactttttaaacctaattatcttaaacatattcaatgagtattggtcaaaactaagagttagaaatagaaatcgtataaatttttaatctccatgcatagataaactttctaaacatagtaaacgaaaatggatagagaataaattgtttcttgagatgaagaagattttttaatatactaaataaatatctgaattatctgtaatatagaatatgttatgtgaggtgcatacaaataaatgaataaaatactcaaaaggatgtaataattgaaaataacatggaggaatgggaccatttacgatatgaatgaataagaagagagattctcagccatgcaaatgcaatgaaatcggttagttctgttaggtgatggccccaaccttatttaattatgggtatgcgtttcgtctgctgactcgcgagtcttgagtctcgtgacccaacttatccaaataccaaacatatatccgatatctttcatatccaaatgaacaagttgcttcacaaaatcactatttaacaaaacaaatcaaagggttgcagttaaccacacacta

SEQ ID NO: 75827 - DNA, 512 bp, Arabidopsis thaliana landsberg
aaatcccaatgagataaatcgatgtaggaaagatcggaatatctgagatcgcatgtcttgtctaagcccaagaacgtcacaagctcgctgagacgccgaatctttctgctcagagagagcgtttgccaaatgaaaaatatgctctggcaatagatcatcgagattcgcttcaatcttcaatttcacacaccgattcagagaacgtaacaattccgttgtgcttttctttcgaggccagcgacttcgaaataagaatgctcattaatttctgctgatttggattcagaaatttcggaaggtttgtcttagtgatctcaattgcaatatccttctgctttgcaatcgccttaagttcaattgatttgaagttagcgccatcattcgcgccaactctgcaaatagcttcattgtcgagataggtgacgatctagcacttgcggctcccaatgaggctccgcaacctcccacttgaggttacccatcgcacgcactctgtgatgctttcgctgctc

SEQ ID NO: 75828 - DNA, 499 bp, Arabidopsis thaliana landsberg
  unsure (1)..(499): unsure at all n locations
agggagccccgggtttgggattccgtccaactctgcaaaaatagtcacgttgtccccgttgcttcaccgattcctgcgtctatccattatacgctttaaaccagcagcttaagacaccggccttcgcggcttttgcctgcgggcgattttctcttcttttcatcttttcaacccatccgttccatggctcacagcgatgtcctccttgtcaaacccgtcgataatctcggcggcgaaggcgaccaagttaaagtccgcgccggctacgcgcgtaattatctccttccgcgcgggattgcggtgccgctcaacggggccaatcgcaagcgggtcgaggcgctccgcaaacgccgcgccgagcgcgaggcgcangagctttccggcgcgcaggagctgggcaagaaattggaaaaggccagcctcgtgttcgtcgtgaagacgggcgagggcggcaagatgttcggcgccatcacgggcaacgatatccacgatcaactgg

SEQ ID NO: 75829 - DNA, 582 bp, Arabidopsis thaliana landsberg
tgcacggacgcctctacggcgactaccaatgggggcgcgacagcgacgacttcggtgctctgcgcggcaagatcgacacgctgtcgccacgactcaccgtgggtggctacctcgaatggcagctcgacaaacaggtcgacgcgggtgtcgacctcagtcacgacacccagggtgcgggcgcctatctcaagttgtatgcggaatgggatctgccatcgatccggctgctgcaaccctcgctgcatctcacctggcaggcgatgaacggcgccgcgatgaatcgtttcttcggcatcagccctgagcaggccggcaccctcggggtgcgggcctggcagccgggcgccggcagccagcttgccacgctggagtacgacctgttcatgccgaccagccagcacaccggcttcgcgctggcactggcctacggccaattgctcggtgctgccggcgacagcccgctggtgacccggttcggctcacgcagccaatggaacgagtcgctcgcctttatctatcaccgctgaggcatcggcagtttcaatgcacgccatcggcacggtaagccaccgaaatcgcgcg

SEQ ID NO: 75830 - DNA, 435 bp, Arabidopsis thaliana landsberg
gctcccacgccatcattgtgttcaaactgttcaagaatttccacatgttactattatggcgtaaccgaaatatggataagacgaatcaactcattaccttgaaaagattctcagagaaatacgaatcaccacccgcatgtaatcttgatcctccagtttgaagatcaagggcacgaatagaactgctctcgctatcagcaatatatgcttctttcaaatctacattcacattacacatagaactcaataaaattggtgatagaagtgacaagtttgaagtttgtagtaattaccagggcctaatgagattcctgatggctgagcaaatgatgtagtctgagggctgcatcaacacataaaatatagcataagtaaaggacacacgtcaagtaataagtaatttcaaaatctagtgtatacatacgtggaacccgt

SEQ ID NO: 75831 - DNA, 526 bp, Arabidopsis thaliana landsberg
  unsure (1)..(526): unsure at all n locations
gacgagcctataaagttgtacaggtttattgcagcacaacccagaagttatgcaaactagtttttttgtacagctctattcgaggtgttcgagcagccgacgcgctgcttcctggccactgagccaggcgccttcgacgcggccggacaagcaccagtcgccgcaggcgtacaagccttgatctgcatcggccagcgcgccccattcatggttgctgctcgggcgggcatacagccagcggtgagccaaggcaaaagtagggnnnnnnnnnnnnnnnnnnnnnnnnnnnnnnnnnnnnnnncacagctgttcgatcacttcttccttgggcaggtcgatgtgttgccggctccagtccgaggtggcgtgcagtacccaggtatccagctgctcgtcacgcccgggcttgctgcggttgcgggccagccagtcagcgggttgtcctgtacgaagcagccttgcatcgggtgtccagcggngtctggaggccagggcgacagcccaggtgggctccatctgcacacct

SEQ ID NO: 75832 - DNA, 408 bp, Arabidopsis thaliana landsberg
  unsure (1)..(408): unsure at all n locations
gcaaaaaaaaggggagacaaaaacncangaaacttaggctttactatacgcacaagaccagaagtgggtnggtagaaaaaaacagaccgagacgcgcccctccacggcggaaaaaaaaacaaaacaccgggtatacgagcccagcaaagaggacaggcccacagttgcaaggagcagggcgagcagcaacacataagaccacaccgacaagcccaaaccaaacaaaaagaggaagcaaaagatgccaggttcgaccagagagagggttcccaagagccaacagaagaaaagcgggctcatactcactcaacaaaagcggtgttatactaccggtcaaggcaaaccacacagagaccangtgtatcaccatctctgctcgcaccacccgggaagacgaccctggaagca

SEQ ID NO: 75833 - DNA, 622 bp, Arabidopsis thaliana landsberg
cgtatttttaccgccgatagtatcctattaagtcatgtgttgtcacagtatcgctaaaaaatattttaaattttttatttatgttcttgcggattatatattggtataaattatcttttcaatctttgctcaaaacttatttagatacatgtttagtatctcatactcaataactaaggcttaaatttattttttattgtcgaaaacatgtggctagtagtttggactagtggcatcgggtgtttattgtctaggtttaaacgcataatgcaagttattgacaattttgtttttttggttgtatatagtattatttgaatcttcatcattaagttttgagaccgattttttccctaattcttctatatttttattattaaactttgaaaatcgacccatagaaaaatttacacgctcatcgatatatttgaagattttgtttcttctgaaagatatctgaacgatcaacttatgggaaatgatagagaagacacgagaattcccaaattctttcatgtctgtcaaactcatgtttcatcgaccggtttgttggaaacctctataacattctcaaacaggaaccattgagacagagggtgactcatctacttttacttatact

SEQ ID NO: 75834 - DNA, 183 bp, Arabidopsis thaliana landsberg
ccaatcaagggtcttaattattttacctgtcctcatctacacatatgctttttaccttcataaaatctaccatctacaatacattttgaactaatgaagacattacaccaaccaacctaaaatccattaaaaacatgtttcttattccaaaattaaatatcccatgatcatattaaacacctt

SEQ ID NO: 75835 - DNA, 512 bp, Arabidopsis thaliana landsberg
  unsure (1)..(512): unsure at all n locations
aagagacctcattgaaataaaaaaataataatgaaatactttattttatccactcgccagaactatcagtggatagggagggaacagcccctgtatggcctttatattcaagataacaggagttaggataaggtctaagatccttcctactaggtagcttacgctgcaaagattcagggtcgatgcttatctggagaaaagaaacatagtgtaagaaaaaatacgggaaaaacaaagaagaaaccaaaaactgagatgatacagtactcactctcttctttcgaactcttggacataggtatacatccaaacaacgctcaaaagannnnnnnnnnnnnnnnnnnnnnnnnnnnnnnnttatcaaagatgtaaacctatgcgcagatatatttactgaaacgctcagcggacaaatacccacgaaactacattagagttgaatgagcgaaactgctacataccttgttggaatgaatattggacgatctttctcaaacatcaactcatatgag

SEQ ID NO: 75836 - DNA, 265 bp, Arabidopsis thaliana landsberg
tgtctcgcatttctcgaaaaagtgattcgattgatgggatttggcttgttacttatgtgatcgatgatagtcgatgaaatttatttcgcaaatctttcttcttagaacgtatcgatttgcccctattagcggcctcaccaccccattgtatgttgccgccggaacccgagacacggcctagtggttcatgaactggttccagagcaactagaaattgatgctttagccagaaagaattctatttcaggatgcttgagacctatcc

SEQ ID NO: 75837 - DNA, 572 bp, Arabidopsis thaliana landsberg
  unsure (1)..(572): unsure at all n locations
aaaccctaacatcacttttaagttcaatcatgtttttaaagctatggctttctccttcccaaaatctcggtccttgtaacttttttgttttgctaaccaagaatttctgacccctcaacatattaatccactatgatctttctttggtgcatattattgtgctccataactattaaaacaaatgaagaatcaactatgtagtatgtaactaaaaggtaaaaaccagtttgaagaaattaaaacaataatgtaattaggttctccttatgtttggttacgataccaagtggactgtgtaggatggtgcaaatatgaaatacacatcactgcaaaacaacacgcgcagtctcagtttttagatcatggccctgccagaattttggtggaatccacagctagatacatatgtacacttgtcagttcccctctcgactatgatattttcacattacaattttttatttatttaatcgtatataaataaatatacatcanatagttaaaatattttgaatcgaaattcaaagtaattgcgttatattatttctttgactaatttccgcagtctacag

SEQ ID NO: 75838 - DNA, 432 bp, Arabidopsis thaliana landsberg
aacatgactttgcctttttttgaatgacattcggtgatttgctttttttgttaaaatttactgatttattatttggggggtgtacaaatttgatttaacatgcgttttatccattaacgttttgtcggttccatttgtttttaatgtttagtatttgttattaaatatatattttaactataaaaaattgtaaatttaaaattgtaagtgttcatatataaatggtaaatttatgatattttagaggaaatgaaaaaatccataattgctatttgaaaaaaggcaaaatcagtaatgtaactagaaaaatataatatgtaacagaaaaaaatagtggatgacattttttcgattaaaaggtttcaaatgaaatacatttaaaaccatatctatagtaccttttaatattataaaatgaatgaaaaaataaaa

SEQ ID NO: 75839 - DNA, 495 bp, Arabidopsis thaliana landsberg
tttaaagacatttacctttttattttattcattataattcaaagacactcatatttattattcaatggaggtggttttagagcatggataaaaacttctggtttaattgaccagtaaactgaaaatactccttgaatacgatgaatacggattgaataacaccaaactttaataatgtacttgaattctgaatatttcttatcatggagaattgcttttttcaactcatttgtgaaagcttaagaaattatatatttaaccaagtacgctaattctgatttctttacaacatcgacaatcctttcttggtcaataatgtacttttatttgatcattgattatttcattaacagactacactagctttttaaagtaatgaatgtactagataacaaaccgcgttatgtggggataaaacgattattaattaatttaaatgtatcgttaatattaaagacgcttatcttcgctatcaagtttatgaaattttcatat

SEQ ID NO: 75840 - DNA, 457 bp, Arabidopsis thaliana landsberg
accctagcggttgattgaggagaactcctgctgccccaccgataatcttgaagatgtctcaatagacgcatatcatgataattgtacatatatcggtgtgcgtagatcatacacacagacatagggatacggaacagaaagtggtgaacttactcatattttctagagagtatccgcaacacaaacaaagccccataaatttgttgattttgcaagttgtacttcacccaatccagaagacgtggccattgttctgggtagtcagcataaataattgtcttgagagactctccaagttgtgatctggataagaaaattaggggaaaaaaaaattatggttgttgttgaggcttatagaagatgctattgggaccaaggtaatgagaaaaaatcatcttctatctgccgttttttaatatctagaacctaaggataatggagagacacattcaaagat

SEQ ID NO: 75841 - DNA, 564 bp, Arabidopsis thaliana landsberg
  unsure (1)..(564): unsure at all n locations
gccattttccgctatcccagtttctcttaccggtaatattttaatcaattcattcggcagcctgatagacgaaagctccgatgccacannnnnnnnnnnnnnnnnnnnnnnnnnnnnnnccgtgcaatggaacagccccctggactccaatggtaaacctattcctctgccgttggtttctcacccacgcaatattcaaaactttcttcaaactggcattaccagtcaaaacagtatttctgtagccaacaatacggaatccattcgctaccgggtatcgtattccaatatgcagaaccggggtatcattcccaattcagatttatccagaaatacgctggatattaattcttcgctaaaaataaaccgtaaagtccggctgagtaccaatattgatttaagcaggaatagttccaataaccggccgggcgaagggcagggtacgaatccattgcaatgggcctactatgtttcgccacacattgatataatggatttaaaagattactgggaaccaggattaaaagggatccaacaacgaacacaatacaatggtgaatttaa

SEQ ID NO: 75842 - DNA, 226 bp, Arabidopsis thaliana landsberg
ggatggaaacaccaaaactgtgaggcattacgtgtcacaagacaagacatttaccctttgcctgaccaacatctccatgtccctggccacaccttcatcccactttgtgattgccatatgaaaaccgtaatccatacaagattctctagatttgtttttataggcttcaaaaccagccaccagattcccattgacaggtataacaaagcctatatgcatagttgtt

SEQ ID NO: 75843 - DNA, 584 bp, Arabidopsis thaliana landsberg
gataagaccttgacacagacgatattgccaatgttttgttgttaattaaccttttggtccgctgtgatcgtgggacggaaactcttcgtcccgggaagaaaaagctctctacttggcctgctcatttggagattttccgtgtaagttgattttggtgttgcttcatatgctattgaacttgttgtcttgtatgttgaagtttgtttcttagagaaaattgctattcaactctttcaccatcattctctttggttcttgttttgtttttattttgagtaagatatgcattcatcagtgcaagtatatcagcgcttttgatttcatttttcttttttgatgcaggacgatcaatctttctctgaaaatgatgccttttttgcatggacgttcgaaaaacggcatccgctatggcaaacgcttttgtccttcttctggcctgtattgactcttgcaatttgtttgtttcctgtgtatccacaccgttgcaaactaattgtactctactcatgtgcgggcattcttctgaagatactgtcctacttttcggctagctctattacacaaatactctgtttaatattttt

SEQ ID NO: 75844 - DNA, 424 bp, Arabidopsis thaliana landsberg
  unsure (1)..(424): unsure at all n locations
acttaaactccttactcacacctcctaaaaatcatgaacttgaacacactttcttcactttgttcacttctcctcttacgatgaggctctctgtgtcttgaaaataactatttcttatttgtactgtgacttctaatctccaactactatttttatggtcttgtttagacacccatatacagnggcccatattatattcaataaaatacaatagtagacttcttacactcattcttctattttttcatgcaattatataatgaataccgtttctttttgctgttttaatatgccatgatataacttcaactgttttatattaataatatgctcacattgtgatttttcatctatacactttcaaatattaacttttaatatcaaacactactttatggcattgaccatctttgaataaacattt

SEQ ID NO: 75845 - DNA, 238 bp, Arabidopsis thaliana landsberg
  unsure (1)..(238): unsure at all n locations
tcatttttaaacactctcatcacattcacaaccccaaaaaaaaaaancaaccctctcccacctaactcataaactatataaacaacaattcctttaaacccttctacatgatacataagcaactactactaaaccttattttttttaacgcccacacaaattactattccaagactaacctttacaaaaaacaactatcatccccacatctactcccttaccaagaattcaaatctaa

SEQ ID NO: 75846 - DNA, 316 bp, Arabidopsis thaliana landsberg
  unsure (1)..(316): unsure at all n locations
acttacctctgatcacgaaaaaaaaataatataaacatatttatttatctttaaacactttaaaaaaaaaaaacattgggaccatttaggtttttcatagttaatacnnnnnnnnnnnnnnnnnnnnnnnnnnnnnnttgcataggatactcatcaatatcatcttcaatctttggtgcaagttgtctcctacagaacgaaagaacgaatttgttcctcctaatgttattctaacgaaaatactgcataaaaatatttaaggtgtatacaattatagatntaacaaaaataattgtagttgctttgataaaatata

SEQ ID NO: 75847 - DNA, 591 bp, Arabidopsis thaliana landsberg
gagaatcgcacctatgccatcaatcttgtttcttgtcttttcatgttttggagggttcattctcaaaacaacaaatcaatatcgagtttttatgtttagttatatacactatcattactttcaaaacaaagaaaaaagcctttaacaaaaaaacaagtgggtgtgtataaaagtagatgtcggaccacagttgataagaatcaaataccgaaagccttatggctattattctatgtgataattatgtagatcactcatactcacttacatgatcaagttcaaattattaaaatgtaaaagtcttcatgtaaacaaatcgggccgttctaagcccatataatgaagcctgttatgcacctaaacaaatagggcccttttatcaattagggaaagaattacgggcctaaacagctcagaagttctgtcaattaaactctgtgttttcttagtctaataacttaccgataaaataggttgtaaaaaagtcaacgatagttatcccaaaaatgcaatgttaatatttttgtcaaatcttgattggtgttggaaagtggaccatctattaatccatctttaaatgattgacaggga

SEQ ID NO: 75848 - DNA, 674 bp, Arabidopsis thaliana landsberg
atcttacatccatatgcaatgaacaatattcaccaatacactttttttgcagtgtctcaaattcaatgtttgttgtacattgactgtgagataataaaaatagtaattttatgggtttctagaaataaaataaaatatctaagaaaaaacaatgatagtgacaattaaagaaaacgagttttaaaagagcgtaaattgactctcttctttacaaaaccgcgtttccttttttgtcttggtcttcttcgtcgacctttctctttttctttctcttgtccataaattccagaaactttttttctagacactttagaaacaccaaaccttaaaaagagctctgctttgagatcttagccattaagttctcttgatgatgtctggttcaagattagtctctagactaataataatcttctcaataatctccacatctttcttcaccgttgaatcgattcgattactccccgattcgttcgaagatgcatcttcagatttcatggaagctccagcatatcaaaacggtcttgaatgctctgttttagccaaaaacagactcttgttagcttgtgatccatcagctgttcatatagctatgactctagatccagcttacttgcgtggcacggtatctgcagtacattccatcctcaaacacacttcttgccctgaaaaca

SEQ ID NO: 75849 - DNA, 383 bp, Arabidopsis thaliana landsberg
ttttcagatcggcgtcgggattacgagctaggagtattataatgggccttacatattaaatgggcctatttgttttgggcttagtactttctcatcttattagactcattcacaagatgcagtagatttattatttttagtacgaaagtaatgtttcgtgactttaaatgtgcttcttcagttacgtgtatgaatttgtattgaacaattgaacttccttttattgattattgacaactggtacgtatcaagcttaatcttatattcttatagctaattaaattaactttgtgaacaggctcattagtacacaaatagtccgtgtctcattgttattgaagttgaaatatcatacacatgttctcttttctacaaagatcaaa

SEQ ID NO: 75850 - DNA, 528 bp, Arabidopsis thaliana landsberg
  unsure (1)..(528): unsure at all n locations
cttcatctttgaagaaacaggcatgtccaattcgatgcggtttaaaattaagcatggcttggatctctttcggagtgggaggctacaaaggcactaagatacagcacgtagtacacaatctgaaaaataaacatttgaaaatcggttaagtggattttttaagagttaatacctctccacagtgaagagtgatgtgaagatcattgtctttggcaaattgtaatgcaggcaagaaagtgctcctacaagaacatggaagatttcaaaaccaactcataaagcgaagcaaaagacaaagaagagaactacgaacagtttaccattctccaacaagaagattccctgaaagatcgataccaactaccccgacatctctcatttccaatgcgagcttaacctttcaagataaaaaagaagaatgtcaaatgttttctgcattagtcttttatgtattcagatagcttagcttgttttgaaacactaacagattccattgcggactctgnntgttctctacgatcaatacta

SEQ ID NO: 75851 - DNA, 101 bp, Arabidopsis thaliana landsberg
tagaagtacccgcaaatatataggtatatagatatcttatgagtccttctactgaggacttctggcgagcttcagggcaagtaaagactaagcactgaggg

SEQ ID NO: 75852 - DNA, 381 bp, Arabidopsis thaliana landsberg
gaatataccatgataacacagatctttgcataacctaagaatgttgtaatctttctgttccgtgctcttgcgttggatttttcgcttgattccaagtaaatatcacaattttattccctcctcctattcattctctcgtcatttaatgcctgcttttgtgatttgctatgatggcatacatcattttctcccattaattgattcgaaaaacttttcagaaaccggagccagcatcaattgaagtgggaggtcctagcggtactgcaaacgtgaacgaaggcaatctcagtatcagtgcacagagaagaggggaagcagctataaatgacgacgttgcaatctcggaccttgaaaggctaatggaaggaaaaacgttttcac

SEQ ID NO: 75853 - DNA, 667 bp, Arabidopsis thaliana landsberg
ccgcaatttggcaacaaattaaacacagagtcaatatttgtggaaagtcagacgactccgacctgtatttgttgttccaccaagacttaatacattatacacattagcctattttgaaaccaagtaaagaccgtaagactcaaaaactttttgttgttaagaaacaatattttagtatttgaaaaagttttccaagtcctgaaaagaatgccgtaacttttttctgtttgtcttaaaagttataaaaatatggttactaggcaaaatggtgagagttgaatgatgatcttcttcaccctctaacatattatcttctttaatctttaaatcattctctctagattcctaaatcctaaggctaacataattactagacgaatattcaaatttattcaaaccttgagaaaagaaaagaaaaaaacaatattttggttttggttacaaagaagttttcataaaacaaagtaaacatgtaaccactttcattcatgcattccatagaccatgacacaattttcttaaactaattattacgggcactacaattttaacaacctatagtacatactttaaactcgagttggatttttttttgtgtgtgggccttattaaatggaccatggctgagtaattcatgcaagtggcaatttggtttgagaagtctgat

SEQ ID NO: 75854 - DNA, 604 bp, Arabidopsis thaliana landsberg
gactaaaccgccaatgctgcttggattttctatttatggtatcatgtttattggttgttttttgtggaattcttctttggttttgcgatggggaaacaagaaatgagtctatgagactcaagcgctactccatattaatctgggatgatcattgagactttaattgtgctcctgaacctgcagatcttttgatttcctgcctccaaaccaagcaaccttgtcaagacattcatttctaggtccgaatggtcttaaaagtcaatgggttgcacccaagtcagagataaaggtatagtgctgatcattgctacctttctcacattttctcactctttctttttactcttggtccaattcaatgtttaattatcttagatctgaaggaactgagaaaaatctttattttgtatggaatgataggttcaatatccgcgtaatacagatctgggttctgccgacaattcatggtaagtactcatcttctgttgccttctaagcttttccttaaagaaagcatggctatctcaaactgactccatgtatttctgccagttaattgaaactggacctagcggttcctcagcatcacttaatggtgattctc

SEQ ID NO: 75855 - DNA, 493 bp, Arabidopsis thaliana landsberg
caaagcagtgactcacatcattcgtgtatccggagaaggcagccacgagaattgcaatcacttcaccaattgttcaatagcgcagctggccggtgatttgaagcaaaaccgtgcgctcaaaccacgcactgcaatgtagatgatgctggcaagtgttcttttacgaccccagatgtactcaatcttggaattgacctagtttgggatgaaccagcccgggaaaatgcacacacgtcgtcaccaagggtgaggatgtaatcataaatagcgatcgtctcgacggcaatgagagctgtctgttggcaccatggacacacatccagcggaggcagatgcgactaaccgaggtgacgcgactggaattgaggtcagatcgttgtaagcaataagcccggtcattaactgatcgtgcagcgcagacacaagcaactgaagttcagcagcaggagagtccatgggttgagctaatatagcgcgataatacttataccac

SEQ ID NO: 75856 - DNA, 606 bp, Arabidopsis thaliana landsberg
aagacagaatttgttatatatagatatatgaagtgagggaaatggtacaaagttaaaggagatctgtttgatttttagataataaatgaaaagaaataagaaacaatcaggtttttttctaatgtggagttttagattcagttttgtagaactaagattcactttgttgggtgttctttcttcactcatttctgttattataataataaaaaaatcttataactttctattttccttactaacaagtacttgaagatttagatatatttatagatctggtgttgtaataggtaaaaacttgatttttatgactataaaagtaagttttgggaaacaaattggggagagagtaaggaaggactatgaggtcatatcttctgttttgtgatcatccatcctccattgttgttaatgtctgtgtctctctttttcttctcttctttctcttactttcctttcttatctctacctctctttctctctcatgaattatatcatatcatatatttgatacacacacatgtgatggtaagtgagagtgaataaggtgaaactagatagatttttgagttttcatgaaaatttaacttatatgagtgatagaaa

SEQ ID NO: 75857 - DNA, 138 bp, Arabidopsis thaliana landsberg
gtggattttgatgttggcggccttcaagtgaactgaaaagctagtctcggctttaattcttgttggtgttttactagctaactattcttttaccctaaatttggtacatttgcatttatgctatcttccccctcttgc

SEQ ID NO: 75858 - DNA, 422 bp, Arabidopsis thaliana landsberg
gacgagcccgccccttcgagcatggcctcgaggcgggacgccgcatcggcgacgagcttcgattccgacttcacctcggcgcccgactgctggatcagcaccttcacttcgctcgaagcgctggcggccgactgggcgaggcggcgcacttcgacggcgacgactgcgaaacccttgccggcatcgccggcgcgggctgcctccaccgaggcgttgagggcgagaaggttggtctggaaggcgatgtcgtcgatgaggccgataatgttgctgatcttggccgaggactgggtaatccgctccatcgccatgttggcctcgcccatcacctgcccgccctcttcggccgtgcggggtgacgtggccgaaacctggctcgcctcgcgggcccggccgcgttcttgagcacggtggaagcgagc

SEQ ID NO: 75859 - DNA, 333 bp, Arabidopsis thaliana landsberg
  unsure (1)..(333): unsure at all n locations
ccatctatatttgggcactaaaggggctcccatggcccataataatcttgagtgagacgagatcggcgcggacgcgggcagggtaaaccaacaggaggcttttgacggacgggaacagattgcnnnnnnnnnnnnnnnnnnnnnnnnnnnnnnnnnnnnnnnnnnnnnnnnnnnnnnnnnnnnnnnnnnnnnnnnnnnnnnnnnnnnnnnnnnnnnnnatagtgtaatcacgatatgtaactaaggaggaaaaacagtttttgtatatgcgggcgacactgaaagcaggagacgagcgagggaccaagagcatatactagggtcaaggatggt

SEQ ID NO: 75860 - DNA, 497 bp, Arabidopsis thaliana landsberg
atttgtttgttatctctttatgtgatttggggccttttgcccatttgatgaagagttaagtttgtgaatatgtgtgtttatcagctacataaaatgtaaacagagattaaatgcaattgcctataactagattttttttttccataattgcaaaatcttcttataagttcaagtaaaattgcttttaaagcttgtaccctttttagattactagcccattataatcagctagtcactaccattttgaatttttctatccattgatttcttttcctctttactagcctttctctaaaagttgtttttcaaaaaagctactctatgagaaagattcatgaaatgttaagctttctttttggaaaaaagagatgaatttggatgttgaagccatcattgagggttagctgaagaggaaacattcacatgaaagtgtaagggatcttacaacttctttgattattttcttcctcttctctctctcttttatctctaccatt

SEQ ID NO: 75861 - DNA, 551 bp, Arabidopsis thaliana landsberg
  unsure (1)..(551): unsure at all n locations
tattaatttaatattttgtattcatattaagtaatatcaagtaattttactattaatatataatttaaacttatacataatggagctttatatagataattttattttatactttataaaaataaaataaaatataacaatatatactctactttaatttaatattctatgagataattgatttatcaaaaaaaattgaaacaattaaaaaatgacaagatccatgttttgatgagagagagggtatctcaattgagaaacaattctaagataattacactaaaaattattatattgatttaattttaattttgatggtttaattttaataggtttttggtttacattcggttagttcggttaaattggttttatattctacatataattaatcgggacaaaaagaaataactgggccagncactctgtagtattgtatacaagcccaaagacaaaactgggacactctttggttgttttttttttttaaacgagccactttttttgaccaaaaacaaaactgtgccactttttaaaaagaaaaacgaaac

SEQ ID NO: 75862 - DNA, 587 bp, Arabidopsis thaliana landsberg
gttcatgagttgctgtaaaattcgtcctcaaatgagcgtgattactgatttttgcacccttgcgttggatccgaatttgatagctgtgtagaactttaccaaatgtcacagcatcaatggttttttgtttgatagctttgtatcttcttcaatcgtctagcttcatctgctaaactctgttgtgttgatgtgcagggatgtgaaagagaggttcgagaggccacagattctggcactgaagatcttaagaaagagtgcttgatgcgattgtcatgggcccttgttcattcccgtcaaacggaagatgttcaacgtggaatagccatgcttgaaggtagtagtactcctatcttgttctgtgaaaactatggcctgacatattcgtttggctgcaagacttacactggttttgacacaagaaagctgaagctattcttctgcatcatttaaacagaatattgataaatttgtttttgttggtggctggtcttttcagcatctctggaagcagtgcccctccattggaggaccgagagaagctctatcttcttgctgctgggtattacagaagtgggaattactcaagg

SEQ ID NO: 75863 - DNA, 174 bp, Arabidopsis thaliana landsberg
ataaactgactttgcaccacaaattatcattgaacactcacttgtgggtagtttatatttctttctgcttgactgtaagcaccatgcatggacagaacccgagtggcctagttagctccgacggtcagggtggcacaacatagcatcatttaagattgtctcagttggcggggc

SEQ ID NO: 75864 - DNA, 604 bp, Arabidopsis thaliana landsberg
catacttctttcttaattcaatcgtgacactgctttggattcttcatcttgagtaaggatgttattttcttcatcaatagttggcaaaggatcacgagagaggagattagattttacagattcatacatggtttcatcaagacccattagaaattgatgaagcttatcctcttcgttttccttctgtatttcagctgcagtctttgcgtgttgataatctgagagactttaccatagttttgtaaatcgcctgtcgtatgcttcgattgcgagacccttttgacgaatttgtgagttttgtttttagcctttgaactctttgaccgtttttaacaaaaaaacgtttctttatgtgcatcaaaagttcgtgagaatcatcactatgtgaaagaggatcgtaaagtttcaacaattgtgagctttatccaagacactacaagggcattattagcacaccaatcttcataatcttcggagtcatcatcggatttaggaatagagccgtctgcaaacccgaatttcttttgagcttgaagagccaatcgtatgtttatggaccatctatcatagttaggtctaggaagcagggttgagagataagagt

SEQ ID NO: 75865 - DNA, 550 bp, Arabidopsis thaliana landsberg
cgtggacaaaatgtattaagtatagttgttggttattacataaactaatccaaccggaacaaaagagatatgttttaaacacatacacatgcacctatcacggcaagattagtggtgtagtggagaaaattaaaaaaaaaggaatgtgtgacgaatgcgatttgtcaaaaaagaaaattaaaaaaaagaatcgatttttggcgttctccatctgtaatgtaatgtttctgcaaaaacaagtgacaataaaaactttttcatggatctgagattttctccaaatctatatttgtgattgtttcgtgtagtttttctcttaaagatgtgttctttaagctctctcgtgctcaatcttacgtttccctttggtttgatttcgtgtttttgttattcgatttcacctttaacttttatctaatctcttgattttgattttgtaaattgtaaaaagtttctggtgattctcttagcgaatttgggaaactttatctgtatttttctgtttcgccgcagatttaggatcctgaattaatgaatttgtgggcttcac

SEQ ID NO: 75866 - DNA, 598 bp, Arabidopsis thaliana landsberg
atgcgatgtatttgtttaccactttttcttatactctttttattaattatacataagcctatagactataaattctcttaatgtaatggtaattatgaaaacgtattctctaaaattacagaggtcaacctcttataataataaccgttgaagataaattttaatgttggagatttgactagtatatatgttgtatctgtaaatataggtttagatggacatatgagttgattttttttttatctttaatttgggtctaattgtatagtttatactttaatgttggttatatgtttttttcatccaaaattaattagagattaaaagagtctctctatttgttgatgtacatgcaatatcatcatgttctagagaatttatcattttgtttccataattcatttacatagcaacgatatttcgaataatatcatgagagatatccctggctctaatcactatattttatatttctgtttaaatattttttaaaaaataggataaaacaaaaacataaaatttaaaagttttattggtaataatgaaaacatatggttcttttgggtttaactagaaaaatggtcaaattaagagatcc

SEQ ID NO: 75867 - DNA, 2177 bp, Arabidopsis thaliana landsberg
  unsure (1)..(2177): unsure at all n locations
ttctgtttaagcatagatgtgatatcttctctcattctctgtaagggggattttgcaacttttttggcttcaaaagctacattaatgagttttttggcaccatgttccttcaatagattcaaagccgctgagcaggatatatcttttaacgatagaccctttgttagattattttcctctgacctttcaaagtccttgcccaatagctgcttctcatggaaaagttcagaaaagttttcagtcacaggaaagcatatacaaagacctttttcgtttgagtaaacctttctctcaaggtctaaccatccgaaacttttaagtatgtccttgccgaactttgcatactttctttctagctgtatcacccatggttgagacagagacgtctcagtcttcaaatctgcattgtttttattcgattctagagaaacatcttcaggttggggaggaagatgattttcactgatagtcacagattgaaccaagttgattttcactggttcactaaactttgtcccaaaagcatagcaagcagccccacccccaatgacgataagatcatcaccaagaacgctggctgtacttctaacaaacaactctttgttcataaattccaatctcacactcctccacaatcggtgcttcagatctagcaaagtcaactcttgacaattttgtgagacaggacaacctccaattatgccaatggtatgcttataaacaaacattgagtgtgaaaacctggcatgaggccattttccagaaatcacttcaagtttccaagaacagctttggacatcaaagctgtatagatcattgagtacattttccccattgtatcctccaaacatgaatgactgcgacccatatgcaaccatagcatgcgaatggcgcgcacagggccattgaccttgttgctcaacttctttccactgaaggtcctttgtatccaaaatgtgcatagaggaaactatcttatcattgtaaagcccaccgaatttgtatacttttgtgccaacactggctgctgcatgtcgatgcctgctcaaattcaaagaatttgcatttagaagaaaatttgagataacaattatctgaagggatgtcaatgcaacaagcaacaaaaacatatataataaatccaagaaattaagcaaaatgtgcaataacaggattactagtctcggagggcgtctccgagaagttgaggttgatttaacaaaatatacagtacatagaagttaatcactggaaataggtcaaatacatgtcgaagaaatggacacattaaatgactcataccttggaggaaattcacttccaacacacctctgtgagctccattcacccgtggatatatcgagcctccacacatcattcaaaatgttcatgggatcagaccttcctccaattacaaacatgaaatcgccaaccattgaagctgtgtggccaagtcgtgccgatggagattcattgacagcaatcaactttaaggtgccacatgaaggattgagcaacaaagactcgtttcttcgagcatgtctaccaaaacctccaaacccaccaaacacgataacctctttccggtctgattcatctatcgtacaagctgagtgtccccaaaggtgaagcttctcaacaggttccccaacaatggataatttctcgagtggtataagttctttctgaacccctgccaatgatttagatacggaaactggctatcacgtttaaaatttgaaagttatcctgcaaaccaagtagacataactcaaacactagtataaactaaacaagactataattcaacactacaatgaagactgtaacttgaccaattccattgcattattcaagctatctatctaaaaaatcaacaatcacatagggatttacaaaaattaccaggatacaagtttccgttgttgatacttgagtcatgatttgcagctagattctcgtaattatcatcttcatcaacatcattttcatctggattcttgaaaccattactagccaaagctacactaaacccatcggttcgcttcctattagcatccatcttctcattagcaatatcaacaaggaacttcacatactctggtgacaccataagcttctctgtatcaccaataggaacctncattcgaatggagcatcgtatagctataattacc

SEQ ID NO: 75868 - DNA, 485 bp, Arabidopsis thaliana landsberg
cttttatttatctacattttaagtatctatctattagacattcttcttcttttgtttgtcaatattagacattcgttgtaaacctaaataatgtttcgctttacagagaactttagattaaacgtctacgtacataggatcaaaccaccaaactaaaaaaccaataataaacgttgtccattgacgtagcaaactatagtttattattctgatcattctctcacttccatataacgagagtttctcaatcaaaaaaaagaaaaaaagtttttcaaatttattgaaatgatgtgcttcaaaaaagaacataacgaaaatgttattactttatctagaaaatgatttggagaaagttatatacttctgtatttgacaaaaaaaaaggttatatgcttactgtaccaaaatgaaaacttaaagctcgtatggagttgaagtcttatagtcttgatagactagaaaatgcacctgatgaagtcattggt

SEQ ID NO: 75869 - DNA, 607 bp, Arabidopsis thaliana landsberg
  unsure (1)..(607): unsure at all n locations
attgaggatgatcagcaggttggttttggaaacgcccgcgtggttcatggcctcaaaagccattccgccggtcagtgcaccgtcgccgatcacagcgatatgttggcggctggcatcccccatttccgcatcggcgatggccatcccgagtgcggccgaaatggaagtggaagaatggcccacgccaaatgtatcgtacccgctttctgcccggcgcgggaaaccgctcaatcctttatactggcggttcgtgtaaaattgttccctcctgcctgtaagtatcttatggccataagcctggtgtcccacatcccagaccaattggtcatcgggcgtgttaaagacataatgcaaagccaccgtcaactccaccacgcccaggctggcgccgaaatggccgccatggacgctgacgatatcaataatatactgccttaattcatcacataccctgttgagttgagaacgatttaacttccttaaatcttccggccatgtaatctgatcaaagcatgaacccggtactattttcattggaatggngtacttttaatccttcaaagatatacttttccctgatgtcagncaaacctacttcatgctacat

SEQ ID NO: 75870 - DNA, 344 bp, Arabidopsis thaliana landsberg
  unsure (1)..(344): unsure at all n locations
gggctttcgtcttaatttactactgactgtctgaaacaccataaagannnnnnnnnnnnnnnnnnnnnacagactgtgcaaaaaactattacacctatgaaaaacatcatatcatcgtggagaataaactagagaatataatcttttctgaagttgaagaccaccttaagtaacacagagatgttgggtggtataatgcaggaagacatcctgaattttggatagcaacaacatattgttaacatcgacacaaccgcggaaactgagactctcacttcagcctgtaattagagtagccaccggaatagccaaagggaaatacttacgttttgtactgcccataa

SEQ ID NO: 75871 - DNA, 556 bp, Arabidopsis thaliana landsberg
  unsure (1)..(556): unsure at all n locations
gccggccggcgcagcgtcatcggcaggaggacgccggagagcaggtcaggggcagtgtggccgtgaagaccagcggcgcgtaggcgtcctcgctcttcaggcgcagcgccagggcgtaggannnnnnnnnnnnnnnnnnnnnnnnnnnnnnnnnnnnnnnnnnnnnnnnnnnnacgccgagtggatgcaggctgagcccgaggggcagcgagcagaggacgatgatcagggcctggatgagcagggtgacgacatcccgggcggccctgccgagcagcatcgacagccggctgagcggcgtgacccgcatccgctcgacgatgccgtggcgcaggtccgagatcaggccgaagccgacgctggaggcgctgaagaggccgagctggaccaggagcccggtgacaagacgttgtaggccccgccgggcgggaagccgggcatggccgcgatcgacttcagcagcggggcgagaggatcangtagagcagcggctgcacgacctggatcacgacccagcggggtttcgcaggagagcagcatgtaccggctgaagacc

SEQ ID NO: 75872 - DNA, 356 bp, Arabidopsis thaliana landsberg
  unsure (1)..(356): unsure at all n locations
agacttccacatttaacgaccaattctcgacacgagaaattatttatccaggaggccaagagctattataaagagtttggaagatatttcgactgatcatacaaaaaaatgttataagatatttgcttgtttttttttaaaaaaattactcgcatatgaaccaatcatatagtcactctcaatgtgtcaaaagtaaatgctagttttttttcacaaaaaaatgctaatataatctccaaaagaacgtttaaaacgaatctaaaaatcagtagaaaaactcaatctccaaacgaatgctaattttctctggttttctgtttgattntgataccaacaaacttactgtcatttaacat

SEQ ID NO: 75873 - DNA, 597 bp, Arabidopsis thaliana landsberg
  unsure (1)..(597): unsure at all n locations
cagatacgttcaccaaaaggcattagaaaacgattaatatcaatccattgttcaactggttctttggcttctaatgctttcaatgtgtgtgccggctgactggtttgtataaatccccatcgattgaccaccctgtgcacatggatatctacactaatagccgcttgtcctgctgctactcccaatgccagattcgcacattttggccctacacctttcatttctgttaacttatcgaaatcagcaggtaattcaccattgtatcgttcaattgctgtccgtgcaatgcctaacatcgtataagccttttgttccggatatgaactgccaaacaataattcactcagtctttcaggacttagttttagtatttcctgaggtatccgggcaatttcaaaaagccttaaggagacaggaatagtagtttcatcaaatgtccggattgagataatacaggaaatcagttgctcaaatgagaagtgtagcctctctcagccaattcaaacatggctgctttgggaaaggcttantagcgtcctcatacgggcaagcattaacgtagtcaaaagtgggctcatagcagatttttatatataa

SEQ ID NO: 75874 - DNA, 404 bp, Arabidopsis thaliana landsberg
taagcgctgactccaccagaactgttagaaccaaaacatgacctttttctaaagctaactccacaaacctatcaagaggattatattctttacccacacgtgctataattcctttgaattgaaacctgttaccccgttggactctcctcacccaagaaatgaggtgagccatacatcccttataacacttcaggcgctttccctaactataaaattgcctgtaggtcaaaagaggaagaactttacttacgtcacatgttttttaccgccaatggatttaaaaaactgtgaacctttgaaaaaactcttagaagactttggatacatttttaagagcattttgcaagcttcgtaaagagggctaaaacactcttaaatcacttttaaaatctattacaatcatt

SEQ ID NO: 75875 - DNA, 488 bp, Arabidopsis thaliana landsberg
tagtccttcttgtgatggattggttggatttgggaagtaaggggttgagtgaattatcgtttttttgatattgtaggttccgtcgggtagatagatgatcttctggctgctcagtggtgccttgaagtcggcggcgagcccatcgacgacggcgtcgtatgccgcaatgagcgcactggagtcgtcggctacgccgtcgccgaccgccccaaacagcgccttgacgtcgaggacaccgccgacggttgggcttgtggcgaagacgtcgtgcgggtagacgatgtgggcggtcgtcggcccgtccgtcggatacgttccgagtgatcgcgtcgacgcggccggcccgttggcgtctggccgtggcggctcgttggatatctggccggtcgccgcgacaactgtggcgcccgctgccaatcccaggaatgttcttctgttcacagcctgcatgaatcctccgatgatggaatttgtgctggcagctgtga

SEQ ID NO: 75876 - DNA, 557 bp, Arabidopsis thaliana landsberg
  unsure (1)..(557): unsure at all n locations
cnnnnnnnnnnnnnnnnnnnnnnnnnnnnnnnnnnnnnnnnnnnnnnnnnnnnnnnnnnnnnnnnnnnnnnnnnnnnnnnnnaaacattcggccactcagtcctgacgcaattcgaattgcgtttcaggcaaatacggatgccatttatcgacaccctcgacaaggcgcatgacgctgtcaggaaaatcaatgaagcatgtgccaaggacggaaaaaagccgattgtcttttcgacattagtcaaagctgatctatcccatgtcatccgccaatcaaaaggcatgcacatggacttgatccagacatttgtggaaccgcttgagcaggaactgggcgtcaaatcgacccatacgatcggccgcagccacaatatcgccgattcggaggaatatcagagtcgcattgaagcgatcaatttttcattggcacacgatgacggccagtccaacctgaacctagaagccgccgatgttatcctggttggcgtgttccgctccggcaaaacgcccaccagcctttatctggccatgcaatatggcgtcagggcggcaaacta

SEQ ID NO: 75877 - DNA, 692 bp, Arabidopsis thaliana landsberg
ctgcaactcaggactttattattgactggactctcctatactcggaattgcaggtggagcctcaattttttcgttaagagctattaccaatatatcgatccttctgatgttcacagtttgacttgtggttagactcttcctctaaagagttcaactgctttgtcccttccgaaagtggtttacatggggctggtaggtctctggttgtgacccccggaggaaccctggctctaaatagcaagactcggttttgttccgtttgatttctagttgggaaagcataagtagctgcaacacataagattctatttcaccagtgcccggggcgagtagttcccgttgcaacaaagtaagtcgtttttgccacttctaaggtttattctagactcgatctcttcctgtagctcatgaactctcattcagaaagatttatatcatacagcagtgagcctttttgatcccaaatacatatagcacgaccgggttggttcttcttttgtaaatcgcgtcaataaataagggtgaagaatctcctgttgcgtgatatcagatatcacatggaggaagacagctgtggcgcccacctgcgctggtccgcgtctgactactgttccctaacttacattccattctcaggatttgctttcccttacaaaactatcataaaactgtacaagcataaatagtgaaag

SEQ ID NO: 75878 - DNA, 586 bp, Arabidopsis thaliana landsberg
acagatacttccgctgcccacagaatggattttcaggactatgcatatgaatataattcatatggtcctgatacactgggcaaaatagaacctaaattaacaggtggcttttcttttaatctcaggtataaaaactttagcctctttgctcagatggatggtcgctggggcggttatatctattctgaatcctggacctatgcaatgggtaatggcaccccgctggcatccctgcaatatagggatcaggcacatggtggttccctacgtacggatgtatatggcaaccaggtttataatggggccgtaccggacgccgtttttgctgcgggagaaaagggcaataccccaactgggcaaaatgtagatataggaggcatgacgtttaaagaggcttataacaaaggatatgtagcatcttggtatgcacccgcctactatgatggaggtaatagtgcaggtacttatgattgggagaatggaattaactggaatggtgccattgccgaagagagctggctgatgcttcgggaaataacgctagggtataacgttcccgccaagattttaagaagaccatgttttc

SEQ ID NO: 75879 - DNA, 581 bp, Arabidopsis thaliana landsberg
aaagaacatagaaacgttgaagagaaaaacaactgaagaatgggggcaaagcgctttaaacttgtaaaaacaagtaaaaggattggcgaaagtaagaaagcacaccactttaaaactaacattaagctttggatgatgatgattcttcttcgtcatcttcatcaatgtcccaacttaaatcttcatcttcctctgcagcactcagacgtttacgcagctcagctctgtttggactaccaccagaccgactcgtttccttaccatctatgctactcatatcctcgatctcgtcccatcccaaatcctcttcagatggctgttgcgttgatgaagaagcagccacatctggtttagctgagtcttgggatggagcagcctcatcagattttggtttgacagaatcttggattggagcctcatcagatgttggtttgacagaatcttggattggagcctcatcagacgcaggaggagcagcatcaacaaatgatttttcttctggaacttcctcactatcagtctccttcttttcctcagaatctttatctgtcttcaaaccaacattgctcacttcagtcact

SEQ ID NO: 75880 - DNA, 212 bp, Arabidopsis thaliana landsberg
cttaataatcaaatttatacttttctttcatttacgttttcgttacactattacgtatatgtaattatgtattatataagcaaaacaaatacgtcacacgggcacaggaagattctttccatgatagaaaaaatactactaatgtaaacagtatacgtacgtgtgtgtgtactaaaggatattaaatgtgggagattgatatctttattttt

SEQ ID NO: 75881 - DNA, 625 bp, Arabidopsis thaliana landsberg
tctttacaacacaagttttaaaataaaatataacacttatgagaaaaaaaaaactttttaatgaatcactttagttcatgtcttattttctatttaactccactcataggatgaagctttccttttttcttgagtttgaaaatgttcttgaaagttttatcaactcgaaatccatctcctttgagtttttttgttttgttttgttgaacccctagttaaggttttgagtgagcacacataaacctttttgagtattgctttagatccgatgaagaataaatcatacaatcaacaatagtataagagcacacataaaaacccaagatattatcattagtgtactccatctaaatcaatgttattaggttttataataagagtttttcatatatataaatatatatatgggttcatatatataggtctatatatatgttgtgtaaaataatggagccaaagctgattattggtgcagccacattcaatcttttatgaactaaaacaaatataaattttttctttttggttcctcgcattttaataaaactctttaatgaactacttcattccatgtcttattttctattttaactcccacaattaccgggattcgacttccacttta

SEQ ID NO: 75882 - DNA, 167 bp, Arabidopsis thaliana landsberg
gcaagcttcgattcccataaaacccttatgtcttcctttaccgatgccctttgtctgcagatagcttaactatggtcgcatcatcggatatcagatatcaaggagaaccagctcctacgcactacaatagatttcaggagtggactcgattttcagctttaagagcg

SEQ ID NO: 75883 - DNA, 546 bp, Arabidopsis thaliana landsberg
tgagaggaggataatggaggaggtaacattccatgactatcttttacctgaagatggccgaggaacaccacccgatattgaacctgttgaggattgatgatgatgagaatgttgttgatgagattgatgttgatgatatccttgttgagatggatgagtatgaggtacaggagggagatagccttgatatggaatgcctgcctgagaatgttgatgaggttgatgttgatgaccaacttgaccacccgagtgatgatattgaggaggaacgattgaggatggatgttgatgataatattgtcctcctcctgatgacgaggaatgatgttgttgatattgaattggcgtataatgaggatgcgattgttgttgatgctggccatgataatatgatgcttgggtcgacgagtgagctgatttactatctcgtgatgatgaagatgatgataaccgtttatcttccataggtaatgcaccaccatgaatattggttggcgttcccccatgaccatgaagaggatattgagctgaggaatgatgggagga

SEQ ID NO: 75884 - DNA, 555 bp, Arabidopsis thaliana landsberg
ttctctgcgtccggcgcatctcatcctcaatcctgtgagcaattcaatcagtatacctttctttcttcgcctgttttgagggagttcgtactccttgatcttgtctgcgatgttcaccatcttgtcggttgatgaggctccacgcctgaacgactccttaggcctgttttgtgtctgaaattccctgtctcaggtaggtttaacaggacagctatcgtagagactgtccaatctgctcacaaaactctcaatcacacgactctcgcgaatatcaatgccagcgagaaagttgttcgcccgccaaaaccttatgtaagccaaaaaaggcggcagttccggcgggcggtcgattccaccaagcggggcattatcgcctcaccgctcaagtcaccgcctacagccatctcagctctttccttctatcaacctcatcgcgaagctttaccattgacatcaaccgctacaatggacgcaacaacctcacccagcaatgccctcgccgaaaccgagaacccagtctcccacattgaaggaggcgattcagcccttcaaccc

SEQ ID NO: 75885 - DNA, 129 bp, Arabidopsis thaliana landsberg
aaatcgcccctcgcccgggtgtctcgacgttcgcacagtcttgtccgtcgtattaagcatcgaggagggtcaaccgccgtcgcaagtctggcgactgtcctgcattctatcatctagcgactgcaaaag

SEQ ID NO: 75886 - DNA, 246 bp, Arabidopsis thaliana landsberg
cgatcaaaaggctgcccttccactaacacaggggtgtcacaagcacgggaaagatgagggaacatttgccacacctcgaggtcaaaagaccgaaagtctcatgtatcttttggacgcgcgtgggcggatcggattcgtactaaaaattagaatcaaaccagctttaaccctttcgaaccacaaaagatttctgttctggtagagctctaattaggacaccgggctctctttcttttcaaatgctct

SEQ ID NO: 75887 - DNA, 673 bp, Arabidopsis thaliana landsberg
  unsure (1)..(673): unsure at all n locations
nnnnnnnnnnnnnnnnnnnnnnnnnnnnnnnnnnnnnnnnnnnnnnnnnnnnnnnnnnnnnnnnnnnnnnnnnnnnnnnnnnnnnnnnnnnnnnnnnnnnnnnnnnnnnnnnnnnnnnnnnnnnnnnnnnnnnnnnnnnnnnnnnnnnnnnnnnnnnnnnnnnnnnnnnnnnnnnnnnnnnnnnnnnnnnnnnnnnnnnnnnnnnnnnnnnnnnnnnnnnnnnnnnnnnnnnnnnnnnnnnnnnnnnnnnnnnnnnnnnnnnnnnnnnnnnnnnnnnnnnnnntaggaatgtctgaacctcagcgaacaaacagaacctagaacaagatctctgaaacaggacaaactaagaaacagtggagaaagtacaggtcctagtgatattcaaaggccgccnnnnnnnnnnnnnnnnnnnnnnnnnnnnnnnnnnnnnnnnnnnnnnnnnnnnnnnnnnnnnnnnnnnnnnnnnnnnnnnnnnnnnnnnnnnnnnnnnnnnnnnnnnnnnnnnnnnnnnnnnnnnnnnnnnnnnnnnnnnnnnnnnnnnnnnnnnnnnnnnnnnnnnnnnnnnnnnnnnnnnnnnnnnnnnnnnnnnnnnnnnnnnnnnnnnnnnnnnnnnnnnnnnnnnnnnnnnnnnnnnnnnnnnnnnnnnnnnnnnnnnnnnnnnnnnnnnnnn

SEQ ID NO: 75888 - DNA, 615 bp, Arabidopsis thaliana landsberg
  unsure (1)..(615): unsure at all n locations
ctcgatattccaataataaaattttgcagatcaattctattatcttgaatggaatatacatttgcattagtcccgctctgctttatatttgtaacggctctgctctcccattcaaacccaaagagtggattgcattttttggtgacccaaaatccatggggaaccgaacaaggcttatggctattattggttatcactacaggacgatgacaagtttaaaatattttggccactctcatagtggaaaatattgttttttttaacagcactggtttttatttcatttttgtcaaatgattgcatggtgattaacacttttctttaaacaatcttttgaatggattctcttattgtaaatcacattttcttgtgttaataataagttacttgtcattagccatcatttataaaagaagtaaatcaaagatattaactctgtaaaaaaaacaaagaaaaaagatattaactgtttttagaaactacactgttacagatttaagagaaacttatttctttaccactcaaatatgtaaaaatgaaccaaattntagaaaagaaaactcaaacgaaagcagtgcttttaaagcaccactattctttaatagaaaagaaaat

SEQ ID NO: 75889 - DNA, 271 bp, Arabidopsis thaliana landsberg
aaacaaccaaaatcaaaattgccttccttcatccattttctcaccactccatgcttgttttattgaaaccccgaccgttgcagatagggccggccattgatgagtattgggagaaggacgcagggtgagattctttggaatggggagactggggctatgaaatgcactcggccagatgaacttgacactatgctacggagctgtaggaaccgatggtatactcccacgaacagctggtacgaacttaaacatatgggccccatgtacctta

SEQ ID NO: 75890 - DNA, 140 bp, Arabidopsis thaliana landsberg
tttcttccctgatatgaatattcttgatcggagtttctctgttgaatatattttccttttggtggatttactacttaggagcgggcgaaacggccccgtgactcatcaccaaccttctggtcttattcctacgactatcc

SEQ ID NO: 75891 - DNA, 533 bp, Arabidopsis thaliana landsberg
ctaagaaacttttactttgttagtaaatttcattaaagtatatttgagtaccaatgtaccatccattaattgcttccacaagacaagaggagcaattatgaaaggctctagcggagatgagagtacgataacaaagataatgtccctattaagttgatacaatgtgaaggtaggtagttttagaacaattcttatggttattcttgtatataattttcttttaaaaaaaattgtaatgattccaaatttttggtgtatagggagggtcataaatttttctcaagataatagacgattagaaaaaaacagggcatatcagaaatgataataactagtaataaatatgcaagcttgaccggacatgtaaaatatactgataccatttcgtaacccacatgaccacattcaaatatgacaatgcgtgcgtgaattttaaaggtaatcacataattgcatatgacatcgtcagctccaatgaaggaaattggaaggaacaacaacatctttctcttgtacaaagaggtcgtctgaat

SEQ ID NO: 75892 - DNA, 574 bp, Arabidopsis thaliana landsberg
tcgtcggattcgatcagggtgaggctgtatttctgcgtgccttagacctttgacagggcagaggcggccatccaggcggaggtggcgccgccgaccactacaatgttacgaatactgcctgatgtcatactgtcctcatatgcttacaaaggtgattatgaccgccggatggacgatgtcaattcgacggtatatcgtataaaatatttgacaatcggttggtgtcgtgcggatatgtccgacaaaagaaatcgggcctgggggtagtagcatgtgggcgatatcgaagatagctgtcattggcctgtccgccagtctgttgtgcgcagggggaatggcctcggcggagacggtgccggtaaaggtgccgggtacggcaatgccctggatcatcaagaagaaaaaccccgacctgccctatggcaaggtggatggtacggcgccggtggtagcgcctctgaaactgacagccggtatgccattgcagatcaccgcgacaggttcaaccactacggtggccggtggcagcgcgtttgacccaagcggtcagcaggaattcatctgcgacgatcat

SEQ ID NO: 75893 - DNA, 535 bp, Arabidopsis thaliana landsberg
  unsure (1)..(535): unsure at all n locations
gacatattggaaaggaaaggaatacatacaccaaggtcacaggccttttcacattgaccggaggcaatgcctgcagttccagccgacggttaagcaattagcggtctgttgcatggttatcgattttgcctactttcaacgtacgcaaatggccttgcaagcttcctggcagatcttcagcttctcgccggtaagggtgccgcaggtacgcttggcgagatggccgtcctcgaaagagggagcagccatggccagggcgacaaggagaggggcaacgaagagcttgaactgcatcttgaaggttggatgggattgacgaggaagctgaagcttgcaagtgatgaagattgtctggatgcggggggaactgcgctggatgatttcttcagcagagggtgaagtaaacgggcctatatatacctttttgagtgcatattgtgcccctaatctttgctaccgcgacttttctccgtgatacttncgagaggactcgctcgctttgtggagctaggaatatctcangatactaagtcgc

SEQ ID NO: 75894 - DNA, 426 bp, Arabidopsis thaliana landsberg
cgttgctcaatactttttctttatttaaagttttcagaaaatgttactattttataatataaaccaatatcttccctagtccttagacaagaatggtacgtaacacttaataaatttggttttgtctattggcagttgtgctgccatatgctgctgttgtgtcctggatgcatgcttctgagacttcggaattaacgatttcatgcaaattattgatgtaataaaagagtatttgatgctagttatgttacctactctctgtttggaatatactctgtggatggttgttactatgttttatgtaagtgattatatatatatatatatattccgttgaattgggttgtcgaatagatccatcgatgattgaaccatcagtcagtaacgaaaggatttgtttcagtttctcacgcattgattattatt

SEQ ID NO: 75895 - DNA, 462 bp, Arabidopsis thaliana landsberg
ttttggatgggacaacaccaattgatattcgaaagggaataggatgcatcgctatatatgttcaacagagacttagtcacaccttactctttttgatgcgtcacaaaaatatgtctagaggctctagttgcccactggatccttgctgatacttggcatggattgagaactgactcacttgcttcttggacaggacgcatgatgcatctgttctcgatcttaagggttgtgaactcttaggttgatcgcggtcatgatggcacctttgtcttagatggcaactacatactacctgagggacgctgtacaatacttataaggtttcgcttaggcaggctccaagcagagctgatgcgatcgacctgtgatgagtgccgcgtgaaccaccacgattgtctcattgacctgatgagcgccggcgcgttccatcaaatgatatggagcatcgactcctctaacaga

SEQ ID NO: 75896 - DNA, 572 bp, Arabidopsis thaliana landsberg
  unsure (1)..(572): unsure at all n locations
ccaatatagctttatcaagtaacgttgtcttttaataaggattgaagaaagatattattgtttctcggttcttacattttaaaattatgaacaaagaattcaagtatattttaaagtttttttttgtcgtccaaggattatgaacatacaaatatatcacaccttagatgattgtcaaaaactcaaaatttaaaaggtaacatgtcaatctggtgatatatttgtaacattaaatataacagcaatatatagattattataacattcacattgtaactcttaaacaaagagatcatttatgtttccaatttccactgagattttttcgtaagttgtgacaactgcatattttcgaacaatacattattgcataacgattaaggaatcggtcactcgtgtcttcataatccagtactgaaatattccgcattggcttaatatttgaaaaagacctaactnttttttattatttcttattggttaataaatttagttcgggaagcttatgttttactattcaatcttactttgtttgataaaatttcagatttttaattttactaatgtttttg

SEQ ID NO: 75897 - DNA, 558 bp, Arabidopsis thaliana landsberg
  unsure (1)..(558): unsure at all n locations
ggatcaacaagacgaatgctttcggtattaactatgccgataactggtttgtagattgtaacggtttctgcaagctatttcttgggcaacggcaataacgcaacgctggagaatgtggccaggaaatatttcctggatggcattcccaattacaaccaggtaacggaaggcagcagccgcaacaacaaccatcgcttcaatatgcggctggagtatgccatcgattcatcgaaccagctgatctttactcccagcctcagtttccaggataaccgctcgctgcgcaatgtgaatacttcattcatcgatcccggtacgctggctactaccagccgaacagtaaataacaacaacagcacacgctcgggcaataacctgaacaacaatattctctggcgtcactccttcccaaagaaaggacgcactttatccatcaacctgaatacatcctataaccagcagaatggtgatgtgtatacggacctgttcgataccactttcttaagtggaggcggatttatcgattctgntttccagcggtatacagaccaacatacc

SEQ ID NO: 75898 - DNA, 596 bp, Arabidopsis thaliana landsberg
cataaattcaatcccttttaaaatgaaaacctattcgattttataagagaatttgttaaaaatgtctattagaaacattttaatgagacaaatgtgcttaaactaacgtaaaagaaatatatagattaatatgtatataaatttatagatatatctttaaattacatcgatctttatatcaaaagtgagtcacacgacaataaagtgaatacaattattaacatattatatgatattttcaaatatgatttgtaccgtaatattgtttttcaaatttaaattactcaattaagttagtctctctgaatttaagtggtgaatgcatgaagggatgaacaatgtgaacattatttgaaaatctgtagttcatagagaatcgagctagaatgcaaatagtaactcttatccttatcaattctcaattcataattagttgaaattttcatttgctaatatttattctaatgcatataaaataaagaaatgtacaattacatgattttcacatgttgacaaaaaaacatgactttgaaatgtttactgataaaaagaatactaactttgtttagagcgacacatacaacgtaactggatgc

SEQ ID NO: 75899 - DNA, 575 bp, Arabidopsis thaliana landsberg
  unsure (1)..(575): unsure at all n locations
gtttttggtgtaaactgttctttaattatgtgttctagggatcacttctttgccattagcttccattatcttctgttgatttcgctttctgtgattgaaatctgcaggcaggattgttatcggactatatggcacnnnnnnnnnnnnnnnnnnnnnnatgtctttggcatcttgaatgcaaatctcgggatttggttaattgttttaaatagtttctaatgtaagatttctttactttttgcagaaaatttcagggctttatgcacaggggagaagggtaaaacctcaagcggaaagcctttacattataagggaacaccatttcatcgtataatatctggatttgtaatccaaggaggagacattatccatggtgatggaaaaagtagtgactcaatctatggtggaacctttcctgacgaaaatttcaagatacagcattcacacgcaggtgcgcatatacatactttaccaatttatgaatgttgaagaattgttccggaaaatggttttagagcattttgcgcaagcaatttacgtatacttgttgttcataggaaaatgaaattttgtat

SEQ ID NO: 75900 - DNA, 545 bp, Arabidopsis thaliana landsberg
gacgacaaaacaactgttgtatcccatgaaaacgtggtcagaagtgatttttcttttttcatggctaagggatccacatgggtcgttccagcctgcgagagtgaaatcaaatctcgtgaaggaactgtctttgttctcgaagttgccacaacactttaccgagaaacgtttcgcactgtcttcatagtccttgaatgagacaactacagataacgcaagtccaacaaagttaatatcacaccagtgcggaggcaatgggatttctagtgaacgtcctagtctttggtggcagaaccaactcggtatttcagtggccgggtaacagataccaaccagaggctccggaacaaatccctgcaaaagacagaaaatgagcttccgttctagttttgatggtgaaagggagaaggataaaaaaatacccgataataacgttttgcagaagcattagccattaactgactcttgattcgagcatgacccacgagactcgcttgtgcgtcttggttcagcttgtaacagttgcttaagatgaacatagaatg

SEQ ID NO: 75901 - DNA, 127 bp, Arabidopsis thaliana landsberg
caaacgggcaataccttaggatagataccagtatctctattattatttctatcatgcattccatcaaacaccttgggggttgttgaattattggattcatattctccttcaccacaatataactatc

SEQ ID NO: 75902 - DNA, 122 bp, Arabidopsis thaliana landsberg
ggcactcacagccctatagaatgtcacaataagttaactttaatacacttccaagaataggatatggatatcatcacaatccctacccaaacccacaataaacttacatacctatcatttat

SEQ ID NO: 75903 - DNA, 552 bp, Arabidopsis thaliana landsberg
  unsure (1)..(552): unsure at all n locations
cgtttgatgtgtaatcttnnnnnnnnnnnnnnnnnnnnnnnnnnnnnnnnnnnnnnnnnnnnnnnnnnnnnnnnnnnnnnnnnnnnnnnnnnnnnnnnnnnnnnnnnnnnnnnnnnnnnnnnnnnnnnnnnnnnnnnnnnnnnnnnnnnnnnnnnnnnnnnnnnnnnnnnnnnnnnnnnnnnnnnnnnnnnnnnnnnnnnnnnnnnnnnnnnnnnnnnnnnnnnnnnnnnnnnnnnnnnnnnnnnnnnnnnnncccgttactgtcgatgagcagctcgagaaattcgctgcggaaaacgagactcttaaagctgattcgtcttccacacaagacattctccaaaagtaagtctttttgcttcaagttttgagtgagactgtgagagaatcttgctatgctttagtacatagccttagccttagatactgtattggtcgaggtctacttgaagatgttgttgtgtggttgatttgcaggaggatatctgaagttagagataaggaaagacgtaaaactttagcagagatcatttactgtttagtggtacacag

SEQ ID NO: 75904 - DNA, 441 bp, Arabidopsis thaliana landsberg
gagggtgcttccttaatctgcaagctgaaatcggtcaacaagcggatgtagacgctggccaagctagtgcagacttgtctggtgacggcagtgtcctgttgcatcaggtggccgaagggggctgattcaaggtcggtgaccagtttgcccaaggccatcagcgtttcaagctgcttggctttctgcagatggcagagattttccacctccagcagtcgtgcatgaatgtccttgtacagggcgtccagtttgtcttgcagttcttgttctgtcatgcgtgttcagtgatttgaaaattgaatcaaaagttcgcaaattctgtccacctggtcaagttccaggtctgggtagataggcaggcacagcacttcgttggccgccttgttggcgctaggcagattttgcgggctcgcagaatgcagcccgcgtacatgggcatgc

SEQ ID NO: 75905 - DNA, 562 bp, Arabidopsis thaliana landsberg
  unsure (1)..(562): unsure at all n locations
ttgaaaaccccaaccaaaatcaaaatggacattattaaaaaccatatcatgactttcataacgacacaaagcaacaattatgaaatgagagtggacaatatttggattatttttttcctaagacatgatccgaagcgggtttgcaatttgatggtttctaagttgttctgaattattgaatgatgtgtgtgtgtttttcatattgaaatcgtaggttctccattacgatgttnnnnnnnnnnnnnnnnnngaaattggaatcgatattgagaaagggaaagaagtttatatttaaaaatgttgatgaatcaaggcgccaagaatcatttatatgtacatgaaatttcaacaaatgttagtagctgatgtgttgagtgtaatggtctgcttgagtgttcacacaaggaggctggaaatctatatctcaccccattgcccgaaatttcagagatgatcattctacagtcaagaaaaaacgcaagattgattatgttattcatgatctacaacaaaatatataaatacattgtaaattttgtgaaactatatttaaaaagatctt

SEQ ID NO: 75906 - DNA, 565 bp, Arabidopsis thaliana landsberg
ttgtgacggtttctatgaattggccttggggatcccaaatgctatggcagacacatgcttcttttaacgactagaggataactattatccgcacggagttttttgacatccaagttagggaaactctcatatcagttgtgcagttcgttgagcagtgaatctcagaaatggggcaacaaactatctattgctgagatgcaggcgaaacacaacggcaacaactcatggctcgtatgatggccgaaaaagataacaagctttgtttgttgctctacacaagaccccgtgacaaagaactagataatgctactgttgacactaaccccgatgatgacgagactgcatttcggctgctataagtgtcctctgttcctaattcataggaatcgggtcactcatttaaacgaacaagttgactagatatcgatggagtttggaagattaatgttgaaagcttggagcatcgccgggggatgacagctcaagaggcgcttcgccattttccaatgacagctcttgatagaacctggatgttgtaagacagcaagatgaccatgaaaggtaa

SEQ ID NO: 75907 - DNA, 317 bp, Arabidopsis thaliana landsberg
ccacatttccaactattcaaaaaagtgatgtttgggctagacactagagtctcactaaaccattgtaatctacaaatcttgaagaactaaacatgttcactacttgtctttcagcatttacaatctctctaaagcattgcgaccagtaccacacaagttgatcaaatccatgagaacagagtacaagacatccagagacaaatgacccaacaacttcctactctccgacactccttccctctcctctgtgcatccattctccatcactagccaccacgagatgcatccttttgcgtcttccgggtttacatgcgcca

SEQ ID NO: 75908 - DNA, 552 bp, Arabidopsis thaliana landsberg
acggatgctatcgggagaaggcgaacgacgaggaggcaatattattattttttatcagaggaggcaatattgtgtaagacgtaattacatccaacggctaagattaagtctatcattataatgcaatgcttacatgtacaatgatgttgtaatacatccttaatatgataatctagttacacacatttaaattgtcatttactctcttttttttttctttcaaacacgttccacttttcaaaaacatgttacatataggttgtgaatagttggtccatatgatgcggataagatcatataaacaaatattttggtaacaaaacatcggactgtaatatatatagagtagacaatagtatgcactacaacataatatttatgttggtataaattttatgatggtacagtataaaactttttgaaaagttggaacaagaaaaaacggaccaataagaattttttaatgctataatttttttttcacatagattataaataaataaaatcgaccttactaactttgatcagtcttgaaaaaatagataaacaact

SEQ ID NO: 75909 - DNA, 617 bp, Arabidopsis thaliana landsberg
caagcctgtagatttggatgatcatttaaataaacataaactttgtctagtgatttgaaaaaatcgaataatatgaacaaataaaaacttttagaagaaaacgtatgagtatcattcattaatattaccaaactaataacatgaattagaagatttcagtcaactttgtgtttgtgtcttatatatgttctaatattaaaaagatgtaattatttcttccataatacattatgaaatcagaaatgaggtttgctctaggatgtaggtacactaaatgtgacaggtcaattatacgacgcaaatcaatttaggtaggtgattgaatacatgatttagcattattgactagctaggatcgggaagctagtaaattaaacccaattaacagaaactctttatcttgttaaattttatttttctaaacctggaatctaatcagtcagtggttactggatcagtgattgtctagtaatacattcatttaagataggctattcatatatagtaatttctaaaaaatcgccatttttacaaaagaaagcttaatatttgatgggagacgtcgggagtatagtttatttttaaaaaaattacgatgcgtaaacaaaaaattctga

SEQ ID NO: 75910 - DNA, 543 bp, Arabidopsis thaliana landsberg
cgggaccaaatctaatagttccagatgctttattatcccacccttttcttccattacccatgtgctcattctcatatggggctgtccgaggtgatcttcttggcccggcttgtccgtttctggaagcagcatgtggaggtatgaaccagtcatctgccatgtcagaattccacattctccccctcatagctccatctgtttgtgagcctctttcccctggagctcgaccattatactttccagttggatagttagcaaaactattatatttgccaaacccagctgtgagattagccctacgacctgatgatatcgaaagatctcttgccatgtcttcaacaatcctttctaaaccccttactctgccctccaaggtcaccatactgtcatgtgagccaccaataaactcttggagcatgttcataagatttgtttggtgtctctctagctgcaacaactgcctctggatggctgaccaatttcctctattacttgtgaaggatccttcagattcgttatcagtattggagacaggagcgtgat

SEQ ID NO: 75911 - DNA, 255 bp, Arabidopsis thaliana landsberg
tctctgtctttgtctgtctctgatctctttccttgctttttactttttaggttttactactatcattccggaaaccgcctcgagggaaagaaaacatcacgactgggatggacagaataaacaagtgctaaatgtagagtaacaggagcagttctaagttgaaaaatgtcaatgtattcgcgaagcaccacgcttaatgagttgtatggtctgtagtgtgaaaggttcacgttatcatacgggactttgtgttta

SEQ ID NO: 75912 - DNA, 557 bp, Arabidopsis thaliana landsberg
gaagtttccgtaggttaagataggcgcatgtgaacctgtagaaatgaatcatatagtcatgaatgcacgattttgtgtatgtaggcttaggaaaaacaggataaagttttcaacttgatcaatgttttttttttgtctttgttctgtttttcttatatgcttttggggatttggatgttgcagaacaaccaggtgtgattcaagttgtgccaagccagacttatcagctgcacaaacctggtggtggtggtggtttcaagttgacctaacttgactttgtgtattctctacttctcaactgaacctgttgctttacagaaactagtctgttgttgtattgttgcgactttgaaccaagtatctaactaaaataatgttatgaagttgcttttattagagttgttcagggttggtgagtaactgagtttttgccaatatattattctaagaaaaatggttcttatagttccaatctcaaatggttaaattctgaaaagaaacgatcataataacttcagaaccaaaatttgtcatggtctctcatcttgtacaaaaaa

SEQ ID NO: 75913 - DNA, 165 bp, Arabidopsis thaliana landsberg
tccggagacccccttaggactcaagcttctggccgagacacggtgtttacgggcttaacttaccggacaacaaaccaaagaacgatttctggttatggggagacacgattaccaattcgttgggcaacaacgcctatgcagtttatgttgcgacatggattgttg

SEQ ID NO: 75914 - DNA, 534 bp, Arabidopsis thaliana landsberg
  unsure (1)..(534): unsure at all n locations
gatggtagtgatgatgagacgtaagtcttgatcaatttatcgttttctgaacacatcccaccactaaagcgctaagggtaccaagcatgtcaccgtcaataccaaacggtacaaaacgctaatttgctccattgatactttgtgatatctctcaacccgttttgagtgttggaaacatattaaagccatatctactctgcttttataagcgtccataatttacagttttacattaacaatcactacctaactctagttcacttggtaactaattaaatgacacagctcattgatcaaatcatttattagcacgttgaagaaaagataagggttcccacattctcactnnnnnnnnnnnnnnnnnnnnnnnnnnnnntattttgnnnnnnnnnnnnnnnnnnnnnnnnnnnnnnnnnnnnnnnnnnaacacgtgtaagcccatattgagaggagagtcacatgtaaaccaaaaccctagcaaaataacanaatgatcaaatataacacttctattcaaaagattacaaaatgatc

SEQ ID NO: 75915 - DNA, 618 bp, Arabidopsis thaliana landsberg
  unsure (1)..(618): unsure at all n locations
aatgccacgttaccctttattagtcgttgataagagtcaatttttatatctttttgtctcattgttgggtttcttgctgagctgcagtgcaagtcttgccatctccttggatataattctaacatcttattctctcaggcaatgttacattcggttcatcagaaaggtctacgacaagaagggagcagagggtcaagaggagaccacaaaggcttttgagtttatgcttaactatattggtatcgcttctcttccgcagttttggctctattttgtttgtttttcatttcaatcatgtctcatacatagagggaattttttccgttatgtgagtaatgaatacaattatgtttagtaaacaatatgatttgatcaattgtatgcttaatatagatgctaatgataactatccatcagcaatagcaagcacatacttacgcttcgtgtctatgtagacctctagtttccctttatcatgccaacacataacataacttgggccttacagatggttgtttatttcgatntatgaatctccagggacagacatcgcatcagggcctatatggactgagtacattgcctttctaaaatcttctcccgttcngtatatcactc

SEQ ID NO: 75916 - DNA, 168 bp, Arabidopsis thaliana landsberg
atattttcgagattatgcctcctgctgtttgttttatcaacggcaaaggggaagggtattaaaaaagggttatcctcagaattagtaacaatgaaaaactgcaaataatctatatatattttcttgggaaaaaatgaaagtttgattaaccaaaaataaataaaaagg

SEQ ID NO: 75917 - DNA, 381 bp, Arabidopsis thaliana landsberg
agacgcataaacagccgatctgaaacagctaacctcgccggtatgaggacactgagcttcttcacagacagaaatgagatggagacgagaaagggactctttcagctgctggcacctttcggcttgaggagccttatgactgaaccaagcaggaatctttagagttggaactcgccctgcgaatggacccatgttcggcgatcctcctgggtaaggctcactcgttttgccttctaagttgatcagactctaattgaaggacgacgaatactccatagacgacgactaagacagcggcttggtgcgcagtggcgacgaaacatccctggatccgcatgggctactgaaacccaccatcatgaacagactggaatgatgacg

SEQ ID NO: 75918 - DNA, 434 bp, Arabidopsis thaliana landsberg
taaagtattataaaccacattttaattaagtaaattacttagtcttgttctaatgtataaaatagcctatgagaggaaaacagaagagagaagcctttgccttatctcttgtcccttctctcttacctttattttaattttcaaatatttctttttgctcccaaagcaaacgacgtcttgtcaatccactcaagccacccaacttcttcattattgggaaaatcctctctctctctctctctctatctttctctctattctcctctctttctcttttttattatttttagttccccttccatgtcacttccttgacgaattctatatacctagttcgtttttttcttcctcaaaaatatctttttcaattcatttggtttttctttgggtgcaactttgccttacaaaatgttctctctttgttaaatttaaat

SEQ ID NO: 75919 - DNA, 542 bp, Arabidopsis thaliana landsberg
gatttgattgtattttctaactagcttatatatggaccttattttactttaattcaacagggaacttatggacttcggcctagctaatgcacgtcctagcgatgacaagacttacctgttcacacatgatgtaggggcttccggaatacgctgcctcggaatatgttattacatggcgacatattctggatatagctttaaaccctttttcttaccacacattagactttgtttgatctgaaagcctcggccttgacttgaaaagctatggcctttgcttttaaaaagctttatcccattgcttaaaaagctttagaccttttcctcaatacccttagcgtctcttgaaaaggatataagcacttcgtttcaaagcgtgcttactactttgcttacaaagctctcttctttgcagcttatacacttgacttttatgttcttagaagtctataacatatatccgagttttagctacaggtcgctaaactggtaatagcgaagtatacactgtgcgtgcggtactactggaatgactctcaaga

SEQ ID NO: 75920 - DNA, 428 bp, Arabidopsis thaliana landsberg
  unsure (1)..(428): unsure at all n locations
ctactattctatattatgctactgatgcttacacacactcattatttaccactgagtaccatgttttttaagtaataagctgaacagtgaactacgtgatgtgttccttacatttacatgggacgcttctcaagagtccagaaatgtatggttacacatctttactgagtggggaacaannnnnnnnnnnnnnnnnnnnnnnnnnnnnnnnnnnnatcacggctgcccgctctttattgcatgtcactagccattgagactgttttgacactgacaggattcattcgcacatgtcataagtacgaatttgaaatgcgtaatattagatacannnnnnnnnnnnnnnnnnnnnnacgcctatgccagaccacgacgttgagccttcacccactttattaagtataaggctgaatcattcccacattgat

SEQ ID NO: 75921 - DNA, 696 bp, Arabidopsis thaliana landsberg
  unsure (1)..(696): unsure at all n locations
aagatatgttttaaaccgaaactggattagaatctctatccaaatatatcatatatgcctccatggcctctcagcgaggctcacacaatcaccatgtctaaaacaatcgacgaggtgatcaattgttaaccctgcagcctgcatgaacgaatgtacgatcactggaccgacaaatcgaaaccctcgtttgatcatatctttgctaattatctcagccttaggagatctcaatggtacatttcttgaatacttgaatttgttaatgataggtttgtaatccataaacccccaaacgaagctgctgaatgatccaaattcattgaccacctgtaaaatatagttttttttcataggatccatttattgataatagaaaataaatgtataatggaacaatacacaataaactataggctatttctaaaaatcggaaaaaggcttgaaacttgccttggttatgcatttggcattgtcgactatacacctgactctactctcttgtaacattattgctttatttgatgcaatctctgcgatctctttctctcccattttggccacccgatttgggtcaaactcacaaaatgcctctctagtttaacaaattatcaaacaccccacanatgattatttacatgtataatgtagcatattatgaatatggtgaaagattttacctaaagtgttctttgcgtt

SEQ ID NO: 75922 - DNA, 427 bp, Arabidopsis thaliana landsberg
tttgctttggctacgagtcatggacaagtgaatgttctttttccatgattcttctagtcggccatgcttggttcatgtatgaacacatatttaaagttctatacaagttgttagaattcttttaaatttaatttgctttatttatttttttagttttattttggaaaatcatggtcacacatcttgagctaccgttgttgtttatatataaatgttcttaatattaaaaaattatgaaccacagggctaataaacttgaatatttgtagggtcaatggctttattaatgtgtatatttgtagaagaaagctgggaaatattctataagtaaattatcatcttatacactaattttttaaaaatccacgcctagtaataaattccaattttttttaactcaagaataaattccattttttattaaaag

SEQ ID NO: 75923 - DNA, 120 bp, Arabidopsis thaliana landsberg
aacgttaactcttttggatcaaatatatagctgttcgcacctcttcagccaaaacatcctgcacaaagttgggacctacaatgcgggaccagtggcgacccccttgcccgtccccctaca

SEQ ID NO: 75924 - DNA, 480 bp, Arabidopsis thaliana landsberg
acgtgcgtacatatttcacactgtttgaaaacctttttaagtatagtttctaatccgatttactttttaacgtgacaccaactaggccattaactatatataatatatgtacattctatataaacatcttaaactttctacaagtatccatcaaaacacacaagaaagtcatctcacgctatatttgttccatacattttagaaaaatgtttcataaggttgctattgaaaccttggttctcctacttctcatcaattacttgacacaaatcgatgtttcctccgcacaatactctcagtatcctcagtcccatgaatatcctgacagctaccttagaccccacaatgcagcccgagccgcggtcaaagtcaagcctctaagatggaatttcggtatagccactgtggctcaggactacgcaaaccatctagcctcaggtccatgcagtcttgaacattcctctggaccatatggagaga

SEQ ID NO: 75925 - DNA, 310 bp, Arabidopsis thaliana landsberg
cccatacagactgatcacctgacaaattactcattccggatcgaccctacgatacgagccattgtaccaataacacttttggttccccacctacgatccacgaacaaagtaaaataacgtataaagtagtggaaaggcacttacgcctgaactcacacttatcctacacctactcatgtcattatacagagactgactagatacaatcacaacatgcacttctctcccctctgactcagccaagccacttcccttgactgactactcgctagatctgagacatggacagaggtaatctctttaatccata

SEQ ID NO: 75926 - DNA, 289 bp, Arabidopsis thaliana landsberg
  unsure (1)..(289): unsure at all n locations
actgaagccggcattcatactaccgatttttacattttccctcgcgcgggagccacgggctaaaggggaaccctcacctcccggtgcacccagacatcccacaagtgaggcatatcgcttaaccccgatcatcttcctaccacgagctcactatcagaactnnnnnnnnnnnnnnnnnnnnnnnnnnnnnnnnnnnnnnnnnnnnnnnnnnnnnnnnnnnnnnnnnnnnnnnnnnnnnnnnnnnnnnnnnnnnnnnnnnnnnnnnnnnnnnnnnnnnnnnnnnnnnnnn

SEQ ID NO: 75927 - DNA, 549 bp, Arabidopsis thaliana landsberg
gggtttggtacctagcggatggaaaacacaaatgacatttacattgtttgggaccgtttttctagggagttgtatactgttgtgtggcaacggaggcaaataataaaaattaagaataaggatatggctttgtcgcttagtggaagatcccgctttgattgaaacaatgcactatcgtatgcgcatgtcatgattagatgcgacgccagattgtatcaagggagaagggatctgtcattaaccctcaataaatgaagatagggtacttataaacataagataacttctgttcaaatattaataatgcgtttgactggcccatgccatggtatcatcatttagggaaatagatagaaacagccgaagagcacccgctatgttgcgagacaaaaccgggtaacatcatatcatcagtctccgtggagtagaatatcacatacgccggatacctttgtcgcccttgtacttctccagggttggagagccgagatggctccaccattcgaacaacatcgtattgcagatcagtttgaaccaaggcgtgaattt

SEQ ID NO: 75928 - DNA, 406 bp, Arabidopsis thaliana landsberg
attagtgtaaaaggagtgtgattttactgttgtttcatgttcttgtcgttaatgaagctgaggctttggcttacggtaacgaacaagattcaagaaaaaatggtgacaagattcttcacagagaccaaactcgagtttcactaacttgccgtctagttcccaaagtccataaaaatctcttcagattgtagcttgcttccctaataacactggttttatcttgtcgtttatgactgttaaaaacgttacgatttgtgacgtgtggaatataaaacgccacgatttgtagttgccgaaacatgaggacaaaaaacttgcaacggataggattaaatatgagcccttcattttattgtatattttcttctaaagagataacatcactatacaatctcactctatcccc

SEQ ID NO: 75929 - DNA, 678 bp, Arabidopsis thaliana landsberg
ttcctcttcttcttctccttcttcttcctacggtgttgctcgtgtcagccatatctccaatccttgcatcttcggtgtgttttcttttcttaccaaattctattcttgagactaaatattaaaagcgtaaacctaacgttttgatgattacaggggaagttgggtcgtcatcttcgtcaacgtatagagataagaaatggaagttgatgaaatgggtgagtaaacttttcaagagtggctcgaatggtggtggtagtggtgctcacactaatcatcatcctcctcagtttcaagaagacgagaatatggtctttcctctacctccttcttctttggtaattattttcttaattatactcgtttaatttgaaacatcttttctttgaaaaaatatttctattttaatctacacacaaatactatagacatgtgatttttcatattaaaagcaatatacagaagacatgtgaacatacactactgttttacttttttttttttgctcgagttgtttgaaacaaataacatgggtcatgtacattctgtaaaattgtcacatctttgaatgagtcggtccattttgtattttattggtgtcatgagtctcgttgggttttgatggctcaaattgagatgatgtgacaatgtggccttgagcactatttaggataacaaaaa

SEQ ID NO: 75930 - DNA, 242 bp, Arabidopsis thaliana landsberg
agaagaggagtcggatgtattagagacttaatccaacttgaccagtggctggattgtcagcagattcgatcatcctctactaaaataagagcactctataaacactgaccgcatgcaatcttacttatgaagggagaagaagcgtttaaccagaggcacttgctagaaacatggagacgctgagcccctacatcagacttgtaccgtcggtgagacagactcatgatggcaagtagttcaat

SEQ ID NO: 75931 - DNA, 374 bp, Arabidopsis thaliana landsberg
ccgaaaattgttttaacctgtgttttgctttgcgtattttctattttccatataaactgttagctgtttgggtttgtgtaggcaccttacgatactggcatcgatccatctgattgccctataatatacaggacgtaatccacgtcaaactggattaaaaacgactgatcatatgaattgccacctataaacgtacaatgaagtatggaataaccattgctatgaacattggtgatcaaacaccattgaaagcaccacattgttagtggggcttaatgttccacttgtaacatgaaaatcatcactggatgagcctactgttgcatacacattcttaaaataatctatggttatagcgtaccattcatgatccc

SEQ ID NO: 75932 - DNA, 311 bp, Arabidopsis thaliana landsberg
attttttctgaatattatacgttttagaatgtacgtaaatttatatttagaggtgactttaacagcagcaaaaaaatgtacattttcctcataaaatcaaacatatcatttttagatggtagagtgtttacattttcatatatattattctatcatttttttgtcaattacattataagctgggaccgagtttttaaggtgtaataaggcattatcctctcgctatgtatatgtaaaacattattcatctatagcaattgttttacttaactataaatttcaactcactgaaaataataagaggaaatatt

SEQ ID NO: 75933 - DNA, 564 bp, Arabidopsis thaliana landsberg
  unsure (1)..(564): unsure at all n locations
nnnnnnnnnnnnnnnnnnnnngcttggaattgttgtttttgtttgtggaaaaggcgtcagcaaaatagaggaacagggtcaccagcaggtagagccaccaggcgcctatggcgaagatgttcgcgatcttatataagcgcgccgtgctgacgtcactcatgccgacgaagctgtggaaatgcccggaaactaagggcatcatcgtgccgatgactaacaggattgtcagcaccatcggcgcatatagaaaggcgccgcgatgttcgaggaattcgctgatggatgagggcagtcaggcttcgcatcacgcatttccccgctgtatcagggcaacaaacatgtcgtaaagcgtccgcgtccagacttcgccgagttcgggaagtttttcacggacggcgccgtcgaacaccatcactgtctggctcgagcgcgtttcgctgtacatggtgaccaaggcctcggcgaccgcacggttggaccgtcctactatcagatgcgcatacttgtcagaaacggtctccatctgcatgtgcagcaccagttctccgtctcggatgaacatga

SEQ ID NO: 75934 - DNA, 477 bp, Arabidopsis thaliana landsberg
gaccagcggcgatgctgcatcaataagtgcagcttccgctttcagctttgattttaccgccggcgctaccttggggtcttgttcataatatgctgtacaatttcttcagtcgacatcagctatatatgccggtaatgcgaaagcacttctgtgatcctgaattccggacggggttgcggtgtattttgcattactcgaacgggttaagactatagcggctgtttaatagtgaacgcatgtaacagcttattactcactgatactgcataccggctgaagcgtatgtggcagcaagagcatataaggcggcggcccgaactccggcgttaccgttagctgctgcacacctgcctgtttatttaagcggtacaccttatcccagcaggacacgtgctggcgcagagcattctgccattcaggcacgcgcggatcgcttacctgcggaccatgtgtgtggcctaccctggcatggatatg

SEQ ID NO: 75935 - DNA, 323 bp, Arabidopsis thaliana landsberg
gtttgaaaatcgactagtcgccatactattataaaatatgtttactatatatataaaccaacagaatggatttggttgggggtcagttttttttttggataccagctaaattattgctatttttttttattgcaatgtcaattggcgatatagttcatatttttaccgtagtggtaaaaaaccccgaaatttagtgtatacataaaataggtattatatctcttggatcgcttatattttggactgttttttttgtcttacgatttctcgatcaattggttgcccattgaccttttttcactattcttgcccatattgattgc

SEQ ID NO: 75936 - DNA, 103 bp, Arabidopsis thaliana landsberg
caatagcaccgagtccaatggtgaggctaatcaattcaatggcccaagaagaaagcacccccatgtcctttcttacgtacctagtcagaagaggaaaacctgg

SEQ ID NO: 75937 - DNA, 507 bp, Arabidopsis thaliana landsberg
cccctgttggacgcgctgtttgacattaatatactaaaatctatgtttgtctatactactgcttgctaaacattatttggtacgggcataaccaaaatatctttactagttaattaataataaaaattttattggagctctttatgtttgacatgtaagataaaatactcatttcagaataatgttcttatatttttttttgttgccaaaactatcagattatgatgaccaactcattcttaaaaattagttcttaaaatgtaacagttattatcactaaaaacctagaagacggatcctattcatttatatacagtcagataaatagaacatctcctgatgataaaggtgggagtgtcattatttatattaaaaaagaaagaataatatcatatgaaaaaaaaagtttggctgttacaaaagtaaagcttatggtttataaatccttgacaaagaaaataaaaataaaaaatcatattacgaaaaacaaacatcggcatgatcatg

SEQ ID NO: 75938 - DNA, 569 bp, Arabidopsis thaliana landsberg
aaatttagcatctatacgggtaagacgaccattcatatatataagggatcatgaagacaacacaaataagacatccacaaataaattaataagccaacttggtcttaaaaatcaggcatcttattcttaacaaactttagctgatcgattagtatttgcactaaccaaagaaataataatttagtttactaacataattgcatatatatattatacaattagtagagtggctataaagcatgccacatgcacattctttaatggacagacatttgaatattgaagagtttatcgtaaactaaatgtcatttgaaaactgctaaaggtcttttattttatatactcacataatcacatcaagaatatgacttatgtttatattcatcgtttttggtcgataataatgattctttacaataaggacatgttgagcatgtttataacttatttaatttgactcgttgaattgttattacgtttgttaatatgcttagattccacatctaaaataatatctaatgcagatcatatgtaatgcacattaaagggtttacctccgataatttaat

SEQ ID NO: 75939 - DNA, 581 bp, Arabidopsis thaliana landsberg
  unsure (1)..(581): unsure at all n locations
ctgccatgctgatcgcgcacgagatcggccacacctggttcccgatgattttggtttatcaacgagcgccgcgacgcgtgggtggacgagggtttcaacaccttcgtcgacgtgtacgaggccgaggccttcgatggcggcaagttcgcgcccaagcgcgacagcgaatacgcgccgggcaagggcacgccggccgagcagatcgccgcgatcctggccgatcccgccgcgccgccgccgatgacctacgccgacgcggtgaaggagaagtaccgccatccgatcacctatttcaaggcggccttcggcctggtgctgctgcgcgagcagatcatcggtccggacaggttcgacccggcgttccgtcgctacgtcgccacctgggcgtacaagcatccgagcccgtcggatttcttccgcttcatggccagcgaagccggcgaagacctcgactggttctggcgcggctggttcgcacnnnnnnnnnnnnnnnnnnnnnnnnnnnnnnnnnnnnnnncggccaacggcggctggaagaacggcgcggacatcaccgtgtccaaccacgacaagctcgtgct

SEQ ID NO: 75940 - DNA, 358 bp, Arabidopsis thaliana landsberg
tttatcaattactcgtaaacaggacattatctttataaagaaaatgatatacatgctgcatttttttggtttggtagttttacatgctgcattttgtacttgcaaccacttctatactaattgttttagataagatagtaccttcttgtttgatcacatcgtaaaaggatcggatatgttaaccgtctttttccaaacgttatatactcttcaacactcatcataatgtatggagatgtatcatgactctttcactaacattggactttgcgcacaaacttgcagcaaaaagtcactattatacatactataactatgctatttgatgataaatatttctgaaataaaaattaagcaa

SEQ ID NO: 75941 - DNA, 382 bp, Arabidopsis thaliana landsberg
  unsure (1)..(382): unsure at all n locations
cccttaccatcccccaccccctttttataaaccaatcaataaaaattaaccactttcaaacaaacaatacaaaaaaaactaaaaaaatttactcacaatatttcatttaaaagtctactttataaaaannnnnnnnnnnnnnnnnnnnnnnnnnnnnnnnnnnnnnnnnnnnnnnnnnnnnnnnnnnnnnnnnnnnnnnnnnnnnnnnnnnnnnnnnnnnnnnnnnnnnnnnnnnnnnnnnnnnnnnnnnnnnnnnnnnnnnnnnnnnnnnnnnnnnnnnnnnnnnnnnnnnnnnnnnnnnnnnnnnnnnnnnnnnnnnnnnnnnnnnnnnnnnnnnnnnnnnnnnnnnttgaattttaatacaatacagaataactaccaa

SEQ ID NO: 75942 - DNA, 900 bp, Arabidopsis thaliana landsberg
gatttttggacgttcctacttgctcgcttagcaaaagaatttgattttattcaaattaacagtgtaaagccatcttctatcttcaccccattacctctaactgcccaatgactaggcctcgacatattctccaaaacctgaaaacccgactcgacccgatccgaaaaagggggtttggttcaggtttcggttagagactataaaccaaatgggtaatgaaattacatcgcatcggtttcggtttcggtttcgatttgggtataaaccgaaacccgatctattaaccggccatattaaatatacacatacatatataaggtattaaggtttatgtaaggttatatgcagttatgatcctgtaaaacatatattcaaaacccaaaaatatcgaaaccacatctctggtttcctataatctctcgttcctcttttattttttttacatccacttctctaatcatcgattcatcctcttctcatcttaaagcgtatataaaccccaaattggaaaactggaaaccctaaatcaagtaaatgattcacgacaaagagctaaacctcctctatcagcttcctttacaaatcaatcgtcagtaggtgtttctcctttctcgtcctctcttgttcaagttttataattatgtgtttaattttactctgtattttagtttcttatgcatcttagattcttagatttgtgactttgtgtgagtgtggaaatgtgaaacgataaattatgtagtcgtaggtatggttattaggtttgtgtgattgttttgtttttgagttagtggatctgttttgataaagtatgtagtcgtaggtgctttaattatactctgtatttatactcctactcatgaatcaggcagcaacagagtcactaggtggtgctgcatc

SEQ ID NO: 75943 - DNA, 539 bp, Arabidopsis thaliana landsberg
attaatgggtgactggtgattccgcagaccccttaaacacactcatacagttttaataaattaaaattttgtgaaactcaggatttatagaggacactatattttttatatattagatctattattaaaattttaaagccacagcgcacaacaataaatagagacgagtgatcatgattaatccaaatgagaaattgtttagttgtcgagcttgatcttgtgtatccgttatgtatgtgacccgcgatccttattcactaatcactggacattttagagttatgcttattcttattaaaggatgtgttccttatgtagttcattgtcgttgtttcttaaaaaaaaaaaaaaaaaaagagagacaaaagagtgaaaaataataattgcaactctcgatttgaaggagattcgcaacataaaacattttagatattccatttttctatataaaatgtacaacttcatgagttatcagttatcattcccagtaaagcacatgaatggaattgaattcgtcttcttgcgacattaaaacctga

SEQ ID NO: 75944 - DNA, 365 bp, Arabidopsis thaliana landsberg
  unsure (1)..(365): unsure at all n locations
aaacccagacccagacccaaacctaaacccaaacttaaacttaaatttaaatttaaaggtagagttaaatttaaatttaaatttaaatttaaatttaaatttaaatttaaatttaaatttaaatttaaatttagatttaaatttaaatttaaatttaaatttaaatttaaatttagatttaaatttagatttaaatttaaatttagatttagatttaaatttgggggggggtggagatttggatttgcaggtaggtggtcggttggcgggcgggggggccgggactccccgcgggggggggggcnncgccccccccgggggggggggggggggggggcgcccggccgcacaccccgccccccggg

SEQ ID NO: 75945 - DNA, 124 bp, Arabidopsis thaliana landsberg
atttaaatttaaatttaaatttaaatttaaatttaaatttatatttaaatttaaattcaaatttaaatttaaatggaaagttacatttcaatttaaattcaaatccacccctacatctaaattt

SEQ ID NO: 75946 - DNA, 713 bp, Arabidopsis thaliana landsberg
cgcttctctttaccaaatcaaactcaacacttcactcaactcttatcggaccttccaaactatatccttcattggatctatggactcttcaattaaaagacgtcacgatccgaaactctatcttctcatcatcgatccctgagaaatcatcatcgtttaataggaaacttagtgaattggagtttaggtttctcaatcgtaaggtttctgcttctggatatcgttctttggttgttcgagctacctcgaagaagagtaacgacgattcttcttctcctggtatgtggttgttcaattgaagactaattttattgaatttgattacttgcatgcttgatttggttagaaattgggcaatttaggtattatgatcgatcaaaatcggcgaatttaggttttgttcatagtgtacttggtaatgtttgtgattcttatacctgttgttgttgatgaaggagatgcttctcaggaaaacaaaccttctaacggcaacaagtccggcgattccgcggctccgaaatcgttcggtttaaacacggattggagagaattcagagcgaacttgtttatgaaagagcaggtagtaagttttgtcattgttattgagaaactatatatatatagtcaataaggtctatgttttgaatgatgtaacaggaagaaaagcagaagctgagggtcatgaatcagaaccgtaggattgaatgacacat

SEQ ID NO: 75947 - DNA, 221 bp, Arabidopsis thaliana landsberg
gcggagagtctgagccacgaggagaagaagaggcaccatacggacggtggttgtagattgggttttgcctggtttgacggtggttattggtggcgggggagacgaatcgggtagattgacgaccggagaaatctgatttgggggtttgcaaaggagagaaattcggaggagttctgtgaaagatagagctgatgaaacagatgctgaagatgatggcggag

SEQ ID NO: 75948 - DNA, 341 bp, Arabidopsis thaliana landsberg
atgaaatacgttgaaagaatagagctccacttgacagcctcttatagttttaatttaacaaaaccttactttattgtgtaggatatcttttgataccttcaaatatacatctcatacttcatatctaaccgcgacttaattccttctaagatcccaccccaacccaaatctgaatcgaagaacacctgacctgctgttgtacataccttttaccatcttcatcctatttctagatacaatctacgtctgattaattccaaagtgcttgcgtataataagaaagaatcttgctctcactcaatctgaaaattttccattagcattacactaaacgctgattg

SEQ ID NO: 75949 - DNA, 337 bp, Arabidopsis thaliana landsberg
gagtttccggctgataggccttttgccgcaaaagcttcaccccgaccaatggttgaaagatctctctctttaactagtcttgagcggaggtacaacaatcgtggtggtgcaagacggagtattgaggttgaagaaacaggtcataggaacaacgctagggattattcaccaacggaggaggaaaggcatctggtagatgagacgtcccaggcagaattatcctttaacaataaagccaaccagaacaattcttctttcccttcacgacctgaatttaagagtggcgttagtagccctatagtgggccctctagaaaaagataacagggtcaatactg

SEQ ID NO: 75950 - DNA, 199 bp, Arabidopsis thaliana landsberg
gaaaggtataaaaagtaccatcagcccccccccctaccactcatattttcttacaaaaccacaccaaaaaaaatctgtatgggtttattataaaacacaaaaaatacattccaccacaaaccacaaccattaactattcactgtaaattcatataccttacttaaatgataattacaatccacaccctttacttcctaa

SEQ ID NO: 75951 - DNA, 246 bp, Arabidopsis thaliana landsberg
  unsure (1)..(246): unsure at all n locations
gacggatgcatcatccagcctaatgcaccgatcccatttaatcctcagttaacgtcttggcagagtagactatatggtacctcccgggaaccctcctttcatccctctttatgttaaccttttttctttaagnnnnnnnnnnnnnnnnnnnnnnnnnnnnnnnnnnnnnnnnnnnnnnnnnnnnnnnnnnnnnnnnnnnnnnnnnnnnnnnnnnnnnnnnnnnnnnnnnnnnttccacgctctttg

SEQ ID NO: 75952 - DNA, 505 bp, Arabidopsis thaliana landsberg
gcggtaggtccctgtgtgatgcatctagaagcctttttttcaattcatttcaaacatatttatttttggggggttcaagcaagctcttgcgttaggtttctacatggatagatagacaaaaagatggaatcttacttggtctccggtgtaggagtgtgtggttgtcattgtccccttgacaattcctgtgattcagttcatgtatgagctataaaaaaaacattttgaaacatgtagtgaagcaaagaaaataaaatgtaccaaattcttcatccaagactttagcaaaaggtgccaaacagttggtggtgcaagatgcattgctgcaaagaaagaccaaaactgaagcatgaatactcagactagttcatgctttaatgagatcaaaggtttaactttaaacggacctaataatgttagcgacatcatgaccatagtcttgctcattgactcccataacataggtggggatatcagcacctttggctggagcagtgatgataac

SEQ ID NO: 75953 - DNA, 299 bp, Arabidopsis thaliana landsberg
tttttttgatctgtgccgggggcacttgaactaaactactgtaaaatgccccaaacatatatatatttcatcttatgggacttcactatggaaacaatggtcaccatgcccatcttagattgtacatactctttactatgacttattccttctgattgacacgatcactcttcttttcattcttattctccacaccaatatacttcaagctgcgatccaatttttatatttcgatggaacatcatggaatcgtgtataggtgcagaacgattctgctaggagataccaaaacctcagat

SEQ ID NO: 75954 - DNA, 172 bp, Arabidopsis thaliana landsberg
acttataaatacgttccccttttactttgctactacagcctatatattttttttcttaccttcaaaatatccattggacagggcataagtcttcaaaactatttcaaacaccaccctaagcatcttacccttattctttcaactaattaatttatattcgaaaaatgcataa

SEQ ID NO: 75955 - DNA, 511 bp, Arabidopsis thaliana landsberg
atttgttgatcttcttagtagaagaacattatttcatgtggaagaagaagtcactctaaagtttctaggattagtggataaagattatttatttgattttgatgaagtgaaatctcacttaagaggaacaattattcgcacgcaaaaaaaaaaaaaaagggttcagttaccaatctgattcgagagagtttattttatgttgagtgatcataagaaaaagtgggttaagacatatccgttaatggatgaagaagctaccaaatacaataatagaactcaactaagtaatataaacaaaacagatggtgttcttaaactgtaagatcataaaacatttgtaagaagaaaaaacttgaagattcttgatcaggcaaaaaaagacaccatatggatttaagaagcgagaaatcaacaagagatgagatttaaaacaacacaaagaaagaaatctgaaaatctagaaatcaagataccaaaacatgaaaagccaagatcgggaagaaaaaaaaaa

SEQ ID NO: 75956 - DNA, 214 bp, Arabidopsis thaliana landsberg
caacacaacattatctataaatgttttagctgatgtttaagaaagtaatttagatgacaaaaaaaaagaaagtaattttaagttatgattaaacattaaacaggattatgtcacttgataaaaggacaattggttttccaagtggtacttctatacattatttctaagtggtaataatatttcaactgtccgatatgttacatgaaactttttt

SEQ ID NO: 75957 - DNA, 425 bp, Arabidopsis thaliana landsberg
aggcgctcagcgtggtggtggacgccctgttggacaccttctgttcggttgtcaggtcgcgggcatcgaggcacggggattcatcctggccgccccggtggccttgcggctcggagcgggattcgtcccggtccgcaagaagggcaagctgcccgcggtcacgttcgaggagtcgtaccagctcgaatacggcagcgccaccattgaggttcatcaggacgcgttcgcgccgggggatcgggtgctgatcgtggacgacgtgctcgccaccggcggcacggtccgggccacggccaacctcgttaccaagaccggcgcggatgtcgcgggcatcgcggtcctgatggaactgtcgttcctgaacggacgcgccccgctggagggcatcggggtccgttcccttcttacggtctgaccagtcacac

SEQ ID NO: 75958 - DNA, 438 bp, Arabidopsis thaliana landsberg
  unsure (1)..(438): unsure at all n locations
ttaggtaacctgatttagcatggagtaatttgtactctttttgagagttgtatcatgccacatgacttggttcactgngataaaagtaaagacagcattacaatggctttccctctaatttcattccttataatgatgaaatacagatattgagaaatattcctaaaatgataaaaatctaattctaatatagaagaaaatataataaaattaatgttaaatttaaggaaaatataataaaattaaggttaacttttagttgaaaaaaaggctaaatctatgtcacatcattctatttaattaatccgtgcagtatactctaatattcattttccttaaaaaagattaaatcatcatcaaatatctagtatgtattagatatcaatctaaaaataaataaaaaacatagaagaacaatacaagagtatccacatatgt

SEQ ID NO: 75959 - DNA, 360 bp, Arabidopsis thaliana landsberg
cacattttgaatgcgatttcgctactaaacaaccccttttgaaaccataagaaattgtgcttcttaaccattgactatcaaaatgtaaaatccggaactccttaaaactaagagaatctgaatctcttggatttgttacgttatttgatagtgatatttgtctaataaattttaacaaaaaaaaagatacttgtctaataaatagatactagatatatatcatatacactaattttttttaaaaaaatgttttttaaacttttatactcgcatctaaaatatgggaaatggcctttaaaagtcaacccgacctattgggaccaccgaagaatggcaaaaatagcctctgttctcagacac

SEQ ID NO: 75960 - DNA, 299 bp, Arabidopsis thaliana landsberg
catttacaactcaaaactacctcccccacatgacccaaagcatcattaattattatttcacatcttatagttactcttaacacttcctagaaaacaaaatccttgcatccatattcccacaatcttcaagtatatctatacatcatctccaacatctctaatcacctccattcacctatcttctcatttggagcacacaatcccactcttacctctatgcaatttccatattttctcctcaccacacacaattattacttccaaatacatactatcacaaattttctatcatattcctc

SEQ ID NO: 75961 - DNA, 258 bp, Arabidopsis thaliana landsberg
caaaaacccccacacagtcacaccactcaatctcaacaaaacacacatactctagttacatatcactaaaaaccctatcaccaacccaatcatcaattttcaaccctcccatagggaaagcaacttccctattagtcctcgcgtgtgcaacgaataacacgaacccactacaccacttttcgtaaccactttctctaatcctctgaactaccaaccatacacatgaccacactgtcaacatttcaccacaagtaccac

SEQ ID NO: 75962 - DNA, 521 bp, Arabidopsis thaliana landsberg
tggagatatcacatcattatacgatagcttcgctcttatcttttcctacatcactgctcttagccttaatgaaaccttcactaccatgatctgcatcattactaagattctggacttcactttcatcgagtttccattcactgtcttcattattgataacctcacatccatctccttatacatcaccgcgcttagccgtattcaaaaattcactaccatgaacaccatgattagcagtcttccggactttactcgattcaagtatcctttttatttgcagatgaagagaccttgtccttgcagatggtatatctcttgttccataaccacctttatcattaatatctgcaatatcagtctcagtcacattgcttttctctctgctctcagatggattatacttaagattcctgttagagtacttacaaggtgataaaatgggaggacaagctgctaagaaatcattaaacaaggacatatcaataaaacatagatgccttcggaaaaaaaaaaaacacaca

SEQ ID NO: 75963 - DNA, 233 bp, Arabidopsis thaliana landsberg
tagcatagctataatttctaaataagcaagaaatcgaaggatcaactgatttttttttttttaaaaaaacgaaatatgtgaaaggagacttaacgaaggaaccgaagccggaatacaacataaaagaagtcgaggggatggtcgggattggtgatgagatctactaaagaaatacggcggctactacgagaaaaatgatataaaggtccacttcgatgacttatttttttctg

SEQ ID NO: 75964 - DNA, 518 bp, Arabidopsis thaliana landsberg
  unsure (1)..(518): unsure at all n locations
cctcttcccgtgtcaagtggaactaccactgaananntaaatcaannnaaaatgcgacttcttctcgttcaaagaaaatgaaaattcttaaattggaacctgtcnnnnnnnnnnnnnnnnnnnnnnnnnnnnnnnnnnnnnnnnnnnnnnnnnnnnnnnnnnnnnnnnnnnnnnnnnnnnnnnnnnnnnnnnnnnnnnnnnnnnnnnnnnnnnnnnnnnnnnnnnnnnnnnnnnnnnnnnnnnnnnnnnnnnnnnnnnnnnnnnnnnnnnnnnnnnnnnnnnnnnnnnnnnnnnnnnnnnnnnnnnnnnnnnnnnnnnnnnnnnnnnnnnnnnnnnnnnnnnnnnnnnnnnnnnnnnnnnnnnnnnnnnnnnnnnnnnnnnnnnnnnnnnnnnnnnnnnnnnnnnnnnnnnnnnnnnnnnnnnnnnnnnnnnnnnnnnnnnnnnnnnnnnnnnnnnnnnnnnnnnnnnnnnnnnnnnnnnnnnnnnnnnnnnnnnnnnnnnnnnnnnnnnnnnnnnct

SEQ ID NO: 75965 - DNA, 275 bp, Arabidopsis thaliana landsberg
acaagcgggggagaccgaggcgcaaggacattgccaccgtggaacccacgaaaagatagaaagggcacggggggtcgtgagaaaaacggaacagtcacaggagaaacgaagacaggtgaaaggaaaaaagcaaaagcatatcaccgataggggacggggagagtaaggaaagaaccccaaacgggaaaagacaaaaacccagaggaaaaaaaacagatgcgcaggaagtctcctaacagcgaggaacagggacggcagaaacagaaaccgaaaaa

SEQ ID NO: 75966 - DNA, 323 bp, Arabidopsis thaliana landsberg
  unsure (1)..(323): unsure at all n locations
cataagattgtaaatccactctatccataaacttataaaattcataacccccggncaaaaaaagggggacttgaaaaggattaccagaatcccttannnnnnnnnnnnnnnnnnnnnnnnnnnnnnnnnnnnnnnnnnnnnnnnnnnnnnnnnnnnnnnnnnnnnnnnnnnnnnnnnnnnnnnnnnnnnnnnnnnnnnnnnnnnnnnnnnnnnnnnnnnnnnnnnnnnnnnnnnnnnnnnnnnnnnnnnnnnnnnnnnnnnnnnnnnnnnnnnnnnnnnnnnnnnnnnnnnnnnnnnnnnnnnnnnnnnnnnnnnnnnnnnnn

SEQ ID NO: 75967 - DNA, 462 bp, Arabidopsis thaliana landsberg
catatgggagacgcggttgaattctgtgttcatatagtaactcctcctgaaaagatcactgccattaaagacagttttctaaggttcgtcgctaaaccctacatctgaccgatatactaagttaagtctcttgaaagtgaagtctaaactatattcttatgttttgatgcacttacgtagacaacaagaaggattattggtatcctgcacctatgattgcgttcctaagcatggatgacttgaatagtgtgaagatagcgctgtggttgacacatagaatgaatcatcaagacatgggagagaggtatataagaagaggtctattactagaggaagtgggaaaaacttgtatagagctagatatcgagtatcgcctatatcctcttaacattaatgttcgaagtctccctgctacggctaatccaacttcttcagaccgcattcctccttcatggatgcaac

SEQ ID NO: 75968 - DNA, 650 bp, Arabidopsis thaliana landsberg
  unsure (1)..(650): unsure at all n locations
nnnnnnnnnnnnnnnnnnnnnnnnnnnnnnnnnnnnnnnnnnnnnnnnnnnnnnnnnnnnnnnnnnnnnnnnnnnnnnnnnnnnnnnnnnnnnnnnnnnnnnnnnnnnnnnnnnnnnnnnnnnnnnnnnnnnnnnnnnnnnnnnnnnttcagcaaagggatgnngtgagtggcacgacgactgttgtgtacacnctcaggcacgaccgtgcccgcttcggcccagtaatgggctttgggggcagcaactttgcnnngttcaaagaacctcgatgcgcttcaacgggcaattctgcannnnnnnnnnnnnnnnnnnnnnnnnnnnnnnnnnnnnnnnnnnnnnnnnnnnnnnnnnnnnnnnnnnnnnnnnnnnnnnnnnnnnnnnnnnnnnnnnnnnnnnnnnnnnnnnnnnnnnnnnnnnnnnnnnnnnnnnnnnnnnnnnnnnnnnnnnnnnnnnnnnnnnnnnnnnnnnnnnnnnnnnnnnnnnnnnnnnnnnnnnnnnnnnnnnnnnnnnnnnnnnnnnnnnnnnnnnnnnnnnnnnnnnnnnnnnnnnnnnnnnnnnnnnnnnnnnnnnnnnnnnnnnnnnnnnnnnnnnnnnnnnnnnnnnnnnnnnnnnnnnnnnnnnnnnnnnnnnnnnnnnnnnnnnnnngg

SEQ ID NO: 75969 - DNA, 561 bp, Arabidopsis thaliana landsberg
  unsure (1)..(561): unsure at all n locations
accctggccccggccctgacccccgacgaagccatcgagcatctgcgccgcggttgcattatcggtgtgaacctgctggcctcgcgcatgggggtgatcgactcggagaaccgtgcggccaccaggctgctgatgcacgcaggcttcacccccaccgttgtcccggccaagaaccgcctggttggcagcccgaagcggggcggtatccnnnnnnnnnnnnnnnnnnnnnatcacttggcgacaatggaattgaagtcggacctgcaggtcaagctgcccggcggcggcctggtcgacgtgctggccggtgcccggcaagtggtggctccgccgtcgaaactgaccgaggcgggcgggctgcgctatatgcccgccgcgggtggggctctcgatgcccccgatgagctgcaggtggctccggattggctttttcacctccgcagcaccgattccgaaggccccacctccaccctcgccgggtagccttcctcgccctggggcatgtcgaggtgcgcgtcacctgtagcgtgctccggagcaagggacgtgacagtcaccggt

SEQ ID NO: 75970 - DNA, 506 bp, Arabidopsis thaliana landsberg
gaacatgaaacccagcaggtcaaattccctggcatcggcctcaagctcgaaagtatacgttttccataaaccttccgatctcgtcataggtgagcgtatcggcagaccaaaccatggcataagcaatttcacctaaagcatagtgtaatttctctataggagtcataacaattaaattttatgtaaaactagggctggttatcttgtgttacaacgcaggatacgaatataattatcccgtgtaagttttaattaaaaatcgtgcgtttctcaaaaagaaaaaacggttttacggctaaatacttgctgataaggtgagttgccggaaaggaaattttcaacattttttttggtaaaacccggatcaaacaaaaacggtggaaactgttgttacacggtcacttcattcattttttggagcagctcgcgaacaagcttattggagtatcttttcattttataactgcccacccactggatcccgcgaatggcattggtcaaaaaca

SEQ ID NO: 75971 - DNA, 504 bp, Arabidopsis thaliana landsberg
  unsure (1)..(504): unsure at all n locations
ctgcagactcctaaggatctgatctttagaataggcacggaaagtgactactttaggtttgcctgcattggatggaagtatgaggtacagaagtatctcaacttttaatcttcatcaaagcttaggtacatatggtgaagaaagaagagtgttcaaatggcaccacacagtgatggagaaattcttacaattaagagacttcaattttggaaggaaacgatctgcaaggtctattgcatttgctacacctggaggacaaatacgaactttaaacttaaaacttgtttgaccataggaaacagattttaaaaaatgaacattaataacgcaaaagacagtacctataagtatacacnnnnnnnnnnnnnnnnnnnnnnnnataaaaagctcatgaaggacacctcggtctcttgtgatcaagtaatccatttcatctgcaattattagcctgcagataaagtttgaatgagaaacagcgcaacatattatatctactgatctagc

SEQ ID NO: 75972 - DNA, 511 bp, Arabidopsis thaliana landsberg
  unsure (1)..(511): unsure at all n locations
aaaccccaacccgcctgggtcgatgcatggcttgaaggactggtagaggcacttttgctctttcgacctactaccgagctggccgnggagatgtggcttccacccatatttgcgtcaaattccaagcagctctgtcaggcgggtgtcagcagtgccggcatactagagttgccgccagagaccagagttcatcaaatgtcgcgtccagagtccctatttcagcacgtgcgcgatcacctctaaagagcgatcgcaatcctgcacaagagtgaggatgctctcccaattcgaaaccacatcgaagaggcgctcgatttgacgctagagtgcgtctatcgccgatcaagcgggcacctgctgtcgtcacggcccgcgaattcagtttcagcactgcgccctgccaatgacaatgacaaaggtcagtgcccctaggagcgctcaaacagactccctacccgactgaatattcttagcggcaatcgcgcccgccaaggctggatggggaacggtc

SEQ ID NO: 75973 - DNA, 458 bp, Arabidopsis thaliana landsberg
attgatccaagaataatctccaatattattcatgaagctcggtactaaaaataccaaacaggggaatttttaggtgggatatttctgaatatagagaaacaaaataacttacatttatagggacgtatcgttcttgacgacaacaaagcgattgtacagactctctgcccaaaagttctaaatgagtatctatggaaggtagagatgagatataaaactatgatgtatacgtggaggccaagtcatttaattatatgtccatataagagtttcaaaagtctttaattatacgttgaagcacttattcaacggataaaagttggcccacacacgtggctaaattggctatagatgtagattgatacctcgtcattaatattagaaaaatggggaatattctcccataattacgtcgagaataagatctcgattcatgtaactaaaagaagttcttttat

SEQ ID NO: 75974 - DNA, 497 bp, Arabidopsis thaliana landsberg
  unsure (1)..(497): unsure at all n locations
tggcatcgataagcaatattaaattaagatgcatggatttttctcatgtaaaagacggtgcggttgttatgggtactacaactcgcgactttcattttaccaaaataagtcaaaaactgataatgacattgccaagtaaaattaaaaccattacaaaaaagaacagaatatacatatatatgttactaagtgagcttgcacaaaactaagtataaaggagtttgtggtgtgttgcctttttgaggcaataaaagcataatcacagctgtgtagtgcacaattatttcataccttataagttataaagtccacaacaattgcagcctctaaggaaaaaagagcgaattactctttcattgcctcattggttttctttttttcgctagttactaatttgggcaaattaaaaaaataaaaataaataataataataatttgggcaaatttaatctttctttcattntggttntaagagtaaaataaatgtataggagatc

SEQ ID NO: 75975 - DNA, 540 bp, Arabidopsis thaliana landsberg
accattaactgttataagactcatcattttttttctcttcataatatgttacttttatattttatgtttttttctaacttagtaaatggaggttttagactgttttatgggttagattgtgattgttggtttatacttgatagacatttgaatcgatagaaaacaaaattaaatgagaatggaactccgcacacaatgcttaatatggagtaattgataaacttgtaataagtaaaaaagtttcagtaatatccctcaaaaccatacatagaatttgtatcttcattctgacacgccatgaaattatgagaaaagcaatgccctttttctttaataacaattatgagcagattgtgcaaggcacgctccttgtttgtgttgacaactttgttaatgtcaaaccattataatatctgcggtaactaaagtctaagcaaacggaaccaaaaccgaatttaaaccgatcaaaacccacccaaaatctatgttcaactatttgggttaacctttttctcaatcctaacggtttggggttttttt

SEQ ID NO: 75976 - DNA, 131 bp, Arabidopsis thaliana landsberg
  unsure (1)..(131): unsure at all n locations
ttcttctgctttttgttgtttcctagagattttcctagaacgtggtccaagaaaatcacacacattgggtcatacctttncgcacaccagaaaccacaaggctaattcacatacccttgtctttgattgaa

SEQ ID NO: 75977 - DNA, 369 bp, Arabidopsis thaliana landsberg
atttgccctgatttgatcatgaatcctcatgggtttccaaggttagaaaatattcctcataagatttttctctaggatctgtgcgggtagccttattatattataacgtggataaaaaaaaaaacatccttcattgagcgagtgtgtgggtgggtgtattcggagacttttgagtggaggttctgctatatcacgttacctataactataaaaagctgtatgacgcatcaatccccactggctttccagttggcatctattctgcatgcggaatcggaagctaacttgcaccatctaggagcttgattccttggttccacagctttcgagattcctctgaagctattgattacttgggattttgcttta

SEQ ID NO: 75978 - DNA, 349 bp, Arabidopsis thaliana landsberg
tgaccaagattgcacacctaaaaactgcagttttatttattacgcgacacaaactacactacgtcggtctagggcatatctatcaggagatatacacaaacaagactggaccacactaaccattagtgcacccatatgcacaccatcataacggcctgaggcatgtatatggtcctcactactgccacaaatgcagctatacctggcactctcacacccataccttgcacttatatatgcatcacaacaaactctaatgttatctactcaaaacaattatccataattcaccataacaagacaattcaatcatcagagacttcatgcacataaactacaagaataatac

SEQ ID NO: 75979 - DNA, 317 bp, Arabidopsis thaliana landsberg
tattggcagagacaaatgccccactgcagatgtttactgttgtaattatattgccaaaatgcaactgtgcggttaactgttttatttattcaaccacatttcacgcaagatacaactaataactctggcttgagtgtaagatgcatagaccaagccctacttaattataccttatagttatattcaaaccgtctaattaggaaaagaaaaaaggaagtgaatcagttttatactatactgatatattaatttggaacatatctacttaagaagacagtgcatttggaagtacatgaataaaaatacgttcaaccttt

SEQ ID NO: 75980 - DNA, 125 bp, Arabidopsis thaliana landsberg
caataatcgtgatttaaagggttcgcagtctgatggtaaactgatgctacttgacgaaacaagtcagcaatctaagcgcgggccgcctagaacattcaggtgactgcctcctgatactcagcatt

SEQ ID NO: 75981 - DNA, 500 bp, Arabidopsis thaliana landsberg
  unsure (1)..(500): unsure at all n locations
ctcgacggcggctcgagcagccagtggatttttggcttcgatgccaacaacgtcatcaccggcnggaccgggtttgaccggctctatggcgaaggcggcgctgataccttcgtcttcttcaaggccgatacgagttcgacccgctcgaccgccgacacgatctatgatttcagccaggccgaaggcgacaagatcgatttcagccaccgagacgccaactctatcttgaacggggaccaggccttcaccttcatcggatcctcggccttccacaaggttgccggtgagctgcattacgtcaccggcaagtccgacacctggatcgagggcgacaccaacggcaatggcaaggccgattttgtcatccacctcgatgacgtggtggctctcgcccagaacgacttcgcgctctaagactcgactatccaatccgacccnnnnnnnnnnnnnnnnnnnnnnnnnnnnnnnnnnnnnnnngcttctccctgccttgaagagct

SEQ ID NO: 75982 - DNA, 522 bp, Arabidopsis thaliana landsberg
ttgggtactgaggtgaaatcggtgcggaacggccgcggaaagctcgacggaatctatgtcgtgatccgtggcaaggaggccttcctcgtaggcgcttctatccctccattccaacagaagaacaccccggattcattcgatgcagagcgcccacgcaagcttcttctgacggtaaaggagatagccgagctcgagcagaagagcgagcgccaaggattgacagtagtgcctattaaattgtataataaaggctcaaagttgaagcttgagatcgcggtcgcccgaggcaagaagaagaccgataagcgccaatccatacaggcgcgggacaccaagcgtgatatcgaacgagaactcaagatgcggtacaaataacccctcttccctcaaagcgccggacatcgtcggacgttgtgaggggatgacaggcttagacggtttgccccgtttcgtacgtgcagtggccgaggtgagtggaacttcgttaaaatccatttgaatgtacgtgctaagaaaagcgta

SEQ ID NO: 75983 - DNA, 176 bp, Arabidopsis thaliana landsberg
agataaactttgaagagactcttagtgctatgatggagaatatcactctttaagcgggcattgagcttttttgggccttttttccagcggcggtgatctttcagggcataaattgggactggcgtattatacagatcaataaggactttctggggtgatatgctcgcccggtgtac

SEQ ID NO: 75984 - DNA, 190 bp, Arabidopsis thaliana landsberg
tataacaagctttttcatggacacaacttttcacccaaccgaatctcctataatctctaccttctgaccaacatcaacaaaccttaaccctaccataactataccttccttgcccaccgaaaatttgctctcatctcctacaaatactacggcctttagagtctcatttccaaaaaaaaactatgacaac

SEQ ID NO: 75985 - DNA, 563 bp, Arabidopsis thaliana landsberg
atattatgtttcaacgcagagaagtgttagtctaacactttctatatgtaccaatattatgattgatcaaggcatcataatatttattacaaatgtcaatcgatattaaccaatagcaaacaaatttgtacaagaatataaaagaatatcttgtctgaaattgtcagattctatgtaagcttttatagttgatttgatggaagaaagcttacatatagacagttgaattaaacatactcgtgtatatctatgacgcttctaatctcaaacggtgacagattcgaggcattgagaaatcaccatttgtttgtgtctctgctcataaatatattttataaaaaagttcacttacaagccaataatttgtagccttatctaggttcttgtttgtctgagaaaaaattatcataagcgattgagttgtataatgataacaaactaaaccaaatttatttgggtagtcaaatgtcggttttttttttatataaaatctcaaatcaacaatttcacaaattttggatgaatattattagctatgttcaaaagacaatacacagagaaac

SEQ ID NO: 75986 - DNA, 552 bp, Arabidopsis thaliana landsberg
  unsure (1)..(552): unsure at all n locations
ccacgtcgggcatgctggatgaatcgttggccgaagttgcgctcatggttttttcactcgggggaaacgcacgcatgatgcgatccgcctgtccgccgcgtgctgacgcaagtcaggcgccgcctcagcggttgaacacgcagcgcgccagttcttccaggcccggcacgtccagcagctctaccttgcgcccttcgatgcgcaccaaaccctgcgcgcggaaacgccccagcacgcggctgaccgtttcagccgccaggcgcaaatagttggcgatgtccgcgcgcgacatgctcagatggaactcggtcgccgatgcgccgcgcgccgcgtagcgctggcccagatccagcaggaacgccgccatgcgctcgtccgcgctgtggtcgtcggccagcaacgtggcggcacccagctccttgctgagcaaccggaacacgtgctgctgcaccatcggcacgcnnnnnnnnnnnnnnnnnnnnnnnnnnnnnnnnnnnnnncaaaacacggtgtcttncagcgcgatcgcgtcgcacgggtaatgctcgggat

SEQ ID NO: 75987 - DNA, 418 bp, Arabidopsis thaliana landsberg
  unsure (1)..(418): unsure at all n locations
ggacacaaacaccatcctagcatgaaagagacaagacngttaacaaatatacacaaggctggaacaaaaaaacggggagccgggggcgaaaggaaaaaaaggctcagccaaagactaaaaagctaaacgcaacggcaaacgaagcgtcgtcgagataaagcaaacagcagcctgcaataaacaaccgaaagcaaagccacgaagcagacacacgacgcacacaacagaaacgcagagaccaagtgaaactagagccacagaaaacgaaaccccatgcagcggaaaaggaaacacaagggccggccacgggctgaccatcggacaatggacacaaaaggtcctggaaaaaagatcagaccatgtccaaaaacaaccaaccatgagaacccatgaaagagactggaacacagggacatga

SEQ ID NO: 75988 - DNA, 537 bp, Arabidopsis thaliana landsberg
  unsure (1)..(537): unsure at all n locations
ttaaacataagttcacaaaatacaagcccaacaagtattctagtttgagattgaaatagttaattacttttctaccggatctgtaaaaaaaataaggatgacgggacgaaagtaaataaatgtttatctaaattttatttattttatacgtaaaggataatgatgaagtctcgagattctgaaaacagtagcctgcttttttcgaccgtttgctatgcttctaagctgacacgtgtcgtacacatgttagtaggtgatgacgtgtcataatattttggcagagagcgaaatcccatgcgtcggtaaaggaaacaaaaaagcatgagtcgttttaaaagtcttctaatcgtcagactcttttctttttctctagttattatattattaaaattcactattntctgtgtattttttctcgtgactttaaaacagtaatctgcaacaacaacaaaaaaacatgattcaatgttacacgagaaaaccagtgagttataaattaacatcttactaaattgcataaaaagtcgattactaaat

SEQ ID NO: 75989 - DNA, 277 bp, Arabidopsis thaliana landsberg
catttttcttgatatctacagggaaaagggttacatagggtgttaattaggctttagtgagtaatgatccaagtgaattaatggttgcagattttgtttttccaaagagtaattagtgtagaatatcttaacatgggattcagagccacatggcccatcctgattggatttcaagcgaagacaaaaagacgtgagatgcgagtggttagtccgatgtaaacccacccggatcgggtcgggtcgggtgtcagcgggatccgcgggggatgggtgggaa

SEQ ID NO: 75990 - DNA, 144 bp, Arabidopsis thaliana landsberg
attctaacacagacttaaattgttttctttctggtgtcttcagcaggaggtgcatgttacaatttagggcggtttgagaaatgtaaccgggacggggcgctagctgaatctctccatggactcaaataagaccttttgggggac

SEQ ID NO: 75991 - DNA, 546 bp, Arabidopsis thaliana landsberg
  unsure (1)..(546): unsure at all n locations
ctctataacaggtttaacacatcattattttgttttcatggttcttcacttcttatattctgaacatctgggtaatcaggtgtctttttcctcaggtcatccctggctggttggctcgcatgaactaaagattccatctgatatgatcatatacaagcttgtaaaagtgtacataatgtcaacttcattgagaaaatcggctttagcggtgagtttgattccacagaagctgtgacatatatactacttacttaacaatttcaattgttgagttctttgaatgaaaactttatgattaatgggttttgtttttcatggttttaggctcttgccaaaacattaactgtaccgcagttagcgtatcttcgggagcaattcacattgttggggccaagcaaaaatggatatatctcgatgcagaattacaaaacagtgagttgtttttccatgattccatcaacctcttcagttttcttttgcgatcttctgtgattattgaactttcctctacaaatctcanngcatcctaaagagttcaacagatgc

SEQ ID NO: 75992 - DNA, 534 bp, Arabidopsis thaliana landsberg
cgaccggctgatctgccttttcgacccgatcccgcatctcggacatctcgttatgctctggttcaggcatatctccatctcccgactcgccgccgccgcccttacgttttctgagcagtgaaaaattggaaatcatgaatgccccaaatcctgacgtcccagccgtcacggctcctggtctgcagcgggctcgcctgcacggccgccttgtccttcagcgccggcatgtggtccggcaggttcattaggtccagtcgcaatgttccccgtgcgtgaggcgggagccgcaggccgctccgcacgccacacacaatcgcgcgcacctatctcattaaccaagcgtatcaggtggccagcgccaatgcaatcggctcgcctgtgcatagaagggttgcacgcttgcagaatcgggttatccatgggctggggccgtcctgcaatatcgggacaggacgaaacgagggccggccttgaactgggatgacgtccgcatattcctcgccgtggcgcacgcatggcagatcctggcccgcg

SEQ ID NO: 75993 - DNA, 609 bp, Arabidopsis thaliana landsberg
aaaaattgatacgaaatgcccagtatgagtctggtctggtcttagtgatgcacacaatcttttaaaacatttagctttttgaataacaacaaagttggaccgaaggatattcatttccatcgatgtaatcaagaaaacaatccaaatctttcggaaaaaacaaaaaacaatacccaccgaattggatattagcagaaaacttatgggttttgttcgatatctcatctacgaagcagcaaaagaaaaaaagaagaatgattgatcataccaggcagcaatgtaaaatattacagagacagctcttgtggatgatactttgaatatatacaagaaaatgtaatgacataaaaaaaaaaagttggtgcttcttgttaagatcaacacgtagaaagaaagaagacaaagtggaagaaacaagattaataaagtttaataagaaacatgagaggcacatgtaaagcaacgtcaatcacttttgtatgtgaatccatcagccaataaacgaaaacgaatctaaaacataaatatttgtgcaactttcttgaaaggtagtgatcatgacactcttcaatcttataaaatgttttcttctttttaatctctacttca

SEQ ID NO: 75994 - DNA, 530 bp, Arabidopsis thaliana landsberg
  unsure (1)..(530): unsure at all n locations
ggggcacgtcctctgggactctcagtagcctctccgctcctggagatgacaccttcacttataaaaaaaaaaacggaaacaaaattttgtgacagaactgaaccaagtgagagttgattcactggggaaagactctttttgacctcaagggctagatcctctgggattactttttcagccccagcatcatctagtcttttcttaaattctcgactaaatttctcaagctcatccatggtaggacatccatatcttttttgtacaataaaaaagaagaagctttcgttaattctcaaaacatactgcnnnnnnnnnnnnnnnnnnnnnnnnnnnnnnnnnnnnnnnnntactcagtggagagtttgtctagtctgacgtatatatatccacgcggtgaagttttgaaagcaaacaattccaagtctttctcagactgcttcaaaacttgtgcagctatagagagaactctttcaccccatgctacacctttaagaacaattgcaccaccatctgcttcattaccaagctgt

SEQ ID NO: 75995 - DNA, 363 bp, Arabidopsis thaliana landsberg
ctatggtagtctctaatttttcatgaccatctatcgtttatatcagccatatctcaggatttttgactagctgtttaatttcatgtacaaatgtctttttactagttttaggttagattacaagagtttttttttttttttttttactattggtaaattaattatgggtttttgtaaatagattaagaaaattagtgcttggatattgcttttatgaccttaaacttgtctttatctgaaagtagccttgtccaatctcaaaccacttcttaaaaatattgatgtgtgttttgtactatgatgaaagggtttacaaaattctaaccggattcactggattctatgttttggaggttaacccgg

SEQ ID NO: 75996 - DNA, 617 bp, Arabidopsis thaliana landsberg
  unsure (1)..(617): unsure at all n locations
tcttatatatagttttttctttttaaactagtatttgtttttgctaattgattctcgaatctaataataaatagccaaccaaagattccaacggttggaaatagaatcatataaagtctttatcttatcaatttattttatcactgaccttatcgtatcatatcaatttataaatcccggacaaatggaatcatataatatgatttatttttaatccaatatacgcattgttttaatttattttttccaaccatcgttctgaatttttgttgaacaaaatattatttttttaattaaaaaccactcaactgaaccattgataaatcataaacgaaaaaaataaatttataaactaaattggtattcagaacattttctttatctatactgattatgtaatttatggtgataacttatattatatcttgggtattcatttcattggttatccttggaaattttatgttttgagtgtgaaatttcgaatcaaaataatatagaagattttataaatgtttatgaatgagtaaacatgcttcaaacgattatatcaaagatgatatgatctctagaaaatgtgaaagggcanatattttttggatataaccttttaattc

SEQ ID NO: 75997 - DNA, 341 bp, Arabidopsis thaliana landsberg
cagacacgcgaacgaaaaacagcgtgcaaattgaaagaaaaacaaaagaaaaaaacgaaacagctagaaagtgataaccgacacgcacaaaacctgtggtgggggggggaaccagacaagagagcaggcaaccccacgcgaggaaagacagaaagcaaccaaacagtggagacgcgaaggaaccacaagagcatgcatagagcacgcggagaggcaagaacgacgcaaacccccggacgctagaactagcatagaagggaagccgacggcactgcacccacacacagagacaggagcagcagaaacaacagcaccgactgaccagacaacaagggcacggg

SEQ ID NO: 75998 - DNA, 412 bp, Arabidopsis thaliana landsberg
aatgccactctcttaaaaagcactttgctgatactgtagtgcaacatttatcctgaagcgcttgaaccataaatccgactctgtggattatattacgtatagagcttaggttaatatacgacaactactaatgaactagaaggttcatgtacacttaataatttactccaaaaaagtccatcaatgtgtatgttttgcatccacacacacatgatcttgcatcaaaaaagcatcatagcttgtggggacaatgactaaaatctttaaaggtcgacttatttgattggcaaacacatgaatggacaggggcacccttatctcccagtgcacttctctttatgctcataagattaccaaggcaatgatttgtgttcaagactttgggggaacacggttgtgtgatgcttgagag

SEQ ID NO: 75999 - DNA, 247 bp, Arabidopsis thaliana landsberg
ctggtaggatcccccgggtctgccgggggggggaaagccacgttgagcatcaaaatggctttttctcaaagcacatgacccaaactttgaagcagcaacactgattctggatgattacatacacagtagtacaaggcgtgcgatgaggcatattcatcaggaaacgaataattcgacgtcgcactgtaattcacaccatggatgctgctgcacatgggaataaataggcccacgacaatggccagca

SEQ ID NO: 76000 - DNA, 359 bp, Arabidopsis thaliana landsberg
taacactctcaactgacacatgtctttcgtctatttcatgatatgctatctgattcaaaaacgtaaaatgggctagaaaatcatacgttactaaagtactgaaatcctaagtcgaatgttactgtaacataaagtatatagaatcagcatgtcctggagcattaccgtacaccaccatcgagacatgcctctaatctcatgttggcatataacttacagcccaaaatagcaacatggcttaaactaagacccacaagagttgttacttacataccgtgattatagtggcagcattcttgtgatatacacatcccctaatcgattcaacctattgcaacccgttcccatttaaacacttc

SEQ ID NO: 76001 - DNA, 606 bp, Arabidopsis thaliana landsberg
gtaccctatgtccagtagaaatctaaatgtacctcttatatctctctttgtcaggcggatagtagaagatcttgctttggatattttagtgggtgaattaaatttttatattattttgatagttttcaatcaaggcgtcgtttcggtccaatctatatttacctcatgttttttcttcgtctctttcatcctaattggtttgtttatcagataatttgttaccgtacacgagtttttgcggttcagaattcgtctcacgtgttgcgagtggtgaatatattaactctattatgaatatattaactctattatctgctatcttgttatctcgatatttcatattgtttcactctttgtaatatctcgacacttcattgcgcgtgttgaaatttattgcgcgtgttgaagttttaacctctaacggatttattatcagatactttattatcgacattgcgcttcagaattctacattttatttactctccctacgtgtaataagtcgacatttcattgcgagaggacctatatctatattaactctattatctgctatctcgttatctcgacatttcattgcctgttttgaagctttaactcctaatc

SEQ ID NO: 76002 - DNA, 1941 bp, Arabidopsis thaliana landsberg
actcactttgagctaacttttttcgatctttatttggtgacagtgtctttgaacgcttcatctcctggtcatggtggccacttatgatacgtggtcattctttcctgtaccatcttcttcacttgatcctaatggaaaaggcaataagattgggtctacgaatcttgctggactcaattttgcacctaactctggtaggatgaaggttaaaccaaacgctcaggctccacctaagattaatgggaaaaaggttggtttgcctggttctgtagatattgtaaggactgataccgagacctcatcacaccctgcgccgagaactttcatcaaccagttacctgactggagcatgcttcttgctgctataactacgattttcttagcggctgagaaacagtggatgatgcttgattggaaacctaggcgttctgacatgctggtggatccttttggtatagggagaattgttcaggatggccttgtgttccgtcagaatttttctattaggtcatatgaaataggtgctgatcgctctgcatctatagaaaccgtcatgaatcatctgcaggtaccatttgattatgattacggttacctgttgtcactggtttaattgatatgtatgaacaagctcttatgctcatgacaggaaacggcgcttaatcatgttaagactgctggattgcttggagatgggtttggctctacacctgagatgtttaagaagaacttgatatgggttgtcactcgtatgcaggttgtggttgataaatatcctacttggtaagctatcctcttgcataaacctggttctgcaggttcatgctctcactctttttaaccaggtttgggaaaaatgatgtgtatttcgttttttcagttgatactgcttttacagtacgagatatatgctcatatgactaatgactctatatgactaatgactgcttgcaccctgaattatatgctctgcatgcatattatattgcatcataactcatttgcttattcaatatatgcctcacaggggagatgttgttgaagtagacacctgggtcagtcagtctggaaagaatggtatgcgtcgtgattggctagttcgggactgtaatactggagaaaccttaacacgagcatcaaggttagattttcttttggtatatttataagttattctcattttcttcatctgatcattcattggtctttctgatgaagatacctgatgtctttactctctttttatagtgtttgctctatcatcaattaaacaaaaaactacacaagtttatgtaatgaataattaggaattttttggtctcatgggttagctatttgacagatgtattgcaaaatattatcttgcagtgtgtgggtgatgatgaataaactgacaaggagattgtcaaagattcctgaagaggttcgaggggaaatagagccttattttgtgaattctgatcctgtccttgccgaggacagcagaaagttaacaaaaattgatgacaagactgctgactatgttcgatctggtctcactgtaagtatctagtatttactgctgtatgtttcaacaaacctttgaccagcttgtaagactctctaatggcttggtaatgaacattttcagcctcgatggagtgacctagatgttaaccagcatgtgaataatgtaaagtacattgggtggatcctggagagtgctccagtgggaataatggagaggcagaagctgaaaagcatgactctggagtatcggagggaatgcgggagagacagtgtgcttcagtccctcactgcagttacgggttgcgatatcggtaacctggcaacagcgggggatgtggaatgtcagcatttgctccgactccaggatggagcggaagtggtgagaggaagacagagtggagtagtaaacaccaacaacacttggggactgca

SEQ ID NO: 76003 - DNA, 464 bp, Arabidopsis thaliana landsberg
  unsure (1)..(464): unsure at all n locations
gcccatgcctggaccccaacgcggaccgtgcagcgtgcgcgcgtttttgcatttccggatgatcgaatatctgcgggcagggcggcttcacgcggtcgcgcgcacatgaccagacccggtcggcacttagccaccaacccatgtcgtgcgtaatgaaaatacgcccatgttcatgtcttttgcagtacgcaccaattgcaaattgccctgtatggtacgtcaacgcagggtcggtatcggcaataacatgacgggtcgacaggccagcgccatggaannnnnnnnnnnnnnnnnnnnnnnnnnnnnnnntgagggaaacgggcacaccccccgcgcatgggaatacgccctgatcgagcagcgcaggattggccagcgcctgactgttgctcatgccctggtgcagcacggctttcgaatttgatcacccaccataaaaaggattgagcgagtcagggctcctg

SEQ ID NO: 76004 - DNA, 606 bp, Arabidopsis thaliana landsberg
taaagcgagcatgtaccgtggcctcaaacctaactctatatacttcatcgaccaccgtcgtgtttatcgcttttacagcccacacctatatataaaaatctcacaggttagcccaaaacgtttactcgtcctgtgaatttctggtttgctcccatcctatagtagcttggaatttaaaaggtgtttatggacttatcaatactattaaatctgtcgtgttcatggctttagaactcctttcaattaaatcaaataaaatttcaaacggatttgagcaaaaaactatatataggctattggacacaaaacactcatctatccaattccaaccctaagcttggtcggttcggtgagtgtgcttcagtattggtgtgatcttgcgtgagtaggtcttttccaccctttatattatagtcccaagacgttggaccatgagtttaaaactccacatactagtgaaatgtttttctttttcaaatgtggaacaaaattttctcttgttaatttctttcgtattccagcaaccaattttcgaccttaatttggcaattctcattttttcttaattggacaaaacctccaatttttaaaacctaaaattcttaa

SEQ ID NO: 76005 - DNA, 336 bp, Arabidopsis thaliana landsberg
  unsure (1)..(336): unsure at all n locations
tttggatatggcttcactcccaacgggtacttaccctaatctttttgtgttcttcaaaatcttttctcaatacttgaaannnnnnnnnnnnnnnnnnnnnnnnnnttctgctctgtgtactgttagcgaatcctatttaaaattcgaatttccgggaatnnnnnnnnnnnnnnnnnnnnnnnnnnnnnnnnnnnnnnnnnnnnnnnacatgaaaacgaatatgtcgcttcccccagggtggattaaacgataaaaggatcacgacagaatgccatacctgctagcgttttttccttctcaaagagggagaatgcgtccatcatgcttctctaaccc

SEQ ID NO: 76006 - DNA, 493 bp, Arabidopsis thaliana landsberg
  unsure (1)..(493): unsure at all n locations
tatataaccacaatatatattgggtactacgaaattccaatgattttgctctttgaaacaactaaactgtgaattacaagctaaggcaatatatctatcatattctttctttgtgcctcaacttcatccctttctaagtaattcaaattaattggaagttttgtcatctaaattgaagttcttcttaccggatcattttgtctcaggttgatatatactttcttagtctgatacgaaaaacttataaatataatgattagagagagacatgtttgatgctatatttttctggcaaaaaacatcttgattatgaactatatagttcgggatatgtttgatgttgtgtgtcgacatagtgaggtccattaaaaagaaggtctgattaaattttacgtttggaccacaaatctttcttttagaaatcgnnnnnnnnnnnnnnnnnnnnnnnnnnnnnnnnnnnnnnnnnnnnnnnnnacccctcacattcgtaacc

SEQ ID NO: 76007 - DNA, 479 bp, Arabidopsis thaliana landsberg
ggaaaatgtgcttgcctggcctgaacccaacgcgagtgcgactcgagtggctcatttaaggagtttcatcaaagaactccggcccaaacaatgcacggaaggttttttattcttcggactgcgccaccaggctgggcatagccgtgcgtgaaccacaacaacatgtttgcctcctattctgatgagaaagatttggggagggtgtctaccattctcagccaggacacacatatatatgcatccccaaaaggactctccttataaatggcagtagaaaggaactctatctttactctcgactgtgctgctcttggtgagacatgtattgtgaaacatatataaaccaaccaaacgaaaggggtcattgacggattaaatgatcatatatggtgaatgatatatttgtattttgcaagacgctatgcaagcaacccttagaatgtgagaaggaggactgtgtcttgggatgagcggatgga

SEQ ID NO: 76008 - DNA, 520 bp, Arabidopsis thaliana landsberg
tcccgtgcacctgcgcggcaccggctccggcgtgatcgcggccagttcttatgttggcggcatgctgggcgcgggcctgggcgggcttggcctgttcgaacacttcgcgatgtcggcggcctgcatcgcgctggtcatggcgacctcggcggtgatgctgctgcgccacggcatcgagacgcgaggcattccgctggaagacatccagcagcacctcgcgacctgagccgccacctcctgcacggcgcgtgcacagggagggcctacgctccgggggtcgacaccaacgggagcatcccatgcgcgtgctcgtgcttctgcttgccctcgccatgcccctggtcgcgtggctcgaccagtccggcgcgttcggaccggacaacggaaccgtttccgacgcgtatcccacgctgctcgtcgcggccggttacaccttcgccatctggggcgcgatcttcctgctcgacgtggtccacggcatctggcaggccaccggcacccgcagaacagacgacacgct

SEQ ID NO: 76009 - DNA, 578 bp, Arabidopsis thaliana landsberg
  unsure (1)..(578): unsure at all n locations
aggggcagcccctcccaccattttggaccgctacctcccgaatccgcagggagttgcttctgagtaccgtgcgtttcttgagagggacaggannnnnnnnnnnnnnnnnnnnnnnnnnnnnnaaaccgatcgattcaacttcgcggttgtagagtttgtggggtttctgcgagaggactttcctcgccatcatgttcaagccaacgggacatatgtgagggatgacatcgacgtggaaacctaccttgaaccgccgattccgtgaggttgatgtttgattgtggttgtgtgatgtgtttgtcaagggctatcgggtgactggccgtttaatttgtgtgtaagaacaccttctcagacaaaaaattcaaaaattacacgttttcacattatcattttgacaaagttgtagattactaataatatattatattattcattgtatgcacgtgcagatataagtaaatatatatgtctatataatcagtaagcgcatcccactctccatctttcaagaaattaaaagctgaccacatagtacacacagcgaggagacgattcgtgtgatttccactgtagag

SEQ ID NO: 76010 - DNA, 1450 bp, Arabidopsis thaliana landsberg
tgggaatagctacataataattaatttgttagaccaaaaactttagttgaattttgttgaaatttggtatttggtttaggttggcagtttggtgatggtatccgatcacttaagcgttaatgtgctttatattttgtcaatcaaacactagtgctgtttctaatgtcaaatcccatatttacattttcgtaattgggtaatatgcagctagcaagttccaagtactaaagatcgattttttactttcaaagttccatttaagaaaatatacgtttcttcggaatcttctatttgttgatgtatagcaaacaaatgctttcgcttttcgagaaacacaaataataaaaataatgctttcaagattaagaccagaatgaaagcttaggtttgacttaaaattcattgtacctgtaggacttgtcagaaagttaagtggcttaacacagaagctacacgtcccagaattcattctcttttacgaattcatcaaaccctaaatatttcatcaaacaccatatcgttgtcggttacacgaatgtgggccgggacaatctccggcgtggaggtcggcgagaggtacaagtctcacaccttccaccaacaggcttatgacacgttgtccactcacatgctttcatgtctgtcaacgcattacccggccgtcctctcacgtgacaaaacccatgctccataactccatagaacatgggtgcttaatcactttacactccttggtttaaattaatttattggtcggtttgcgtttcagtaaccggttattaaatattctcaaccaaacctaaaagtctgaatggggcttttccatcattttaaatatttttcaaaattgtatatcactttatattatttatgctattgatctcagtatggttaatgattttacaaaactattttactcgtaactataaattatacaactaatttaatccagaaaataatattttaatggtggacattttgatcagactctttttctataattacaaacaatacagttacactttgtactacattagtgctatattctgtcaaaatttggaattgtttagttttcatatagactttcgttttttctcgagaaaactagtgtaaagtataataagcacccaatcaatattttaattttatcgatgacaacaaagcttagctgtctagaagaataaatctttggagcaaagcaagaaagttgtaaaataagtgatatttagaagatcgttagtgacttagtgtgaatcatgctactctggcttcatctgtcagcataatagcatatgttctttcttcctaaagttgctttcatgacactcaacactccttcataaaaatgaccattattgagttaattactctctttttcaaaacattatttagtgataaaatattccggccgacaccaacgcaataaccgggcattgaatgcaccacaaac

SEQ ID NO: 76011 - DNA, 448 bp, Arabidopsis thaliana landsberg
agatatagtttacaaattaatgctatgcaatcttactttgaattcagatttttaatcctgaagagcgtgaaggagtggaaaagtttgctacaacggttaaagaaggtccaatattgtataacccatcaccatcctgtagtttggaattgaaagaaaagttagaaacttcacacctcaaggtatataatatatgctcactgaatatgatccagaacatgactctttcctattatgtttcagagtgcttgaaaaatattctgtttttttccgtacagtttgatgcttctcttagaaggcttcaagagttgggaaaagacagttttctgaatatggataataagtttgagacatatcaaaagagattgtctatcgactacagagagattttgcattgccttgataatcttggcctgatttgcgcacacttggtatttttctaccagtttag

SEQ ID NO: 76012 - DNA, 567 bp, Arabidopsis thaliana landsberg
agccatgacataatttagccctttaaagagttctgtcaaagctccttttatcatcttctctgcgtggcttagttttttcttgcgggtctggagcttatttcctccatctggaccatttttcttcgatgaagactggtttatcaagtaactgatagctgagaatgtacgagaaggatttgtcaatggaatcttgatcttcacattcttcccttggcagctgaaaacacgactagaaaccgtggtcagcttcgagtcctcgttgttagctttgatcggttcttctgatcccagagactccaatgcttcttccccattatcctccaaattatctaagcaagatacctgaagttgcatttcctcggttctgcccctaacagagtcgtcctctgtattcagaaacagagcaaatagttatagccaattcttaaaaaatcattcatttaaacaaagagattaaataaacataataacactagtctgattaaataacataaaaacactagtctttctttttttgggtttaaaggtctactttattaatcaagcaagtcttatatatatatttta

SEQ ID NO: 76013 - DNA, 448 bp, Arabidopsis thaliana landsberg
ggtattaatgatggtcataatctggctattggcttgttatgtgaatttcccattgggcttatataatgaaattggcacaaaacaaagcccttttagttactacccaaatcgagaaacatggatgacaataatgctcaaacactttgaacaaaagcaaacctatcctatgtgatgtgactgattatcgggataaatcgctgctataaactcggaaccatgttcatgacaattcaatttcaaaacggtgaggtcttaattacgcgacagcaaagagatgtactcaacatacaaaaaaaagcatctcatgcaaaaagtggacgcattttgttataaatggtacaagaaaaatgctaacaaattcgttcaaaacaaatttatataatctcaggaaaccgttgtcagctgagctatttaagcaacctgttggtatgttatctcgtaaacactt

SEQ ID NO: 76014 - DNA, 465 bp, Arabidopsis thaliana landsberg
  unsure (1)..(465): unsure at all n locations
gctaacctgaaatctatgcctatgcctttaaatccctaccatatggtactgataatttgctagaaaccccatgtgggcattccccaaaggaatggtactcctacagacgtcttataatgctaggctctagtgagtacagacacnnnnnnnnnnnnnnnnnnnnnnnnnnnnnnnnnnnnnnnnnnnnnnnnnnnnnnnnnnnnnnnnnnnnnnnnnnnnnnnnnnnnnnnnnnnnnnnnnnnnnnnnnnnnnnnnnnnnnnnnnnnnnnnnnnnnnnnnnnnnnnnnnnnnnnnnnnnnnnnnnnnnnnnnnnnnnnnnnnnnnnnnnnnngcaaagttctccgatatgagtaccaccctgatcactatctacccaacattgactgcatttcactgaatggaatactacgaaagcatgacatcaaaagtctaaaaacagaccagcagatctgactgtctctttcc

SEQ ID NO: 76015 - DNA, 613 bp, Arabidopsis thaliana landsberg
aaaggctctcgggttgcctgtaatagacaccgctcattagaaaagccgctatcatcatcatcatcagcctcagtttataatgttctttttgtccgccgtgaagattacttagcccatcctcgtcatggcggtaaagtccagtctcggctcatcaatgaggaagaagtgttcgactcgttgcatcattgggttgcaactgggtccaccggtctgaccaaatgcgggattaaccttgtgaatggcttgcttgcacacatgtcaatgaaagatcaagtccgagccattcaagatgcttcagtgatcataggagctcatggagcaggactgactcacattgtctctgcaacaccaaacacaacgatatttgagataataagcgtcgagtttcagagacctcatttcgagcttatagctaagtggaaaggattggagtatcacgcgatgcatttggcgaactcacgagcggaaccaacggctgtgattgagaagttaacggagatcatgaagagccttggctgctaaagacaattgaataaatcaggattttagtaagtgagtgagttctaatctcccgtgaccggtgtgtatttattttttgaaactcttggatttt

SEQ ID NO: 76016 - DNA, 377 bp, Arabidopsis thaliana landsberg
gatatgatggtaacattctgaacattgcttagaggcatttactacgtgattcgggtataccaccaaattgatggggtacctggatttcaagactactgcctgacacaccattttgagaatattatgaatctaattactttttgaatgtttcagcgctataaacgggcatcgaataaaatatactttccatattcttttcgtttaaataatgagattatttacgcttaataatgttttaaaaaattctttgaatttcattccattttaaaataatattttttgtctatatgttttactaaagacactatgatttgaatggattaatattagatacggataaggaaaacactattacatttatttatgaaagggcttta

SEQ ID NO: 76017 - DNA, 530 bp, Arabidopsis thaliana landsberg
  unsure (1)..(530): unsure at all n locations
ggctgatttttctgcacagaccctgtgccaaactcaattttgcattttttagaagctgtaagtttatcggatatgggcgaataaaaagtggaaaaggagtccatgacatttgagaagttcagggaccaggtgctggctgatttcaggatcgcctgcatcagcagggaagcatcgctgctgggacgtaaggaagtattgaccgggnnnnnnnnnnnnnnnnnnnnnnnnnnnnnnnnnnnnnnnnnnnnaatagccatggccaagcaattcaaagatggtgatttcaggtcgggatactatcgcgatcagacctttatgatggccattggccagttaaccgtccaacaatactttgccgctttatacgcgcataccgatatcaatcatgaacccgcttcgggcggacgccagatgggcggtcattacgctacccgtaatctcaatgatgacggaagctggataaaactgacggaacaaaaaaatttcttcgccgatatctcttcaacagctggccaaatgccgcgtttatt

SEQ ID NO: 76018 - DNA, 586 bp, Arabidopsis thaliana landsberg
agacagtattcgtattatccattttagtatattacttttccaaacatttaatcattaatacccaaaaaattagaaatatgtatctgaaagtataatgttctccaaatacatgtcccaatgtggaatttcattacataaaacttttgaacctaatttagaacccaaaattttaatcccgtctttgaatcaaaataaattgaataatactatcttttaccatccgaattatttgtttccaatgtttaccctttaactttcgtcccaatcgccgacccacccaccatatattaaatgagtcaacaaacaacaaataaatatatttaaaatagggattttgtgtaaataataaagattctttgtgcaaattatatcttaaataaggatttgcgttttccacaaaacaaaataaataaagatttgcgtaaataacaaagtttccaatttccatgtgcaattattttcaaatatatatttgctatcaatgatgatttatgtagaagaaggggttgatacaataatttaacaataatttattttaaaacacttaaagagtttgaagtacagataattttattttattttttga

SEQ ID NO: 76019 - DNA, 578 bp, Arabidopsis thaliana landsberg
tgatgctcgcgtttgcgccgattcagccatcgcgcatgtttcgtttacggcggccggaatagcctgcgctcaggtccgcaacccgcaggtgcgccatgagctcccacgaccgcaaggacaaccgcaagccggacaagcccaccccgcccgagccggacgagcagcgccgcacgcgcaaatcgcacgagagcgaaaaccaggacgaagcgctggaagaaaccttccctgccagcgatccggtgtcgcccttcatcccggccaagttgccgaagtaatccccatgcacgctgcacgtgtccgtgcaccgatgccggagcggggccggacaaggtcttcctcgcccggccatcgacccacgcgcgcgggcgaccggcccgtctgcacttgcagcgccgcctgcacacatgagcgttgccacggacgatgcggctgcgaagcctgcgcgcttgcctggatgatcgaccaggacgaccgcgccctgtggaacgagcgcggccagctggtggcgccggacaacttggccgtcagcgcgcgcaccgtgcacgaccctcgccagctcagcctgcgttttcgaacgc

SEQ ID NO: 76020 - DNA, 615 bp, Arabidopsis thaliana landsberg
  unsure (1)..(615): unsure at all n locations
gccgtgtcgccataccacggcgatgcggcggtcctgggtgttcagcctcgccaccatctgttgggcgaacagcggcggcccggacagccacaggggctcactcgacggtggtgcggcgacgaacacgcgggtcttgtccgggcggctgccgacgaacaacccggctcccccggcgggaatgccgaacccgaggcggtgacgctcaccgacgatcgcgccgggcgacaacagcggaacgcggctggcgaccggaagacagcggctcagggcggccacctgttgccctgacgccgatcgcagaccgaatccggaggtcttgtcgaaagtctccgatcctcgcaccaggtaggtgatcagcggctgagccagcgcctgtcccccgccgaccggggtcagcgacagcgtcgtgaactggcggtgggactgcagatggttccaggctccggccgactcggcgttccagtgcccgcgcgcgggcacgtagctgcgggtgtgcacaccgctgcggngtccgcagttacgccatcccgggctggacaggggacgtgacacctgcgccagcaccgtgtcgtgcagggcgcggacctgcgtggcgccatgagcctgccgccgaaa

SEQ ID NO: 76021 - DNA, 142 bp, Arabidopsis thaliana landsberg
  unsure (1)..(142): unsure at all n locations
gtaaaggacaaaatttggagtatcaatttttataaaggagcttcagactatgcgganggaattactatatataaaactgcatactccactacttggagaataatatagaaaaattatttttatagaaaccatattttcaaca

SEQ ID NO: 76022 - DNA, 590 bp, Arabidopsis thaliana landsberg
atatattgttttttccatgagacgctgtgttatgtggcgaccagaaaccgcaacatgcagaatctctaaaacttgtcccaattcataaaaagttttgatttgatccattatgctccactacccactaccgtattacatcatactcgtgctctaaaagcattattttccaataactttttgtagattacgtatacaaagaatgaaacatgattattgttgctgcagatctattggccagctgttggaaatatgcgtaggaaacccacaagtggctgaagaggtgttataaattaagaactcaaaacactatataattttaagtaaaggtacttttagtagtgcaaaacatttcatatactgcagccggatacaaaatttaacaaagccaaaattagcattacaataacactctaccaatatgcaacgatcgatccggtgtttagaaatcggacactcattgttttctcttattatattttaataatcgccgctagtcttttctttattttagactgattcattggtgttaggcctcgagatcacaacacttgcatcatttgtgtccattttgcatctgcttttgatgggag

SEQ ID NO: 76023 - DNA, 270 bp, Arabidopsis thaliana landsberg
  unsure (1)..(270): unsure at all n locations
agggaaaccaaaaaggacacgacgcggggccagacaaacacggaacaaagacaggacagaaacaggaacaaggcgcggcaaaacaggccgagagacaccgaacaccaaaaaccagaacacacggaacgacaaggcacggccncaaccgncaaggacagagaaacaacacaagagaaagcgcagggaagacgaaagcccaacnacnaacaggcgaggccgccacacacacaaggacgaaacccgaaaacagaaaaaaccgaagaaccaaaa

SEQ ID NO: 76024 - DNA, 214 bp, Arabidopsis thaliana landsberg
  unsure (1)..(214): unsure at all n locations
aaaaaaacgacggaaacacgaaccaacagaaaaagaaaaaaaacagcgcgcggcgcagggaaaaagatcactatcatgagagaataattcggccatacaccgcggaatatgagatgaatcttacataggcaaagaaagaaaaaaaaaaaagaaaaaagctaacccctgggtcatagtcatacaatgaanaaaacaagcccgtccagtaaggaaa

SEQ ID NO: 76025 - DNA, 197 bp, Arabidopsis thaliana landsberg
  unsure (1)..(197): unsure at all n locations
agaagccaaccaaagaggagaaagggcccaaaaacgagagacacgaaaaagaggggagaatccccatccaaaccaagaggaagaaccacgaggatcccacgaaaacacgagggaccnnnnnnnnnnnnnnnnnnnnnnnnnnnnnnnnnnnnnnnnnnnnnnnnnnnnnnnnnnnnnnnnnnnnnnnnacccaaggg

SEQ ID NO: 76026 - DNA, 370 bp, Arabidopsis thaliana landsberg
  unsure (1)..(370): unsure at all n locations
gtggcaggtatatcggtttccggtatatctatatatcttaaatttttttctaaaaaaacctacaaaggggaataggcaaatgctataagtccatcctcacaantccatatcttagactataacgtggatgatttactctggcaagtttggtataaatagaggattttgcttagcgttttttgcgaaaacccattatttccaagacatgcagcttatcaatcgcttccgccacatcttgttgagtgcgtttaaagtcaacaccggtttctttactgctcaagaatttttcaaccccctgtttgccttctaaagccgccgcttcatttacaatctggagggcgtttgacgctatcttccaaaatgctgatat

SEQ ID NO: 76027 - DNA, 160 bp, Arabidopsis thaliana landsberg
tttttttttttttccgcggggggacaaagtactcttgatgatgacttgatcctctcgatctattggagggaagtacttattgaagcggttaagtgtggtacatgaactcgactgccactctctatttcacttcttcaccctagaagttcaaacctgggga

SEQ ID NO: 76028 - DNA, 294 bp, Arabidopsis thaliana landsberg
  unsure (1)..(294): unsure at all n locations
aggngcggggagaanaggggagcaggacnggcgcaacccgaaaccggaaaccanaacccannngannancacacggcnaaaaaaaancacanaacccgaaacaaaacnaaggaaacaaacccangaaangaagcaaggaangggcccaaagcnacccncgccnngggggcaaagccaacncaaaggnccccaaaccgacangaangccaaaacnaanacccnnacagancacaaagagaggaagaaacacaaagaagaaagaacnncaacacacggagagaggggacacagaga

SEQ ID NO: 76029 - DNA, 364 bp, Arabidopsis thaliana landsberg
  unsure (1)..(364): unsure at all n locations
tatacactggcagganggggnaaaaaattttaaaattttcttaagaaaaaacgcggagaggggccagggggaacattgaaggatacaaaccccacccacccccccnnagcaataaaacatataaaataagcaataatgggagaaaacaaacttggaatactggggaaaaagttggacttaatacaagaactttctatnnnnnnnnnnnnnnnnnnnnnnnnnnnnnnnnnnnnnnnnnnnnnnnnnnnnnnnnnnnnnnnnnnnnnnnnnnnnnnnnnnnnnnnnnnnnnnnnnnnnnnnnnnnnnnnnnnnnnnnnnnnnnncctctcacgccgggaagagaccccttggcataaaaattcac

SEQ ID NO: 76030 - DNA, 559 bp, Arabidopsis thaliana landsberg
cttttcaaactaaaataaacaggttaccttattaaacaatgaattcaggtatgaaatttgtaaatcgatgatcattataattttccttaattatctaattctaagatagtctaaccatgaatattcttataatatcttaactgtataggagattctattttcatccctaaattatattcgtaattttattcggatatacttgcttttattttcgtcaacagatatatatatatatatattatttatttttacttttcattaaaattagtgatttaattctctattatttgtgtactatataaaacaaacaaatgaatcttataatgtttgctttttcgtccataaatatttccgggaaaaatcgttagatataaatcgaacctagtggtgagtgactcacacacatgtgacaattcccaaaataagtcccccacgtacgctatgtctgttttagtgtgcatgtagtaactattatttactgatttagaatatgattagagaaaataaatacttgtaatcattttccttattagcaatgttgttgggaaaaaagaagaag

SEQ ID NO: 76031 - DNA, 205 bp, Arabidopsis thaliana landsberg
atgttttttgtttctccaaaaactttttgataactttaaaaatctagtaaatgcaacattttctaaccttttaaagtatatttgagggttaaaccgagaattaagacttacaagtcttgggataatcactctataagaaacactttattgtggtttggctcacttttcaaccttactagattttttctaaaatgttctatccctt

SEQ ID NO: 76032 - DNA, 528 bp, Arabidopsis thaliana landsberg
ttttagaaaatactaaaagttacacttatcttttttaatctatggttaagtatgtgagttggtctctgtcattcttctttctttgaaatcttgtcgtccttttatgaaccaactttttcttcacctctagtggttgtgaccaatttaaacaaattaattagtatttgcgtttctgtgtacgtaattaataaaacgttacgtacgtgtgctctgtgcgatggataaacgtgagagtgatcattataccttttagatccaacaaagctcaaacaactacattcatgaatgatatacaaaaaaaaaaatctaccttcatgaatgatttatataccattcttatacggtttcataacgtgaaaaaatgattctcatatacaccttttcatcgtcatcaattcttatttaattttgaaaaatggttcccctagttggtggtatgcctaaaaaacagatctagtagaaaaaattaatcccctttttgtttacttttacgaactattatctataaactatttcaccattgaacta

SEQ ID NO: 76033 - DNA, 236 bp, Arabidopsis thaliana landsberg
  unsure (1)..(236): unsure at all n locations
tggccaacatataaaactagttgtaaatctaaaaccggtttttgactttaataaantcaaaacctgattgtaagtatactggggattgaaaaaaacaaaaacaaatcaagcccaaaacttcgggagatgggtctgtaaagtgaatgctagtggagatctctactactcgaagaatgtgatcgattaaaatggagatttcttttttttatagcctttggaatcgaaatacacatgca

SEQ ID NO: 76034 - DNA, 163 bp, Arabidopsis thaliana landsberg
  unsure (1)..(163): unsure at all n locations
acatctctcactaaaataccgcatagttcacagtctgcagcagtctcattttgttatagatgtactctgtaatatggtggctgtggactggtgcctgccataagtactttgatagctttgtctgtcattcgtacccgggaatagtgcattctacnngcctaga

SEQ ID NO: 76035 - DNA, 620 bp, Arabidopsis thaliana landsberg
  unsure (1)..(620): unsure at all n locations
ccggctttccattgccgggatatcctttagggtactcttctttcatttgagaatatttagaagggaaatccggggaagggctgtctaccaccgaatagtaaatgcaaagtttgatacctgatccttnnnnnnnnnnnnnnnnnnnnnnnnnnnnnnnnngtttgaagggagtggcatcaacaatattatagttagtcagctttgaatgaaacatacagaatccatcgtgatgttttgcagtgatcacgatgtatttcataccggctgcttttgcaaaagcaacccagcgtttggcgtcaaaatctgtaggattaaactccttagcatacttctcatactgcttcaccgggatatcagctttcagcatgatccattctgcatattttgtctgcttaccatttaattcgccggcaggtaccgagtatagcccccaatggataaagagtccgaatttcgcctccctgaaccattccatgcggtgtgcatcgtgggcaggatctatgccttcttatggatacttgccgctctcagtaaagaagggattgaagatataccggctaagctcaacgcngatgcttttattaaagtgctccttttcataatcattcaagattaaaaat

SEQ ID NO: 76036 - DNA, 144 bp, Arabidopsis thaliana landsberg
accatctttctaaatactcaccgctaaaaagggtagcaacgctctccgttcctctttctactgttcctacatcctttctaaccacaagaatccttacctgcaatggcattccaattcatcaccttataagattttgagaataca

SEQ ID NO: 76037 - DNA, 569 bp, Arabidopsis thaliana landsberg
  unsure (1)..(569): unsure at all n locations
tctgagcagaccgactggcgcgaattcgtggaatctaccagcgtggtggaaaaggttttgtcagacgatgtgaatggtatctaccgcgccatggatttttatacccgcgaccagtaccgccatgcagtggaaaaaannnnnnnnnnnnnnnnnnnnnnatcagaaaaagatatcgcggaatatgccatacagctctccaggcaaaaccaggcatccggtaagnnnnnnnnnnnnnnnnnnnntgtaggatattacctggtagataaaggcgtgaaggaagtggagctgtatgcatctatgaaactgggtttctgggagcatatcaaaagagggttcaataaaattccattgctgggatatacaggaagcatcttcctggtgaccctgctgttcagctggccgctctggagccaggtatatacaggcgcacccgtgcaatgggagcagataggcctgttgctgctgatcatattaggcaccagccagctggcgcttacgcttgccaactgggttgccacacaactgatacgtccttttctaatgcagcggatggattattccaaggcata

SEQ ID NO: 76038 - DNA, 508 bp, Arabidopsis thaliana landsberg
  unsure (1)..(508): unsure at all n locations
ccggaagacgaacaatgtataatgtataatgtataccaaagtttcggtttagtttaagtagtataccacagtcaagggttggttaccaaattaaataagtttacatacctacaattttgaaatcaatagcctgatttttatggaaactactttaaacaatttccataaatatttggtagtcgtttatggagatgatctaattcaaaggtcatagtcaaagtcaaaagcatatcttactgtatatcctccgaacattctatatttgtgaaatattttgaactatatatttcatttcataagttaaaagggaagaagaagaaaagacacaaaatacgtaaagaaaaggattaaaatggtttcatcaaggaaatgtgttttccttgtgttcttatgtatggctgttctcttgaatccaagtaggcaaacattaatacttacagatgaatatgcgttntactgttacaatacatttgtctaaggattctttatgtttttcagtgataaacta

SEQ ID NO: 76039 - DNA, 503 bp, Arabidopsis thaliana landsberg
atctcacagtcagatggattgatctgttaataacaaaaagggtttaagatttagtcacgacacatggaaccgagacaaaggtggcaagaagaagcaggagaagaaacttactttcaattcgttatagaaagcatgatcccatacatgttccatatcatgccaattgtgcacaataccattgtggacaggataatttatatccaattgatgccggagctcagagcaagtctccccaacaactatatcctaaaatgaaacaaaaccaaaacgtatatgaatccgaattacgcatatcagctcagtcaaaactcaaaaggctaacaatgatctggttttgcttatttaaagtcacatatatacataccttgacttggtgctgcatgagcgattcttcataccgaatcaatggccttaccacgacacaggggataacagacgttgggaaattctctacagcaaatacacattttacatactgtaaaattcaataagaggctcacaat

SEQ ID NO: 76040 - DNA, 107 bp, Arabidopsis thaliana landsberg
agaaaacaaatataggcatgcactccaatatttatggtttcagcgaggacccgcctggcatcatgagcaccggtgagagaaggaactgatgcattatggcaaaaaaa

SEQ ID NO: 76041 - DNA, 135 bp, Arabidopsis thaliana landsberg
  unsure (1)..(135): unsure at all n locations
gatatctgctcttggtctactctccatgacctgacaaataaaccgcaacagctatttttaaactattgatggggatttcaggcnttttactnacccctatccccccacccccctaccttaacagtctctccatct

SEQ ID NO: 76042 - DNA, 310 bp, Arabidopsis thaliana landsberg
  unsure (1)..(310): unsure at all n locations
taaagttggaactttggtccggtgcagatcaacggcaganacataagcctttcgttaagccagaaaatgtaccaaaatgaaaaactaagcaattataataacacagtcaggagagtctataagctaaacacatggatgagagattttgaatttccactcatttttatgagcaacccaaatccactaaaatcagatcgttggacactgaattccagtatagcttcgacttacttgtacgaaagcttccatacctctctgacatttgaggaaccatctgtgacttgagacaccaacgttgaagcaagagcac

SEQ ID NO: 76043 - DNA, 549 bp, Arabidopsis thaliana landsberg
agttggagattgcttgttgccgtatattgtaactttttgtgtttttatgtctctacctctgtgatcgggatgggggtggttgtgatcaaaattagaaagaatggtacatattgcataaaaataaatatatctcttctaaattgactagttaggtcatactatttgtcaagattcgtcaagaattaaatttactattcagtgcggtgaaaacggacaatattttcagtgtatacaaatgatttattttattttattttaagaccagagattgtttttaatcataatctaccaaaaaatcattataaattcgcacattgatgtattctagaattttaatatcgagaaaagggttttgataataagcaatgggaaatcactatctttcaaaatcacaactgtaccgaatggtatgttaattagtagttaaaaaaacaaacacacgattaagacactgattaatccggtggagaaaagaacaaacaaacaaacaaacatttattgaatccctaaaataagattaattatttaccctaattagaaactcataag

SEQ ID NO: 76044 - DNA, 188 bp, Arabidopsis thaliana landsberg
ccggtgctggacattctatcaaccactggacacactttagcttttggagcgcttgcagccgcacctgtggctgtgggaaaggatgttgtggtgcctaacacgaacgatgcatcacagccctatacaaacaaaaagtactgcgacactaattcagtagacgacatatagagaaatcatacagacatata

SEQ ID NO: 76045 - DNA, 237 bp, Arabidopsis thaliana landsberg
aatgtctgcgtgcgtttagtttggtgttatctcattttttaacttaatcaagtttgtcgggaaaaaaactactctacggatttcataaatattatgaatgacagacgtaatcaacacattcaagatataatcatataaccatgtcttttttcacttttctcaatcatctacaaagccatgatcatccagaggaaatagttacaatcagatgagaaacccaaccaccattggaaaaaa

SEQ ID NO: 76046 - DNA, 362 bp, Arabidopsis thaliana landsberg
agaccatagcagtttacatgagattagacatcgtgaatggtttatttctcttttacagatacccgtagttaagccgaggagacggggagatttaattgtagaaataggaaacgcttagagtcattggatcgatacaagagccatcttcacattagcaatagatttgaaaatgaacggtagtggagtgcaccaaaggaccaagaattatgttattgttgaagacgaaatctagcaaagcatccacatacctagcaaaagctctcaagatatctaaaactcacgcaggactctaaacatttatagccagagcacggccttcccaacagagaagtataccttgttatcttgccgtttacagaact

SEQ ID NO: 76047 - DNA, 257 bp, Arabidopsis thaliana landsberg
  unsure (1)..(257): unsure at all n locations
ttggtgctctatgttcttgctactctcattagataaagttattccaccattatgagtgttactattcggaaccattaacagaaaaaaaaaaaacagaaaaatgaaaacccaaatgcaaacaaaagaaaagtgctactttgtgtttagtattttacactttcaaaagaattttatagacaaaaaagttctatacaatattacgaagttgaaaaaaagtggaagcgcaaaaaggcgaatgtaattgaannnatgcaaaa

SEQ ID NO: 76048 - DNA, 111 bp, Arabidopsis thaliana landsberg
gaacataaaggaataccgagaacagcttgagtctctatccgcgggatgacggagagtccgagaaataaaaatcggatgacgtcagaaagaatcgtaagccaaccatgaatt

SEQ ID NO: 76049 - DNA, 314 bp, Arabidopsis thaliana landsberg
aagctctccatgagttaggttttggggttaagggtcccaaagaaagtcactctggtatgtttcccaagcattcatctccacatcattagcaaactccatagggtcgtatgttgaatgcatcattgtagtaggagatcccaaagttgactcgttgatcgcttgaatttccctgggcgagagtctgaccattgttggagctacattggaggagcttgagctgttcacttgcatggctgactctgttccttcggtggtgcgggctaatgtaacctcatgaactggcctgcgaatgctgtctgagctatattcttcat

SEQ ID NO: 76050 - DNA, 526 bp, Arabidopsis thaliana landsberg
  unsure (1)..(526): unsure at all n locations
taagatattttctgtcgtaagtgatgattgtgatttggtgatctcttattccaaagaaatttatttgtgtagttgtgtatgcatttatatttgatttatgattactaatgaacactgcttaaaaaatatgtgaccagaattttcatttctcttttagatggatcttgatctgaaaagtccaccaaacaaaccgcaacacagtattagtggtatgagtatggagacgccctccgaagcaacatcatcatcaacttcagttactgaagctcaacgctgcttgtcactctattttgctctctgtaccaaggtcttgcgaatttttaccattcttcgactaatgactaatctagtctttaagtctgtggcaaaattttgctaaaactcttagttcctatgtgcctattatttgcagaagcactccctttttgttcatgtattcagcatatacaagaatgcatcagatcccgttaagcaggtactggagcccagagttaagaagntttataatatattttcttctctgcta

SEQ ID NO: 76051 - DNA, 525 bp, Arabidopsis thaliana landsberg
  unsure (1)..(525): unsure at all n locations
tgccggggaacgtcaagtccggcatcttggcaatctgcagcgcgcgaaagtctcgataaagccggcaacggtggccagaaagaacagcaggatcgcgggtgtcggacggtggatcgaccacgccgaaaaattcacgttcatgacgcttccacgctgatcagatcgccgtcaccgatgaagctgccgccggacttcacgatctgcgttttcggcgtcagctcgccgctgaccgcgatcagatccccattgcgcacgccggtcgtgactttgagttgatggacgacgtnnnnnnnnnnnnnnnnnnnnnnnnnnnnnnggccatcgcgcagcacgatcgctgactcggggatgctgagcaccggatgctggccggtttcaaatgcgccttcgacgaactggccggcggtcaaacccgcgtccttgggcagatcgacatataccagcgcattgcgactctgcagatcaacggtgggcgccagctggcggatcgtgccgtgaacgagcgcaccgtcgtcggngcgatgc

SEQ ID NO: 76052 - DNA, 586 bp, Arabidopsis thaliana landsberg
taccggctgactttgctagccgttgaatgttaactttacgttgtttttatatctgtagattttaaattataaaaaaaggggagggggtgtttacaataattatcttctacacggacgtgattgtgaatgagaaaacttggtagttaagatataataaataatcaattatgatcatactaatatttaagattctcgcttataatgtgggataaagaattgacaattgatcatacattcatactaatattttaagattctcgcttataatgtgggataaagaattgacattgatcatgtactaatatcttaagattctcgcttataatgtgggagattaaaataatggatataatgtatacaggctatatcatcctgcactaacgatcccatctacttattctgaagattataaaatatcaggcttgcatatatagaagaataacatgtacctaacttgttggttaaacaattaaaacaaaatattcaagaagctttgaagaaccatggcgatgtttaatattcagcctgtgctttttttccttgcatttttttttttttaaccgctttggggcacgccatccatttt

SEQ ID NO: 76053 - DNA, 606 bp, Arabidopsis thaliana landsberg
actacgaaaatgaaagaaagagaagatcaaacaaaatcacaagggaaaatggaattaaagctctatatttgttggttgccgaataggaattggattcttccttgtttgttgataaaagatattaaattcataccacaactttattcccttccctcacatgcaacttcttttctttacttttgtttcttattacaaattgagatgactcatgtcgctctcgagcttttatttgtaataaaaagaataattcgtacgttaatctgtcgaatcatttgttacaataatacaacgttcttaagctaattattctccttcaatcaaacaattatcaaccaaactattagacataatgctgatcatgacttacgaaattatcaacttgaaatgaattgactataagtagacaggctcatatcctaagtatagataacgattgtatcaactatcaaccataccaatttagggtcataccggtttaggtttggaagtgactactgtctggtggttttttgatactcattttagtatttactaaccttttaattcaggggacaaatcaacttagattctaaattgttgaaaaaataaaaagattctaaaataata

SEQ ID NO: 76054 - DNA, 465 bp, Arabidopsis thaliana landsberg
aaccggcatcgtcgctcttggccagcaccagggccgggaaaggtttggtctcgccggcaaccagcatgcttcgggggagggcgcgcctgccggaccgtacatcaacgaccggatcagccttgtttttattgctggattccattcttttgtctcctatgaacgaggtgcctctcgagcacgcagcttgatcagctccgcatgaaaaaagctcttgacgttgtcaagagcctgggttgtgtcgtgcgagacaccgggcaacacgtccatcacgaccttcgcaccggccgattcaaacgacctcttcaggctggccaggcgctcgggccgggtagcgccggcggaattggcgcccggcatccagtacttgctgctttccgtatgggtgatttcccaggtttcgagatccgccccgcccacgatcatgtgtatgggaatgcgggcgaaagcattgcgatcgaaactgac

SEQ ID NO: 76055 - DNA, 119 bp, Arabidopsis thaliana landsberg
tggttctttaccccgcctaaatcaggccctgacgtaccttacataatggattaattggtatgttaaatgtgggggtttaagttaatataaaaccctacacacttgaataaaacctaaaa

SEQ ID NO: 76056 - DNA, 330 bp, Arabidopsis thaliana landsberg
  unsure (1)..(330): unsure at all n locations
tggtgagtgtcccctggccgtgagtttcctcattcttcaggtantcattcttatgaccaaaattattctgggggcataatgagggaggggggggtaaccatccctattgtaatgacttattaaaaaactacacatattgataaccttttgaaatgtgtgataaagatgcacagtcatgtgttggatgactcgtgacagacacaagccgtgaatgcttctatgtaaatactagcctggcaatatgttacctaccatatagcttttgaacattttattagttactacagtatatataatctagtcaccaacccaaatacagatttcaggatg

SEQ ID NO: 76057 - DNA, 513 bp, Arabidopsis thaliana landsberg
  unsure (1)..(513): unsure at all n locations
tactggttgattaaataatagatgatattttagttttaaaatagatttaagttaaatagtttttttatgtatgtgtatgctcctaaaacatcaactaaataaaaatggaggnnnnnnnnnnnnnnnnnnnnnnnnnnnnnnnnngtcacattagaaaccgtaattttaaaatggaggagtcgaaattgtaagtttgaattccagtaaacacttcgaccgaattaaagtgtcaactatgtttgacaaaaaggtacagcatctctctcatattaaaatttttaaacacagagatgacttgaatttttggagctgaaaacaaataaaacggcaagatgtgtcgttttgttaacaaatctcacatgacgtggttttccagagttagataagtacacatctctctattaactatactatccaattaaatattgtgtagtagactaggtaccaaacaaagaacacatgattttgattagcttctcttcattatacacaactttatttaaataggtagat

SEQ ID NO: 76058 - DNA, 620 bp, Arabidopsis thaliana landsberg
tgtattaacaggattgtggtgtaaatgctttagagcaaaatataaattataaacatcaaaattataactccgtacggtgtggtggtatcgtaaggaaagaaaactttcaaacacaatatcttcttatcgatgggatggagaaacgttattgaaacttttggaatatttaccaaaataaacctacaccgatgaaatattctttgaacaaaaataaaaatctacatttagttttggaaactgtctggtaatttccacgaaaggtctttggactttgggtgcgtgttgaaaaagatataactctccttatacagagacccacatgtcacttcatatgctgattaaatttaatttgtacaataaaattacttttgagactaagaaaaactcttacgccttaatagaatttaattaagggtatttagtaagttacatctacatgtgaatttgttgaaattactggtcttgattgatattctctgtttcaatttaagcgtcatttcagaatttgaaatatgtttataaaagtgtcattttaagctgtttaactgtcatttatgtttcaatgcatgtatttgataaaatttctatttttggttttactgtttagtatgttggccatg

SEQ ID NO: 76059 - DNA, 492 bp, Arabidopsis thaliana landsberg
gggctctgtggcttgtgtacttggaaatgcagaggacttttctgtttaaacggctacaagtgtaaagttggggagagcagtgacattaccgggttgttctatcccgttgtctttgctcggcactggttagttttgactatatctgcactatttttagcctcgaaaatgtaaactttttgcaacggttttatacatcaatgtggcatcttgtgtagatgaaatacgtataaatttgctcttagccttccattaatgaatttatctatgaaaatgcataaattttttcagggtttagggagaaaaagtttgctatcatcggtgtcaaagtctatgctgcgggttattatgtgaatgaatctatcttgagcggcttaagcgcttggaaagggcgatctgctgatgagatccaaagagattcatcactgtttgtttccattttccaaggttaacgaaatgctaaagatgatagctttgtttatcaacatttgatct

SEQ ID NO: 76060 - DNA, 535 bp, Arabidopsis thaliana landsberg
  unsure (1)..(535): unsure at all n locations
gtaaagtcatcgcacctatcggtccaaccacattgggagaagaatcttatagttattccttttcngggagccgaaattcatcctgtgccgagagcgcagctatacaactctccgtctgtacctgcgcctctccacagtgtgccttgttacccccccttcttccttaaaccataggacagtattctgtgaaaataaccttcgatgagaaagaaaaanagagggccgttaagaagaaccctttactggcctacacccttagacactctaacgatccttctttcaaaccctgctcccatttncgagtcaacgagaatagatatannnnnnnnnnnnnnnnnnnnnnnnnnnnnnnnnnnnnnnnnnnnnnnnnnnnnnnnnnnnnnnnnnnnnnnnnnnnnnnnnnnnnnnnnnnnnnnnnnnnnnnnnnnnnnnnnnnnnnnnnnnnnnnnnnnnnnnnnnnnnnnnnnnnnnnnnnnnnnnnnnnnnnnnnnnnnnnnnnnnnnnnnnnnnnnnnnnnnnnnnnnnnnnnnnnnnn

SEQ ID NO: 76061 - DNA, 605 bp, Arabidopsis thaliana landsberg
agtacgtgccctatagcaaaaatgaattattacgaaatgtgtcttccttttttaatagtgtatgacttgcgctgggagggtttatgaggttgtgacaaaccaaccaactgtctataacaaagaatactatggggactggtctccaagaccaatccctaaacgaccgatgccatatgtaccttctcctcctcctccaccgacacgacgacctcctttcaccacaaatcactagaccgttacttttactaaactcttgtcattagacattcgtcttcatctagtaaatctaaataaataaaatgaaacttggcaaataaaacaacaaaactcttgaatgcattgatttggctttggtaatacaagaacaaaagatgtgaagtacattgacacttttgttataatatatcaagtgtaatactccaacaaatagccaggaccgggtttgtaaggatcagcttttacataagcctcatggcggtcaaagccgacaccgttcacacggttgcttacaacatgaaagaagcttctttggaacctacatattcgtttctgttcttgccacgaactctgttgctttaactgcttccctattgacaaattcaaac

SEQ ID NO: 76062 - DNA, 444 bp, Arabidopsis thaliana landsberg
gaacaatggtctcttctgaatttggtttactcaaggttttttggttatcagtttcttcctttctattttgggatatgattatcaagaaatagttcattttattgtatttatcatctatagttataattaaacaagtttatgattcaattttattgattttttctgcaaaaaaaaaaaaaacctcaagtccactttttttaaaaagtttttaacctttcctaggtctgaacaaaatatttgattcaaaaacaaaacagaatagatttcgaatcctaaaaaataccctgttaaatataaatcttaattactcttggtatcgactaagattgtgcatgtatcacccgattatcggatggatacccaaatttatctaaaaaaagaggttcacaccgatttgattcctatcctatcagatattttggatcatttcacataattttcggt

SEQ ID NO: 76063 - DNA, 527 bp, Arabidopsis thaliana landsberg
gatgagttgttcttttaattaatcgttttaaagactttaattatttttattccactaacagaaggccacacagggcacgtgcatcatgcttattgattattgctaactgggtcgccttaatagactaattctacttctattttctactactaaacttgtttactcgtgaaagtggaaggcacacttaaaaagctttttatttcattaatccaatgatactgtagtataagtataatttattttgatcaatttttctctcttatgaaaagttctattaaaactaactttttactagttaatcgctatagaacgaaatccaggatcaatatataacctatttcactctacacgttcatttattttatgtcattccgatattattcaatgttattaatcaaatctaatacatgatcgtcgacaaacatagaattggtgagagcataaggtccactactaagccatcatattgttaacattcagtttctctgttttttttattggaactcttttattttattcaatattat

SEQ ID NO: 76064 - DNA, 124 bp, Arabidopsis thaliana landsberg
gctactgttccagtgccaaacactcggcgaatgggctggtgttagttgtcttccttttttatccttgaagctttcttggctctaggaagactttgatggtaactaataatcttcaatttggttg

SEQ ID NO: 76065 - DNA, 125 bp, Arabidopsis thaliana landsberg
aaatgtgtaaatatttcctaggtatattcttggtgaaatagatcatgcaggtatttaactatgtctaatagtatggaatatcatcgaaatatgtgccaaaatatctcatattaaaagatacaaaa

SEQ ID NO: 76066 - DNA, 296 bp, Arabidopsis thaliana landsberg
tgcaccatcaaacacactgaaaacaaattttatattatcgatcaaacctacaaaaaacaaggtaaggaaactaatatactaatcagagcatctactgaaagtgctctgtctaaaagcatggcctccacaaaagttaatagagattttaccttgtttatcgacactggtggaataaacacatcaataaacagaaaaagatcaggaatatgtccatccgatggtcatttgtgcaccatatacaactatactgaatacatatactgatacactctaacaccgtaacaccatggacagga

SEQ ID NO: 76067 - DNA, 617 bp, Arabidopsis thaliana landsberg
  unsure (1)..(617): unsure at all n locations
cannnnnnnnnnnnnnnnnnnnnnnnnnnnnnnnnnnnnnnnnnnnnnnnnnnnnnnnnnnnnnnnnnnnnnnnnnnnnnnnnnnnnnnnnnnnnnnnnnnnnnnnnnnnnnnnnnnnnnnnnnnnnnnnnnnnnnnnnnnnnnnnnnnnnnnnnnnnnnnnnnnnnnnnnnnnnnnnnnnnnnnnnnnnnnnnnnnnnnnnnnnnnnnnnnnnnnnnnnnnnnnnnnnnnnnnnnnnnnnnnnnnnnnnnnnnnnnnnnnnnnnnnnnnnnnnnnnnnnnnnnnnnnnnnnnnnnnnnnnnnnnnnnnnnnnnnnnnnnnnnnnnnnnnnnnnnnnnnnnnnnnnnnnnnnnnnnnnnnnnnnnnnnnnnnnnnnnnnnnnnnnnnnnnnnnnnnnnnnnnnnnnnnnnnnnnnnnnnnnnnnnnnnnnnnnnnnnnnnnnnnnnnnnnnnnnnnnnnnnnnnnnnnnnaacccacaaaaatgcatgggaaaagtcccaatgcttgcttttttccactgagggctttttttggcttttccgaaaggtatataatccaactttggccctcggtttaaaattattgaatattaagtttttaccaaaaaaaaaaaaaaa

SEQ ID NO: 76068 - DNA, 480 bp, Arabidopsis thaliana landsberg
  unsure (1)..(480): unsure at all n locations
nnnnnnnnnnnnnnnnnnnnnnnnnnnnnnnnnnnnnnnnnnnnnnnnnnnnnnnnnnnnnnnnnnnnnnnnnnnnnnnnnnnnnnnnnnnnnnnnnnnnnnnnnnnnnnnnnnnnnnnnnnnnnnnnnnnnnnnnnnnnnnnnnnnnnnnnnnnnnnnnnnnnnnnnnnnnnnnnnnnnnnnnnnnnnnnnnnnnnnnnnnnnnnnnnnnnnnnnnnnnnnnnnnnnnnnnnnnnnnnnnnnnnnnnnnnnnnnnnnnnnnnnnnnnnnnnnnnnnnnnnnnnnnnnnnnnnnnnnnnnnnnnnnnnnnnnnnnnncatggaaaacagattctactctcggggcgggggggataggaaaaccttttttgcatgaataaaggatttattccttttcatcttggcttggtctctattttctctatttttttttacctttaagaaaaagattgaccggtactcctacccccatttgaatttt

SEQ ID NO: 76069 - DNA, 500 bp, Arabidopsis thaliana landsberg
tatatgaaggaaagggtccaccattctaaaggagcaagaagcattatttttttcgaagcaaccaaaaagatttggggggagacttaatgtcgccatgcccatcaagtgaaactacttcaaaaattgatcgataaggcttatgaagccgaaactcttaaactttcactttttcttcataaagatgaaacttgataagtttattacaaacaaaggcaaaacgccaaaaaactgcgcctacaaaaccggattcatcggatactatatctataactcaccatactgtattgaaacaacaaagttggaccatattcgaacacaaccttacatacataccggacggcttacgaaacagaaaattttttctctttctcaaacaatctttatcgaaaatagcttacttaaaaatcatattttgatcatatattttgtttttacactaatttagactatataataataatattattaaccctcgttaaccacacatgatatttaatact

SEQ ID NO: 76070 - DNA, 178 bp, Arabidopsis thaliana landsberg
cttggtttatgtttagttcaacattaagaagatttacgtactggcaattttccattcttgagcttctctttactacactgactgtaccgaatttgaggatttaccgtttcaattccacggtttgtctttcattgatgacctctttcctcatttgttattatgatatcgactttgagat

SEQ ID NO: 76071 - DNA, 514 bp, Arabidopsis thaliana landsberg
ataaaataaaaactgaaactgatcccaatcagaatccatttcttttcacagcaattgcgaattcggccatgagggttgcattggaaagaagatgagggatgtgagttcgcacattaccaaagaagaacatttgtggaggagatgggaacgatagagagaatcctggactaggatcttttatgtgtagatggatcagagagagacagatgtagaggacattatatcttttagttttgtttatctgtcataaatcatatattgacaaaattaattaaatgaatttgctttgcactcacagaacagaacagaagatgacattttctctgtgatcatattatgctttgtggtttaatcgactggttatttattgattaccctaaaaaaaaacggaattcgtttagaaaatgctaattgaattattagattgcttcaaacacgctagacagtagtgtaagatctgttattacacacacagaatgactgttaagtattacttggttataatatctagatt

SEQ ID NO: 76072 - DNA, 538 bp, Arabidopsis thaliana landsberg
acaaacatgtgaatacttcattccaaggttaaatcacagcacgatagactaatcccactgaagaaagtgacaaagtagtgtaaaagtgaatagaggaaggaggaagaatcaaaccataacaatcccatctttgcacttgattccaacaacagtcctgcgaaggaaaaaaaagggaaagacttttaagaaaccctaattcgtgtcgataaccaaaatctcaaagttttcagaagctaaatccgatctactaaaggcgaagatcgaagaagataaaaccaactaacccactgttgtcgacagctttagcggcgtactcgatctggaaaacacggccatcgggagagaaagtggtgacggagagatcgtacccagttccaatgctactcatcttccttgattttttttttctctgactcttttctgatttcttcttcgtcgagtgatttaagctgagatcgaagaaaggggttttctctgttctcaagccagagacaagccaaatctttggagctccgtctgactccgggttggatattaa

SEQ ID NO: 76073 - DNA, 113 bp, Arabidopsis thaliana landsberg
  unsure (1)..(113): unsure at all n locations
aagtgcattggttcgaaaacataaatggtggaaagagatagatggtttttncccccccnctcnttnatatcaatctttgaaactcaaaaacccaaaatttttttttccccttt

SEQ ID NO: 76074 - DNA, 380 bp, Arabidopsis thaliana landsberg
taatatgtagtacccaaaattatatagttatgtgaggctttaatattgtatatttagcaataactaaactatatgaactttgattgccataatgtatgtttatataaaaaaaattacttaacattgacatccaaaaaaagtttataaattaagcctttaacaaaataaaaagtttataaattttgatatttctttgtcgaacgtgtgatacataccacgtagaaaagcagcaatataaattataaaaatatagcgaaactctattattgtcacactatataggctatagcacctagacttgctgacgcatttgagagattttgtccaaccgactttacctgaataaactgcctatgctcttaacctaatggacctttggc

SEQ ID NO: 76075 - DNA, 340 bp, Arabidopsis thaliana landsberg
catggtaaaatagtctaccctctacgtatacacataaacggttaaaatgaacacaaattacaatttagaccaatggaaaatcgattttactcaaacaccaataaactttgaacaaagaactgttacacgtagaaccaaacaatatgatgaaaagtattattaaaatttagatcctttagaaattcaccctctttaggaataaattcattttatgcacatttttttttttctccgattataggtctagccaaactattactaactcggtaaaaaattcagataaaatattcacaaaaaaaagagtatttatcctatcaaatttcacctaggtgattttatg

SEQ ID NO: 76076 - DNA, 545 bp, Arabidopsis thaliana landsberg
  unsure (1)..(545): unsure at all n locations
gttgcgggcccgccagctgtcgccgctgaaggagccacgcgcttattttagcagcatcgcccgtggcctgatgggcgagcagttccgccgccgtgcgctggaacgggcctannnnnnnnnnnnnnnnnnnnnnnnnnnnnnnnnnnnnnnnnnnnnnnnnnnnnnnnnnnnnnnnnnngataccctggcgcgcctcgaccgtgccctgcaccaactgaaaccgcgtgcccgccaggcattcctgctggcccagctcgacggtttgagcatcgtacagatcgccctgcgcctgggtgtatcgcgggccaccgtcgaacgcgacctggccaaggccctgggcgtctgctaccggttgcgctatgccgacgcctgacagcgcgcccgcgcaggcgcaggtcgaccaggccatcgactggctggtgaagttgcgcttcgacagcccctgcccgcgtaccgagcaacagttccagcactggctggccagccatccgcacaatcccttgcctggcagcgggtcagccaccttcgtgactaactggccgggc

SEQ ID NO: 76077 - DNA, 151 bp, Arabidopsis thaliana landsberg
gaaagttaagctacaggtatcaatttggaaaactatataaaatcaaaagcatgtcgcaggaaaattccacagtatttaacataacaaaattattatgctatagtaatatctacctttatacatttacaatgaactccaaattaaatgataa

SEQ ID NO: 76078 - DNA, 650 bp, Arabidopsis thaliana landsberg
  unsure (1)..(650): unsure at all n locations
ggaatggccacacaaattgtatttttatgttgaactttagagattgcaaatgatttggtggttgagtttgtgtacattacatggggacgagggtctgcaatcctataggcatttatttaattgaagccacctggatttatgcgtaataccttaactaaacacacattgccaaatatactaatgacaacttttactttatttcgactatgttgagataaaaaatacatttcaattggaaatattgtatgtgtcaccttcatgaattatataaactccaactttaatattgtatcgtttttacaccatgtgtacacatttacttgtatgaatgcgaaaacgattacaaattacatgcaatatcgtacgtggatctctgaccacaaaaatttaatatcaatgatactaaattacaatatgctaaaaatataatgaattaatgtcttaagacattccaaaacgaggattttgttatagttggaggggtccctggacttcctttggattcataaatctcatgtcttcggagacagcctgacacatctctntcatcaatattcaatataagtgtaatctcatatggaatgttaantattcaaactatagntaatctatggaatctcaaccagacatcaatcaatattatttgcctt

SEQ ID NO: 76079 - DNA, 577 bp, Arabidopsis thaliana landsberg
  unsure (1)..(577): unsure at all n locations
tattcaccggcatcccaaagacagtgttgaactaaaannnnnnnnnnnnnnnnnnnnnnnnnnnnnnnnnnnnnnnnnnnnnnnnnnnnnnnnnnnnnnnnnnnnnnnnnnnnataatatctgtgtgggtggcagccatggtaaaacctccatctccgccatgacagcgcatattttgcgacatacagggtatggctgcaacagctttttaggtggtattgccgtaaattataatagtaatttctgggctaatgaacgcggcgtaagnnnnnnnnnnnnnnnnnngtacgaccgctcatttttaaagttatcgcccgatatcgcagttgttaccgctatggacgcggatcatctggatatttatggcaccgctgaggaagttgaaaatgcctacatagcctttacacagaagattaagccagggggcctgttaatcagcaaatatggcttaaaaagagatcctgaattgacggcagataatcaccttagatatagtcgttttgattcaacagcagatgtatatgcctacaatctctccgttgacaaaggtagctatgtatttaatattcagtttaaa

SEQ ID NO: 76080 - DNA, 216 bp, Arabidopsis thaliana landsberg
  unsure (1)..(216): unsure at all n locations
cgctttgttccgctgcaccgcgatggccggtctggtgcccttctcaactagcannnnnnnnnnnnnnnnnnnnnnnnnnnnnnnnnnnnnnnnnnnnnnnnnnnnnnnnnnnnnnnnnnnnnnnnnnnnnnnnnnnnnnnnnnnnnnnnnnnnntacgccgggctggtgccatggccatccggagggtgatggcgaccttaaacttgttgctccac

SEQ ID NO: 76081 - DNA, 635 bp, Arabidopsis thaliana landsberg
  unsure (1)..(635): unsure at all n locations
ctcttaccaagatcaagagcaatattatcaagaggacaacgttgtaattttatccaatctgccacctccaccacctggggatgagtcagaagagactccacctacactgtaataccacacatgtgctgtcaagtgattcatgtcagtaaaagactggttgtaaatcatatcatccacatggttnnnnnnnnnnnnnnnnnnnnnnnnnnnnnnnnnnnnnnnnnnnnnnnnnnnnnnnnnnnnnnatctagacgtttatgttcgtgacaccagatctattggagatttgcgttttttgagtaacaaaacaaaatactttacaaagtttttttcgatattttacgtgcataaatacagttttgtgagataatattgatcagtagcacactatggcagatttggtgaatctagaattagaaggaatgattccagaattggatcaacttcaacaactggagttatttaccaaggtaaccaacgcaacgcattgccatagtgacatccacgtaggctgaaataaagaatatcatcaaaaaacgaaccaatttcgaatatgcngtgcgaaggaggcagaaacagacacaaaaactggattggatgaaatatattgaatacgaagtgatctgcacaaactg

SEQ ID NO: 76082 - DNA, 562 bp, Arabidopsis thaliana landsberg
ggccggcgccatgggcctgggcggtcgcgtcctggccgggccttatcctgccctgatcgacactttgcgctggggcggacgaacggcatctgccaactgtcattcaatgcaaaaagtggcccacggcacgccttcgggcatcgacaacaccgtggccacctacggaagccgctgctgtaccgcgccggcgagccgccggaagtgcacacgctcgagttgtcccagccgttgccgctggtgatcggcatgtgcggcgccgaaagcctgaccgcgaaaatggtcgcgcgcgtgcgccgcgcctgggaacgcaacaagccgctttacgagcgcattttcgatgaaatcgacacgctgaccctgcaagcgctggaagcgctcaagacgcacgatctggcgcaactgggtgaactgatgaacgtctgccagggtcaattgaatgccctgcaggtttccagctgggagctggaagaactgctgcagatcgcgcgcgacaacggcgccaccggcgccaagctgaccggcggtggcggccgacgttcaatggtggccttgtgccccgatg

SEQ ID NO: 76083 - DNA, 531 bp, Arabidopsis thaliana landsberg
aggttggagaaggtacttctaaagatgcttcatgtgtgtactgagggctaaatgatcaagtggcaaatatttttactaccaccattgttcactcatcaatttgaacatcttaactcagaaaatgagtcttacacatatctttggaagctcataaggcttcgtttataattcatttggtacaaagtatcgaaagcgaatacaaaccgttgcttgcaatttgcgtacagtttaagacttttcgtggaaacatacagaagtagggtcatatgtgactcaatgcatattaagatcttcttgtcctttgtctccaacacgaaaacaacacttttacagtcacacattgccttaccaattttcccactttctgtttcttattattttggttctctttgcttttaaaatctcaatttgactaaccggttaggtgtaccaatcattagaccgaatgcttacatgagtaaatgagtttacaggacaactaaacttgagttgtgttgttttctatcagttaatcaacgcaacgcccggaag

SEQ ID NO: 76084 - DNA, 502 bp, Arabidopsis thaliana landsberg
  unsure (1)..(502): unsure at all n locations
ntagtatgaaccctcattgttattatttttatagtgcctacgaatgattctaactctgaactctaaataggtctctctctctctctccctgattggtggtctcatcagattcaatgccatctacacaatgaaaattcctagatgtacatccttagccaagtttcctctcctaaactccgtacaggtaaacctaatgatttgatatagatctccacttagatgctctctgcacattcccccaaaacctgtcatagatttcctcatttttactaaatagttatggttatttaattattttggttgcacaaatggaacccaaatgctatagttgacccattctttccacttcatacaatttctcaatatattctgtggactctaattgaatatgttcaatctctccatatattctgtggactctacttgaaatatgtttgtagaatttgatcacttctcacagtctccattacttttgctcaagcaccataatttctcaaaattt

SEQ ID NO: 76085 - DNA, 444 bp, Arabidopsis thaliana landsberg
ccttggttgtgtcaaaattgaattatcatgtaaccattaaaaaaactaatttaaaaatagatcttttgcatatgcgtgttttggggaacattcgagacattattaattctacgacacagttatcacattgccaaacctctctcatatagctcggtacatataaatggaagattgatagcacattgtcttgcagacttcgttttgataggaccgaagcacgtatgtttgactctcttctgatccattcaaattgtaactctctgaacctttgtgtcaataactgactttctcgcaaccaatctcaaagttcgctgtcttctctgtgagagggtcatatccatagtcgacagtcactctcaaatacagacctgatgatccaatactaatgcataggcaatatgagagccttgaactcactttctaacgcactagacgcatcttatc

SEQ ID NO: 76086 - DNA, 597 bp, Arabidopsis thaliana landsberg
acaaaaatataatacattcttattatattattcccttatttttaattttttaaaactcttaaatcatttacctgacgtagggaatgtttgcttaaaattaaacattcacataacttcatcatataaggttgaaaatcatgcattacataagcttgttctattatatatacagatacaaccttacactgaaacatctattttcatatctaacttcaatcaaaaactaaattatactttatcatgggttataaagcagatctaaatcaaataagcttattcacagatcaatgaccctttttgcaagaaaaacatttctccaaagcttgatgacatctacatgtataagtacgtttactcattttcaaaaagcacttgacttatctcatttatcgcaatatatctaacttgttcctttgtgtagacaatctagtcacactcccttctgtacggaggcttgtacagaaatacagcaggcggctcatatcgggatacattaatcattagatataattgaaaaagataatgacatcagatgacaagttcaaaaccatactcataacaatgttgaatgatttcatattttaacatcatcctaat

SEQ ID NO: 76087 - DNA, 287 bp, Arabidopsis thaliana landsberg
aacattcaaacttcagtacatcaacccaaacatttcactatctcctcacctccacttctcacttcaccgaaaacgatttaatctatatccaccaaccctcctcaacccccataaacactatcataatcaatcatctccacacacacaaacatattcaattacctcactactccaaattcacaagaaaacgtaaatacatcccacaaatcacatacttatataatatccattaaattaactaatcattcatatataacaccaaattaatacaatttactaatttcata

SEQ ID NO: 76088 - DNA, 660 bp, Arabidopsis thaliana landsberg
atcgaagataaaccttaatatagataaagacatatagttactaaagaagtaagttaatgaatgttgaataaaaacaccaatggtaagctaaatattaaacaatacaaaagagaaaacaaagctaataagtaagaagtaagaagctaaagagatagactgacatccatgctccctcaaccaaaagacaaaacacagtgcatcaatggcccagctgtcaccacaactcttttttttttttgatataggaacttgttttgttttctattctataatatttatttattcttctttcttgttatctttttaaatcaaaacgatcgagactgaagttgttcaatttttttcgtaataaggataagaaattaattaaggatagagagcacatgaaaatacactgtatgtactgtaatggtgcattcaaggacccttcaatacgttccaaggccacatgtgattctcacaaaatggttcaatatttatgaaagttatttgtgaatatatgttaagataaaatgtacctggaccattctttctatttgtattagactatcttacacgtgattttcttactcttttgatttgacttcaattagatctatatattgcatcaaactttttaccaaattatgcgtcaagtcacaccaattgatgaggttggcc

SEQ ID NO: 76089 - DNA, 316 bp, Arabidopsis thaliana landsberg
acaacaattgattgtgagtttattcgtccagcagcatcgtagttgtaaattattcttgagtttttgttttcgactggggtgactgcgtcgttgatattataagaatacaatatctcatcatccacatagactgagcgagtgagtcgtccttttccatcataggaataattgctagtccggcccttcgcatcggtaatttgaattaaattgccgtcagagtcgtaatcataagatattgcttggttcttcgcgttcgttattgttgccacacgatcaaacagatcaaaggtatctttggccacttgattgtacggat

SEQ ID NO: 76090 - DNA, 412 bp, Arabidopsis thaliana landsberg
  unsure (1)..(412): unsure at all n locations
acattttaccaaacacatctcatccatggattttctccttatcctcatgatgatcaactctaagacggatatggatccattaaaatcaacaacaatctcatataccccnnnnnnnnnnnnnnnnnnnnnnnnnnnnnnnnnnnnnnnnnnnnnnnnnnnnnnnnnnnnnnnnnnnnnnnnnnnnnnnnnnnnnnnnnnnnnnnnnnnnnnnnnnnnnnnnnnnnnnnnnnnnnnnnnnnnnnnnnnnnnnnnnnnnnnnnnnnnnnnnnnnnnnnnnnnnnnnnnnnnnnnnnnnnnnnnnnnnnnnnnnnnnnnnnnnnnnnnnnnnnnnnnnnnnnnnnnnnnnnnnnnnnnnnnnnnnnnnnnnnnnnnnnnnnnnnnnnnnnnnnnnnnnnnnnnnnnnccccacaaa

SEQ ID NO: 76091 - DNA, 383 bp, Arabidopsis thaliana landsberg
  unsure (1)..(383): unsure at all n locations
tacgcttgacgaggccctcacctaccggcgtctcggccacgcgcagcacgacaaccannnnnnnnnnnnnnnnnnnnnnnncgagcgctgggcggcggggaacgagccgctcgaccgcttcatcgccacgctgacggagaaccgctgggcggagtccggcgagctggcgcgcatcgacgaggagatcgcgcgggagatcgaggcggcggtggaggaggcggaagcatctccgatgcccgagccgatggaggcgctcgagggggtctacgcgggtgctcgcgccgccgttccgtggacgcgcctcgacccgcccgacccgcaccgagcctgagtggcgacgtccgacgagacgcattcgcttgcgggcaccttcctcgaagcga

SEQ ID NO: 76092 - DNA, 471 bp, Arabidopsis thaliana landsberg
  unsure (1)..(471): unsure at all n locations
aaaagccaatcaaactctctttataaattaatagaatttcagggttccaataatattattaggttttattgtagtattagggtggacgcaagagagagattggaaatcaaataaaggaaactgagaccttgtgttttggaaatcaatcaacttcaataaaaaatctgacaagttttttgaaaccatgagtactcgttccattgagtaatttatcatatattcatatatatagtgagtaaaagcgattatgccacaccaatgaccaaacataacatcgcccaacgagagaatgtgaagctcacattgtaccgtctagtttctctttaacacccttaaatgtctaacatatttctgtcatcatgcagttgtaagacccatcatgttntactagtgcactatacatcagcaaaccacgaaccatataacatgcatctgctcttaacaaaggtatgaatatatatgctgatcctc

SEQ ID NO: 76093 - DNA, 415 bp, Arabidopsis thaliana landsberg
gaatgagagcggttacttacttacttttgattgagaacagttttaccgacggcacgacacgtgtccaagaaaccaaatgtgcccaaaccaaactagatctttacttttatcttgcccacacattttatataaaataattataaattaaggattatgcttttactcttttaactctttctcatttcgacacgcaacttcttcctttagactcttgcttactatatatacacacacactttcatttttgttttaaataaatcttttatttacaatatctttctttaattagaacttatagctagtcttaagataatggcacttgaaactcttactttcaagattatttctcgagccgactctgttaagattagcactaggtttatggaagcaagcaacgatctaagcgatcaagatc

SEQ ID NO: 76094 - DNA, 479 bp, Arabidopsis thaliana landsberg
tcggatctgccgagggcaagataagcatcaggtaaagacggtggaaaagacagatggatttttcggggttcgtctccacagaatgtgattgggtcaagctttgaagctaacaccctgatcttacacacttgagaaggattaggtacgtgttcagatgtacacttgaacatctcaaagatcctaagcaatggagagtctatgatcacagtatcggttctaaagcagcggcaataagaggcttcaaaagtttccaagacaggaaagttcagaacgaggttctttgagacagaagacatgttgaagattctagcatcctcgagactaaggaacttaaggttcgggagaatagcgggagccgaaatgtcaagaatgctttttgtacggagccttaactccacaagcgaaacaaaactaggaaaaagtgaagaaaaactgatgatctctagatcgttgcaagtgacaacaagtctctgaagatt

SEQ ID NO: 76095 - DNA, 108 bp, Arabidopsis thaliana landsberg
aagcccgaaaatcccacaccatactctctcactgcactacaaaactttatgtttccacacaacagagatcatctacggggtagggctcttatatatagctttccttcc

SEQ ID NO: 76096 - DNA, 412 bp, Arabidopsis thaliana landsberg
atgagacaaaggctcttctgcaatattataaccgatagaaattgccgggaagaatctcatattttttatttgcctgaaaacggtccgagccattataagaggccaccaggttcagcaggtatttttgcttataatcatatccgcccttaaaagaaaaacctttaaagttagccggtatccacccggcattcttatcattataggattccctgttgtataacagtaaggaagtaacgtggttatcgccaaaagtacggtcgtaattaaaataggcctggatattcagccggttgttatactgtccctggtaggcccttaatgtataatttcccaatacataagcgctgccattcagtgtgtaggtcccggtaaccgggtcataaagataagaagggggatcatcacgggacag

SEQ ID NO: 76097 - DNA, 710 bp, Arabidopsis thaliana landsberg
  unsure (1)..(710): unsure at all n locations
ttcatcatctattacattattttaaaattttattgacaaaatagaccttcaacccataattttgtttagcacaagaccatttttcaaaatagaccttcaatttttcaaaaaggataaaaagaggcatttttctccattgctattaggtccaattattcaaaaaagaaatggatagaccatataaaaggatattgttttaatgtttcaattaaaacaacaacacgaatttttatttatctattagtgataacgaaagaacatgtgcataggttgttgtcgcaatcgaaccggcttaaccggttaaaagataagtggtagacgattgtacggcttgggaacgcgtcggacctactcttctcaaagttgttgctaacgcaagtcttaagctgcgagccttacccaaccatgaatcatctacacacttttttgtcgaatctacacacatattataaaaataaacaatacaaaattcaaagagggacaaaagagattcgattcttttgggcagagcccgttgttgtttggtgaagatatatancttaatatttgttattttacatgatgaatatgtgaacattctaagaanttatgaacaaatgtagctcatctacacccataccctctaaaaaatttgggtagagctgagcaaatttcttgaattttgggatttccccaattgaatggccatatatcgattttttagtattcat

SEQ ID NO: 76098 - DNA, 564 bp, Arabidopsis thaliana landsberg
catttattatgtatgatttcactgttctatgactaccttggtttagctttaccaagaaataaaattaacattagggattggtaacaacattttaatggagcattatattaacatgtgagattagggctttctcatatgataatttctcttaacagtttaaaatttattatgccattatccaagcccccttttccttgagcattgtgtgggcttgccacttgcaaaaccaccaaatctaattagctaggaatgataatagcaacagcagctatcattcaacaaggcctgtgccaccctagcccatcagtgagcatgctaagtgcctggcattctttgagccttgtgaattcccatgattagcattattactcccgttctacactgagaaactggacctagctatgtgaagaaactcagtgtcacaatctagaaattatgagtccaggctttcccatcgaaagtgtctcagttcacgatctaaccttgtaggaacacttcttcagcttctgtccctgctctctgtgagtggcacgtttgaggcttgttaatccactcaacccattc

SEQ ID NO: 76099 - DNA, 757 bp, Arabidopsis thaliana landsberg
caacacacatatattatttggttcgagggtccaacacacatatattatataaatactaatgagaaatttggcccttataagtgtataattaccacctttttttccatcgacgtgaccaaaagtctttgcaaaactgacctgtaaatatatatgcacgaaaaaaagtttaaataatttcggtattagacatataaaaaaaaaggtttggtattcggtaaaaaaaaaaactaacatacggtcttcggctgttgtgtggcatagcatcattatgttttgtctcttatgtcacaaacccacatggttaattccgtattggtatattttttttaggtaccatcggaaattttctgaccatgtctcatttcttactgttcatttccaaaaacaatagtaaaatgcaagaaaaataaatccaactatactatatatgtcgtaaatctacattcattatctgatatcgtgatataatgtcagtacaactcttttccaacagagtttttacctattttaaaacgtttatcaaaaaaattgtacgaaaatgaatctgaattataccaatcaataaagaaaaaaacttcatagaaatgttcgtatatttttataataaattgaacggtctgtattattatatacatgcatgtatcaatagttgtattatgcttttatagggatcaagataagttgggataatagaccttaaaagtggtccaaagtatactttcggaaatgtcactctcatcagaaaaaaaaaaaaatc

SEQ ID NO: 76100 - DNA, 429 bp, Arabidopsis thaliana landsberg
gttcttttcttctttataaatctttattctataaacaaaattttaaatattcaacgttgataaagatttcctggcaaggagtccaatacatatgatagcttcttccgtatatttaggaaaaatattggtaagaagagtaacaaagtattatttgaataagtggtatacttatttgcgattttcaacgattttatttttatgttgcaatactatttggatatagttagatatgatctttagttgatcaagaaaccttgtgattaatgtgtatgtattggggataacaatctgtttatttctctataagatattcaagtctgtttgagttttagagttataaatgataaacgcacctctactctgagtactctctcatgttactagcattagaaaactaaaaatgcggagttcactaccatattatgtact

SEQ ID NO: 76101 - DNA, 348 bp, Arabidopsis thaliana landsberg
aacacatcatctctttcataatctctccttatgttttatatttgtctgcactttatgtggtcatgggcttagggttgacgccaatcttcttccaggaaacactaggcatgatttgtttcgtgtccacacgatctttaaactgaacagcaaagttgagcaacgaatcaagaagtgagtcagatagatagtgaggctcaagtccaagttccatcagcttagtgtgctttgcgttgtagtaatgttcttctgcctccactctcgggttaggcaccgtcatctttttcacgtctagcccaagctttgaacccgctttagtgacgagtgaagccagttcattgactgaaaact

SEQ ID NO: 76102 - DNA, 478 bp, Arabidopsis thaliana landsberg
  unsure (1)..(478): unsure at all n locations
aaagggattccgttcccgcaggcagagccaacaatataagcttactggtgaaatcggatgtgccttacatgaaatccgaaaaagtgaaaagctatgaggtgggttacaaaggtttgatcgctaagcaattgctattcgacgttaactactattacagtcagtacaccgacttcattatcaataccgtagtagcagcggcaccttcgaatatcctggcggcggacggctccgtgaaccaggtagctgcaatggagttgctggggccgggtaggcagttgtatcagctgtataccaatgccaaagacaaagtctccattcagggggtaagcgccggttttacttactctttgcctaaaaactacaaggtatcggctaatgcgacctggatcgatttcaacatgggcgatgcagatccgaacaatantcccgcttttaacacgccgaaatggaaaacgaacgtcatgttcggcaatgcgcg

SEQ ID NO: 76103 - DNA, 207 bp, Arabidopsis thaliana landsberg
aaaactactttttccacattttattttatacatttttattctatatccaatacatgttttgtattgtatttgaatcgtagccgttttaacccacaaataaagagacattctaatatgtgaatccgatgtctacattcaggcaccatatatggggacgcttaatagacaagcgctcagaaatgaaaatctgtatgctccaaagaggtt

SEQ ID NO: 76104 - DNA, 482 bp, Arabidopsis thaliana landsberg
  unsure (1)..(482): unsure at all n locations
atatatatatatatgtatgtatatatatatattatttttaattttctttatcgagttaagaaaaaaatagtttatatatgtgcgtaaattaatatttataactatttcctatttctatatttaaatatattaacaaatttaaatttaatacgtatcgatatcttatgattcacttgacatgtgttgcgatcacgtgagtttgcaactttgaaaatccaattttatacaataaaataggtaatttcttaaaaacaaaaagttaatagtagagaaaatatgttttatctgcacctatgcgaaagagaccgtgagacttgcagaattttaactggaaatcaattcttataccaagattatctaagaaatttttgtacgtttggtggactntctaagtgctggtgtattttcttaataaaatccctagcctaccatattcttcttttccccacccttaagaatatgaataagcaaaacttaagaac

SEQ ID NO: 76105 - DNA, 557 bp, Arabidopsis thaliana landsberg
ggcgccttggcggcgcgcgcggcgcgcgtgccggcggtggtgaatgcggtcgcgggcatgggttacgtgttcgccagggaccgcccgcacgcgcggatgttgcgtccggtggtcaagctgctgatgcgcggcaccctggcgggcgggcattcgcgcctgatcctgcagaacccggacgacgccgacgtgttcctgcgcgcgcgcatcgtgcccgagcagaagatccgggtgatccgcagttccggcgtcgacctgtcgcgcttccagccgccagcgcgcgagcaggaacctcggccgctgcgcgtgctgctcgccgcgcgcctgctgtgggagaagggcgtcggcgactacgtggaggcggcgcgcctgctgcggctgcagggacgcagcgtcgaattcctgctggccggcatgcccgatccgggcaacccgcgttcggcgacgcggcgccaggtcgagggttggcatcgcgaaggcctggtccggtggctcggccacgtggacgacatgcccgcgttgatgcgctcggtggatgcgatggtgttgccgagctacta

SEQ ID NO: 76106 - DNA, 444 bp, Arabidopsis thaliana landsberg
tcgaaactcaccatattattgatctgttttggttctcgtcctagtttttcttgtacttctctttcccatttcgtctcgcctttcttctttcccatgactatgattagattttttttggccttttttaccagcaagatgttatcttggtccataaaatctttaaaactagttcaattttgattaattattttaaattgaccccattataaagtagaaattaatccttgtaaaatttggtttaagagcaaacaattagatattatataactttttaggccaatttaaatcaaaacaaataaatataaaataaaaacatgtctattgaaatgatttcaacctcataattttgtcctcttgttagtctatcatttttttatcatccctttttttttcattgaaatttacgttaaaaataaagtataggttaagacataatatacattt

SEQ ID NO: 76107 - DNA, 381 bp, Arabidopsis thaliana landsberg
  unsure (1)..(381): unsure at all n locations
ctcaaacgcgtactgtccatgaaaatcaacaaaggcacactttttttggtgatcatcggtccggacacgcgcgatggtgaatgggtcaaatgggagatcaggaaagcccgcgagcttcagaaaaatattattgcggcaaaagaccannnnnnnnnnnnnnnnnnnnnnnnnnnnnnnnnnnnnnnnnnnnnnnnnnnnnnnnnnnnnnncaatgtgccccatctactaagcgttgtgaaaaacatctacatatgagcaccattaaaaaagaagaagttcctgcctctatgtcatcgctggtagcaacagcggagatattcaagaacaggatggaatatgaaaaagccaaactactgtgtgaaaaatcgctagctttgtaac

SEQ ID NO: 76108 - DNA, 354 bp, Arabidopsis thaliana landsberg
actatctttacacaagaacggcttttcaaagtaatgatatggtacgatatgacaaattgcgacagatgttaagatcatagtctgacataaattatctggtttaaaatctaaagggtgtgaatttaaaagttgtgagttgatttagagagagtcgacatgattatacttgaccaaacccaaaacataaatatagtactcgagacttactgtattgattggaaccaccttgggactctatcatttcttctctacttacttatgtcagcacaactttcgctatgtaattgcactttttatagaccaaaagtcctacattactctaatgtcttaaaccccatttacaagaagagttct

SEQ ID NO: 76109 - DNA, 532 bp, Arabidopsis thaliana landsberg
gcttgagtcctgagatttccacataacatatacagcatttatctaatctcctcaatcaggtttgggtcaaatgtgatgacctatatgtaaatgattaagatgtgccatttatgtcaacaataccacagggttacaacctttggtttttcttctttcactttgtctgaagtggacttcacattaggtggaggcgagaaaaaattggtaagtctgctaaattagatacttagattgacttatctgctttaatatttaaaatcttcgtctacctgaaattttttcatcttgtgtatatagataaacatgtttttttaaagtcttgagtttttcacttgtagttggggggctttactctgcttaatcaggattttgaattgcatgtgttttcattatgaaataaattgtttggtcaattgtgcgaagaaactattgaacaagtcgtactctattgattgccaagttgtgttatcctcattgctactaaccttaattaaagacactgttgaatttccttgatccctgtatctccttt

SEQ ID NO: 76110 - DNA, 382 bp, Arabidopsis thaliana landsberg
actgttaaaagattaaacaaccaaaataaggaatttatattaattcctgttaaaaatgttcatatacaattgggcaatggtcggatgcgatgtgagctaaaagattcgttgggcttcagcccatttactcgagcctactaagaagtaagaagttaaagtgcacggaactggagaccttagatactgcgatttgtgactccaacagttgcttaaagttatacatatggtttgtattgtaaatgaaatattctcacatttttctcaattaaatagaggaaggtattatttgacaagagacgactcgggctacccaaacccatattcattgtggagacatatttgttaaagccatatatatccttgcaaaagccgaagaagcatt

SEQ ID NO: 76111 - DNA, 758 bp, Arabidopsis thaliana landsberg
taaatctagtaatacaaccattgaggaatatctaataagaaactatctacgggaaaaataaagtatccaagatgaaattgtttgacttattgccaagagtataagtatacttgttcaattgtgctattttctatttgtatttccttattactttagctagggattcaagttcgattttatttcatgtagaaaaagctataactttcttctgaattcgtctttaaatattattatattttacttgtgtgttattatgaatttgagtgatgttactttctctaccaaggctgctaaagctttatctttttttttccttatagtttctctcattcccataatatacccaaaattcttaaaatggcacactgatttgaatgaaacttatcataagctataaaataaattaaaacaacgtaaggaaatagaaactcatagtaaaaagggaacatcttacaaagattctaaccaaaaaaaaacaaattttaggtttaaagctatttcgccctaaagacgaattaaacaactttattgtctatttctctaatttaaatttaaattctgattatacaacatccttacatgcctcctaacttaagtttgaatcactaacaaagataaaagagaattgtatttgtaggggagaaaaatacatacacttttttttttttcacaaaaatacatacactcaaagcaaccaatgccctaaaagcattttggctttgaatatcaaaatggaatatatcactttgttgaatttt

SEQ ID NO: 76112 - DNA, 451 bp, Arabidopsis thaliana landsberg
acccatgtacttaagtcggagcatctatctcgataaatctatactatttatttattattatccaattaaatgttaaacggaatgttaaaagatccttggaggtatcaaaggttcgtctggttatagaatataaactcaaaactgagttttcttgagcactacatacttctcaagaatatacctcaatagtttcatccacaaaaaattcttgtggtacatcactttcatagaaatggaaaggaattatgaaatcatgaaatgtcgtacatttggagataatctctacaaaactagtagaaagcgcacatatcccaaacaattatttttttgggaaatagacgttcatatctcggattcgaatgaggatcataactgatcaaatctcatctatacaagttaaattttcatagaaagtcaacatacaaaactgattttccatctcactatatgg

SEQ ID NO: 76113 - DNA, 733 bp, Arabidopsis thaliana landsberg
  unsure (1)..(733): unsure at all n locations
tgttgagtttagaatccaaaacatttaaccgaaaatctaataattttaaaaagggtgatttactcatctataagactaactaaaaaaatacgtactaaattatttacaagagacaattgataactagagtatgaattagttgtttagacttacccatgtgtcaaagtcatattgacaaatggctcggttataactgatttatataccaataattgcatacaagtttgtttcttaaataaatcaagcaatattcataagattgcatgtgtattttctgcgaaactattagtacgaattcgtggatatgcaaatttaatgactatgcaaagtaggtgagaatgtaatagcgattagaatagctagggtttagcctaccaaccatggtaatccagtttcctaattatcgttagtttttgaatcccattcatgcttttatctatttttcaaccaatcatgtctttttaccaacaaagcatttccagtctaagcaatatggtaggtaactcggtacgataaacagaaagataatttattattcatctataaacgaataattggttctcacattactcatacagaggaaaaaaagggatatacaaaccctctctaaattatatagttntgaattcactgttgtttatcaacaacatatataactctcttacccaattcttattattgttcatacttcatagacattaacatgtacgtatagtgattgctacaatgaatg

SEQ ID NO: 76114 - DNA, 596 bp, Arabidopsis thaliana landsberg
aattaagaattggaaaatatttggaaaagaggataaatattaaaatttcaaaagattgagtcgtacacacacgcctcatgctaaataaacgcttgaccttaattacgtcggtggcaacgtatcttcaatccgtcccttaccatcattctatgattggagtagtcgattaaccacactcgccacttggaactctccaacccctatccaggaacccttcttcgttcgctgaatccctaccaaactcactaaatatcaagttggagatgaaccacttccaaaactagatctatatatctttttttttttttcataatgtaagtgtaaatgtatacatacaagtaacaaacaatcgaagccttgttctaaaagaacttatttttgtaatcattaactatttgttggattataaacaaaaaaaaaaacttaaatgcatggcaaattggcattagtccatgtttttaaatttagttacgattttcatgatttgttttcgttaaatattataaagttgaaagtcacgtttcaacgtattcatataagtaaaaacttaacataacatatctcttaaaattttcaatgacggaaattatgggaat

SEQ ID NO: 76115 - DNA, 476 bp, Arabidopsis thaliana landsberg
tgctgatcggccgatcgaactgaatgcgctgcgtcgcatattcttgctcaatatcgatggccttctgcgcattgggcgggccgtatgcggcaatcgccatccgttccagattcagcccgcgcatcaggatacgccagcctttgttcttctcgccaatgagattgcgcgccgggacgcgcacctcgtcgaagaaaatatggttggtgtgcgtcgtatggcgtcccatggtttcgatcgggcgaatggaaacaccgggtgccttggcatcgaccagaaacaggctgaacccatcatgcgccggctgggccgccggatcggtcttgaccaccagcacgagatactcggcgacatgcgctgacgtgatgaaccacttctgaccacggatgatatagtcgctgccatcacgcacgtgatgggttttgatcgaggctgcgtcagaaccgtcctgcggttcgtgcagggcaaaggcattttaa

SEQ ID NO: 76116 - DNA, 474 bp, Arabidopsis thaliana landsberg
  unsure (1)..(474): unsure at all n locations
cattctcaaattttcaaacgtcttcaactctacggtatgtttaaattcttgtgtgtctgtaacgacaaccggcattgcgggttacgtttgacaaagtcaataatttccggcaatagctcactggccttgtcccattcgggctgaatgaaaagcctgcagccggggcttacctttttttcgagctccagggcccacttgaagtcatgacggttaaaggcaatgattttgagctcatttgcgcgggcaaagttttcttcaacggggcccttgaactttttgggcgaaaggcaaacccaatcaacatggcccttaatgggattggtgcccgaggtttccatggcaatttcgaatcctgcggcttttaaggccgaggtgagtggtccannnnnnnnnnnnnnnnnnnnnnngccgtgatcacggcaaaacgccctggttcggcactcatggtcttacaaaggtccgcaatattcatga

SEQ ID NO: 76117 - DNA, 536 bp, Arabidopsis thaliana landsberg
  unsure (1)..(536): unsure at all n locations
cggacgatcgctcctacatcgattcgatgttcctggacggcacgctgcacccgttgttggttcagacactgcctgccggcatccctgagtgggtgcgggtgggcgtcgtgcaggacccggcagcgctgcgcaatctggtggccgaaggcatcaaaaccctgctgggtgaaattccagcggcagacgcaactcatcgggactggacgcacttcgcgcgccgcctcggggaggttcttgcacgttttcacgccttggattcggcacgagccgaaggcatcaaggatgcaatgcgcgagctacagacggcggcggacgaggctctgcgtgtgtgggtcgtgaagcactatgcggacttgccgtcgttgtctccggccaagggcccgatcatggtgcatcacgtgccgcgtatgctttccacgcggcttagcaagnnnnnnnnnnnnnnnnnnnnnnnnnnnntcgacggcctggccatcgatcaatggacccagattcgggaatcgctcgtcagcgaatccggtgcttggacctttgat

SEQ ID NO: 76118 - DNA, 325 bp, Arabidopsis thaliana landsberg
  unsure (1)..(325): unsure at all n locations
agtcatgactatacgtatagtgtcatagcaaatcaataataattttggatggtcaaagctttttgtccatggctgtgtgggtgtataatgcgactaactatcacaataaggctgcatgtgttttcaatccctttcgatgtagacagatcaccgatactcagtttttacttttatatatatgtattctcattgtccatgacctagattaaataataacaaaattacacaagaaacccataagtttttatggagagttcttttttttaaagaggttacagttgcaaactagtcacttttttaaattaattnggcaaaagcctttact

SEQ ID NO: 76119 - DNA, 516 bp, Arabidopsis thaliana landsberg
  unsure (1)..(516): unsure at all n locations
atcatctcttattgcttttacttttaaatatttaccaaaattaataatggatcctaaaatacaaattactatctttcagttggtccattttattggatggaattttaataccaaaagaacaaaaatagttgtaatcataaattctcaaaatgaacaagtatctcagggctttgatactttttgctattgtttaatcacaaacaattaaaaaggaaaggaatgaaaaaactttaatgtataccatcactgtctatgggattaattaactaattgaattattcgttatttaactaaaacaaaaataatctggtagcgacttttatagtgatgattatcattgctattcttttcccaacctgataacttgattaacttaattaagccatgatcattattagttaaagattaaaagtgcacaatagattcttcaatccaaagaataattatggtgacgtggcaacatatgattggtnggctcgcattnggatttaagaaacctttttaccttttaattga

SEQ ID NO: 76120 - DNA, 581 bp, Arabidopsis thaliana landsberg
cctctccggacatcaggtatccttagttgacacttcagcggaagcgttgacaaaatctattataatcataacgcaaaatcttaacaggcaacgttgcaaaaggtagcatctccgaaacgcaaaaaacgactacacttaacaatataaaaacgttctccggtcttaagagtgcattaccaggtgccgatctggttgttgaagcagttacagagaatatcgatattaagctacagatcttcaagatattggacgagtactgtgatcctgctacggttctggcttccaatacctcatcgatttctattaccacaattgctgctgccaccaacaggcccgataaagttattggcatgcactttatgaaccccgttcctttaatgacgctggttgaggtggtgagaggaaaagctacgtctgatactacaactcaacttgttgttaaaacagcattagaactagacaagattcccgtcgaagtcaatgacgcacctggctttgtagccaaccgaatagtgatgccgatgatcaatgaagcaacttacgcattacacgagggactcagcggcgttgctgagattgac

SEQ ID NO: 76121 - DNA, 595 bp, Arabidopsis thaliana landsberg
ctactccgttcactccaatttttttcctttgcaatgaatttcttcttctcttcaacgtcctcaataagaatatatggttaagtagtatagcctccacttgctgatcaaacatccattgttggttaaaatatgcaaaattactaaatataaatctttgatgcaaaaaaaaaaagaataaccatcaagaaactattgtttaaatataatttaagtatgacactctttagcaaaatgaaaataagaaaacttgaatataatgttcagcaatagcagagacgaagttgattatataatccatcaccattactcattaaaacatgcacaagtaaaggaacaagcttgagtttttctttctctgagatttgagtaaaagagtgttgttgacgggaactgtatttatagatacagggttacagtatgtcggttttcttattccttaggtaaacgtgaaaagctgttattgtatatctagaaatatattgaatttatctatataacttaattaaccataattgagaataagattaatttctcaccacatgtacaaaataattatttcatgagtattaaaccaactaaagaaaacattttaata

SEQ ID NO: 76122 - DNA, 573 bp, Arabidopsis thaliana landsberg
tgtttggttggaaaggagcttcatgcactatcttcatccatttgttaatattttactagtcatatagcagtccaggattgcggattttatatttccatgatttaaagtttcactgatttcgatcacaacaaattaatctcttaaataacgcgtatcaccatatttaaatcaatttttgtcgcaaaagtttttaggacctgaaatattttgaacctgaaatttacaattagtcacatattcattcgtgaagaccgatatagtcacttggaattttgcaatagttctattcgtttttttgtttccgtccatcagttttattaaataatcggaaagagctggattctctttgagagagagctacaatggttctattcacataatttctattacgtttgtatttctgcttttgatttgacaatattggctacgattgataacattgcataatagcataatgacagaagttgcaaaataaaaattggcaaaatgaaaacttgttaataaaaaaccatagaatgaacttttaaaaacattatcgtgatggatatactttgagatgtgccaaaaaaaaaa

SEQ ID NO: 76123 - DNA, 351 bp, Arabidopsis thaliana landsberg
aagctacaagaggagtgacggcacccctgttaaatcattccctggtgatcttcgtcttctcgaagaactgcatgtaagtaccgttctctgacatatgtctgactgtctccttttatgaatagggcaacttctcttgttattaatttggttataaagaatctgacaggcacatcatttggctctatttgttcataaagtatctgataaagtcctgaaaacagagtttaatcttattgtctaggaaatggtacttattacttattgttgggatgatgaataactttctatacttgtgcaattgtttgtaggtggagtcttcatcattttttttcacatctccctttttactcc

SEQ ID NO: 76124 - DNA, 197 bp, Arabidopsis thaliana landsberg
attgaatttcttccttgagaggtgctttctgaacactgttacttgaaggtactactcatgtatcggccagtgcctattcagaaggcggcacctttttacccgcttcagttgctactcctgctaatagctaagcgcattctttgttgttactggggggtcctgaggcccagggagattttactcgttggggtcaataa

SEQ ID NO: 76125 - DNA, 448 bp, Arabidopsis thaliana landsberg
gacctcatccccttcgtcggcctgccccccgagcagttcgacgtccgctttgccatccgtttccccctgttcgtccccgagaccaagcccgtgcgcgacctgctcaaggagttccgccagaagaaggtgcacatcgcgatcgtcgccgacgagtacggcgggacggccggcctggtcacgatcgaggacatcctcgaagagctcgtcggggacatcagcgacgagcacgagccggtcgagccgtcgatgttccgccgcctcgacgaccacacggccgacgtcgacgcccgcatgtacgtcggcgacgtcaaccgcctgctcggcctcgacatccccgaggacgccggctacgagacgctcggcgggttcgtttccgttcagatgggccgcatcccgacgccgggcgcgcactttgagtacgacgccgcgcgggtcaccgtgaccgacg

SEQ ID NO: 76126 - DNA, 570 bp, Arabidopsis thaliana landsberg
gattatgtaaagtttgtttatgactttaatcgaagattttgtttttcaactcgttcattcaatcttgggataaagactcccatgttacctaaaacacaattcaaaagatacaaatcagctccaaaaaattgatattaatttgtacaacaacaaaataacaatacacatataacatcaacatcaagtgaaaaatcataatgcatgataagaaattcaattcatataaagaaccataggaatataaaacaaaccataatatcataactatatatttaataaaaagtccttttgatatggtgtgaccgagaccctatatttatagctaaatatttaggacaaaccatcataattatctctgaaatttttattttttaattttttatatacaaatatttgtatataaaaacatttaacatatatttctatacatggacgatttaacatttcattgtatttggaatataatatttcttgaggcggaggagtaaagaagaagataagataagggtaaggaagagctacttaatgtttggtcaaaccctaactcggacggtttaaattgctttaaca

SEQ ID NO: 76127 - DNA, 187 bp, Arabidopsis thaliana landsberg
ggaaaaaaaatttggagattcctggtctcatatgccagatcaactctttaatttcataaagagttaaaaaaggaaataaaaaatagagcccaatctcataatttcctagcctagaataagcaacaacttacagtagagggcacccactcttgtcaaccatatacattgaactggttttaaaccttat

SEQ ID NO: 76128 - DNA, 621 bp, Arabidopsis thaliana landsberg
acaagtaattggttagatacattaaaatcaaaaacaaaaaagcaaatggaattgttaagatttttacacgtttagatgagaagaaagaaagaaatcaaggaaagtaaataaaaacgaaatggtcaattcaagtgaaaggcgaataagaggttagtgtgacgtcgttttcatgatgtagtgggaccacgtgaactgactctgcaactcacgtgagagaaacactgtagaaacataaatagattttcgaaaacattaacatcaagggcaatttagtaacaatacttcttgactagaaactgtttattgatatgccacaaaccgacctatccttaaccattcgtggttcggttgggcacatcatgttcttcccggcttacgtaattcaatcaataaataatcattcaacttgagttagttaacaaaataagaagaagcatatcaagtaggtttcaacttcaaaagattaagatcaaaataacttatataatacaaaacatatttttctttaatttcctacgcatattattaaacatattccttggaatttatttgaattattgtattgggagaaaaatcatttctcgggagtctacaagtattttttttataaccctatttttt

SEQ ID NO: 76129 - DNA, 219 bp, Arabidopsis thaliana landsberg
acgcagaaagaattgttttccaccattcctgcaaagcagagaagacttttaagcaacgcaagcttacatcacaagaaacaaataccaacttcacgaagcattcaatggaagtttcatcttggagaaacatgcttacccgatctctagagggcattagagcttggacaacacaaatgttgaagacaacccttcaggcaccttcaattacttgaaacaccc

SEQ ID NO: 76130 - DNA, 468 bp, Arabidopsis thaliana landsberg
accagcgaggcaaattcgtggccgagcggaataccggcaaagcgcattccgatctttttgccgggccggttgagcgagaacgaaggcgcacgttcgttagcgtcatggcgcagctcgagcgaaatcttggcggacaggccactgatttcttcgagcatttcctgcatctcgcgcgatttatcgctgccatcgaggttggccacgatttcgatcggttgcgtgacccgctccaggtaagcctgcagctggcccttgatattggcatctaacatggtgcgttccgttctcagatatcgatagggtaaaaagcccggacaacggctgtccgggccggtattgcaatgacagtcttagatcttgccgacgaggtccagtgacgggtggatcgtcgctgcgccttcattccacttggccgggcagacctggccgggattcttggccacgtactgtgcagccttcagcttgcgc

SEQ ID NO: 76131 - DNA, 334 bp, Arabidopsis thaliana landsberg
  unsure (1)..(334): unsure at all n locations
gcacagaaaggaaggccccccgggcagcccaagggggggggaccggcgcccacaaaaacaagaaaanggaaaaaacgacaggcgagagaaccgccacgaggacgaaagaggcacaagcgaggcaggacaaaccaaaagacgacgaaccccnncgacgaggagagggaaaggggaccacggggacaccgcgcaacaagganagcacacaaggacaaccaaggacacccccaggccncgaagaanccacagcaggcaacaacagccgcgcanncnccncggccaggagacacnncaggagcaagaaacgcacacaaaaccccgccacannaacacc

SEQ ID NO: 76132 - DNA, 336 bp, Arabidopsis thaliana landsberg
cccctcggatattagttataacgaaccggattggttcggccccgatgaatttttgagagcctggaagacttgcaacgaatgttcacggatatggttggaggagatggcgtgagctatgactgtaacaataatccaaagggcaacaaaagaccacgtgtcaatatctcgaggagtagagctgcgatgcgttaaggcttacttcttttgtgtatgagtgtcgaggagtatcaaaatcacaattccatgttcaattgtctagaccatcaaataaattatctgtgaaaaccaactagaactagcccaatctttggaaatccagatgccccaatcactaaa

SEQ ID NO: 76133 - DNA, 119 bp, Arabidopsis thaliana landsberg
tggaacacttcattatggtgagaacttactatatctgttctcgaggtaacctgcatagctgagcccagtcgtgagtgtgaccggctggatatcaatctgtcagcctcaaatgctaaatc

SEQ ID NO: 76134 - DNA, 104 bp, Arabidopsis thaliana landsberg
ccctttgtttattggactcatctcgttggccttggaagacacaatttaatggaaacattttggaaccacttaggaacttgtagaataagcagtaaatcaatgag

SEQ ID NO: 76135 - DNA, 254 bp, Arabidopsis thaliana landsberg
ctatacaaaaaactatcaacctttgaaacttaaacaaaaataaataacggaaactaacttgctacaatcaacattaatatcaaaaaccttcatacataacaaaaaaaaagaagatcacaacagtacaaataaaaaaaaactgttggtaaaacccttactgccacaacactaatacttatagcttgtatactctgcaaccacaaacccagttaaaataaaaactctaaataacgcatcaattgaaccaacttaaa

SEQ ID NO: 76136 - DNA, 169 bp, Arabidopsis thaliana landsberg
gaaggtctcgcttggtaacgaaaaagtccttttcttttttgtgttcattaggaagatggtaggagcaaaccatttttttgttgttgtttcatagattttttttgttgatatttcccatttacccttgtcaaaagacgttatgtaaaaccatattaacagttttatattc

SEQ ID NO: 76137 - DNA, 291 bp, Arabidopsis thaliana landsberg
gatgtgtcttcaaatcaagctgaaataaacctagcccggttcttgagttttatagtcagttacttactttttacaatcttaattcactgccctgatgagtatcattctatgtgactagctatccaaggcgccagatgggaacgggggagttaatccaggtatatatcttctaatggctgcttaattatcggaaatatacctaaacatttttagattcttatcaaaacattctgcatgtggattcagctaaaaaatcttcaattttattaaaagatatggcttccaggggga

SEQ ID NO: 76138 - DNA, 568 bp, Arabidopsis thaliana landsberg
  unsure (1)..(568): unsure at all n locations
atgaatctaaatcgattgggtacaaaaagaaaatattcactaatttttttgttcctgctaatgtcacacgaaaacatatgttatcttgtctttgaccatgtccttgaaagttgaaacagagacactcgtctctaactctgctgaatcatttagtacattttttttaatcctttttgaaccaaatgaggagagtttagataatgaatttgtaatcgatcgtagaaaccatttcaaattcaatctcttaactcaaaagtatatcttgttcaaaaaagcctccccgagcttagccttaagcatgctgcatgcatattcattgaaaggagcaaaatgaatatatcagtctataagaatagtctctagagatcttagaagataattaagaagcgtaagaaacagatcactgtatcatactaagtaaatgcacggtacataactgaagttttaaaaggagagcgctgcttaaatcatggaaggagagaattctgcttcagaaacaacttcaacatcaatctgcactttaaagtgtccttgtccagtaagctntaggaatttcagctagagacac

SEQ ID NO: 76139 - DNA, 594 bp, Arabidopsis thaliana landsberg
  unsure (1)..(594): unsure at all n locations
gatgaattttcgagttacaatgaacgcgtccaagaaacgattgccatgtctcaattcagtatcttatttattttcccaaatcaaatgtagattagaaacaagtcaataacaataataatagatattttagtttgagtttatcaaaacatttagttggatttggatgaaaatgtaacggtacataaagagtggctataatttgttggattttggttttgtttatgaactagcacactacaaaaaaaatcatgcaaatgatgaaatcttacaactcttagaacggaaattttgataggacttttctaccgtaaacctacattttgacgaaaacataagtcagagaaaatatcctacaaaagaaaacagtgagaagagccatggaaatatcctagctatatgactgcatgagtatgaagtatgaacaaatcagccttgataatattgttcctctttatcccaccagcatcttaattaaaagaatacnntgattatgtaatccattcatattgtgacacctcanactttataaattaacctaaatgaggtgaccatgttggggaatggnnggctaagtactccattagaagaagaatg

SEQ ID NO: 76140 - DNA, 140 bp, Arabidopsis thaliana landsberg
aagattggcttatttgatgaaaattcagagaatctaacttgatttgaaaaatattataaacactgggggggtaaaatagtgccaaggcccccactctctagcgtgcgagaagctcacctggcacccccccattcctcccc

SEQ ID NO: 76141 - DNA, 215 bp, Arabidopsis thaliana landsberg
tgtgcttgctccccccctcttccttaccataggaagtatttgtgaaataacttcttagtttttaaaaaagagggcgctaagagaccctagggggctaaccctacacacactaacatcctttatcaaacctgcttccattaggaggctagagatgtagtacacgataaaggggctcgcacggtactgtccatacgtgatcacagaatgcaaggggt

SEQ ID NO: 76142 - DNA, 333 bp, Arabidopsis thaliana landsberg
gatgccgagcgactgatcacgcacatcggcgacgtggtgttcgaaaagtccggcgtgcgtctcgaacccgaagtgcgggtcgtcggcgacgccgtgaaaaacggagtgacgccatgaatggcatcaccttccaagacgtacccagccacggatggcttctctgctgtgcgcacggagaagcggcatgacgcgcacgatcaacccgaaggatttcggtcgtgtcgcggtgctcgctggcggctggtcgtccgagcgtcaggtcgcgctgtggagcggctaaagcattcacgctgtgctgcttagcaggggctgtgatgcaacttttgatacgat

SEQ ID NO: 76143 - DNA, 406 bp, Arabidopsis thaliana landsberg
ttcactcaaaaaaaaaaccacatagactgatatttatttacgttcccctctaccatcaaccttatacaactaatgcacctgcaacgttgctaaaaattcaaaagcttacttggctcttatataagaaacaaaaaacaatccttaagtttcatacatacactcttaaaccttgcctacttttcaattcaatttaaaacacactaaacccacactctaattaaattccattcattacctctgattctcttttttatccacagggttttgaatgaaaacaactcattttattacatacttccgatcttatacaaagatttacacacgcattaagattgtttcatcatcaatcgaacccaacatcttctttaatacttacacttccatatcccattcgcatgttatatca

SEQ ID NO: 76144 - DNA, 306 bp, Arabidopsis thaliana landsberg
gcactctgactatctcaattggagggattttgtttcactgccatgccttgttaatagcaatactcttcatgatttaccaaacgaaagggttatctctgacttcgtttgaacttagctattaccatcccagattgtctgatcatgcaatacacatgagacttttcgtctattaccctcaaaagtctagaaaaaattctgtccgggtcgggctatgcatatgccctggcctgaggttttactccgttaagggggcctcctcagccaatctgcctaagtcaccggccaagggctcgctctttgagagat

SEQ ID NO: 76145 - DNA, 397 bp, Arabidopsis thaliana landsberg
  unsure (1)..(397): unsure at all n locations
tccatagtagnngactattgtcaaccttatctgacggcagaattttttccctttctgatttgtaattttgcagttggactaatggaatgtggagttgttgattgagaattgcattttttattatgattagagaattaccaactcattgttccaaaagcttgtgcttatcatcattgctatcttgatgcaaatctgaatccagtttctggttttgactttactttgaagcttttttttttcagttatgtgaaaatgttgctgtgatttgttagatggtttcaatatgcctaaacaaatttgtacttgctagttacaatatttgaatcatgtctaggggacagctgctttacttgtttgcattttggaggtaagtgatctgaagcattaacttaaattg

SEQ ID NO: 76146 - DNA, 426 bp, Arabidopsis thaliana landsberg
cattatgaggacagaatcggcggaattcggaagaattttgttgttacacttttatgacgctttttacgggtgaaatcgattggaacgcttttctggagaatcgcgatcgatcaatcgaaagagttagaaaagacagccgatcagtgtcgttctactgtcctccctttggcattcccgctttttctccccgtcatcccggcgaaagccgggatctccctgcctttccacctcttcgggggtggcacgaagagaagtgagatcccggctttcgccgggatgaccaggggatatgaaccgctttccgccaggcttcggcgagacaggggaaaaggcaccgcccaaagaaaaaccccgccggatcgctccggcggggtcattctctgggacgatccggccgtcaggccagcgatcactcctcggtcaggt

SEQ ID NO: 76147 - DNA, 611 bp, Arabidopsis thaliana landsberg
atgttgcctgagacaaagaatgtgccaatcgaagagatgaacagagtgtggaaggcacattggttctggggaaagtttattcctgatgaagctgtcaatatgggtgctgctgagatgcaacagaagtccgtatgatgatgatcaagaatgaagttttctttgggcaataaagatttatgagaaaagagaaagtgaataattcttgggatgaaataagaataattgtcaaaaatgccttacttcctaaaagaaagctgctctgtctttagcttcagagacttagctttcattgtttcttctttcttcttttttaatgtttctttgttgaaattgttatttggggcctaaagatgtaaaaacaaaaaaaagaacaaaattatttaaaaatggtttcttattttacatttcattgaatctttatttgagaaaaatagtgttaacgctttatgcaagaaacaagaatagtcatcacttatcaatcgatattccagtttatccttaccattttttctttccatgattgccgtacctttcagctctttttgcacaaatttgtgagaaagtatttcacatttcgaaactgaccgttaaataacttaaacttcactctt

SEQ ID NO: 76148 - DNA, 480 bp, Arabidopsis thaliana landsberg
acaatagagggcatgcccaggtactcggagaactccttgttgccggcgagatacgcgttcacgcgcagcgcgccggagaccaacacggtcggcatgatcgccagaccatcgaggccgtcggtgaggttcacggcgttggagaagcccacgatcatgaagtaggccaacaccacgaacagcgcgcccagcggtatcgctacctgcttgaacagcggcacgtacagcgcggtttccgccggcagctgcgcggtgtggaacaggaaccaggcggcgatcaggccgaacaccgactgccagaagtacttccagcgcgaggccagtccgcggctgtcgcgcaggacgatcttgcggtagtcgtcgtagaagccgatcgcgccgaaacccagcgtcaccgccagcacgagccacacgtaacgggttgtgcagggtcggcccacagcaggcgtggctgatcgccacccgacagcagggatcatcacg

SEQ ID NO: 76149 - DNA, 275 bp, Arabidopsis thaliana landsberg
ctatcatctatttggtgaattttccttaccggtgataactcctgcactatattatagagctgtgatcgagatgtagttcacggctacgctgagggagttgaacttgaacttaactacctgggtttcgacttagacacaaaggctatatattcctacagccgggagaagcatgagcgataacagggaccgggctcacaaagaatgatagggagaggccctatcaagtagttaactatgacagcccattgaagagtccagcgcgagacacacacgcg

SEQ ID NO: 76150 - DNA, 469 bp, Arabidopsis thaliana landsberg
cggcgacgctccgatcaaccacactcttcttctgtgtcgccgcaacagctccgaattccgatgcacgatgtaattcgccgccggggcgtttccttcgccgttggtgaaaaccctaagatcaccgtagtgtaagagtagtccaggtcctgaaccttgctctgcaagcttccctagatcatgaaacctagtgtcggtgtaggttttatcgaatttgacgctgatttggtcggagatttctgaaccgatgttaaccgccgttaaaccgtgaagcttcgtcgggagaatcatcccgtcggtttggtttttctctagcgaatttaaataactggttagtacaccgtaagctgatacaccaacaagcagaggattcctccctttatctttcgtgaaaaccgcgctaatcctccggtaatccaaatctccgttaaaattcaggcttggtacggtgaaaccccatcgaaccggattc

SEQ ID NO: 76151 - DNA, 311 bp, Arabidopsis thaliana landsberg
gcagacgctgatcggactataccactctttttgttttgtttagcaacctcggggctgtgccctacctctttatcactgacggtcattagggcctactgggaccgctgttccttacataactatcccacgctactgccgacctgacccatatttgggatattatttcaagtgctgattgtaccgttccgcccacgacaggctaccctagagtcatactgtccctaaccttcgggaaaccactgcttgggtcagggcatttcaccctacccactatcgtgattttaacatagcggtcgcctcatatttcaccc

SEQ ID NO: 76152 - DNA, 550 bp, Arabidopsis thaliana landsberg
  unsure (1)..(550): unsure at all n locations
gcggccacagcctggcggtcatcaatgccccgctcgaatcggggttgcggcttttgttcatcagccgcgcgaacccgtacgccaccgacgtggtgatcgccttcgcgactcggcgggtggatctggcttttctgcgggcggcgtacagcgcggcctgctccgggcgggtcgcgtgggtcgtttacgccgagccgggccggcccggaaccgacctgcgctgggagtggttcctcgcggcgttgcgccaatacggcgttcaggcggtggagcaggtgccgnnnnnnnnnnnnnnnnnnnnnnnnnnnnnnnngcggctgcgcaacggcgaaccggaggagggcctggcgggctgacccgggacgttcacacnnnnnnnnnnnnnnnnnnnnnnnnnnnnnnnnnnnnnnnnnnnnnnnnnnnnnnnnnnnnnnnnnnnnnnnnnnnnnnnnnnnnnnnnnnccggaaatcgtaccgggttcagccgggctggccgctgccgccgtcggcgccctgccggccgggtggggaatcacgctaagcgatcccgctg

SEQ ID NO: 76153 - DNA, 382 bp, Arabidopsis thaliana landsberg
actacgttttctgcattgcatcattgcatgttttctcttccttcaagcaactagtcttttaattagggctaaggacatattgaacataacaattccttcgtctagtttcaatatgtattttcagttttttcgtctagctaactttagacctgcaaagcgtttttttttttttaataataaattagagtattttcactatatatcagtagaaatgggtgcgtatgtttttgataattaatttaataaaacctgtaatgagtagataagacaatgagtttactgtgtaagtaagcaaaagggacaaaaaatgtgttttgtacattattttgttctgtgggttgacattaacttgttctgtttagaatttttatagatattggac

SEQ ID NO: 76154 - DNA, 238 bp, Arabidopsis thaliana landsberg
  unsure (1)..(238): unsure at all n locations
attaacactnggatcaacgcgnnaaaaaaagaaaatttaaaattattaaaaggaaaataataataaaggggaaacgagccttaagaattgctggtgaaactgaattaggtcctctacaagagaaacgaggcactctagaagcaataggtcggccaatgagcgtcttggaagggcttagtcttgctttaggcactctgcgaaatcaaaatgttctcatgtgttagaaaaaaaacaaaaa

SEQ ID NO: 76155 - DNA, 515 bp, Arabidopsis thaliana landsberg
gaacttcataaatttggtattttgctttgatatttttattagttcttggatgtttttacatcacagaaaacattgcttttcacctatatatgttaccatttattttggtataatctaacgtttttgcattcttctttggaattatattttggttttattagggaaacgattttcaatgcatcccgagacagagcaagcctgtttagttccatcttccaagaagactaagctatgcagtgagaactttgaagacaaattcagcagcttgcatgagagtgttgttagcataattcttagtcaacttccaactgctgaagctgttagtacttctgtgttatcaaagtcatggaagaacatttggacaaacatcacagatttacattttgatgatacaaagcagagggatccgagtgattctcgatttactgacttcgttgagcgtgtggttggcgacattggaagtccgcacattagcagtttctatctatgctctgttaatactttcgatgagactc

SEQ ID NO: 76156 - DNA, 272 bp, Arabidopsis thaliana landsberg
accatcatttcaatcgatttgttcacatgaaagaggagcctgccagtttctccacgaaacgatttttgatttgtaaatccatatggacattgaatctaattctagctgttgatgctctataaattgtattttttcacatcatacaattataggtttgaaatagcattgtgacacagtgacaacattattacattaactactactagaagactaattgccttctaaatccaagaggtaatctatgtatatattcatttaagagtctgtgacac

SEQ ID NO: 76157 - DNA, 471 bp, Arabidopsis thaliana landsberg
aggggcaagagatgagaaagcgactagccatagattatctttttatgaaatctatgcgaaatcaaaggagggacggagtacctgacgcaacgagaggagagctcgaacctaaaaggaacaagccggagaaccgccttgattcctctagataaaggctgacagagggagtgagagaagtcttatgaacgagagttgcttatgttatttcacaaatactcggaaagacaaacaagaaaagcacatagaaatggaagagatcatggtactaattggctattgcactcgcgcaatagggacataataacgctatacctcacttgaaccttcatatgcctaaagatgtgactattggcacaaatccgagccaagagtaaagatcggcagttagccgacatctatatatatagatatatgaagatatacatatatagatatatgcatgatcaatcaacgataaaaaacgctttatgc

SEQ ID NO: 76158 - DNA, 332 bp, Arabidopsis thaliana landsberg
  unsure (1)..(332): unsure at all n locations
gggggggtgacgggttccctcacaaaccaanacaaattcccttttacccaaagccaaaccaacaacnncgggggggggattatataaacgagggagcggaacaaataacaaaaagaaangcaaccaacgctaattggacaaagcgaccactaagagacgccaccaaaagcggctagccgagacccttgcacaaacaactacagctggaccagggaaaacagcactcaatgggtctgcaccatcaccatcttcaaataaagacattttgtacagtagcacccaaaatagcgcatattaaaaccacacccagtacaccggagactcctatcata

SEQ ID NO: 76159 - DNA, 228 bp, Arabidopsis thaliana landsberg
  unsure (1)..(228): unsure at all n locations
gcttcaccactcaacagcccttgccacctctagtttctcatcactggataagagattcttgactcccgcgcggtcaccacgtttatagactggccatatagcaatatgacttttgctggctgacgttgttgctaaagannnnnnnnnnnnnnnnnnnnnnnnnncatactgaaacgggcacgtatctatctcacctaaaccgcaaatgctgcttccaccagcttcaac

SEQ ID NO: 76160 - DNA, 440 bp, Arabidopsis thaliana landsberg
aaaactaggtttacggttgttcgttttttttttttgttagttaacattaatatgattttgtgttatatgctacatctgttttgttaactataactatcagcatcttaaattcttttgatttcttgtttctattagggtttaggaaccttaaccctgaggtagaggaaggaatctgccaagtcctctcttacatgtggcttgaatctgaagttctctcagatccttcaacaagaaacttgcctttaacatcatcggtggccacatcatcatcatcatccttctcgaacaagaaaggaggaaaatcaaacgtggagaagaaacttggagagttctttaaacatcagataactcatgatgcgtctccagcttatggaggaggtttcagagcaccatatgcattggcttgtaactacggccttttttatatcacttaatcatat

SEQ ID NO: 76161 - DNA, 555 bp, Arabidopsis thaliana landsberg
aaactagcgagggaaacataagacatgatacgagataatttgtttttcccaataagaaagagacttgtggggtagggtcatggtcatcgattatgcagtgacatggtataaagtcatccgtggacgaaaaaatcagcacaagcatttaccagcttgacatagtaattgcaacattgatgatgatttgatttgatttgatatttattttgaccaatactcccatattagttataaaataacctagtgtttattttaaaacacatatatacgtcgtcttatattctttctttagaatgattatcaaccgtttttctttactttttttggctaaacttcgatgcgtgcttctaatcacgtctatcctaaaataaaataaaataaaaagagagacactatggatctatctatcctatatagagtctaggttcattggtcattgtacactggtattactataaacaagtttagtagattgcatttctattttcagataagggtttcggtttagcccaagtttgagtatgtatataaaccgccccatgtatattatcccta

SEQ ID NO: 76162 - DNA, 582 bp, Arabidopsis thaliana landsberg
  unsure (1)..(582): unsure at all n locations
gctgcatgatatcataaatttctgaaattataatgacctctaaagatgttaagttttaatatgaataaaatgtattcggggtttaagcaatacactttcaatttgaaaaaaaaaaatggaatcattacaaatatttaaaaccacaaaatatttgaaacaatgttaaaaacctaagtaatttgcaacgacagaaaatggatacatatcccatgttgaagattaactactactataaattattttgatgagaacttcatccattttttgtcactgcaaatatggaactaataagcattcacctccacaactcaacaataaattcatctaaaacgtttttttatttcaacacattttgtttaaaatgactaatatacnnnnnnnnnnnnnnnnnnnnnnnnnnnnnnnnnnnnnnnnnnnnnnnnnnnnnnnnnnnnnnnnnnnnnnnnnnnnnnnnnnnnnnnnnnnnnnnaattcgcattcatttgaaatatttattattaaaagaaaataattatacatatttaatagaattataaaaaacaaaaaaaaatcgccgcgtgcattatgaaatgtgttatatgt

SEQ ID NO: 76163 - DNA, 162 bp, Arabidopsis thaliana landsberg
aggaacccacattttacaattattttatactggaaaggcttttgcctatatgtattacggcatgttaatctcgatattagaacacttgcatttgcgccttttgttatttataccaaccagcaagaaagaatgtatggatttgatactcaggatgccaccacc

SEQ ID NO: 76164 - DNA, 328 bp, Arabidopsis thaliana landsberg
  unsure (1)..(328): unsure at all n locations
ggagatcggcaaaggcaacttctgcaaacccatntttattttcgttggcaggaccaaagaactgngggcgggtttattaattttgggatagcccccaccgtttaaccgacattattttttgtaaacaagttaaataattgtacatgatgctgatttaatattgtttttgacatattcttttgtatcaagtaaaatttctcgtcatatttttgacagtattttaagtttaacaatgcttattacatgataacaataacgtcttacatcttgagcttgatctgaatttttttttggttttaaaatttttttttgagttcacatggaaaat

SEQ ID NO: 76165 - DNA, 571 bp, Arabidopsis thaliana landsberg
ttagtattttcatagataaaaagtgaaaactaagaaaatatattatgttcggaaaaaatatatatataatatggggatggtataaaattatagatttatagttaagtgtacttcatagtgttaaatatctctagctaattattaaaaatatttttagttttagttataactagttgagtactgacatacaatatccgtacgccttctcaaaatattgttcaacattttgcttaaaattcaagatagctcgaataaagtattggtcggacgtaataaaacgtttttcaaattttcgttgtttacttaataatatggctcttcgattgccagacctgacaaaggatacccaacccccagttagttaagatatctcaccttcaattagttaatgatatatatatatataagaacccatcaaattactatatggctgtattatagtgagcattattgatatcttacgaaactatactcgataatggaaaaattagagacattaattaagcttagattctaagcaccataccatctgtattatatgaaaacaattatcatgatatatatatatata

SEQ ID NO: 76166 - DNA, 516 bp, Arabidopsis thaliana landsberg
  unsure (1)..(516): unsure at all n locations
aaaaattaacaacactttcttagaaacataaagataggtagttaaattataaccnnnnnnnnnnnnnnnnnnnnnnnnnnnnnnnnnnnnnnnaacatgggttagatagatacaaaatattttaaatcgtaactttttaacttttaaaactaactaaaatctagattgtaacatctctaattttaaactatttgtgaatagtttgtaacgatatttttcaagtgtaaaattactttgcaaaaacaagaacaaaaacaacaattgttaggctcgaattgacggcctaaaacaattcctagtccaagtttttttttaagatgttgacatttacaaagatgatctttgtaaatacatttatctcaacaattcacaagtgttttctgtcgaccatttggtaagttcatcaaaaccccaagggttgagaatattttgaaatatgtatatcagatttgggttccacttagaaattaaaaaatgaagatgttttacaattgatagctcataatattttatctg

SEQ ID NO: 76167 - DNA, 428 bp, Arabidopsis thaliana landsberg
attcagtagtgttaatatttcttttcttagctcaagattctcattgcatacagttttggtaggaaccttgggctgtaaattaacctgtaaacagaaaactctatatactcaaaaaatccatttagtaaatcttaagagtggctacaatcaaataaactgacaagaacctactagcctctacccgaaccaaaatcccaaagaattacatagaacacattcaaagctagcttcagtacgggtgccttttataacattagttaagtctcatcatcaatcaatggggaaagataagcaaatgagatagacaaatagaaagagttaaacagaacaagaagcaaagacaaaccccgagatcttgcagagtctgctcaacccgcttgatcgttcgaagaccaacagcagagcttgcagcttggaccatttgttca

SEQ ID NO: 76168 - DNA, 308 bp, Arabidopsis thaliana landsberg
  unsure (1)..(308): unsure at all n locations
actttggccggattgctcatgccggacaaaataaggcctgtttcaattacaaggccgacaataaattcaatagagcggggcatgacggttctccggattgggatgatcaggccagaatgtggcgtacgacatatacagtgatgaagccccatcccatgaaggccagggtggcgaccaatgaccggggtgaaaggcgtgacaggccgcagactccgtggccgctggtacagcccgagccaaatcggnnnnnnnnnnnnnnnnnnnnnnnnnnnnnnnnnnnnnnnnnnnnnnnnnnnnnnnnnnnnnct

SEQ ID NO: 76169 - DNA, 472 bp, Arabidopsis thaliana landsberg
gactcgttttctaacataatctcttctctgctttcgtggtcaacttgttttcgtttttgtgatgtctcctccgtgcgggtgcaggacgtgtcgatgttctacctcgacttgttggcgttgttcgtgcggcaaaacatgcaccgagtcgccctcatttggtgagctctcgtgcgagttctgttttcttccctgtcggcattcgctgtgttagctggacgcacgatgttctgttttgcgtaggcacagatgcctgcgacgtgcggaacgatcgatctccaacagcagtaacacgcggtgtctgcaggccacgtgtgtacgagcacagtctgcagcatcgaacgaaaaaaacattctttggctttcagtacattgtacgtgtaatcacctcgggcgccagcgattgctcaggaacagtttctctttccaacagcacgatcggcgtgcctctacagcaatgccgttcagttgggat

SEQ ID NO: 76170 - DNA, 292 bp, Arabidopsis thaliana landsberg
agctgactcttgctgtatgctagtaatctacatgttttttgttgattggataagcagcatgacattgtctggttcttatattgctgcgatggaagcgacgagtacgaaagtagcattcattgtcccaacacttgtataatgggtggtaacgttaactacatctacaaacctagagccaaccttaaatctatacacttgcaactcggtttaacgcctcatccaaaggagttatatactataggaatatttcaggacatggtcaagaatttacaaggttttgcaactttttttg

SEQ ID NO: 76171 - DNA, 544 bp, Arabidopsis thaliana landsberg
tcctctaaattttgaatgatatttctgttaatctttgtcactttaaacatccacttaacaataacctcacgttatttatcaagataaaaataatatggaatggaataaactcaaagatatgcattccacttggatacgttattctcaatctcaatgcttcatgatgtctatatattatatactttctttttttgctaagaaaatatattatatacttttgttttatcaataccataaaattttgatagttgattggtggattagttagtttctgcaatacaagaattaataacttcgtatacattattagttgagatcgccgatattcatatgttaataaaatttccttgtgtttcaatttctcatattgataaagactaaacatttctccacatctgagacaaaaacttaactcatgaaattgcgtagtcttttgccttttctcttgtttgttcgtttatgcgtttttccttgcattcttcgctttggagtagatgaaattccaacgtgtttcttagaaggcttcgctattattttgagtttt

SEQ ID NO: 76172 - DNA, 564 bp, Arabidopsis thaliana landsberg
  unsure (1)..(564): unsure at all n locations
aactcaancatcaggtaacttcgaacatcttcaaaaaatatttttatctcctataattcttccaaaatgttaaccgtaaacagcgatacgggcttctcttatccagtgttgagtcaggcgatatccatctttctgagtaccaagatgctaatggtgacaacatggacgacacagatgacattgaaaaccctgttgatggagaggaagatcaacagaatggtgcagctgagccagcttctgcaactgcaggtatttatgcacagtttgtgctcttcattttttctctgcctcacttaagaaagaatcataattaacatcatatgacgtagcaacagataatggagcagcagctcaaaagctggtgattagcgaggaagaatatgatagaatcacacaggctttagtcattcgccttagacaacatgaagaaactgttaacaaagacagtaagcaacaacactcttcaattttcatacttttcattttcttttcccaactattgaaaacaatttttttcctttaggttctgaattgcctggaattagacaaaagaactgattcgat

SEQ ID NO: 76173 - DNA, 624 bp, Arabidopsis thaliana landsberg
  unsure (1)..(624): unsure at all n locations
cagagtcctcctctttgtctcatgggatatcttgagcttttctttttactccttaacattgtacctactctatgaagggtcctttattaagttttactagtttaaacgacnnnnnnnnnnnnnnnnnnnnnnnnnnnnnnnnnnnnnnnnnnnnnnnnnnnnnnnnnnnnnnnnnnnnnnntagcttgtacttttttcgcttgagcttctattttcctaatatatttttctcttctctcacagctgcacttattaactggagtgtcatatcctttcttgatttgatagctttcctcctcgttcactatattgcacctgaaattggtaagcctgttttccctctaatcaaaagaaataccccaatgtttctgctgtagtacatgtttcttggaatctttgatttggggtttaggtgtgaaaggattcatctagtttatgcccaacatctacattagcctggagaaacagaaaaaaaaaaaagagagtctattattctcagctttcgtcgcttttttcagttacggttgattagctgatgtttactttctcaaacttactttggttcttgctttattttgccaggataccgttttcagaggaggcattggctattatggcccattt

SEQ ID NO: 76174 - DNA, 246 bp, Arabidopsis thaliana landsberg
ctggacacgagccatctccaaggctagctatagctgcctaaaacacaagggctcactagaaattaaactaactacaggatcgaaaaaaatgaacggaggatctacatgatgttgagacttgaaaacatgtgaatgctgagtgtgtaaaaggtacaagctcgagcggctggacaaaggacacacgagatacttaatgggtaactaataagtcaggcatgtacccctaaatcccagccggagcgacca

SEQ ID NO: 76175 - DNA, 406 bp, Arabidopsis thaliana landsberg
tatatcagttggcattttatattctaagcgtgttaatcacccaagtgacagtctaaaagaatcgcccatgattgttcctccgtctctctagctattacattcacattcagatgttattgtaagattcgtcacaatgctaaaggtatatcacatcacgtaatggaacatgcataatactgaagaatgaaataaaaattaatcttaaaattgtgcttagagggaataactaaaaatgcaaaatttccataccaaactcttaacaatttggaaaataataccaacctcctcattgacttgatagtaaatcagatgatctatcaccatgggatgttattgaacattgataatcacgttttgttggaagagctataattatgaaaccaagcccaccaactcaaccgatcca

SEQ ID NO: 76176 - DNA, 605 bp, Arabidopsis thaliana landsberg
  unsure (1)..(605): unsure at all n locations
cttctgatttcaacattttactcgatttgatttttatgttgtcattgttattctcttgttctcgtgtcgtcggaaaataaaaatcaccaaagaagtaaaagaaagcaaaaaaaagagaagagaagttgtaggggtaaaagtatttaaatgatgttgatccaatcatccaactaataatcaagttcatggatactaatgataataccctttttctttcttttttaactaggttaaattttatttaacttacgaataactcttatttagtcatatatttaaaattaggtactaatagaactaaataaccacgaaattttgtttatttggaaaaatgtataagtggcaaaaccttaattaaatagactttccgtgatgtgtgggctgctgcattctttcggtcatcacatgttgtgtaagaattttcctctaaggtgacgaccgttgtgaatgggtccatgtaggtgattattatgaagtcaattctctaggggggaaaagtaagaagagcatanacacaaatggcctaaaatgggttagcgtgcgtccatatggcgttaagagcaatggcngaagacgggaagagtcgagcatgaaagcgatgatgt

SEQ ID NO: 76177 - DNA, 457 bp, Arabidopsis thaliana landsberg
atacaagttggctctatgggtcgatgagtatgtcttctacaatgtagctcagcttttttcaacaggtatttgcgaccgtgaccaacagagctcaatcaacttgtgtctagagtcgagccgccatgtacaaatcaattttgccgatttttgagccttgactctgtgatcggggaatctcaatgttaaaaggactaaacgtcatctcgctcctctactgtcctgctataacacgggtttcggtattttaacccttaagcaacttgtggagtctccttatctatgttaagaaaaagaaaagtatatatcacatatagttgagcgtgacacgaagatcgggccgtccctttgtcgagttttttaatctgataccatgacccgcatatgacttcttgtaacacttttttatgcatagtgatttagtttagaaatgaggtgtagtagataaagggcttttttt

SEQ ID NO: 76178 - DNA, 559 bp, Arabidopsis thaliana landsberg
  unsure (1)..(559): unsure at all n locations
cggccggcccaccgcgacggtgagcgcccagtagaaccaggatnnnnnnnnnnnnnnnnnnnnnnnnnnnnnnnnnnnnngggctgggtcagctcgcccggcccaacgctgccggccgggctgaactgccagctgtcgcgcatcaggtcgtagaccgccgcggtgacgtagatgccgggctgcgacgtgttcttgcgcagctgataggccaggttgaccgctgagccccacatgtcgtagacgacgctggagcgaccgaccagcccgctgaccacttccccggtgttgacgccggcccacagccccagctggtgtccggttcggccgttgaagcggtcgatgatgcgttgcatttccaccgcgaattccagggtgcgatgcacgctgtccagccggggggtggtgatgccactgccggccagatagccgttgtacatggtccggatccgttccacgccaaggtcttcggctgccgagtcgaactggcggaccacctcgtcgactatcgccaccaattcatccccgggcaaactggttgccagggtgtcaatcccgagaa

SEQ ID NO: 76179 - DNA, 502 bp, Arabidopsis thaliana landsberg
gaggtggcactctttcccttcagctcctccggtgaagtctcctcacgcatgtaaatgtcattatatccaaaacaaaatggatttctaacaaatattaatgaacaatagatatattcatcttgaatcattcgaagaaaactcaaaatgtagaattacatgtgttaaaattgaataatcttagagagaagaataccgataagtttgaagctgtggtggcttgtaaggcctttcacggactttcctcgaccttgttccatgttgagcggcatgatgggctaatagttaatatttatgatcgaggtacatattcattcactctttaattagtaattgaaatacaaatcgaagtttatttctttaatttttcatccaaaaatgtcgaagcaactagatatgaccatgcactctgatattttgggtcaagatatgacattaagaaaaatcacaattacataacctgacaaattaagaaacaattgacattctaaatacaatcacacct

SEQ ID NO: 76180 - DNA, 332 bp, Arabidopsis thaliana landsberg
cgcaaaatcgctcgaataggcgttcagatatcccttcttttcgcgcgaactccattgcttggcccaatgattgagggccgccaatacttcggcgcgttcctcatcagccttggctttcgcctcgcgcttggcttctgcttcgcgacgcttctgctccgctttcggatcaggcttgggttcggcttgcggcttcggttccggctttggcacttcctgcttaggtgcctcctgtttcggcgccggtttcggttccggcctggattcaggcttcggttcgggcttcggctcacgtttggcttccgctttagaccgttccggtttcgccggcgctg

SEQ ID NO: 76181 - DNA, 255 bp, Arabidopsis thaliana landsberg
  unsure (1)..(255): unsure at all n locations
caatcatttcgaatccaatctgcagcacaacaaaactagagcacacatcgaaactatttgaaaatcaacacagccagatcgcgtagttgttttaaatgcattatcaccaaaaagaacatttgagtacgttgtgtctagttcctttgtatttgtcacctggattgcccagtcctagaaacagccatggccgatgaacagaagaagtgcagtancaccgttttgacaccctactnagtattttttggggggtttacc

SEQ ID NO: 76182 - DNA, 588 bp, Arabidopsis thaliana landsberg
  unsure (1)..(588): unsure at all n locations
gattacttttaaatatatatatagtatatgtttggtaacaaattttttggtaaatccgaatgccaaatggcagggggtggtccaaacttaacagctatagggttcttcctttgcaagttggagatttgtacacatatttaataacgcacacacacacacgtttatacataaagactcaaatctataaatagaggtatagagtgagaggaaacgcctaagaatccggaagctcaaaacaaaaattgagagaaaaatatagcattagatacgggaaggtccacgtaagacccgtactctactttgattctctcaatctccttcaattttttctagaattttttgtgatccatctttgatctaagaagatgaagcgtgagtatttagattacacacttgtgcctttagggcttgctttgatggtgttntatcatctttggcttctctaccgtatcatccaccgtccttcttcgactgtcgttggccttaacgccttcaatcgccgcctttgggtccaagccatgatggaggtctatctttntattctttaatcatatttatttgcttttggntctaaatttatatgtatat

SEQ ID NO: 76183 - DNA, 573 bp, Arabidopsis thaliana landsberg
acgctatcatttaccaatcgaatctgtaaccatttgcatcgaatttttttcaatatcagaattatcaacatacagtggagtaagagacagcttggccactaccatgcaaaggttaaccaatcatattcatatattatagacatgtcgatgtatatatgtctgtggtccttctaacgtttttttttcttttttatttactcatcctttgttcccactgtgctgtcacatagattcttcacagatctttcgagagagaaaaaagagaacaacaaatcgaaggtcataataaagtcccaagactatatgaaacaaagttgtgaaaaatttccaatttgtaataatcgagatggacccgtattttatcttctctcgtttttgaatttcataagtttgtagactacatttcccttgaattcaactaacttaaaagtcgattattattacaaagtgtttccaattcgaaatgatgtgagttataaacttataatcaataacataacaacaatggtgaaaataagctacattgatactcataatattagaattgaatgtgacgataagtgaagacagttt

SEQ ID NO: 76184 - DNA, 852 bp, Arabidopsis thaliana landsberg
ttctcataaattcgttgatgcagcctccaaaaaccctcatcaaatcgccgtgattcaagcttccggcttgacggcgaggagcattaggtcggaatcagctgcaccgcctgtttacgacggagacaaatgtttcacgttcgcagagctttcttcatccattgattcactcacctctcgtctccatcgtatcctcagtaacgatgattctcaaggttacccatttaagctcttataaaattcttaagttctgtgagtataaaagctcataaagtcttaaccttttgacattgcagtggctggttcagatgttgtgtatatgccaaaggtagtggctttatatatgccaccatcagttgaatatgttatcagtgtgttctctgttttgaggtgtggagaagcttttttacctttagatccatcatggccaagagaaagggttttgtctcttatttcctcttcaaatatttctcttgttattgcttgtggcttgtcttctgtggaatcgcattggcttgtggaaagaaatgtttgccctgtgttattgttttcaatggatgagaaattgagtgtggaaactggttgctcaagctttgtttggccttgcaagaaagagaggcagagaaaattttgttatcttatgtatacttcaggatctactgggaagcctaaaggagtttgtggtactgagcaaggttaggatgtgttttattcataaacttgtttcagctacttctacaatgaaaatagattgttaggtatgatgatcttgaaatttgaaggtaaatattagttcgagaatgagattatttatagcatttggcgtttatctataatatttcacatgtttacgaa

SEQ ID NO: 76185 - DNA, 575 bp, Arabidopsis thaliana landsberg
cctgaaccggtatcaatgtcttcttcaaattcaacaacatttaattccggttatcgttcggttatcacaacgcgtgcttttatagctccaccttcatctccagcttcatttttccaatcagagccaccttctgctacacaatcacctgttggaatcctctcttttagtcctttgccttgtaacaaccgtccttccatcttcgccattggaccttacgctcatgaaactcaattggtatctcctccggttttctcaacttacactactgaaccatcttcagctccaatcacacctcctcttgatgactcatctatctacttaaccaccacaacaccttcttcacctgaagtgccttttgctcagctctttaactcgaaccatcaaaccggtagctatggttataagttcccaatgtcttctagttatgagtttcagttttaccaacttctcctggtagtccacttggtcagcttatttccccgaccctggttctggtccaacttctctttttcccgatggagaaacctcgctgttccctcactttcaagtctctgatcctccaaaacttgtgagtc

SEQ ID NO: 76186 - DNA, 551 bp, Arabidopsis thaliana landsberg
  unsure (1)..(551): unsure at all n locations
aaaaaatcgacacaatgagccctataaaacaaaccaagaggaattatgttatattaattcagccgttgggaacatgctgagtctttatatttcttttattaattccttttcgcatgagattcaaaagccccacaccacctcaatccaaagaaaagtataacatgtttaattaagttttatttgatttctagggatttccaacatctaatcatgtggttgtatagtatacacggaaagctacgaatttttaaacctatactgcaacatttttatagcttaacccaagatgcctcgttatgtattacagtatatacacattcccatcaccttccatgattttatcttgataagttgaaaaagatatataagttggaattattttaaagtaaccttgctttgaatcttaacattccctgcttttttcttataattntaagtttttaactaaggctagnttatttaatttttatcattattcgatgctgcatttcgatacactactagtctactcctattttttttgggggtgtttatatatagtcatgtgacat

SEQ ID NO: 76187 - DNA, 529 bp, Arabidopsis thaliana landsberg
aggcgcgagataaggagaaagagagaaaagagatttagagattggcgtagaatcgaaagctacttgggttcgtcggcttcatctttttcttctgtctaatctcctcagaggttctttcttcttcagatgaaagttgccggagcaattagaaaaggatgcgtttttattttatttaacaaagatgacgaaaggtgagtacaaatacgatgtcgttttgagggattgcttacaaatatgaaagggaaaaaataataaaatattttgaactatgaattaggatgtgtgtgtttttgtcaattaagaggaatagatttgacataatttcctttcctttgatgacatttgttatgtcgcgggaatatataaaatatattgggaatttaagaatgcaattcttacatgcagacaacccattttcagacaagattttgtgcatgtaaactcaaactacatgtgattttattgggtaatgaatctgatgaatcagaagaagcttcatgtctaagcaagagatatcttgtgggatgcc

SEQ ID NO: 76188 - DNA, 506 bp, Arabidopsis thaliana landsberg
  unsure (1)..(506): unsure at all n locations
gatactccttatacgaggattaatttttttctacaattgattgaacctaggaatcgagtgaactccagtggtagctagaatatccatgtaagaaaagtttactaaagaaaaagattaaaaaaccgatgtcactattaatgtcgtatggaagatgatcatataaaaaaaacgtgtaggatactaaagagaaggtagagaggcggaagagtgtggaccgttggatgtacagttgagtcgtattaatgtataggagatgcgttcgtggaccattgtctcgtactgagatttttctttaattcgatagagaaatgaagacaaagttagttagaaaaatataaggcgaagctcctcctatttaattcatacatctacctacatgcactacgtgtatatatgtgtatgtatgcatctacaatctatttcagattattgtttacggcagntctaagtacaggagactagaagagacaaccgattacgccgttctatgcatttcggctttgata

SEQ ID NO: 76189 - DNA, 212 bp, Arabidopsis thaliana landsberg
  unsure (1)..(212): unsure at all n locations
ctgcatacatcactttcttttttttgcaccatcgaaaaataaacgggtggggggggcctgacctactcttacatctaaaacttctgacactccattcccacggggcggggaaccaccagctgactcagctgtgctaccgcaggctttggtgaagacaacttaagaaagcannnnnnnnnnnnnnnnnnnnnnnnnnnnnngcttacaccaga

SEQ ID NO: 76190 - DNA, 456 bp, Arabidopsis thaliana landsberg
  unsure (1)..(456): unsure at all n locations
agcgcgggttggaattgtctttcgaagggcaccggcggtgggacttgcttttcacaggccgctatgtcgcacaaatggggaaagtaggcattacggccaatgagaagcatttgctctacccgattcctgttcaagagatcgatgtgaatccttcattgaaacaaaannnnnnnnnnnnnnnnnnnnnnnnnnnnnnnnnnnnnnnnnnnnnnnnnnnnnnnnnnnnnnnnnnnnnnnnnnnnnnnnnnttctgacgatacttattttattccagtctttgtgcggcaaggcacagcagcagtacgatgtggtggtatacggaggtactcccggtggtgtaatcgcggcagtagcggctgctcgtgagggagcgaaagtgctgctcatcgagcagactaggcatgtgggcgggctcaatacgagcggcattggtaccgcccagtccgagcatatgat

SEQ ID NO: 76191 - DNA, 302 bp, Arabidopsis thaliana landsberg
atatatttttgatttttctaattattttaagatgcaaatggtagttgcaagttttggagattagtatagactctaagttctcttggttaaaagaaattttacaatatgataataacatggacatataatataggtaccattgttataggatgttcattcggttaaatccaatcaaaataaaatcgtaaggaaaattagatttaaccaaaaaaagatttggtttatagattttttacctccaaaacaaacatcaaaccgaattgaaaatgaaagatcgattagtcaaaatataaaaaagttaa

SEQ ID NO: 76192 - DNA, 576 bp, Arabidopsis thaliana landsberg
  unsure (1)..(576): unsure at all n locations
ttgaccaggtcgcggatgctgaccagacccttgccttccgctttgttctggcgcgattcgaggccgaccagatgcgggtgaccgagctgcaattcggccgcgtcttcnnnnnnnnnnnnnnnnnnnnnctgcgggatgtagctcgacatcacgttcagcagcgtcgtcttgcctgagccggtgccgccggagatgatgatgttggctttctgctcgaccaccgtcttcaggaattccagcatcaccggcgtcatcgaaccgaagcggatcaggtcttcgccgaccagtttctttttcgagaatttacggatcgtgatgttcgcgcccttcagcgccagcggcgggatcaccgcgttgacgcgtgagccgtctttcaggcgcgcgtccaccatcggcgagctctcatcaatgcggcggccgatcggcgtgacgatgcgctcgatcgcgctcaccaccgcctggttgctggtgaaggtgatatcggatttctgcagttggccgccgcgctcgatgaaaatttcatcgtagctgttgaccatgattttcgacaccgactcgtcggcgatcaggtctttc

SEQ ID NO: 76193 - DNA, 592 bp, Arabidopsis thaliana landsberg
  unsure (1)..(592): unsure at all n locations
attgcccctgtcatctgctgcgtttgtcttcagacgtttgacttgtgatctactgttggttttttagtccgaccatatacgcttgcactctctgagcaagttggtgttgttgttgagaaagtgttccacattcttactttgagtagcttgactgcttgcttcttcttcttccccatctatcgagttttctctgtccgcaacaataggtggttctttgttcatgtcaggtattacatcgacactttgaacaggtgaaatcaagattaggaaatagagtcaacatttttccttttagtttcatgggacctgttgactctttcaataggtgaccatcttctggtaggtgaatctccttggcatttttgttactaggagtccaacgactcaaccaggcagattcataaccatgaacacaactttctgtcttaatcttgcttaagcccataaaatgttcagacatttgtacctaaaagatatatcatatataagtaaaggcattggtttcattagagacaaaaatcaaatatctccaatcactcatcaggaaaacaaaacanatgttcttggtacatttattctcaatgaccatgtg

SEQ ID NO: 76194 - DNA, 119 bp, Arabidopsis thaliana landsberg
ggaaaaaacccacacgagcggacaaagggaagaaagaacgcgttcccgaagaaagggattgggaaaacacgagggggagagagagcggggggggggagcgaacaccgagagagggaaca

SEQ ID NO: 76195 - DNA, 560 bp, Arabidopsis thaliana landsberg
  unsure (1)..(560): unsure at all n locations
ttgcnnnnnnnnnnnnnnnnnnnnnnnnnnnnnnnnnncacctggccgttaccatctagcgcgacacgtgcgccacgacgcacggaaagaatggtggtgccgtgaaaaaccgcgtctgccatgggaatgcaacctgttgattatgttgaatgtacgaataagtttacgaataaactgctgtggtgcagatgagggcatccgcggcggtttcaaccctgcggatatcaagattccagtttgaaaacaaccggcacccgcacccagccttcgacgttctccgcaccgcgtcgcgccggcacgaaccgccagtttttcactgcgtcaagagcggcgccatccagtagcttagagccgctggaccgatcaagttcaacacgcagcggcacgccctcgggactgaccagcactttcagcatcaccgtgccctgatcgccgctgcggcgcgcggcggcaggatacgccggcgcaggattacgcacgtacgccgcattgaacagcggcggaatgaccggcgattccgcgcgtaccgccggcgccttggcttcttcgccacacgtgat

SEQ ID NO: 76196 - DNA, 576 bp, Arabidopsis thaliana landsberg
  unsure (1)..(576): unsure at all n locations
agacctgcaaaatttccatttatctgcagtaattacgacttttcagataccattctggcgggtaaaaccgaaaagtacagggtcttccggnnnnnnnnnnnnnnnnnnnnnnnnnnnnnnnnnnnnnnnnnnnnnnnnnnnnnnnnnnnnnnnnnnnnnnnnnnnnnnnnnnnnnnnnnnnnnnnnnnnnnnnnnnnnnnnnnnnnnnnnnnnaagctcaaagaggaactgggctgtcacctggtggtgtgtttgtcgcacctgggatttaagtatgaaaacgataagttgagtgatattattctggcacaaaaaagcaaatatttggacattattttgggtggtcatacccatacttttctggatgcccctgtaattgaaaaaaatgccttaaaaagaacgttttgatcaaccagacaggtggggtggaatatgcttgggacacctgactttagcccttcaaaaaatcctaaatctcacggtaaatattccgaaatttcttatattgcangaggaaatcaggaaatggcttgattttcagtttgagcaaaaaaagttaacgggcaagaaaaaata

SEQ ID NO: 76197 - DNA, 285 bp, Arabidopsis thaliana landsberg
tttatacttcccaaacacaacccacaactactcatatcactgcactcttcaaaataactcctcaccctctactttccaactaaagaaacaagtgctgaaataactgctaaatcttcaactaatacatcgacaacagaccctactgatctacccaccaaccttcaacgatacaaatgacaaccctaccacatctagccccttcaaatagataacactcaatttattccctatctataccatcccttagacatcccagaagaaagggcgtgaactaacatgtttacc

SEQ ID NO: 76198 - DNA, 498 bp, Arabidopsis thaliana landsberg
  unsure (1)..(498): unsure at all n locations
gagaaaacgggaagcggatcaactctatatccgtttagaaccaacatgcaatgggggagaatcctatcatgtatgaaccacgaaagctattgacgcagatcattcacaagccgcaccacaagaaaaagcctttaggtgcagtcagactctcttactgtacacgcatttgatacaagtatatgagcacagacaacaccatgtatagccaatgaggactcaaagannnnnnnnnnnnnnnnnnnnnnnnnnnnnnnnnnnnnnnnnnnnnnnnnnnnnnnnnnnnnnnnnnnnnnnnnnnnnnnnnnnnnnnnnnnnnnnnnnnnnnnnnnnnnnnnnnnnnnnnnnnnnnnnnnnnnnnnnnnnnnnnnnnnnnnnnnnnnnnnnnnnnnnnnnnnnnnnnnnnnnnnnnnnnnnnnnnnnnnnnnnnnnnnnnnnnnnnnnnnnnnnnnnnnnnnnnnnnnnnnnnnnnnnnnnnnnnnnnnnnnnnnnnnatgactg

SEQ ID NO: 76199 - DNA, 520 bp, Arabidopsis thaliana landsberg
cgaacgcacgtgtacacacagacagacacacacagacacacagaccgacttaaacatacacacacacgcacatgcacagacacacagacacaccagagactgctactcagtcaaaacctatgcgttattctgtgatcctgtgatttgccacatgacaaatatgcaaagcatcctctttctcagataccccggcagctgtcatctcttctaatgttcatgttactcaaaattacttacaaaattcatgtctctacttacctatagtgaacaaaaatcaaaacaaaattttgtttcatacggtataaattacaaatcatgtaaaccgacatgtctccttccattgcccctatatacccagtcctccccctctctgatttgggctatagatcgcctatgtagatcccatggtggttcacttcttgcaatattttcattattacatttatcatacaaagtggcattatattttttaattaacatcaggttttttttaaatctctcttgtcctatatcctttcac

SEQ ID NO: 76200 - DNA, 503 bp, Arabidopsis thaliana landsberg
  unsure (1)..(503): unsure at all n locations
ctttccatgcctatatcacaattacacacatgtcaatgctcactttccggtttccataaatcccttttttatactcactaagtatttacttggaaaagtgcagcccttcacgaagatccttctcccgttgagctttctgttctttcttcttcaaatagttttgcatctacaattataaaaacaaaaacaaagctcactcacaagccaaagttcattacttttgatgtcacataatcaaaacttttgagctcacctgaatctctctcaatctactgctaatgtatccggcatttctctcagctcttatgatctccttctctgttaactcaccagtatcttcagccttacctgcaagagaagaagacacaacacattttaaacataaccaaacccaataatgagttttgcagagagaatagataaaataaaacagagctagaatatgggaaattcaacanaccatttctcttttcatttgcataaacagggaccaattctctgac

SEQ ID NO: 76201 - DNA, 388 bp, Arabidopsis thaliana landsberg
  unsure (1)..(388): unsure at all n locations
gcggcgggccaagaacgcccccggactatnaccacctttnacttttgaggagcnangggcatcttgctggnttaggatgtcaccgatgaatcttcttttaacaacatccgaaactggattcggaacattgaacaacacgcctctgataatgtcaacaagattttggttggcaacaaggccgatatggacgaaagcaagagggctgtacctactgcaaaaggannnnnnnnnnnnnnnnnnnnnnnnnnnaagttttttgaaacgagtgcgaagacaaacctgaatgtggagcaagtgttcttctccatcgcacgtgacatcaagcanaggcttgcggagactgattcaaagccagaagacaaggcaatcaaaattaacaagccagacc

SEQ ID NO: 76202 - DNA, 350 bp, Arabidopsis thaliana landsberg
  unsure (1)..(350): unsure at all n locations
gggcctccctcaccaggtaaggtcccncccttttccgtcattctcaggggggacaggaaatcagcggcgatggccgttatttttgcgaccaccttcgcccccatcctatccgtcctcttctgtgccgcggctggcaccgccgtcgacaacgacctccccgactacgtcatccagggccgcgtctattgcgacacctgccgcgccgggttcgtgaccaatgtcaccgagtacatcgcgggcgccaaggtgaggctggagtgcaagcacttcgtcaccggcaagctcgagcgctccatcgacggcgtgaccgacggtaacggcacgtacactatcgaccttaaggacagcca

SEQ ID NO: 76203 - DNA, 595 bp, Arabidopsis thaliana landsberg
  unsure (1)..(595): unsure at all n locations
acgcgttcgattgggtggtccaccatggcgcagcgatcggttgtcacgatgacgactaataagcccggcctgcggctcttcctggcgtccgcgctcctcggcgcggcgccggccgccgcgaacgcgcccggcggggcgttcagcaactgggtggcgatgaaccagcagagctacgcgctgtacgcgcagaagtccgtcggggacgggggcaaggagcccctggacaagaagctgtcggaggcggagaagaagaaggtcacgtacgtggtggaccccagcggcaagggcgactacaccaacatcaccgcggcgctggaggatatcccggtgagcaacaccaagcgcgtgatcctggatctcaagcccggcgctcagatccgcgagaagctgttcctgaacatcagcaagccgttcatcacgttccggtcggaccccaagaagcccgccgtcgtggtctggaacgacactgcggccacgaacggcaaggacggcaagccggtgggcacggtggagagcgccacgctggcggtggagtcngactacttcacggcgtacagcgtggtgttccggaacgacgcgccgctggccaagcccg

SEQ ID NO: 76204 - DNA, 516 bp, Arabidopsis thaliana landsberg
  unsure (1)..(516): unsure at all n locations
gtccggcctgccgccncctagggatccgctggcgccgattgtcaattacccgacgtatgcctcctccattcggcttntgtgcgcctgccccacgtcactgccgagcctgccggtgccggcggggaccctcagcgccgtcgatgggctgaagctcccgatgctggcgccgtcgtccctgcagcagcacccgctgctgaggcaccggcaggcgatgcaggccgctggcctcgtggcgcccaaggacgacgtgaaggtcgagggcaacgttgccggcggcgctgccccgtcggtgtaccagcagatgatgtgcagcgggctgcggttgcgccagcagatgtagatacataaataaatgtggagaggattagtgattctcaagttattagcttcttaccagtcgtattaggatgagttcgtgataattgttataacgtgggaacaaacacccngtgctttcttgtttttttttcacccttccacttcatttttagctcagcaactatttatttatttact

SEQ ID NO: 76205 - DNA, 427 bp, Arabidopsis thaliana landsberg
  unsure (1)..(427): unsure at all n locations
gatttcgctccctctccctcccttcccttcctctttttccgtgtaggaggagaggaaagagacgaggggcgcgccgggaatgaggaccaggaggggaggcacacaacgcttcctcttgcacgcgggagtcctcaagcctcctccttggccttggctccaattcggggtgccataacacgacctctgccggcggccggccaccggcacccatgtcgcccttctacctcgctcgcggtgcttccaagctagtgagaaggattacctcggagacatcagtcgagctcaagattctctnnnnnnnnnnnnnnnnnnnnnnnnnnnnnnnnnnnnnnnnnnnnnnnnnnnnnnnnnnnnnnnntggcgttcattatttgcaccggccggggcccacccttcaagatcttggcttcatgattcttccggagct

SEQ ID NO: 76206 - DNA, 729 bp, Arabidopsis thaliana landsberg
  unsure (1)..(729): unsure at all n locations
acaaacaaaacaaagaatgaaaaatcaaaattgaccgtcgaatggaaagttccatgtaactaccctctctacaaccttataaatacatccccaaaccccttaaaaataaagcctcatcctcatactcattaagttttagaccaatcttgattcgtagatatttatttttggaagatgtacggtgtcggtggatcgagcacagcgggtttcgcagaagcttacgcgatgaggaagatttataaagaaaagatgaagatgaagcttgcagaggcaaaagtagaggaagaaaaagaaaatgttggaggtaagagtaaaatctggaaaacgaagaaatctaagaagaccctccatactaatccaagggtttcctctgcagatatttaaacatctatatgtatatggttatgtctttttgttcttttcttaactttttatgattggttcattttgttcttttgtgtaatattttttttacagttaataacaaagaattatattgattgttgtaaatcttatgcttacttctattcaagaagttagattagaaaacactgaagaataacaaaaagagaaaacagaggaatgttgaagaatcattcgattcttagcttttttaaaagaagtaaaaagaccagagcanaaaccagaggattttctagcacatgtttaaaaattattgctgaaggtctagattcttgaagagctgtaaaaaggggcttcnatggatga

SEQ ID NO: 76207 - DNA, 338 bp, Arabidopsis thaliana landsberg
gcaaaacacttgctaaacgaatgatggcaataaccaaaaggatttacttttatgcggggtaggtaagctgatcatgggtcaggagcaggtagaaaggaacaaatagggacctcgtgcttactcagtttatgataatggataggaatacgatacagcttaaggccttattgaagaggcgtgcctgatagacatcagggtctaatgggacattgttgatactagactgaaagttagactaagacaacgtcttacaaaacatatgatcacactatgctctactacatcctatacaaacatgtgctaatcccgaaggagactctgagacgctacactcttga

SEQ ID NO: 76208 - DNA, 557 bp, Arabidopsis thaliana landsberg
ggtgtcgacagcggaaagcgcgttgtcggcctgacctgtcagcccgggagggggctcgccagtccgcgggtcccggccggtgatcccgcgggcgaagaccacgtcgtccgtgcgaaggcccacggcctccggccttcccggcgttccttcgagcaactcgctgaactcgcgcacgctcaccctgcccgcacctcgccttcacccgccgcagcgtcactcaatctgtatacactatggactataacgaatgaggcaaactagtgccaggtgcaccggatcggccggggggagaggtcaggaagtgccgggcagtcgcagcatggcgatggcgctctgcacggtgggcaggtctcgtcccggatcggcgctggtgacgacccggaacgcggtggccgcgagatgcccggccatggcggcggccgcggcgtcggcgtcatcgcgcttgaacgcgtccaggatcgcctggtgaaagccctgcgccgtcttccagctcaccgtgtcgctggactgggcgagccgcagataggggtgcgtccgctccctgagcgtcgcgagca

SEQ ID NO: 76209 - DNA, 128 bp, Arabidopsis thaliana landsberg
agcgtttagaccatctcttatggtggtcttctaattttgcttttatatgtatgagcccgcaaaaaaacgggggggggctattaaaaatgccaatatcgccaatccacatccttaatttcagtcacttc

SEQ ID NO: 76210 - DNA, 563 bp, Arabidopsis thaliana landsberg
  unsure (1)..(563): unsure at all n locations
gtattcttaaaacgagtattatagctttatttttttcagattattcgctatatccttattcagcttctcctcctccttgaactgtgcttccaactcagccttgagtgctgtaaaccgttcagcaaaattaaaatcatcttcttcatccggcaggcctacatatcgtcccggggtaagcacataatccagcgacttcactttttctatagatgccgaagcacaaaaaccaggcacatcagtataactgccttctttattacgccagttgtgataggtgccggcaattttttgtatgtcttcgtgcgaaaattcgcgtgtgcggcggttgatcaggtggcccnnnnnnnnnnnnnnnnnnnnnnnnnnnnnnnnnntgcggtcgcggaacctgccgtttttgcggttgcggcttaagaaccagagtgctgccggtatctgtgtattgagaaagagcttggccggcaggtttacaatgcagtcaatcagcccggcttctaccatcgctgtgcggatttcaccctcgccgctggctntggaggtaagcgcgcctttagccagcacta

SEQ ID NO: 76211 - DNA, 361 bp, Arabidopsis thaliana landsberg
aagattaaagatcaaagcaagctccttgggtaatgccaaaacaagtactatcgctttgtggtgacgtcaggccttgatcttaataccatctttattgctttttatggattgatggaacggggacgggattcttctgttctttatatgatggaatctttgtagaccctcttactatcattgaaacctcaatcatacgagaccacatattaatgaacctcaagtccaaagtactgagtgagaccttggacatactattcataaaaaagcttttgactaacatagatcaagagcgttgtcttgatcaatagagttaaagagaaatttttgatattagttatagaagacgaagagtcgctacagt

SEQ ID NO: 76212 - DNA, 144 bp, Arabidopsis thaliana landsberg
accactgttttaaatataaatcaaataataattaataactattctggaaatattatattatatagaggagccggataatttaatatcttaaatccccaaccccccctattacatatctaaggccctatcttttttaacattcat

SEQ ID NO: 76213 - DNA, 519 bp, Arabidopsis thaliana landsberg
aacgcatgtgggtgaggatgctggcagacagtggttcgtttttgctttccatcaatgaaaatatacaggagggactgcggttacgggtaatggaaaccaagaggctccaactggtcaatggcaaggtgattacctgtgatgtgtgtggcccggtagaccttcgctttgccaaccgggaatgtacctgcagggccatcgtgctgcccggtgattccgagccccttctcggcgccatacccatggaagaaatggacgtgatcatccatccgcagaggcaggaacttatcgttcacccggatcacccggactatgcattgctgagattataggaatgatcttccaccatcattttctcttccgaaatacttcagctcttcagaaagatccaggaagggatatctttcagacagttcctttgttttacggcaataactatacaggaatttgctatgccccgcagatgtttcattgaagggcttatggcggaatgcgatatcgatctctgctatatcgcgcatc

SEQ ID NO: 76214 - DNA, 541 bp, Arabidopsis thaliana landsberg
ctatgaatgtggtcagagagggtggcggcaaacgagtttgcagtttaggcagaatcacgaccattaaagaaggtcagcccacgacggctacaattagattatagagggttactaataataaaactgctaaaaaacgatactacgtaagatgatgccaaaccatccgggtaagaggctttagatggaagttgggcgagacatcggcaccgtccatcaatatgaacagccaagacgttcgtgaagagatttaatcggtttgcgtggtaagagcagcacgacatgaggttgtttccaataaaaccgcgtaaaagtttggtatcattttatcgttccagggatcccaggcagattgggattcaggacggttagaacccagtccgagagtttagagcgttaccgattagagacagttgcggatagcgaaagcgtcgttaaaattcaacgtacgttatgttgcgaaccaaagaaagccaaggttaaaaagtggcccgtaaagttaaacaaccggggttgcgatcggtagtatagaaaagggtgacag

SEQ ID NO: 76215 - DNA, 520 bp, Arabidopsis thaliana landsberg
gtgaagagcaagacaaaagttgaagagaagacaaaacaaaacaatgcgtggggtgcgagatggagcgagatgggttttccggttcgcatgatgctccctgggatctaaggcagtccagtagtgacagagtttggtaatataatagaccagtcgtcaaaccagtgtccacatttgttaacgtatgaaacttacaagtgggtacaaaagcaaggttgaggtcaacacgctagaattctagccagaagtgtatatgaatttcgtaagggcccagttaaggtcccaggggttggcaccgagaggccagaaccaaggccaagcgaagaagagtcaggtagaagccaggtagagtgagatacaacaaaaccggtgtgagtcaggtaataacgcatgcgatggagcccaaagtcagacacaaacacaaaaaaaaaaatcaacagggtatagacgcagggggggggggggggggcagtaaaaagaaagtgcaggcaagggagggtcgattttggtctgtaacacaaaa

SEQ ID NO: 76216 - DNA, 657 bp, Arabidopsis thaliana landsberg
  unsure (1)..(657): unsure at all n locations
ggaccatcccctttgttatgggaaaacatcaacaagaactttgaccataaatataactagattttgatcggtttatatgaaacatgtgagtagtttttccacatgaagttaaaacaatcgttacaatttacatattctaaaaacatcaatacatattacgaattggtgccgaaatatataaatttaaataagctaatcaatttattctacaaactattctcaaaatgtataagaccactcaatatatataccatcgatgtcaatttttgtttttttaaagattaatatttactatttagatttcaaaatatgggttgaagtacatttgacatgtacatgcatttttggatatatattaatatatgactctatataatatatagatccaaaaacgttgtaaagagatatatagctaggaaaaggaggaaagacttaggcagttgaacagaaaagttaggtgaatatagttggcttcaatattataccctttaactcattcttcttctttctttcctacaaatatccttataacctttcttctcctcttctccttcttcctcttatgcaaacatatatttacataaacacacacatatatatagtaagagagagagagagagagatctagncagatagtgaaagcttcataatcaatgg

SEQ ID NO: 76217 - DNA, 543 bp, Arabidopsis thaliana landsberg
  unsure (1)..(543): unsure at all n locations
aaataagcaaaatggagaagtgggggatttggaaagcggagggacggggggtaggagagaggttgaggtacaaagaagcaaggcccgggggagacctagggggcagcttctgaggcaaagactggggtggctgagaggggtcccgatattatttagggtagaaaccaggggattgccgggaattatagtgatttaagatgtaccccagttgggtttacaatttagatctggggttgtacagtggatgcgaatgccgggcgtgcgaaagagatggatttaaagggggttattatcgtcgatagggtcacgtagcgtgtcgtctttgcgtggtgagggcgtgaaacngcgagttacgtcccggtaacgcagggcaacacgtagagagcgttaaaataaagatcgaggtttatcacaacaagaggttggggacngtggttgtcagcgggcggggatcaaacgtgccagatgggacccaggagacggcagcccagtgaaaggacaaaggttagtgtgatgatacaatgcaatgcacacgggtggtga

SEQ ID NO: 76218 - DNA, 528 bp, Arabidopsis thaliana landsberg
gacggaaggagcatataaggttacaaaacaggacgctaggattggagtatggactagtgtttgcgcaagcttaaatcaatgagaacagttaaaagaccggtgtaggtattgggtgcagcggttgaggaatgacgttggttagtataaattgggccggtgctagtgggtttaggcatgagtaaagtagttctacaatggcgtgggacattagcgtacgggcacacatcaacggatagttggatggttagggagaggctagggagtatgcggtgataggcagtgggttttgaacgttgtcatagtaacgtggaaagttttacgtggtcgtaaggttgttagtatggttgtgtgcgtaaatcgcatggtggtagtggttgtagtagtcgtaaatcacgataaaacgccaagttgttgcttaaaaacatggtacagatggtgtggtagtttaaccaaatggaatagtgggcgaagtagtactggtaagtggttaatgcaaatatagcggtgtacttattgaaaggtaggaaa

SEQ ID NO: 76219 - DNA, 467 bp, Arabidopsis thaliana landsberg
tctaaggactatattctgaacttttgaaatatagaagactctacaccgaaatataggatcacaggacagcaaaccaattccggatttttttttaatgtgtatatcgttttgaatttgttttttttacacactttatactttatagattataaaatggtgaccacggatagttgaatctctttgatagatagtggaatattccaaaggtagtacgatgaaactaattatatggcaatcaaagaatcgtaatgtgtgcaatctttgcttaatatataactaactatttaacaaaatacagaatcaaaaattatatgataaatcaaacaatcgtaatgtatatgtgcaaattttgcttaaaacagaattacgttttcacgtacattacatgattcgccacattatgttaatttggctataaattagttatttaagtttatagactcaacatgaaaaaacttggtcaaggg

SEQ ID NO: 76220 - DNA, 340 bp, Arabidopsis thaliana landsberg
ttaacagagtgaaccaaatagcttaaaatttacgtttgcaagtaggaagattaaagatacatgcaaacctgaagcatggtgtaagatttcttgatcccctggaattcaagctctatcacggtatcctgagaaatgaaaatcaccgacaaacaattattagcaacaagccaaacatgatctacaacaggaagtgattaccaattgatcaagttagccatatattacctcaaacgttgaattcaaagaaatcaaggaagaaaaagcttgaaacgtatttattcataactgtttgagggaaacttaaagtcataccttaagcgaataattgaccacctggagc

SEQ ID NO: 76221 - DNA, 735 bp, Arabidopsis thaliana landsberg
atctcaaaaaatatactaatggaatttcttttgtttattaacattcaatttgtttatttttattactaattttagtttatagtaaaatacataaagtatttcttcaattatttcattttcagattgtggccaaaagtagtgcatctaacaaattttaataataagcaatagcaaataatatcctcttgagcatcttataccacaatcaggccggcactggcatattttagtaatgatattttaatacttgtcacttcaccataaaggaaaagggtcatgtgtaacgataataaattactaatattatataatgaatactaaacagattaatttaattgcctttaaaatgtaagcaattattttcgaatgaactagaaagatgtttataaatcaacctcaccttaaaacttaagaattctttttttatttaaatttatagaattataatgttttcatgattttttttttaaatatagctaagccccaaaaagttaatcatgcatgtctgttttgatcgaaccataattgaagcagggcacttgtttttctggtgagattaagctcttgttttatttacgaagtatgggcagggcgaagtcttatgtttcggcgctaaaagtagtatctacttcaaactcgattttcttttactattagatgatcttataagtaaaagcatcaaaaacatataaacttagaggtgatattaaaatttgattatctcaactgtttaca

SEQ ID NO: 76222 - DNA, 410 bp, Arabidopsis thaliana landsberg
agtacgagttggccgggtagaggtaccacgagacgaacgtaagggagatgtgggaatatgtacgtggggaatttaatatggctgggacgtgtgcggacgccgcatagaacgtttgtttgataacgtagcaagggacaaggtggctaagaaaataaaatagtaaccggtgatgtcatagaaaggaccaagagagggaaggaattgggggtataccaagtgggtataaaaggagtaatgaagtagaaggaggtgggaggacattaggagagggcaggtcttaaagatagtaggaggcaagaggtgggtagagcgagagtgtaattgaagatggtgggggtaacggggcaagtggcgatgggggagaaagttaaagagggaagaggaaaaggaaaagaggaagaaaagtatgt

SEQ ID NO: 76223 - DNA, 588 bp, Arabidopsis thaliana landsberg
gagttaacaacctacacaaccactatacacggaattggatttctgtcacttgggcattataacaaataaaggtagccagaaatattatgattgattcatgggtaacactaacaaacctcacaggtcactgaacatagaaccaattaaatattagagatgcatttgaacggtggtggaaatcaatgagcttagttgggatacttacaatgcaaatatgatttcggtaatcaaaccagttcttcatctgtacacagctgcaaggacaaagcagaaatgaagaaactgagcaatgatatacacctctgaaggaaacgatgtcatcaactaaagtctagaagataaataaataccgtgtgcggcctttatcactcttaacaagtttctgaagtacatcaatttcaatcattgctgcatcccggtatttcttaatgcttcgaattatctttattgccacatattcttttgtatcacgatcccaacattccaaaacccgaccaaatgtgcctacaacaccagcaagttcactgaaatggcacgatttgattcacataaacattttcttatctcgacacaccatgccacttgaca

SEQ ID NO: 76224 - DNA, 492 bp, Arabidopsis thaliana landsberg
  unsure (1)..(492): unsure at all n locations
gggcgcagcgcncccgcccanccattgccggcgatttttagcttcaccctgccgccggcgccccccagcccacggtaggattccatcgacctacaaaaggccttcaaagggtttggctgtgacagtacaacagtgataaacatacttactcatcgcgattcagtgcagcgtggactcattcaacaggaatacagggctatgtatcatgaggaactctcccatcgcatttcatctgaactcaatggaaaccacaagaaagctatgttgctgcggattcttgatcctgctggacgtgatgcaactgttttgagagaagctctaaatgttgacactatggatctgagagcagccactgatattatatgttccatgaccccatcacagttgcaaataatgaaacagacttattatgctagatttggaacttatcttgaacatgacattggtcaccacacatctggcgatcaccagaagcttttacttgcctatgtg

SEQ ID NO: 76225 - DNA, 736 bp, Arabidopsis thaliana landsberg
ttctatgtctccctcctcagcttataatcaaatcgtggccgttgattctctttgactcagaacgagcattaacggtgacctttttatccgacttcaccaccatcgttgccgccgcattcgatcgatcactaatcacaattctccagctcaagtgggacattcgtgttcgccctctctcgcctgtcacgcgtgtctctcacgctccacattttttttaatcccgttaatcacacgatcttaaggtgtctgatttcactaaaaacatcggaggcaaaaaatgaaaaatcccatgtgcatgctcagtcaaactcacccctcacgtgacacattgcctctatcacgtgatagacgagtaccatttctagatacaactaagattcatatagatcctttaggatttatttttttacagtgttgtatgtttaaattgaacacatttatgccgttgacaaaatttaaaagtaaatatgaggttgacttttgatttataacagattcgtagtatagaatatttacaattgattgaccaacaaaaatgagcaaagatgttaccgtgggtcgattctttacctgggaacttaaatttggtaaaaattagcggcagcttttcttttttaattttgcctactactacatcagaggggtattatagggaactagagtaaaacctaaggacatttccgaccaatgaaaaaaacatggaaaatataagaagggctgagaaaagcaaacaaaa

SEQ ID NO: 76226 - DNA, 744 bp, Arabidopsis thaliana landsberg
cccagcgcgcgcggatgccgggcgcccgcgaccagcgcggccaccgccaccgccgtcaccatcacgtcgtagcgggcgtacaccgtcggacccagcagcgcgagccccagcgtccacagccacggcccgcgcgccccgccgccgtcccgcgccccggcgtacaggagcagggccagcaccgccaggtcggccaggagcgcgagggcgaagaaggcgtgcgcgtacgacaggaacggcagcagcgcgggggagaggaccgcgagggcggccccgggcgggtactgccaggagacgtcgccgctcgggaagccgccggtcagcagcacgtcgtaccagccccggtagatcaccgacacatcgccggtgacgtccgggcccgggaacacccacaccttcagcaggcacagcagcagggcggaacggctcgcaccccagacgaggaacagtgccaccgtgatccgccgcgtacccgccatgcccaccgagacaccgtccccgtccgtccgtcaccgccgccgtccggggcatgatcgcgcggcgggcggtggtgcggccgtgaggcagggccgggggccgcgggaaaacgaccgggcggcgggccccgcacggcccgttcggtactgtcgtcggcgatgcacaagaccctgatcgtcaccaacgacttcccgccccggcccggcggcatccaggccttcctgcacaacatggcgctgcggctcgaccccgaacggctggtcgtctacg

SEQ ID NO: 76227 - DNA, 416 bp, Arabidopsis thaliana landsberg
attcagtaaagaagcaaagaactaattaattagtaactatatattttttggtatatcatgccaaagtaaactaattagtaatgttcgaggtgcgaaggttaaccgaattctatctcaaattgtcatataaaaaagttcatcatcaatttatcatttccttccattgtaatgaaatttaacattcatatgatcatatcaacgaatttttttatcatctccttgatctttttttttttttttaatttagagaaacaaggaactaaatatatgagaaacgtattgttaattttcatcgaaaaaaataaaaattcgtgactaaatgtattcgaacacccttcaaaaaattaaaaacggccttgatatataaatactttgttgattaaaaatatatctttgaatactttgatattcttaaa

SEQ ID NO: 76228 - DNA, 574 bp, Arabidopsis thaliana landsberg
  unsure (1)..(574): unsure at all n locations
ggggagctccttcgcctttggaaaggccgacatggacagcatagtgatatcagcaaagaagaaagggtccaggaacaaggttacttatctgatgaatggcaaggccatctccgagagggattcagcgcctgcagggaaacagcctctgaaccgcgcgaagccgaaaggattgagtggtagtannnnnnnnnnnnnnnnnnnnncctcaacaactggtgatcatgcaagccgtcggacccggcagccacctggcggcgacagcagcatcttgctgggctagcgtgcatatggatattgtcctatgccgccacacgggtggttggtccgtccgtctgcggccatgttttcctgatcacgcgatgagtcccatctcagatgatctggttcacttctggcgtgtgtatgggtttgtgtctgtgttggttgtgacatgtccaatggaacaaccctatccctactgcgtgtggtgccccttctgtgcggattcagacaacggatgacaatgggaaccgtttccttgtgtgtacctggaaatacatatgtgcgtttcgtttttaataaaaaaaaaaaaaaa

SEQ ID NO: 76229 - DNA, 491 bp, Arabidopsis thaliana landsberg
  unsure (1)..(491): unsure at all n locations
gacgagaacctttctccctcctccacctttctcctttttatgcctttgcaaaacaccttcgccggcgagggcatggggttggtttaccgtgtcctggaggtcaccctggtgtcgnnnnnnnnnnnnnnnnnnnnnnnnnncttctcccggactcgcatctacgccgtggcttccatctccggattcgacctccgcatcccttcccacagcacccaagcagaccacagcaacggctgcaacccctgctggaacgccgtggtacacttccccatcccggctgccgctgacacccgcggcctctcactccacgtgaggctccgcgcccagcgtctatacctgggcgatcgcgacatcggcgacgtgtttgtgcccatcgacgacctcctggccggcgccgacaagggtggccatccgaggcccctgagctaccacgtgcgcaggccgcactctggccgggcccacagcgttctctacttctgctataaattcac

SEQ ID NO: 76230 - DNA, 309 bp, Arabidopsis thaliana landsberg
  unsure (1)..(309): unsure at all n locations
aacttaatggtatattaagcgaaaaactacgttccttttttatctcgcctgtcatatcttgagatctgtcatcaagaagctgcctgtctctttccataaactcacatcagccacacataaatacatcttaacactcctaagcatttcactagccccacnnnnnnnnnnnnnnnnnnnnnnnnnnnnnnnnnnnnnnnnnnnnnnnnnnnnnnnnnnnnnnnnnnnnnnnnnnnnnnnnnnnnnnnnnnnnnnnnnnnnnnnnnnnnnnnnnnnnnnnnnnngctcatagactgtctctgggaagattcc

SEQ ID NO: 76231 - DNA, 462 bp, Arabidopsis thaliana landsberg
ccacgcgtccgctcacccccaatgttgcaaccatatctgactttgagttcaaagagcacgggggcgatgactgctccgggtcgctcaaggagggcccgaccggcacctggacgctcgacaccaaggccccgctcaagtaccccctttgcatccgctttgctgtcaagtccggtggctaccgcatcgccgacgacgtcatccccgccgatttcaaggccggcaccacctacaagaccacactcagcatctaatcagcctctgatgatgaattatatttcaaaagagctcacctggcgctcacgttagcaagacaatattttttctatggttattttgtggcgccaaaccacccaaaaaatatgtgatgctacatgtcccttatgatgccttgttgtgttgcgttgataatattacataaactaaataaattattcattaaagatttaggaaaaaaaaaaaaaa

SEQ ID NO: 76232 - DNA, 297 bp, Arabidopsis thaliana landsberg
cttcttcctcctcttgtccggtctttcccgccccccattcgatgaataaaaaccctcccgcctgccccctcgcgcacctgcctccccgagctccgtccgcccaccacgtctccctccgccccctcgcccgcctcgccgcgccctcttttccctactacattaggaccgccgcgcgtccccgagccgggaaagacaacgtagaagagtgacatgctcccattccatctggcatgtttttattcacacacctttgcctttttctttgtcctcttttccttaattaacaatgatgcatgc

SEQ ID NO: 76233 - DNA, 437 bp, Arabidopsis thaliana landsberg
  unsure (1)..(437): unsure at all n locations
gggaggcagccacggaaccccnggaagcgagaccgcggtttacttttcaaggcgaaggaggcgacgacgggcggggcagcaccgncggcggaggaggagaacaccaccaccgacgaacaggccgcngccaactaactgattacaaggaggccaagagctagacgacgtgcatccaccacgatgcattttgttcaactgaattcgggcgccgggcgggctgtctctgtttgcgtatcctcatgcatgggtgctttcgttgtacgtgggccgggctggactcactcaatataatgtgntccatccatcgacccattcgcgaacccgtctatgtgcaatgcatctgccttgtggactactttacattcttatttcccagtgtgcacatttgcaccgcattccctcacgcctcaaggcggagaggattcgaggtgatttac

SEQ ID NO: 76234 - DNA, 334 bp, Arabidopsis thaliana landsberg
tatctccatcttatcctttgcaatacactctacatattaaaccacataaacacattacatatgccacctatgccaatacactaccccccttctttttttttgtactagcctaattacaaacacaacataaaacctaagactttttaaaactaaaagcccaacttttaagcctaacaatatgaaaccgcattatcaacaatgaacacatatcaatcttatttttatcccaacattcataaaaagatagacttaccccaatttctcttctaaaatctaatttaacttgttcttcttcctccaatttcaagaatcgaaaatatataacggatcaaat

SEQ ID NO: 76235 - DNA, 535 bp, Arabidopsis thaliana landsberg
atcgttaaaatcaaagttggcacgaacagaacaaaacccaaaagcaaagttatctagtttacaaaaacaggttgaatgattagtggtatttttgaataccgaaaagaaagaaataaacgtggtgcgtgcgagtgagacctattcacctaagatcaggagggcttcaatgtcacgcagcagagagccagagaatataataaaaccaagttggttactaaaattttgatcaacatacatacagacacgtacatagtatgtgtgtgtgcttaaaagaatctctaaagcgagatgcctatacgaagcataatttcgtaaatgttaaggaacatataaccttaaacaattttgtcaattttcatcatgatgattctttgaactccacatgaggaatctcacaatcaaaccaggttctctcacaatcaaaccaggttatatacgtctggtgatcgagttggtccatgcacaattcttcattaaagatcttgactataagaagaaggaactttaccatcgatgaatgacttttttttttttt

SEQ ID NO: 76236 - DNA, 667 bp, Arabidopsis thaliana landsberg
  unsure (1)..(667): unsure at all n locations
taaggcctttttgggaggtaggtaccataccgtttatgtttaacaaaacaaaacatacaaacggaaaaggtaaatacgagttcttgcagggtcagagcaaaaaactattgaatcgaagaaagagcttacggcgtggaccaggccttctcattccaggtggtggaggaggaggaaaagaaaaactatcacacggatggtgatgccatgaaggtaagaatggaggaggatggttgacgtctacatcacttcctccaatgccattccacaaaaaaggatctctaacatgatcattatcagactcctttgtatagaaagaagtcaattctctacttatcggtgtttggttgcttccaaaatccatcgtctcaatactctgatgaatatttggactattgctctctgttgtaatcacaatgcaaggcatcattaccaacagattccaatatctaaccaacatcatacataagacattntgagaatacctttgttgatagtgtaggaacccaacacaaagacaacaaaagcaaggctgagaagtagaagcatagcaactcgtcgacgacctaagtaccagcaacataagaaggagagagacctttccttctctttagaattagaagtgagcattgtgaagaaaccagaagaagataatgcagactcaaaagct

SEQ ID NO: 76237 - DNA, 559 bp, Arabidopsis thaliana landsberg
cactttttggttttttaggtcactgctccgacgaagaccctttcaacttgacaacattttgaagaacataacggttaggattcgctacattgtgagctctatttcagattctacattgtaaattcttgctttgtccactttttaggaaaaaaaactcacaacaaataaatgtttccgcttttgatttcttctactcacatctcaatcttcactgagagctccatcttcttcttcgctttgattttggttacaaagaatcgctcttttcgattttgtatctctattttgttcggggaacgaaacggtttctgcgcgttctctctgtattggttcatatgaaatttaggccttttcccgctcaatcgacatgggttttggcttgtaatcttcaaaatctctgcttttgcacactttagttgatgggttctttggcttaccctacttatgaatatcggctctctctttagattcatgccacttttgctttaatcactgcaccgccgatggatgcgttcgtctcgtttgacactgttagggttaacctccctttctctctctc

SEQ ID NO: 76238 - DNA, 139 bp, Arabidopsis thaliana landsberg
gaacacgtggtgattggaaatgaaatggtgaagcttgcgtcgattcagatagcatcacgtgatttcttatttgcttgggacacatcatagaggctcggattacgtagtttactaaatagagatcccgtgcaaaccacaa

SEQ ID NO: 76239 - DNA, 454 bp, Arabidopsis thaliana landsberg
gcgcgctcctcgtcgccgcgaaagcgcacgttcgagaactccgtgccgcggcataggccgtgttcgacgtccgtgacgcgaacccgggtgccgagcaggtgggcgcgcaggttcagcgaaaactggcggacgaaggctttgctggcgccgtatgcattgccgccgggataggggtagctggccgccgtcgagccgagattgacgacatgcccgcggtcgcgcgccaccatgccgggcagcacggcgcgggtgacgtacatcaagcccttgatattggtgtcgaccatggtgtcccaggcgtccagatcggcggactgggccggttcgagcccgactgcgagcccggcattgttgacgagaacatcgattgccgacaggtccgccggcaggccctctatcgcctgcgccacagcgccgtggtcgcgcacatttaagacgagagggtggacgcggt

SEQ ID NO: 76240 - DNA, 500 bp, Arabidopsis thaliana landsberg
  unsure (1)..(500): unsure at all n locations
ccaacaaaaaattggaaggaaaaaaaaacgttaatttaaaaactaagctggacaaaagaatcgaaagaaccgaaccataattgaaccgaacaacaaccgaaccaaaattaaaaatacttatatggattttaaattttagaatccgaactgaaataaccaaaaatatctaaagatgaataaccaaaatattaattatttttagatagaataaccaaaaatatcataatcataaaaaaatatcaaaaaatatttagaaaataatcgtaaatgtctaaaaatattctgaaatacccaaaaatatctgaaaataaccaaaaatttggttcctatatggatcataaactctacaacagaaagaaccagaactgaatgaaaccaaatcaaatactcgattgaggcctagttccaatagtttcggtagttggtacatacaaatntgtatgcggattagactatttttgccgatgaaacttatcagttgagcagatgagcttgggggc

SEQ ID NO: 76241 - DNA, 599 bp, Arabidopsis thaliana landsberg
  unsure (1)..(599): unsure at all n locations
atatgtcttttgctgtagattggtttgagccattagtgtctttgcttcaaaattctccagatctgttagttcttctcatcgaccaggtccgtgtttgcgcatgcattactaaaagtaaaaacttcaaaattagcaaacatgttaattagtttccttgatgttgttgcttcacagttatggtataggagcgaagcttttccgctttcatggaagaaaccgaatgatatacctccatgcttgtcaaccagactcaagatctttgagtggaaagaatatggaggaacaagccaagagaaacaaatgttaagttacatttttgccaactctaaatgtttaaagagagctggaatctctctgagatcaacctggaaatggaataaaaagaagataatgaaagagttgaaatccatgtataggatttcaacaacatctcagattctcttctcaactccattggtgtgtgaagccgaattgtggagatagagtgactaattagtctatatcaaagatcatatctgccattagctagtcaagctatcatttttaacattttttctaattattcaangtatctgaactccaagatcataaattcatag

SEQ ID NO: 76242 - DNA, 4225 bp, Arabidopsis thaliana landsberg
tttctttaaaaaacataaaccctaatttagtctttgactaatttcattgcgacctatttttttttcctttcgcagaggtccgactcgaaacagaagaagagaacgatgagatttttctaaagcctatccacaaagccttataatcctctattctggcggcgatggcccgtgatcacacactctgtggttttctctgtaccgttgctctccgccgattcgcctgatcttctttaatcgggctcgtctagtttcatcttcaatgatggttccgtcaccggtttcaaatccgaaggcttgatcttatccctcactaatcccatctctaatctccaatccctaatttcgtcaaaaggagatcatgatgttgagaattccggaacaattgaagacggtcgattggagactccgcagaaacgccgtaagtgcgttgagggagagagtagtggtaagcgaaagacttcgaaatcgaagagacgagttttatccgggagcaaggagaagactgtacagggaaggaagagggtaaagagtataggtatggtgaatggaagtataagtgtagtgcagcagcttcatgctttggttgctaataaatgcttgaagattatatgtcgtgtggtgaaggttgataaaggtgagaatggagaagaaagagctgtggtgttagttgatgtttacctgcctattgaattgtggtccggatggcaatttcctaaatctcaagctactgctgctgcattgtttaagcacttgaggtaattcttttggactcttgagtaatctctctatcgctagaatagttttctaaattgtagttgcttggtttagagagattaaatggacatgttcaatttcatggtatgggaatgcatctgttgttatcatgaatgtaaacttcttctgttgagctatgtcagttaggttcactgtaaaatgaatagatacttctctcgcaattttaatgtattccacttttttgcagctgtgactggggactgagagtctcaatccttgacggaaaaagtatttgggaagaggccaatggaagaataaaggccatctgggatctatctgactgtcatgtgtttgactgcaaattactctgtaatgccccaaattctccaaaaagacggttatttaaactacatgaaatttttaagagcttgcccagtccaggaaatcatgatgtgtcttattcttctagagtattgccgtctactgactcttgtgcatctggtgtatgggatctctcagatgacgttttgattagcatactgatgaaacttgacacgaaggatctttttagcattgcagcagtctgccgtctcttcagatcattgacctctctaattgtgccatgtatgaatctaaaactctttcctcatcagcaggcagcagttggttggatgctggagcgtgagaggaaagctgaagtttcctcgcatcccctttacttgagttttgatactgaggatgggtttagtttctacgtaaatgctgtgactggtgatataatcactgaggcagctcccatggtcaaggatttccgtgggggaatgttctgcgatgaaccaggtctcggaaagacaataacagcattatcccttatcctaaagacgcagggaacaatggctgatccgcctgagggacttcctatcgtttggtgtacccacaaaagtgacaaaaaatgtgcctattatgagtacacgagtgaccagttcacttctaacagcatgtctgctgtaaagaggtttcaaagtccaagtagctgtcgaaaccaggtttcttttgaagcctttcgtccgctgctggagtcaaaatcgttgccatttaagcaagcgaggctgatggatccagatgatcaaacattggagtctaagaattcaaactttgaaaacgaatttgaaactcacatccctgcgtccctggatttaaaagctcaatgtagaaagagcttgggtaatgtcagaaaaaatctcttgcctgcatataatggcgcatctgagctctctgaagtgatggaagctaaaagaatcagtaattggaagaaatgtggtatgataacaggttgcaagagaaagggtcttactgattcggatgtggaaagcaatatttggatgcagtgtgaatcttgctcaaagtggcggagaataatagatgaaggtgtatctgttactggttctgcatggttttgtagcaacaataatgaccctgcatatcaaagttgtaatgatcctgaagaattatgggataaatctcaacctataaaatacttgcaagggttttatactaagggagcctctggggaagaaagtgataatatctctttcttcacgagtgtccttcgggaacacaagtcttcagtaagctcaaccgtaaagaaagccttaatttggcttgctaaactccctcttgagaagctctcacagatggaaacagttggcttacctggtccagtgttgggtttaaaattagatgcccttgggttccagagaatatttcgagcatttggtcttaagagtagagttgaaaagggtgtcaccaaatggttttacccgaagtttcttgagaacttagtatttgatgtacctgccctcaaagttgctctctgtcagccgctggatacatttagactgtatttgtcaaaagcaactctaatcgtcgtccccacaaatttagttaatcattggttaacacaaatccaaaaacatgtttgctctgatcagcttcgtattctcgtttgggctgaccatatagagctttctccacacagcttggcttgggattatgatgttgtgatcacaacttttagtcgcttaagtgcggaatggaatccccggaagaaaagcccattgatccaagtgcattggcttagggtcatgctagatgaaggacacactcttggttctagtgtcagtttgactaataaatttcagatggctgtttctctgacagcttgtaatcgttggctattgacaggaacaccaacccctaacacaccaaatagccagctttcacatatccaacctcttttaaagtttcttcacgaggaagtctatggagaaaatccaaagttttgggaagctggcatccttagaccatttgaagcagaaatagaggagggtcgtttgcgtttacttcagctgcttcagagatgcatgataagctctagaaagaaagatctgcagatgattcctccgtgtatcaagaaggtgacataccttaatttccttccagggcatgcaagaagctacaatgaactagtggagacagttaggcgtaatatcttattagctgattggaatgatccgtctcatgtagaaagtctgcttaactctaaacagtggaaatttcggagcattaccattagtaatgtcagactatcttgctgtgtggctgggcatataaaaatgaccgacgctggtcatgacattaaagagacaatggatgctttacttgaaaatgatctggatctttcgacggaggagtattcttttattcaagatagccttattggtggctgtaactgtaaaaggtatatcttaaatccaatgttttcattagtttggggcatttgccacaagtatctaatttcgcttttgcttctcatcttataaatagatgtggggaatggtgccgacttcctgttatcactccatgtagacacctgctgtgccttgattgtgttgctcttgatagcgaaaggtgtactatttctggttgtggatatttatatgagatgcaaactcctgaaactttggcgcgaccagaaaatccaaatccaaagtggcctgtgccaaaggatcttattgagttacagccttcatataagcaggtagatatgcgtataaaccatcttataagttaacgacttggttcctggaatggtatactcaaatgcattacttcattattcaggacgattggaatcctgactggcaatctacgtccagcagtaaagtcagttatctcgtagacaggctgaggaagttacatgagggtaataaaaaaagcattttgtctttcaacaagactgacaatgacaacctggaagacaatcccccaggtacctcggaagcctttttggggaaagaattacatggacaggattgtggatctcagatggtatttgttgataaagtattgattttctctcaatttctggagcatattcacgtgattgaacaacaggtatgaattaccttgtttttgaaacgcattctta

SEQ ID NO: 76243 - DNA, 355 bp, Arabidopsis thaliana landsberg
  unsure (1)..(355): unsure at all n locations
cgggcatgctgtcnccgcacgcctcccaanccccggccttttatcttcgtccncgacgcgcggcgaacgcgggggccggttaaatatcactcgctgtcnatgctcaccaccatgacaggggggcatatgatcctgagctgacgcgccgccttctctggcaactgggagtactttcactacttcattcttgacccgtacaagccgcattgaaccttcttacacccgaacgccgacccctacatcctcttttgcaagtgggggtacatgggcaacttcctccaagacgtcgtcgacttcaacagctccgccacatgcacgccactcttccgcgtcaacaactgcggatgccgatacc

SEQ ID NO: 76244 - DNA, 463 bp, Arabidopsis thaliana landsberg
attattttattgctaatttaggtatctgaataataactcattgactggcccaggtcctgattcatttttgatagaaaacaacaacatgtaagcaggctatcaactacctacctagagggtgaatattcgggctcatcaaggacattaatttcttgatctgtcctcacagatttatcttacgacaattgcactcagccacctactttaagctggaatcaacttgatgtgtaagcaatccttggggtgtcatgtcactgagtttcagcgaatcatgattacaggtttttctaatcagcattgttggttaaaactttcaataacttgatctccagctacccccacatgaaccaatagcgcgggagtctgttttcccttttctttcgggtgccgcaaaaccaaaaattacttacaaagatataatatacacttgaggagtgaccaatggcggttgaaaaaggatctt

SEQ ID NO: 76245 - DNA, 468 bp, Arabidopsis thaliana landsberg
  unsure (1)..(468): unsure at all n locations
gcgggatgtcccatgctgcaaatggtattgctgatggatttcccctgtgggaatatgccaatgcaactgcgagtatgcaaggcttatttgcccattcaggacccacacaaatcgcaaatgttgcttttcatgnnnnnnnnnnnnnnnnnnnnnnnnnnnnnnnnnnnnnnnnnnnnnnnnnnnnnnnnnnnnnnnnnnnnnnnnnnnnnnnnnnnnnnnnnnnnnnaatgcaagttccttatcaacaatgccacagtaatggtttcttgcatggtggcattaattaccctggaaaccgtctccaattaggtccacgaaatccacttctcttcaccagttctgaacgtgcttttgggcctccacannnnnnnnnnnnnnnnnnnnnnnnnnnnnnnnnnnnnnnnnnnnntctaccacccgagcatgctacaataatggatttttcgagattgtatgaagtgttcaata

SEQ ID NO: 76246 - DNA, 389 bp, Arabidopsis thaliana landsberg
ggcctaggggccgaaggcccccgtgcccgttctttttatctgtagcaaccggccagtgcgcgcggttgcgttagatttgcatggctgcgcgctgcgctctgacaccttgcactagcgggtcggcggcctaggcgcggggcatctttcgagtgcgtgcgtgtctgttcaagctctgatcgtctctccggcccattcgccggaggaaactgaccgccgccttctcgctctcgctctctaccctattcccggggctgagaggggaggagagaaggccacgtccacaccataaagcaggacgtacagacacgtgtacgagggggatcaccgtcgggtgaggtgactaagctggcggacggaacgacgacgatggcgaggagcggcggctgcat

SEQ ID NO: 76247 - DNA, 517 bp, Arabidopsis thaliana landsberg
ctttttgcaaatggcaggcgtgtgtaagtaattctggtctaatatagggatttcctggcgcgtctttatcaaggcaaccggtccacctttatgcgtcattgccaccttccaggcctggactgcttcgttggcatctgccggccggatcacgaccagattagggacggatctaagcccaatgagttgttccacaggttgatgtgttgtcccatcctctcccagtccaatactgtcatgagtaaaaacataaatcggttttattttcatgatggctgccagccgcattggaggacgcatataatctgaaaatatgagaaaagttgccccaaaagccgtaaaacccttcgtagggtgatcccgttcaaaatggcgcccatcgcatgttctctgatgccaaaatggagattcctgccaccagggtcttgcttactaaatgacccaagaccttttattaaagtatcagtggagggagccagatcggctgcgcctccaccagtaatggaaaatagggcgcaat

SEQ ID NO: 76248 - DNA, 568 bp, Arabidopsis thaliana landsberg
cattaacttcttaacatattctaaaaaaacttctaattaattgctcaaacttctaaagatttctttttttatgcaaatattatatattttaatgttagatcagtttcattctctcattagtcaccaattctaccaaatcccaatccaaaagaaatattatatgttctaggtggctcttgatgctcttttacaaaaccaaatacactcattagtcaccaattcttcaagttcgtgtgatttctccggttcatcaagctcgacgcacgtctcttcttatttttcaggaccatcctctctatctttaacttaaaccaaaaagttttgacaggtttggccatgcattttctccagtaataatttatatgcatagctctcttctctgaaaactaaacaaacattctcctcccagatctatgggagcttagtctaaccgtccacaattttgtggtggcatttttaattgggatgaatagggaaaaaacctttgagaggatatctaaaatacaaacttaggtttccttttaggctaatcttttaaaaacaccaataactttaatttgaacctttt

SEQ ID NO: 76249 - DNA, 327 bp, Arabidopsis thaliana landsberg
tccgtgcatgtgcaaaaatcaccacacgtgtgatcaaaagttcatttttttgaaccctgtgtaccctataaaggcaataagagcttttattgcacgcaaaatttttgtgtgagtataatattacattcatacaagaaaaagagtaacagatactaatattcaatccaaaattatatcgccactagataaggcccacctaaatatggaggtgtgaaaaaatagatccattaaaattgataatatgctattttatcagacaacgaaattgatcaaagttgtgtaataaattaccgttcgtgtatgcacagagactaaaatctttttttt

SEQ ID NO: 76250 - DNA, 608 bp, Arabidopsis thaliana landsberg
  unsure (1)..(608): unsure at all n locations
agatcataacatatgccacgacaccaaaactcactcaaaatcaaagctgttttttccttcgtttattctttttttccttctggccaagtgtaagtagagaagttgcgatggaccaacttaagttgattcaacccgttgtaaactcatcctaatctggctctaattgtatatatttgtatatagtatagagaataattaaatgatttgtctttttaagataacaattaatcataatcatgacttctataagcttaagcaatgtaaaaatcagtttatacaaaaatcttaaaacaacacaccgaaaccagaatctatcattataaagccaacgatagctttaaagtacacaataagatttgatactaattaagtttcaattattccaactcgaaccagcaatctaaccgacgaaagtcaacttatataatgtttagggcttatttgaaacattggtcagtccagacagattcacaaaaggtattaactagatcacttccactttttgaacttgcctncttcaaacattccatgctttccatgcttgaacttcccgtgcttcccatgcttgaacttaccatgaccatgaccatagccatagccctgaccat

SEQ ID NO: 76251 - DNA, 256 bp, Arabidopsis thaliana landsberg
cgtctagctgtctcggtcgaactgtccaaggtcctgtcacaggtattagtaatgagccgcgtaaaaacctgggccgaagtagtaatgcccaaaggctgaaccaagctggtattaaaaatgatagtcgtcgggtcgtgtcttttacgtggtggcttaggcaatgtagcggtgataattaacttagcgggcccgggctatttgagccgttggaggcctctcactaaacaaccaggataatcggacacagttggatagt

SEQ ID NO: 76252 - DNA, 339 bp, Arabidopsis thaliana landsberg
agctgtctcgatcgaactgtccaaggtcctgtcactgtgtttgtgggtgtcgtatgactgtgcgctaggtggtgtgtctgtgtgcttggttagtgtgtgtcctagggttgggtttagcagacgaccaacagccgtacatgtgcacccagaggtaattgtggcgggcgcataagccaatagcaagccggaacgtgccagggctgccacagcacgttttatcgcgtgcgcgggtttagtaggcgaccgcggttgtcgtatatgccgcgcagccggccgtacccgttaaaaacacgtagagcggccgcagcaccgtataagtgaacaccccgaggggcatgt

SEQ ID NO: 76253 - DNA, 277 bp, Arabidopsis thaliana landsberg
tctagctgtctcgatcgaactgtccaaggtcctgtcacgtgcatatgaggcataagcgtaaactgaacaggtaacataaacaaccgagtttattgcattagtgccacctgtagggggctgccaaaatactggcaacaggccttcaattggcctacaggataatagttacaaacaagtgatttgttatgccccgtgttcgtggtctccgccgagctaaagtgggcgcaacatttggatgcccaacattaggatgggccacgacacactgtgcatataa

SEQ ID NO: 76254 - DNA, 422 bp, Arabidopsis thaliana landsberg
tgatcatcgtctagctgtctcgatcgaactgtccaaggtcctgtcacccaaaaggtgtgaaaaaacggtgatgagtagggtgtggtgtgtagtattgttaggagtgtgtgtgtgacaatttagaatttttgtgtgtgtagtgtgtgtgcgtggtagtggtggtgtaggacggagtgggtgtagcctatggataggttagagtggtgttagaacccatgagatggttaacagcaccgttgcccagcggggtaaacgtgcgttaggtcttgttgttccatgtagttctcatcacgtggacgttccgtggttgttaagcacgaggttacacgtatcgtacgccgttcagaattggctctcatcacagttaattgtcttgcgcttcgtacgccccacaaaccggcaagtaattcaacccagcaggg

SEQ ID NO: 76255 - DNA, 460 bp, Arabidopsis thaliana landsberg
atcgtctagctgtctcgatcgaactgtccaaggtcctgtcacagtaaagatttgggtgatggtggtggtaatctgtgggacgatagctccaacaatcaacgttgttgtcggtggtggtggtgctctgggtgtgtgtttgtgtgacaattcgaattcgtcgggtgggtgggtgtgtgttgtaattacacagaaacacgtattggtggagggggtgcaagtgtctcctcggaggtgggtgctgctgctcctgcgccggttcctcgtcagcccatagtaagtcgccagtgataatggtcgtctgtcacgtattcggagttgcgcccacgatattcacggtattccaaatggtattcgcgccgtcgcgtaagcttgttacaaatgtttggttggtaataataacggtattgataatcgtcagccttatattggtaatgattgtcgtcagaatccaggtatggat

SEQ ID NO: 76256 - DNA, 317 bp, Arabidopsis thaliana landsberg
cgtctagctgtctcggtcgaactgtccaaggtcctgtcacgttgcaaatggcccgctcaggttggtatgtatagtggtggtgtagtatgagccgtgtggtgcagcgtcacttgtggtatctggtttgtatgccgggttttgtaacccgacgggtatgttatatagtgtgtttagtgtgcaatctagttttagttatacgttatcttgatgttagagctttcttgttgtggtgttgggttggtttttcccgggtaactctcaggtccagtgtaacccgtagtgcacaatccctttcttcctgttgtcctttacattgg

SEQ ID NO: 76257 - DNA, 441 bp, Arabidopsis thaliana landsberg
gatcatcgtctagctgtctcggtcgaactgtccaaggtcctgtcacagtagccggccggtaatggcgcgcaaccccgggccagtagccaaaagtggccgccggtgacgtcgaccaaactaaggcacccactggtggacacccgtcgcaggtgctttagtagtggaacacgcgtagtaagccccatggagcagcaggccagtagttgttttagggctgtaatagtggcgcaaacagcgctgtagcgttggtataaatgtttgtggcggtggctgtagtggttttatggtgcaagtatagtagcgtggtaagcggtaacgagcccatgtgtttaacgtgcaccatgtgtaacacagtaagcgtaaacgtgttattaggaagcaattaacaccgctgagtacacagcagcaatgcagtaaatagcccacagacaagtgcaactg

SEQ ID NO: 76258 - DNA, 434 bp, Arabidopsis thaliana landsberg
tgatcatcgtctagctgtctcgatcgaactgtccaaggtcctgtcaccgggcgtggctctagctgtgtgatgtattgggcgacgtttcttcgtaaaagatttaggtttagtcttgggtgtgtgttggtggttgtgcgttttttaaaaaaagcaactctggtacgtgtttaacaaatttgtgtactcatctactacagtggttggtggtcttacgtttaattttaatgattagtgggcttaaatgttcgtttgtggtgtataaatgtaaatttgttaaccacaatcattggtttgttcagtttaagtgcggatgtttgttttgcgttaaaggcaacagttttgcgtttttaccatttttggtggttaatttgtgtacgtgtacgtgtattagtcggcgacgtttgaattcataaggtgtggtcagggctctagta

SEQ ID NO: 76259 - DNA, 285 bp, Arabidopsis thaliana landsberg
agcatcgtctagctgtctcggtcgaactgtccaaggtcctgtcacgtgtacggtgacgacgtgcaaagtaacgttgcaacgcctggggctggttagtgacctgtacaacaaattaagaagcaatagctgcacagtgggcgttttgggcttgtcaattgtgtgtgtgcacagttggagccaacttgcatagcactacaacagccggtgtaatattgccgttaaccaccaaacaatacagtagccatagcacaaggagccccaacggctgtaatacctaggtgtagc

SEQ ID NO: 76260 - DNA, 170 bp, Arabidopsis thaliana landsberg
atcgtctagctgtctcggtcgaactgtccaaggtcctgtcacgtgtagtgtggtgttttgtttggtttgtgggggtgtggaagggtgtagtagagtagagtgaggaagtggatgtagagaggaacatagacagagaaggtggggtgggggagggggttgggtagcccgtg

SEQ ID NO: 76261 - DNA, 446 bp, Arabidopsis thaliana landsberg
  unsure (1)..(446): unsure at all n locations
tgagcatcgtctagctgtctcggtcgaactgtccaaggtcctgtcaccagttgcaactcatgatcaaagctgcagctgcacaggcactagccccagagtggtgtaaagagggcagggtagttgagagtaagcagtgagtggcacccacgcagtagcagcacatggaccaaatgaggccccatggcatccggggcgtatggtgttattgagagtagcgtttgagacacaggcagggattaagccagtaggtancagtaaaaaggcagagtaaaagtagtagaaatgctagtgttgtacacacaccaagtaaacaaggccgtagggcccagcgggttgtatgaaacccccgcgtattgccatccgatacacgttgaaagggttactagcctgggggaaacctgcaaccagcagtatgatgatagagctagccttatgagccagcacaa

SEQ ID NO: 76262 - DNA, 381 bp, Arabidopsis thaliana landsberg
gtctcgatcgaactgtccaaggtcctgtcacggtaatgatgaaccggctgcgaccacagaacagaggcaacgacgctgaacgcttgaatagttgctcgcaataagccttgtgctagtactagtgtggtgtaacgtggtatggcggtggcatacagtgcacgcccgcaacccataaatatggtcttaattggtgctcgtagtacggcgcaccacgtagttttattgttttagtacgttgtataagtacagtgccggttgacgtgcagcagtgtcggaccattctcaaaatacgcctggtattccccgccccgagggccgttacccagcaagttaacgtgattgccccaacgtcgggcctggtaagcccgtgacacaatatgc

SEQ ID NO: 76263 - DNA, 399 bp, Arabidopsis thaliana landsberg
  unsure (1)..(399): unsure at all n locations
tgatcatcgtctagctgtctcggtcgaactgtccaaggtcctgtcacaacttggctgggtggtggtatggtaaatggcttaagtgtcaacacctaagacaaggcctagtgtttagaggcccggttaattctagttctagcgggcctacttggccttgtttgttgttgtggttgttgttctccgtgttgttcttcgaaagataagtgttttttacgttttagctttgcctttagtagacgtaattgaaatggaagtcctgtttgtttatattacgtcaggtatgtgtgcgcgaaaatagatccctttagtacgtagtcgcgccggtcccgtcaattttcgcgccgcccgtgtagttccccatagcntcagacttagttgtaaaatttatcagcttatttg

SEQ ID NO: 76264 - DNA, 353 bp, Arabidopsis thaliana landsberg
tcatcgtctagctgtctcgatcgaactgtccaaggtcctgtcactaagccttcacggtctgtaaaaggagaaacgcgtgtaggttgtatagccgtgtgtatgaatatgacgtatgcgaatactagtatatgcgcgaagccttcgcatctttgtaattttgtggtgtgttggttgtcaatcttgttaacaaatacttggtcaaattggtctttaggttaatggcagtttaaattgatgcctagcttggaacgttttggatcggattcacagttggttcaactggtacaatcttatccgttccttcggcacaggcaagtgggtagacagcttgatgggcaacgctaccccacagt

SEQ ID NO: 76265 - DNA, 426 bp, Arabidopsis thaliana landsberg
gatcatcgtctagctgtctcgatcgaactgtccaaggtcctgtcacaaaagcaacaaactctcagggcaacgtgtgttaaattaggaccggcgtggttgctgcagacgatgtgggactactagtagttaactagcaaaaacaagtaagttagcattaggtgagtgaaaacattgatagaagttatagccatcacattgttacgtttggaattggtattcattattgtaggccggtcatcttggttgtaaagtactcgtttttgtcgcccccaggtgtgatatggataaatatcgccgtttaccgtggtgtcgttacatgtatgtttaaccatcgacatgtatgcgtaaaataattccgtagttgagttcgtagttttgaatgtaaagataaatgttatattatagcaatgtttaatggttggccat

SEQ ID NO: 76266 - DNA, 490 bp, Arabidopsis thaliana landsberg
  unsure (1)..(490): unsure at all n locations
cgtctagctgtctcgatcgaactgtccaaggtcctgtcactaaggctggcaggttgttgttagtaccagatagccggttgaggaacgccttgtaaactacacacaccgcgccaaactaaagagtttatagatgtattggctgtatcacaacgtgcattacaaggccagcatgcgaaaactgcaaaaaagacgcagggttgccaccgtcccatgtaggggtaggagccagtgcatacnggtagagtagtaagcgtaaagacgtggaatggggtaaataagaagtgaaataagcaaccaaccggctcnatacgctggcacaggccggcgccgcgcgtaacggggccacgagagtggtgagtagtgcagagtagcgtaacagttgccgtattaaacgagcgctagtacaagtaaaggtaagggctgtgacaaacaccaaggtttctagagtggccgcgttgcccaatgaacacatgtttggatttactacagt

SEQ ID NO: 76267 - DNA, 446 bp, Arabidopsis thaliana landsberg
cgtctagctgtctcggtcgaactgtccaaggtcctgtcactgggtggggaacgtgttgatctcaatgcgcgtggtggggtgtgtgtggtgggcgggcgggtgtaatcaacctcaaagggtcccagccgcgcgttggcattggtagacttctcgcatcggagtaggcttgtgagttagtgtgctggtgggtgggtgggtgggtgtgctgagcgtgaggctgcgtgaatattttgggccaattggtttgcgggagcacgtgggcatggtggttgaaaggtgcgtttatcggcaggcaggtgtgggtgtgtgtgtgcccggtgtgcctagtaaacggtcgattggggcgccgggccagcccagtgcacgttacgggccggggtccccacagtgcgcggttggaatttatgggttgttgggggaccagatgtcgtgaaggcaaggggggg

SEQ ID NO: 76268 - DNA, 441 bp, Arabidopsis thaliana landsberg
  unsure (1)..(441): unsure at all n locations
gatcatcgtctagctgtctcggtcgaactgtccaaggtcctgtcacaaggattgaaaaatgcctggcctaccacgccaaccgttcagtactgtatgtatcgcaggagtcggttagttcgcaaccaagagccagtccccacggtatgagatggtagattgcggttgacagtacaggtagagttgtagttagttagagcgcgaaacgacgcgtacaatacgtgtaccgcaaggttacatgagcgtcatagtagaatacggcggggccaaggtccggtggtaggcagtaacgtaagcgtgggagtgatcaaatagtaccagagttacaccggcagcaccagcagtgacggccncgttataatggtgaggagcgggcccgtgggttagccggtacgtataaccgggtacggtttgactacgtggtaataatagccgacagtagca

SEQ ID NO: 76269 - DNA, 506 bp, Arabidopsis thaliana landsberg
  unsure (1)..(506): unsure at all n locations
agctggagaacgacggaaggtagtatcttttgctcatttttcaaccaaaatcatcgatacttagggttgttactgatcatattttggggggttcgtaatcatatgttgtaccatattgttcaaaagggtttaattcttgataagaacttcagttggattatgcttgttaatcatatgagatcaaatttaattatgcatgctcaacaaaaatggattccaaaagactgatgctttagctttattttcattatctttgtctcttttttcttcactttggggtcactggttctctttattttcttcttttccatatactttcctttactctctcaacaaattcactgttaactttataaatataaatgtatttgttatatacatgctggttcctgctggtcatcaactaatgcattatagtatggtttacttttttatttntataactngtctagaatttttaagtgatatactcaagtctggatccagaaaacanatgggaactttga

SEQ ID NO: 76270 - DNA, 368 bp, Arabidopsis thaliana landsberg
tagctgtctcgatcgaactgtccaaggtcctgtcacgttagattaaactagcaagacgcggtgaacacgcactggtagtggtaagtgttaggcgcacaaagcctggttaacccgctgtggtgtggcgcgtgtaataggtgtggtggtatgcgccgaacgtgttatagagagctttacgtaatgttagttttgaaaatgttgaaatgtgtgttgcgtttaacgttattggttttaaagtagttaacggcttttaaccatgttaggaacgggccgcgcgcgctgcagcgcggaccgggcaggaatgcgtaatggcccacgttattaaccattttacgtggtaattgtaggtaccagtgcgtgcagtggca

SEQ ID NO: 76271 - DNA, 360 bp, Arabidopsis thaliana landsberg
  unsure (1)..(360): unsure at all n locations
cgtctagctgtctcgatcgaactgtccaaggtcctgtcacctggtgtacagttcaccagcggtgtccacgcgatcagcagtgtcgcgattacggctgtgttgtttctgtgttgcacgggtgacccggccaaaaccaaatcgccctgggccccgcccgtatattctgtagcagtgtaattacgtggttaagcatcgtagtaggccccgttgtcatattccacgcgccgttccaagtcttgcgtggtcatcatgtagcaagcttccacaggttcctttcnccgtgtcgtcagcgtcacatccngttacagggtgtttttaaagcgcgaatagcaaatgtagtcgcgtgacaagtggtgtgaa

SEQ ID NO: 76272 - DNA, 568 bp, Arabidopsis thaliana landsberg
  unsure (1)..(568): unsure at all n locations
annnnnnnnnnnnnnnnnnnnnnnnnnnnnnnnnnnnnnnnnnnnnnnnnnnnnnnnnnnnnnnncatgccacttatctgtaagagcatttgagatatgcattcaagtgttacttctaagaacaatgcaaagtattagtagctccgggtaaatttgaaggccggtgaaattgcactaggctaaccaggttgatgtctgtgaatataatatctcctgacttggttcctccaagcgtttcacttacaggtgatgataaatttgaattgggagccaaataccatccatcaatgcgagcaaagtcacgtaaaccaagcttttgaaatataagagatgcctcttcacgaatacttttgataacatggatagggaaacgtggaggagtgtgataggtgacctgtttattttaaatgaactcattgtgaggagatataaagttactacagtttggaactcaatatgctgagaaaccaatatgataacctctgaaaaataaaaagaaaggtatgttgacctatttgatatacagagttaagggcattaagaaatcaatgtgttccagacacacctt

SEQ ID NO: 76273 - DNA, 322 bp, Arabidopsis thaliana landsberg
cgtctagctgtctcggtcgaactgtccaaggtcctgtcacacaacacgcaggttgtgtgtgtagctgaagagtcagtagcacacaaagtgaaaagcccatcagcaacggcggtactcacgcggttagcaccagcatctcaggatggttagtagtgcttggtcatggtggtggtcgtggttgtggttagttgttaagtgtgtttgtgttagcgcgtggggcagtagccagaggagggcggccgaaaagtgagttaacaatgttcacacaaaaaccagccttggcggagtcggcctaggccccattaacgccagtccgaaaata

SEQ ID NO: 76274 - DNA, 390 bp, Arabidopsis thaliana landsberg
  unsure (1)..(390): unsure at all n locations
cgtctagctgtctcgatcgaactgtccaaggtcctgtcactaaacgactgccaaacgaaacgtaagcaatgaaggtggcaagcgtaacgcctgttaggaataaacggtatgggcactcgtctcacacctgataagttatgcaagctacaatgtagattgttagttttacattttgtcacgcaccctcacagtggataagtggcaaggcaaactgatctgatacactgaaacctttaaaaggggttaatccgtggacaaccccagccggagnggaccctgcagcacaatagctgcagcggattcagttcaatagctaccggcggctgcgcaacaaatgcaagtacacacgggttccccgtatagccaagccggcctgcaaagtaatgagtg

SEQ ID NO: 76275 - DNA, 398 bp, Arabidopsis thaliana landsberg
  unsure (1)..(398): unsure at all n locations
cgtctagctgtctcggtcgaactgtccaaggtcctgtcactaaagtaaaccacccaacagtatagtgttacaaaaaagaggaaggagcagaggaacngtaaagaaagagaaaaaaaaaattggaagggcaaccgcgtagcggggccgtgggagttagagggcgtggtgctaagctaagagactaggaggtagcagcgggcctgggggtaaaaggcgggtggggagcgaaagtaaggaggttttttttcccaggaatagggagccaacggatacccaaagaagaagcangtagaatgaaaggtggaggatgttgtgagagagaaggcacgatgggtggggagaagaaagagtgctaatgcaactatgcgcaacagcggccacaaacggcaacaagggaa

SEQ ID NO: 76276 - DNA, 387 bp, Arabidopsis thaliana landsberg
  unsure (1)..(387): unsure at all n locations
cgtctagctgtctcgatcgaactgtccaaggtcctgtcacagggaaaggtgcagaggcttaaaccgacagctgcagctggccggcccagcataaacgttggtggtacagccagaccagaacgttgctaaaggagtcacaagaaagtgaaacccaaggctcgcgtgtgcaaaagcggcgtggtaaggcataaagaggccgcgatgtagtgtgacagggctacgtgtgattgtaccagtggctgctttggggaagtaacnggccagttagtccncgtctcgcaacgccattgaccaatggtctaaccgatggccggacagcattgggggtcgcgtggaggaggcgattatagggagggcgcggcaggtttggccggaacggcggagatt

SEQ ID NO: 76277 - DNA, 422 bp, Arabidopsis thaliana landsberg
  unsure (1)..(422): unsure at all n locations
agctgtctcggtcgaactgtccaaggtcctgtcacaggccacaggtggcggtatgccaggattggaggcagactagggggttaggagggacccaagtgtaggcacgttacagtggtagtagctgtgcagtacaaggaagaagtcgtgggcgtgtagtaggtacacacgtacgtgatagccggaaagcgtgcaacgaacgtggtacagccataggtagcggtgcgtggggtaaccaaagcaactttaggtgcataaggggagtcaaagcgattggacattattggtagtgacgcaacaactagccagaaagcaggccagtaacacgtcctacgtgccaaggacagaggagggagtatggccgcattanaccaggcggcataccaagggtaggagtagcttgaacgtgcaagggcacccggccg

SEQ ID NO: 76278 - DNA, 246 bp, Arabidopsis thaliana landsberg
ctatctctatatggtaaattccttttgatgagtgtttttaatatttttaccaccttctcacacacctaggggacctaggggcaatgttgcttggacactaactgcaaccaacctgagtactcccacgagtcaaatcccctgcaacacaaccgatgactcgcactgtacagctcactctatgtccacttttctccgaaaggcccactatgagtcaaccgaccttacctgaaagtcttgcttctctcc

SEQ ID NO: 76279 - DNA, 413 bp, Arabidopsis thaliana landsberg
tcgacacacacttctccttctaaggttaaactgtcagaaagctgccatgcgcagttggggagatgctcttaacagcacgctccatgagcatcacaggctcgtatacgaagggtggattctgtatgacagtgggcatcgcgacgaagcgttagccaaggccgagcagtcgatcggactccagagatcattcgaagccttcttcctcaaggcgtacgccttaggagattctagccttgacacggaatcctcgctctccgtggtccagcttctggaacatgccaacagctgtgcttccgacaaccttcgcaaggggcaggcatacaacaacatggggagcatctacgtggactgtgacatgctggacgaggctgccgagtgctacggcatcgcgctgaacatatagcacacacggg

SEQ ID NO: 76280 - DNA, 494 bp, Arabidopsis thaliana landsberg
ggggaagcagacaatgctcatacccaagggtgacttttttgtctgacaactcaacttcacaggcccttgcaagggcgacgttaccatccaggtggatggcaatctcctggcgaccacggacctaagccagtacaaggaccatggtaattggatcgagattctacgcgtggataacctggtcatcaccggcaagggaaaccttgacgggcagggcccagccgtgtggagcaagaactcctgcaccaagaagtacgactgcaagatccttcccaactcgctggtgatggacttcgtgaacaacggggaggtgtccggggtcacgctgctcaactccaagttcttgcacatgaacatgtaccggtgcaaggacatgctaatcaaggacgtgaccgtgacggcgcccggagacagccccaacacggatggcatccacatgggcgactcatccgggatcacgatcaccaacaccgtcattggcgtcggcgacgactgca

SEQ ID NO: 76281 - DNA, 192 bp, Arabidopsis thaliana landsberg
  unsure (1)..(192): unsure at all n locations
ttttttgtttnacacccagccttagntgacacctaaaagactacaacggcgtggtttttgttttaggaatacctgactgacaacctattatcaagctgcagatatagaaaaactaggatctgattcttcaatcacaaacaatcgatcaatcaaccaaaataacacttccgaataatattcaaggataacaat

SEQ ID NO: 76282 - DNA, 446 bp, Arabidopsis thaliana landsberg
  unsure (1)..(446): unsure at all n locations
ggcggccacgcgtccggaccctggcggcgggcttttcccttttcaaggtctccgacgcggcgtgggcgcggccgccttttcctcctggtgtcgagaccgccaccagcaacggtgcccgcggcggcagcgtgaacgtggaggataagcagcggcggcgccacgacgactgccaccccgacgtcgttcccgagaagatcatacaggaggacgcgccgtcagttgttgcggagaccgctgccgcccccaccaccacggaggtggaggtggagtcccccaagaaaggagcggcgccggtgccagagcccatctccactgtcaccgcaatgaaagacagtgnnnnnnnnnnnnnnnnnnnnnnnnnnnnnnnnngccaccaacaaacctgagatggacgataaggaggtggcgatgcggagattcctgggcagcccgctgaagacagcgat

SEQ ID NO: 76283 - DNA, 700 bp, Arabidopsis thaliana landsberg
cacgaaattatagcaacgaactacacacatacataaacaaatacaaatatcaaaatcaagaaaaagtcacaacgaccaactttaattacataaattaaaaaagagtattggtgatcaaaactcaacgacaaaaaggagagagtgggttagttgaatgaccattttgttcgcatgtctgctctctcttctccaccttctttttatgctctcctattttcccgacgactcaaaacaatcaagtacttttatctattattttgtatattccaattcaaacatatctacaattgtctaaaattaattagtttatgactaattatctactatattttaataaccatgtaatagcaaaaatattgtttaagaaaataaaaattatacaaattaaggttactttatgattagttacattaaatgaaactaaataattagttggagatattagtggaattgatctaacggcagtttaaagtattaaattaaaataaaaagtattaattaatttgtttatccaaaaaaaaaggtttagtggaaaagacaagtgtcaatagtatagagaatcataaatagaattagaaaccccccaaaaaaatgtaaagcttccaaataaaaatatataagtaaacagaaaattttctcgttcttctttgagaattgagattaaagctttctctctttttaatggaagaatctcagggca

SEQ ID NO: 76284 - DNA, 455 bp, Arabidopsis thaliana landsberg
gtccggccaatactcaaacggcaccgaccgcccgttcattttcaattttatggccgacctgccccccgccagtaaccgtgcactttatgttatccccaacgccatcacccccgagttccggaccttaatcgacatcgtcttcgagaacccccagaagagcatacactccctccacctcgaccgctaccccttcttcggcgtcgggatggagcctgcgacgtggtcgccttagatgaggaaccacgtacatcctactggacacggagagccggcacacgatccaagactacccgcagccatggacggccatcatgctgacattcgacaacgccttcatgtcgagcgatcggtccaacgtttgccagcgagactacctcgaggagcagatctacattagcgtcatctcgccgtcgcagtcgatgtgctactagtacaacatgcccgacaacgccctc

SEQ ID NO: 76285 - DNA, 641 bp, Arabidopsis thaliana landsberg
  unsure (1)..(641): unsure at all n locations
cggggcaaagacaagggtanntattcatttcgatcttganntctttatgcgatcgataaaacttatatttagactacgatccacnnatgaacctcgcggatgaatanntctcataaatgacttgtcttttggtanagaggggtggacatnntactatatgtnnaaattcgggtgggccatgggacccnnnnnnnnnnnnnnnnnnnnnnnnnnnnnnnnnnnnnnnnnnnnnnnnnnnnnnnnnnnnnnnnnnnnnnnnnnnnnnnnnnnnnnnnnnnnnnnnnnnnnnnnnnnnnnnnnnnnnnnnnnnnnnnnnnnnnnnnnnnnnnnnnnnnnnnnnnnnnnnnnnnnnnnnnnnnnnnnnnnnnnnnnnnnnnnnnnnnnnnnnnnnnnnnnnnnnnnnnnnnnnnnnnnnnnnnnnnnnnnnnnnnnnnnnnnnnnnnnnnnnnnnnnnnnnnnnnnnnnnnnnnnnnnnnnnnnnnnnnnnnnnnnnnnnnnnnnnnnnnnnnnnnnnnnnnnnnnnnnnnnnnnnnnnnnnnnnnnnnnnnnnnnnnnnnnnnnnnnnnnnnnnnnnnnnnnnnnnnnnnnnnnnnnnnnnnnnnnnnnnnnnnnnnnnnnnnnnnnnnnnnnnnnnnnnnnnn

SEQ ID NO: 76286 - DNA, 359 bp, Arabidopsis thaliana landsberg
gggcgcacacacaaacaccccccaccaccatgtcatttttactagcacgcagaacaaccccccggcggcgacgagacctttcacttaatccacctcctcacacccgacagcgtcacctaccataagacatccttcaagtgcacccactgcaaagccatcccctccaccaccacctactctaccatggacggcgtgctgtactgcaacacccactttgagcacctcttcaaagagacccgtagattctacaagaactttacgctccgtgtcacgactccagacaaccctcaactgacaacggccaccatcaagccatcatccacctctttctgtcactcacgataagtgcacagcttgcc

SEQ ID NO: 76287 - DNA, 477 bp, Arabidopsis thaliana landsberg
cgcgtccccccacccctccgcaaacctgcagtcttctctatcatcaccaccaccaagctcaacgacagcggtctcgttaaaataatgaaaagccccaccaccgcatcatcggccgcgctcttggtgctagccctcgcgctagtggcggccacctccccacaggtagcggaggcaaagaagaagagagcggcggacagcggcgaggcggcggaggcgaagaacatccaggacgacttctgctcgacgctgtgcgagggcaagaaggggacggacctggtcgtgtgcaaggagtcctgcgcgctctcccagcagtccaacctggtgctgtacggcaggatccagtgcaagggcaattgcaccgagcagaagggcatcacggcgccggccatgaaggtctgccaggaggagtgcgacaaggcgtacgtggtgaaggccgccaaggtcaccaaggcctgcagcgtcacctgcgccaaggag

SEQ ID NO: 76288 - DNA, 448 bp, Arabidopsis thaliana landsberg
  unsure (1)..(448): unsure at all n locations
tccgagccatttggcgggcccgccgtcagggccagtttagcttttcatggcggccgtccggtccgggggntgcaccatttcaccgccgctccgaggcgtcgcgtccggcaacctccgcggccgtggcggcggcgagggccgatgacgccctgcgccagcgcccgcgggggctcgtgcaggtccgggagcgggaccagggcccgctgtcgacggggcaccagcacctgcaccaccatcaccaccagctgcggcggtcggcggcgttcccaccccgccgcccggggccggggcgccgccctcctcagcgctgcgaaagcgacctcaacatcagggagcaccgctcctgcagcgaggtggccggcggcaccgccgcgggctgcgccgctgtgtgctgctgctttccctgcgtcatggtggaggtcgcggtgcctcccacggtgcgcgcgcc

SEQ ID NO: 76289 - DNA, 140 bp, Arabidopsis thaliana landsberg
taaaaataatcaacaaaacaaaaaaaaaacagaaaaaacacaatacctcaaaccacccaaaaacacaaaaaaacaaaaacaaaaccaaaaaaaacctaaccaacacagacaaaaaaaacaacaacaacaataacaccacc

SEQ ID NO: 76290 - DNA, 537 bp, Arabidopsis thaliana landsberg
  unsure (1)..(537): unsure at all n locations
cagggcaaagaggtgctggaggccacaaggcagcagctcgtgaggtttctctccctggaggatctcaataggatccagtacctttctgcctgcaaccttttgtacaaatagtactaatggtagttagattactgtgatacagtcaaaaggaaatttgtatgatgatcaggttgcatgtaaccagaatcatcaatcagcctgtaaaaagagaatatgtgaaaattgtattaagctgaactgactactgttgaggtcaaaaggttgtgttttgtcatgtgaaggaggcgctttttgactggatccgcgcgggagcatacataggacaactgctagcttccgatccaatgcaatgaatgatcactacgcagacccttttgaggctggtggattgtgtacatttaatatgcaaaaaagataagagacaaaaaaaaaaaaaaagnnnnnnnnnnnnnnnnnnnnnnnnnnnnnnnnnnnnnnnnnnnnnnnnnnnnnnnnnnnnnnnnnnnnnnnnnnnnnnnnnnnnnnnnnnnnnnnnnn

SEQ ID NO: 76291 - DNA, 187 bp, Arabidopsis thaliana landsberg
gctgtgcaagacatgttggcgttctttcgataaaaccttaggaaaatcttactgcgaactccaccatacctttcatcgctagatgggttgccgccccattggagaagacaatgtctctccatggctggggctgtcatcgtccacatcaacatgaagatgatctgtgctcttgtcaacctgaagatat

SEQ ID NO: 76292 - DNA, 490 bp, Arabidopsis thaliana landsberg
actcagggattaagctcatatcttctagattactgtttttaatttgtttcgtttgcgactgtgtttcagcggtctgcaattaagccagctgatgatcagctgagcttgtcggatttggatatggttaaagtcattggcataggaagtagtggtgttgttcagctggttcaacacaaatggactggccaatttttcgccttgaaggtactcattggttaaccttcagattcttctatgtatatgatgagctaatttcctcatcttttctctgtgtttgaagatttacaaatctttttcttccttgccttggcactcactgcgcataactctgaagctatatgagtaggtcattcaactaaatattgatgaagcaattcgcaaggcaattgcacacgagctcaaaatacatcaatcgtaaccgtgctcaaaccttgttacctcgtaccagtcattttatgacaatggcgcaatctcactaatcttggagtac

SEQ ID NO: 76293 - DNA, 446 bp, Arabidopsis thaliana landsberg
cggaggaaacaccggcggcaccactgaacttcactcttgctttcattgtgaaattttccctacatcctagcgagaccgtgactctcgatgtaccacaacatctcaagaaaccattccttccttcctggtgccgtacctccagtatcgacattggttcatagtcttactatcacatgctatgagacgcataatgaggcatcatgtcagtaattcagtatccaaacaatgagatgagattggcatgctaagaaaggacgagctgatattacaatgtactcccttcaccatgtcagtaatttattgtccaaacaattagatacattgcgttatatgaaggagtttcttacgtgtatctagtgctcggagaaccgaaacgtagtatctaggttgcgttagaatctatactgcctaagtgcctaagatcgatttctaagtctctaaaatac

SEQ ID NO: 76294 - DNA, 525 bp, Arabidopsis thaliana landsberg
  unsure (1)..(525): unsure at all n locations
gggtggtaagcgcaacgatcannagccatcagcggcaacctcatgagttattccaacnatcgatcccgcgcaagcgggcgtcggagcagttgtgtggtgggtaagcggtaacggtgcgccacaggattaccgctgtccgagtcaacctgctccaagnnccccgcccccgtctccgccccttagnttgcgctgttgnggccgccgctttgcccgccggccccccggcccaccatttgcgtcgtgtcttgcgccgcgccacgcccacgcattgannacgggagaatagaanntatggtatcgttcaaatgcagcaattgccattgctattagctccagaagtttattcttacctcggtagcaccatgacanncgatggcccgttcgtattnttctggctttgctcgtactttttcagttccatgcgttttaccaacaccttttacttcccagcagaaaatacataatatgcatgtactcctctttttttccgtatagtaatataaacaaattttcanaanaaaaaaa

SEQ ID NO: 76295 - DNA, 571 bp, Arabidopsis thaliana landsberg
  unsure (1)..(571): unsure at all n locations
cgaacttagttgaagatggaggaataatttatgcctatattttatattttttaaatttagaagatatnnnnnnnnnnnnnnnnnnnnnnnntcggatatgagtctaaaacctaaaatttccaagttaactaaaaagtatatatatataccacaaaagtatgttatgagaagagcttgtggtttagtgacgaactaaggtttcgtcaaaaaaattgtgtgacctaaaactcccctacctagttcaacaccttatagaatgaactaatttatctactctcattccagtctaaataaatgaatttcggctccaaagtttcataatataaaagaaaaaattatatatatggagggaaaaggcatatataataaacatcattcgaattcgtttttttcttcttcacanaacataagtagaattctataaacctaaaactttcatccaaaatgtactatangatcatccgtgaatgaaaaaaaaaaaaaaaagcgtacactcactcatatgcacacacgaaccaatgcatcggtaagattcgcataaacatacaaaaaataggagtaaataaaccaa

SEQ ID NO: 76296 - DNA, 624 bp, Arabidopsis thaliana landsberg
atgaccgccatgagaagggctgagatcaaacgcatatagagcttcatttttaaagattttaagatacaaatgtatagagaaagctaaaggttgttaaaaagatcaagaagataacactatataaaggggatgaattcttttgttggtaaaatgtaaggctttgattttacaaattaatataaataattgatggccttacaaaaaatagaaacaaaacgtgaaccagttaaaacctttacccatatagatgcagtcgtaattaaaggctgaccaatcaattaaataatcaaattaatatttaatcctaaagaacaaggcaaaaacttatgacaaagaataatgcataatcgtcttgatcaacgaatcaaactaaactaatttttctgtaatttatacatcttacttaatgaccagaaaggaataatcaattttacacggttatgggaaaattgcaccctaaaatgttaatttagctgcataaagaaaatcctgaataatttattaaaattcgggccttccaaaatacttctaaaaaaaaaaaatcaggaatggtgtttaaaaataacctacctttttgggcttaacaccaaattgtgtaaaattttgggctttttaaaaaaaaaa

SEQ ID NO: 76297 - DNA, 123 bp, Arabidopsis thaliana landsberg
ttccttgttaatgacatgattactagggtttttataaagcttacttttttttgctgaatcacgaatgttgaacctctttacccggagtgaactgttggtccagatttaccacgagcatctttt

SEQ ID NO: 76298 - DNA, 453 bp, Arabidopsis thaliana landsberg
ccacgcgtccgcccctctctcccttcgtcaccatcacatcctttcattttacaaaaatgtcgcgcgtcacagcggcggggctcttctacatcctcgccgttgctgccctcagcgcggccgaggccccggcagagtcaccgaaggaaggcagtgctgccaaggcacctgagtctgccaagagaactgctgcccccgctgaagcacccgaagccgcatccacccccgtcgccgccgctgccccatcgccgtcgtctaggaagtctggtccagctaccgcgccagccaccgcctctacacccccttcttccacggacgaggagttgagcccttccccgccagcatccaccgccgcggcgtcccctgcggctgagggaccggctgctgatgactccgccggtgctgctgcccttggaagtggagctgccatcgccggcgttgccgctgctgttgcta

SEQ ID NO: 76299 - DNA, 298 bp, Arabidopsis thaliana landsberg
cgagccgccacatagccatgggcgcctgcgcaaccaagtccaagtttcttgaggggcaggccccagcttgggccgggttctctacacccaaggttgcgccccaggccactccaatctccgttgaggttgcggctgatgaacaggtagctgataaggtggtggtggaggagccggctgcggcggccgacgttgagcatcagaaggctaatgaggtgctcgctccagaggcgggcgtcgccgagcccgaccacaaggaggaggaagcctgtgataaaaccttcttccaggaggaaaatcc

SEQ ID NO: 76300 - DNA, 161 bp, Arabidopsis thaliana landsberg
gcactctcgatcgtctccaactcatagagtaggtttgtaagcgtgagctataaatcccacccttgcgagatgactattacgatcttagaaccggcgtacagtattaagatgcagggacaccgagtggaacctctagatctttggccatgctctgcggtgaa

SEQ ID NO: 76301 - DNA, 485 bp, Arabidopsis thaliana landsberg
aacaggcataggttaaggttgctcattggtggatttgaaaatagtacaacaaaatgcttgaaaacacgtatagatcctattaagcctatactaatcaaaacaatgtgaagatgttaataatgtaagcattgagttttgagaggtgaaatagacatcactaatgttcattttacaaagcttcataggtcgcactaaagttaattactaaaattctaaaccgacaaaatcgaaaattgtaccgaccgtcggacctctctaactagaccaaaccgactctacagcttaagtaaagtcgtgaaacgtgtcgagctatgagtggtcaaataaagttgtgaaatacacggctgtgagaggtggaaacagatgagatgtcgtgaatcggagggctaagaagagaaagcactgtacacgtgtctatccttctctaacgcttttattctgattttctccctataaaatatatgtatactttaaataatgttatt

SEQ ID NO: 76302 - DNA, 587 bp, Arabidopsis thaliana landsberg
  unsure (1)..(587): unsure at all n locations
atcaataaggtttggagtaaacaacaaccacgtcaattccattttacccgagcaatctcacattaacacatatgagaggttagagaagcatgaacttgttggacttgtgcatgatggtgtcttctctatctttatctccaacatgctacacttccatatagcgaggctattcagaatacccatgactgtctggaaaagataatctcttgaatgatctttgtctccaatttggtctttgaatgcatttcaccaacttgtgagccgaaaacagattcttcaaacccaaacttgatgagattgttacgtttagagtaatatattcctctatgcatacaaatatacacccaagaaaggtcactctccctccttttgtttttgaagtcaatgcatgaaatttgctctacttggatataagatgctagctaagatattttgaagataacaattggtcaaatatatgaacgagtcanagtcgccgctctatctaaagaaccacaattaacgagcctcttcgtttttttactactaataaataacgatcagacataccatctgacatttggttaatctctgatttcaatttggat

SEQ ID NO: 76303 - DNA, 479 bp, Arabidopsis thaliana landsberg
  unsure (1)..(479): unsure at all n locations
gggccccggcatggacttatctccagcaaggcgtttgagttgtgatctctctctcgtgcgcccagatcgtttaaaccgacccccgctgcctctgcctggtactggacggcactgccannnnnnnnnnnnnnnnnnnnnnnnnnnccagggcactggagctccccggcgtctgcaacgtcaaggcgccgccgctcagccagtgcacaggcgtccctgccgcacctgcaccgacacctaccgactagccaccagcagcagctgaggaagaaccctacgcacctgcagatgccccttcagcaaatggagcctcaaactccacaaactcaaagaatgcagcgagcttactgcttctcatctgcgcattgctgtatgccttctaataagtggtgatacaacttcgctggccatgtcaccgtgcaggaattannnnnnnnnnnnnnnnnnnnnnnnnnncttacccatgattcttcggaaatttt

SEQ ID NO: 76304 - DNA, 457 bp, Arabidopsis thaliana landsberg
  unsure (1)..(457): unsure at all n locations
gatccggagcanccgcggncccaccgaccccgccgcttttcgttctccatctcctcgccgctgcctctgctttcgcttttctataatcaagatgagccgtcgtgctcgtgccggtggtggtcaaagttctctgggttatctctttggaagcggtgagccccccaaaccagcagtggcaccagctgcaagtgctccacctgttgagaaaccatctgctgcaaagactgatgcggtcaagcaggttgctgctggggttaccagccaaaccaataactaccacagggctgatggtcagaacactggcaacttccttacggaccgtccttcaaccaaggtccacgctgctcctggcggtggctcttccctgggctacctgttccgtggcaactgatgcccgtgctggtgcgctcaccaaagttatccttccctgcctgctgcgtgctatgtctgaatcgtg

SEQ ID NO: 76305 - DNA, 480 bp, Arabidopsis thaliana landsberg
gcgctatttcgcgaccaatttcgatcccgagatcaatttccgcgaatttaccggcaaggtctggtcgtggcatgacggtcgatggacgtcgaaccgcatgttcgagatcggcagggagtgggaccttccggtcgtcggcagacagacagcctatatgaccggccatgacgagatccactcgctgtcgcagatcctcaaggttccgaatgtccgcttctggatgggtttcggcgaacattacatcaacgtctttacggtgctgaacaatcttggcctgttgtccgagcggcccgtcaccacggcggaaggcacggaggtcgtgccgctcaaggtggtcaaggccgtgctgcccgatccgggttcgcttgcgcccgattataccggcaagacctgtatcggcgatctggtcaggggcgtgacgaatggccgggaacgtgaggtcttcatctacaatatcgccgaccacgaagacgcctatga

SEQ ID NO: 76306 - DNA, 488 bp, Arabidopsis thaliana landsberg
ttcctctcaccaagtaacctgaacatcaatcaatcagtaaattgtctcagacaaaaatgattaaatgtgaaaaagacaaagctgagttttttttctcaaatgtcagctaataagaatcaggagaaatctcagaaaagctacattttccgatatccaaaaattattatgatgatccaatacagaagatgaaaaaaaacgaacttaatataaaccctaagacgatgagagggttctggaaaagaaagcgattaagaagaaaaaactattgatcctgagagaaaaaggacgaatttttcagagtaaaatcaaacgagaaagggacaaaaaaatcaccagaaaagttgttcaaagaaacttgcctctgagatagagaaagagagacaaaatgagaaagagaaagagagaaagattgcctgagagattcgcgaccgtgaccgacgggaagagagattcttgctttcgttgtctaacgtttttttctttttctt

SEQ ID NO: 76307 - DNA, 348 bp, Arabidopsis thaliana landsberg
  unsure (1)..(348): unsure at all n locations
ggcggggaccgatcgtgccggatgcacgggccgnactttacggctgctgctgctgctgcttcttcttcgggcgacgtggcggttaacggcatgaacgtggctctccaccggcaggtctcggggggctccatgaagcataacgcggagctccggcgccaggcgtctctcgagtcccctcgtacagcgcgggccaccagccgcttcctgttcgggcggcagtcatccatggacccgaaccctaagcgcggccagagccagagccccgtgcgcgcgccggatgacctgggcgtgccggacaacctggacgccaccatgcacctgctcttcttcacttgccagggcgacgcg

SEQ ID NO: 76308 - DNA, 479 bp, Arabidopsis thaliana landsberg
  unsure (1)..(479): unsure at all n locations
tccctcctctncctctttctcctcctacctctccaacacccatccgtancggtgcccttcaaattgctcttcagcccatccaccacatcgattctccccccaacatcaaaggccggaggaggaagaaaggttagggagtcggccatgggatgcttttcatgctgctgtgtgacacatgacgacaaccttggcaggaggaagaagcatgaccatccctatgttcctatccctgctcatgtttataatctttggacctagccggttcccagccccaacccctgtcatctccactggcagagctcatccaattgcagtaccggccattcatctggaagagctgaaggaaattacaaaaaacttcagcagtgatgccctcattggcgagggctcgtatgccagagtctatcttggcgtgctgaaagatgggacgaaatctgcaatgaagaagcttgactccaacaacaacctcatcaaaaatt

SEQ ID NO: 76309 - DNA, 506 bp, Arabidopsis thaliana landsberg
ggcggcacgcgtcccatgttatcaacgcttctcctgctgtttacatcgcgcgccttctctttctctcccgggcgtcgatcgtgttcttcagcacgggctagctagccccctccctcccagccatggcgacgccggacaacaaggggcacgggcatccgctgcccaagtttggggagtgggacgtgaagaatccggccacgtccgagggcttcaccgtcatattccagaaggcccgcgacgacaagaagaccaccaccggccctggggctgggaacgcgcgcgcaggcattccgccggccttcatgaacggcggcggcgacggcgggtacaggcccgacttcggcgacggcaaccagtacacgccgcccaaacggaagaagtgggccttctgtggctgctgaatcgaagctcgctgtgctgctgtgctgactcgaaaggagaacggatcgtgcagcagctcaagtgatccaggatgatgggagcgccgagacacgatggaaggcatt

SEQ ID NO: 76310 - DNA, 394 bp, Arabidopsis thaliana landsberg
ttttcttcataatctaaattcaccaaaaatacgaagaagaacgagaacaacaagaggtaccatacatttgtgattttgcttaacttttgtgtgattataagttgactctttaattaaagaaaaagcaacaatcaacaatcaagttaataacttttgacttgaaaatttttaagtccaaattgatacatttgcaaacaaagaagtttgtagtatatatatacttgtatcacaagtttagtcttaatgtaactactctttctctagacatgtctctgattcttgttttgttgtagaaaatggtcgcctttggaaaaaagctcaaggaacgcagcattgaagaatggcaagagtatgttttctataatactcaaaaattgtttgtattataagttta

SEQ ID NO: 76311 - DNA, 311 bp, Arabidopsis thaliana landsberg
  unsure (1)..(311): unsure at all n locations
caaaccggacagnatttggataaccctaaacaagccttgaaagaagtacgagatatcttgcttgagcaaccaacgaatgtagaggccagggctatagaaaaacagttaatcgcacaagaaccgtgagcgcgggcatgtttgccacaattgcaaagcaatttgagtaagcctgttacgctggaattacgtgatgccaatatcaaggtggtttttgaggctttgtcacgtgcgactgggatcaattttgtgctggataaggacattaaacctggaaccaaagtctcggtgtttgtgaaaaaaatgccgattga

SEQ ID NO: 76312 - DNA, 555 bp, Arabidopsis thaliana landsberg
  unsure (1)..(555): unsure at all n locations
tggaagaaaaattaggttcttctgagttagatatttttcttgaattcttcaaancttggtanataaatatagtgatttctagcctgttgcttttagttcagagcgagctagcgttttaggagaatgtcnntaaacacagtcagaaagccaatagaccgacnttnctgatgactatgnnggagctttnnagctgccgttaggttaggtttgggcgtgcccataaagtaccannatccttagannatctgtnntagcagtcntnncccgcagctgggtttggttgagaaatagannaccaactattactttccaataatagggcagaaaataggnnnnnnnnnnnnnnnnnnnnnnnaggtataccctcatatnnagttttgggaatatanngtttggtagacttccgaagtatttaattaagttattaagttgtggtccagagagatagtacccatttggacctggatttggtaagccaacttagccattntgggttccatttacattagtataggtttnttttttttcagaaattggtattaatccaattttttt

SEQ ID NO: 76313 - DNA, 228 bp, Arabidopsis thaliana landsberg
catgccatagacttgtctgaaatgggctggtcatattcggaagcagagactggactgtctgatttagcgacggggtccgacaccttgtgggccgaaagagagcacatttacgcttccatataaggactagagccctggaccgggtaacggatgacagaccatatggcgaccgtaaacaacttctgttggaaacagcgactccagcgcattctgaagcacgtatcctct

SEQ ID NO: 76314 - DNA, 425 bp, Arabidopsis thaliana landsberg
cgcctaccaccttttcctttacactcgcaaacaagccattcctagaggatgtgtacttttctgaccaagcaccaccaatccacaatcataaagatctcgaggacaaacatcaaacacaaaaacaatacaaggaaggacaggaaacaaacaatggccaatgcaaagcacatgagtcaaccaaacctactgaaaagatattcaatgagctcaccccaccccagagcatcaataaccttagtaatcaacaactacaaacgcgtaaagtttccaaaatacataaaaattcccaagctaagacactccttccccaccctcgcgtttttgcatcttgaaaactgcatgtcatgtactaaacttccatcacttggcctcctcagtcaactccagtccctgcaaatctcaaatgcatactcagacatcaccat

SEQ ID NO: 76315 - DNA, 142 bp, Arabidopsis thaliana landsberg
aaaaaaaaaaaccacacaaccccccatttaaaaaaattattataactcaaaaaaaaaaaacccaacaaaaacctttaaaaaaaaaaaaaaattacattaattccaaaaacaataaaaacctaaaataaaattcccatataaa

SEQ ID NO: 76316 - DNA, 307 bp, Arabidopsis thaliana landsberg
  unsure (1)..(307): unsure at all n locations
ctttgcccaccacaagggcttagtggcggatgccttgatcgtcctctcggagttgtccctgaacagaatccaaaggctagtgacacaaaacaaaaaaattagtacaagtaaccaagttcatatttgttagggagcctatatatatatatatattggctgatgataatctcacctggtttttgaattggtttcaggctagaagctcttttcagaagatttgaaacctgcttcttgctcataccaacatcatttgaggagcatgacaatcttctttccttggcatatgacaactgctcatntgatcctg

SEQ ID NO: 76317 - DNA, 167 bp, Arabidopsis thaliana landsberg
gtttcccctcaccagcgtaagccttcatagagcccatctacccggagagctcatgcgcctagcctatgcgagttcgtgttcttgggatcaaggaagcccagccgttgagatacttttataggtgcagacgtcccaccgggtataacgtaaggggttgaagctaattg

SEQ ID NO: 76318 - DNA, 555 bp, Arabidopsis thaliana landsberg
  unsure (1)..(555): unsure at all n locations
acaatgatatatcattgcgatgaatattaaggaaaagatatgttgnttaattttataaataaagngggggagaggcaagtatattttaaaaaaaaaaaatgaatcaggccagcaatgatgaaatagtaaattatttttgacgggacgatattttgtgtgtaagaaaaatcaaaacggggtcccttttttggcatttaatatcaaacgtattcttgcggtggcggtggttatctcaatttattacttggtactttattttgtccctccagattcatctattctttttttctttactttattattcttcaccacacgatgataaatacatcaagcttaccatgttggagttgtagcttagatatcagaacttgtactatcatttttttagtttgagatgcagttgtccagcagatactcaacgcatggatgggaaaatatgaataggaacgtatttatttcgttttaaatcgcccgacgaagatattgaaatctcactgctattattagcattcttaatcataccccttttttacaaaaaaaatatttttaatttta

SEQ ID NO: 76319 - DNA, 183 bp, Arabidopsis thaliana landsberg
acgtacattctgactatcatgtcactacacaatcatttttcatactaagataaaggaagtttaaaaaacatataaccaaaatccattttgaaaccaattttatttaaaaagttcactactctacatatttttttacacaaaaaatcttcccatatattaattcgatggttacataaaacttga

SEQ ID NO: 76320 - DNA, 602 bp, Arabidopsis thaliana landsberg
atatgcgaagaagcaactagtggtgacgtggcgttgattccttccacggatgttttggggaggaagagagttgatttttggactggaccgtttaattcgtcgctgttgttgaggaacgctccgctccaatcttcgaaagagccacttgagaccattgcgtctatgattttggttgcgatttggttttgctccgtcgcgagaaatggaagtgaagtggaagatgtaatggtgatgatagcgatgatgaggaggaagaggaggaggtgcttggtggttgccatggaagagaatatgaggtatgaaaattggagtccggttggagggctcttcttttttgctgatataaaagaataatctgctaggggaatcatgtaaaccagttccgtatttggttgtacttggagaatgcaaagagctataagtattttcaagtgcatttaacatgattcatggctgattttggatgatactgatagtaacgggcatgatgggatgataatacactgatagttctatgaagatacagatatccatctttacctcgcccgaggaaccatctcagtatccaggctcatcgaaaccattctcacagggcccttatg

SEQ ID NO: 76321 - DNA, 394 bp, Arabidopsis thaliana landsberg
ttatttattgtacttatttattgccaactttttacaaagcaagatatcagctatgcaataacagacaagaaaatggaaaaattttttgttatacaaacttaacaataacattaaacatttttgctcattgacattatcttaattaataaggtacccacgtgaaaaaaataatggtgaaatccttttatgggatcaaggaagaaaagcttgaccaggatatattatctattaatactttacagttaaagttacattttcataaaggatccatctttgatgaagtcttttacacttacaagcacgaatactttgagagattaatatataatggcacatatttattaaaaagcagtgtggcgtacctaaaatacctacattacaaccgatgttactc

SEQ ID NO: 76322 - DNA, 642 bp, Arabidopsis thaliana landsberg
tactccattttataaaaagtaaaaacattgtggtgacaaaaaatacaagtcagtctattttcaagccaaaattaaatacataaatataaaaaagtcaatgttgactcaacaaggaggccgctctcattttacctggaaacaaataatagtaaacacataaataattggttaaattggttaaaaacatccaaatagctagataaaaaaaagatcaaccagaattaatgataaattaataacttaaacccaaaaccaaccttttgtatatggttttaatgtcttccctcatgtatgaagctccaaggaagtaatcattgctgtagtttccatcaatggtcggaatacaaaaaatttcatctataggataagtcttcccatcaaaccatattccagaaattatctcctttttagctgctattatgtcttcgccttcttctgatgtatccgcagccacaagcctataggaataaactttgttttgttgtcctggatgataagccaactctatggcttgtcgagccatacaagggtttgcgatgatgtcaagcattaaaacccttgttgcacccggaagagctatctgctcattacacgctttgatggatgcaaagaaaaattttgcatcatgtgaagtgttaaatg

SEQ ID NO: 76323 - DNA, 613 bp, Arabidopsis thaliana landsberg
  unsure (1)..(613): unsure at all n locations
ggtgctttatacgccgaactccgctgcaatcccgcataacacgatggtcttcaatccacgtcgccgcaactgcaggtcaagcccggtgccgtagaatgcgccccattgctttttcaaaatcaccagatcgctggccgcctgctttagctctggcaccaactcggtccagtccttgggcatgttgccggccgcgcgcatgggctcgtccaccggcacctgcagggcgtcgcgccagtcgtcggcgaagcccacttgcaccagcaccggctgcgctcccgccgcccgcgccgcatccagaatgcgcaccgagttcgcaatcacctcttgtgcggagtgaggagtgccgggcatctgcgcaatgcccttttgtaaatcgattacaacaatggcagtagtgcgagggtcaagggtcagttcgctcataggtccattattctccatgggtnnnnnnnnnnnnnnnnnnnnnnnnnnnnnnnnntaacaaaggggcgcgatgttccgcgcccctttgtcgtttcgtcgatgaggtgctcggttagaacgacaagcgcgccccgagttgcatggtacggccactcacggaaagcgatgtgatgttagccgctcccgtgca

SEQ ID NO: 76324 - DNA, 374 bp, Arabidopsis thaliana landsberg
aaccaaaacttagattataaacaaacatgagtattgtttacatttatgagataagggatttgtggtttcgtaaggtgcttactcctaaatgtcggatattcctatataatcacttagtgtattaattccagttgtcatatataaatttgtaataaaaataagtcagatgattgcgattgtaactagagttttttcttttcttttctcgacaggtgtagagttgtaatattaatattgtattttgaaaccatttaccttatcttaaacttaaaactttggactaattccttttgaaaaatttaaaaaaaaaacttgaaaataaaaggttttaggggattaggatttattctcataaccttattaactttttattt

SEQ ID NO: 76325 - DNA, 598 bp, Arabidopsis thaliana landsberg
  unsure (1)..(598): unsure at all n locations
gacccaatgtccgataatggcaataataataacttgaaatccgatgttaatgtcaacttttcaccttatggtaatgggtttgggaaaggcccgaccggccgtttttcaaatggccgcactatccctgatattatcggttagttcccgattaatttcctctagttactcgacatttgtatatcctttatatattttgaaaattaaaaaagaaaaggtttaaaatattatgaacaaatgaaaaaaaaattgtatgagagacttgagaatcaaaatgatactttatagtatcattttattggtaaaccatttttacacttatgtcactagatccaaaatattaacatatctttaatatgttaaaaactatattcaaatatcatttagtaaagtatttaagattttatttttacatattaaaagctaaaattgtgacatcaatagctagtctctccattttgtaccttatgtgttcattcatatgcctaatanttacgtattttgaaagatatatatactacatgcattagtcactcaattgtttcttggtcgtacgaaattttattaatggtatatgagacgtgttttttttccccttaaa

SEQ ID NO: 76326 - DNA, 183 bp, Arabidopsis thaliana landsberg
  unsure (1)..(183): unsure at all n locations
ttgcctttggttgtcaaaatatgattacaacgtttctcaattgtactcactatatattttgtataagcaaaccaataaagaaacattaatgataaagtggcacattttaataacattcaggaaacaataaacattaccatgtgatatcacttcacttacactgctttnnnctttctcagatga

SEQ ID NO: 76327 - DNA, 673 bp, Arabidopsis thaliana landsberg
tcaaagacgacgaactgtacaatagcttgcatgatcttggcggccatgacctttcggtattgatcgaagccatggttataaagcaaaaaagagacgcggcggccaacgatcatcattgctcacaccatcaaaggctggggtcttcgcatggcggcgtctcccggtaatcactcgacgcttccggatgaggatgagcttgtcgacctggcccgcaaaaccggcgtacccgaaaacgaagacttcgcccattttgacgacgcctccaaggaaggcaagtacctcaaagagcgcggcgaaaaactgtacagcgaaattctggagcagttcgcgctgaaagaagaaaatcaggcgcgttttcgtaaaatgtcccaggaactcggcgaaattcccagttctttggaaatcaattttaagatggccaattatccccacactcagtggatgctgggacagttgacctccaagctgagtcggatcgccaacacgcctctggatgagaaaaaactcaaggacaaacaaaaaccgctcaacgagcacgaaaagacctttaagctggccggcgaaatgatcgtttcgatggcaccggacgtgggcaccagcacgaacctgaacccgtcgatggatggcaaaatctttggccatcacgtcgaagatcttgaagaggaattcgggg

SEQ ID NO: 76328 - DNA, 400 bp, Arabidopsis thaliana landsberg
cgttctcggatgtgtcctcctagcacatgccaatctctccttgtgaaggtttccattcaagtgcccaagcaagattgtgtcgctgtagcatggagcaagacacaaagtgcagaagaatacaaaacgtttcccatcctcacgtagctcaatgtaagtatgcccttgtaacctcagattcttcagagtagttcttgctaattgctctttcaaattaatactaggctttggtaaccctaattctttcttctcagccattcagagatccaacagacacaaacaacttcacgactcaacaaaccctaaaagaaaacccccaattccacaatcctaagaagtttcagagtacaaacacaatcttctaaattcttcaccagaaaagatcacttacctaaaataagac

SEQ ID NO: 76329 - DNA, 1220 bp, Arabidopsis thaliana landsberg
ctcctgctatcgatagtctcaagccaaatcttcaaacactcatgtaacttcacatcttcttcgtaatctacaaataagtgaactactgtactagtctcaaacgctccaagtccttggattccaacttccctaacattgttcggctcgagattgtagttataaaagataataagggtcagatagatcatacggcgacaacacaatttcactagtaccaatcattccaacaatgcgcaacttggtggtcgcaacgatattccaccacataaaaggcaatacatagatacgcttcgtccatgtatttttcttgacatcctcaagaatccacaaatcaaaacttttactggttcgatcaattttccccgagtttgaacactgacatatacccaattgacccttgtggttaatcagtttcgactagtgtttgatatctaatctgccaaggtcgccgataaagctcaacttctcggacttgacatcaaaacaaactataacaaaatcctccctattgcaattgagcttaccgagataatacaaaacaccattgatgcaaatcccagcgtcaaatacaggacgaagaggtttgcaacattggagcaatcgccaaatcattttaccagctcctaatgtcaggctctctactaggcttattattatccactcacaataaagaaaaattcaacacctagaagtgtgaaaacacacaccaaaaccagcagcattatgagataaaaacatatcagaatcagcaccttcaaaagtctgaaaacaacagcatgttatagtgaaaacacatttgcacctaaaataatctaaaataagcataatcacctaagtccgcgaaacggttgatgcatgatggccttagttaatctttaaccatattaaatttgattattgatctaaaatatattgacaaataaattgttttcagattttttttttgacatttataaattttcattttcatgaaataattttatgaaccaaaacatatgttatgacaattaaggaagaaccaacatcattaccaaacatgaactccaaaaatcccaataccaataccaaacataactccaaaacatttgagcctagtaacttctgatcctgattgcaatatatagcaatatataagatcttgaaaggaagtgaatgtcaaataacagaaaatgaacttcatatatattttagatcaatgaaaatattactaaagtttgttc

SEQ ID NO: 76330 - DNA, 237 bp, Arabidopsis thaliana landsberg
tacaaaataattctacataacccaatcaactttttaatttttaatctaaaaaaatcaaaaaacgagcagggagcaactacattttcactccaaccctctaccaaaaacaaaaattaataaaaaacctatccacaaataacaaaaaaattattcggctccaccatagataaccaatcagaaacatttctaacaataacaatcgtcatcaacatcaacttacaatacgaatattcttta

SEQ ID NO: 76331 - DNA, 247 bp, Arabidopsis thaliana landsberg
ctccaggcaggttggactttcggcgtcttggatgttaggtggaatatgtgagccgccaagcacaattagtttgagcggatggattagataattattatttatgccggaacgtatcagcacagccccagtcgtcagtgccggacaccttaagaactggcctggagccgtaggtggtgtaatgattttgttctgatagcccatagcacgttgcctgagcaattgttacggggcggttcgtggaatatgt

SEQ ID NO: 76332 - DNA, 502 bp, Arabidopsis thaliana landsberg
  unsure (1)..(502): unsure at all n locations
gcagatgaacgggttatcggtgacgccagggttccacaccgggtgttcctcacagcnnnnnnnnnnnnnnnnnnnnnnnnnnnnnnnnagcgtgtgcgcaggtacgtgcgggtggggagtgggatgggtacgggtgcgagtagaggtcgaggatggacagcgtgcgaacgggcgaggtcagcgcggacgcgacaggcaacgcaacggacagtgggataagatgtggtgaaatacaatggaagtcaccgtgggaaaaaaaaaatgattaaaaacgaaaatgagatctgtacgaaaaaagagcggtgcgagaattggggacgggcagaaggaaatgagaggggggggcggaaacagaaggaaataagagggttaggggaggaggtacacgggacggaataggagaaagggagaagtagaagtaagagcagcaacgagacaaagtcggcggggacgtaccgggtgggacagcaaagtaacaggnacggaaaacgatctagggggg

SEQ ID NO: 76333 - DNA, 468 bp, Arabidopsis thaliana landsberg
  unsure (1)..(468): unsure at all n locations
ggtgagagagatcacaaggtggtgagagagccgacaacgattatatcacgccagagagaccaagtaaaagtgcttcaagaatggagcggagcagtggtgatagttgaccgtggttcgggttcgtagtgcctggagcggtggtagcgactaggtagattcaagcatgtgagcaaaggatcgtcagatggttatagaggagcccgaatcgaccacatagtgtgagggggttttccccgaagtgggacaaggattatcgtggagtgggtaaggtgttgtgcgattagtaaagcaaacgcgaagaatttcgttgttgtgtgggcaaataccccgtgtggagccggtgcgtcgcgtgcgaaataaggggcgtggtgttagaggatgagagtgtgacangtaagaaggggagagcaccaatgatgcaatgtaagtatggctgcttcggatgtggtacggggtcaacaccgtgag

SEQ ID NO: 76334 - DNA, 479 bp, Arabidopsis thaliana landsberg
aatgatattgagtaggggggaagaggggtagttattgagaagggctgaggtatagggtggaatggcgaattagagattcagagatgccagagcgttattgagtagtgtcaccaacacaaccaataaaaagtcgtccgaattaaataaagttagtgacaagggtaagtgaaaaaaattagatacaaaaatacagcggacaagtgcctatagagacgcatggatggccatacagagaggaacagtgcgaccgctatagagaggttggggtagtcttagatgtgatataattgtggtgtatcggtattcaatgtgggaatgcggggggtggtggggggttaaggagtatggtgtggaggtggagggggaggggtaggggtgaaagggtattaggaaagagggggggaggacggaaatgaatcatagggagcacgtggaaaggggaaaaaacggggaaaatgagaagacaaggggcagcgtgg

SEQ ID NO: 76335 - DNA, 462 bp, Arabidopsis thaliana landsberg
tatacatgtttgcgacataggcaagtcctgtatgttcatggtcaggctgaaaagcggcatcgcaagacgcaagatctggctgccggcacagagcggtttgatgagatgatgaggcaacattgcatgggcagtggttggtgacacaaggtagtaaattgcgtggagttggtgcagcactaggttgtgaatgaacggacatgcttgtggatgagtaccgaattgattggtgaaattaggtttatgagatgggtggtgaagttagtggggaatgtgggcagggtcgagtagtgtaggccatggagggtaaataaatgtcggatatgcgtattcgaggatatcgcaatcaacaaaatgatagcccgcgtatgtggatattcgtaacaatgaaaccgttacattacgtatacatacagacaattacatagtaaaaagtggttggcgtcttgagacagagcaacgggg

SEQ ID NO: 76336 - DNA, 442 bp, Arabidopsis thaliana landsberg
gtaaatgcttagaggatgctagctagtagggagcaaagaggcgagagtaagcggggcgcgctagcctagctaggcacggtcccggcccgatcccaaagatctcatcggttaacaagattagtggggtatcataaacgaaacccattccaccagcgggtaccgaaaacgaagctaggtcagccaggatgctaacgacacaaacaacacgtggtgatgtgttgtaaccataaaaaacgacttcgtagtcgtggtacgaaagttcttagcagggcctgggacacgtgctgggagtgaagtaaccggatagacagagtgagcgtgagggagagaaaggactggtatgtggaagaaggcctgcagtaacgtaaaagaaacagaaaagagagagatgagagacgcagactaagaaggcgtggatggatgacgagagaggagggtgggg

SEQ ID NO: 76337 - DNA, 360 bp, Arabidopsis thaliana landsberg
tgccgacgctgccagcggtcctacggacaatgcgggcaaggcaaagaccggtatcgatgatgctatttctgcggcgttcggcgcatccgataccgaggagagttcggctcccgtaaagaccgaagctcctaaaggcaaagtgaaggcggaggccaaacaggctgaatccgaatccgagccagacgagaatgccggagacgagacgtcgagcgaagatgctgaagcgtctgaggcgagcgacgagagcgaggaaccgcaagttctatccgccccgaagcattggccggaagacgacaagaaagcgttcgcgaagatgacccgagagggtcaggagatcgcgctcaggttagccaaaaacct

SEQ ID NO: 76338 - DNA, 571 bp, Arabidopsis thaliana landsberg
gctatgtgggttgcgagacacgtaacagacttgcgagcaagaaccttgtatacattgttggggatgtctcgtgaatacacagaaatccattttggcgaatggcctaagttcattccttttatgaactcatgtgagccgtttattttcaattatgttccaagtttggttcagtattagtcgatacaggtaaggacgtaatttcttcaatctcctttttttgtttattcgtttttgcgtttttgtagtaaaatcgtttgattaatctatgactagatatattattttgattcctggcttatttgcactacattcaagttccaactaaaacaagaataagttgtgaatttgactaactttaaaactacaattgttacattccaggacgctaaatgttgataggtcacatgactcatgactcttgagagtattttatgagacgaaagcaacatagcataatactaaaaatttatatacgtagatcggttggtgcggaattgaatgatgtacagatacaaactaaacacatgtatattatttacaaaaataatgaagagatttttatgggatcttt

SEQ ID NO: 76339 - DNA, 616 bp, Arabidopsis thaliana landsberg
  unsure (1)..(616): unsure at all n locations
tgcccgacctcgcacagcccgacgccaccggcatgcggacagaccggttcgctttactttgccgccagcaggaggatggggatgttctcgttcacaccggcgacgcggcacgcgtcgatctggcagatgtcgatcgcgccgctggtgatcaactgcttgaaaaccactgcatttgctacgtgttcgccggnnnnnnnnnnnnnnnnnnnnnnnnnnnnnnnnnnnnnnnnnnngccgaggatgtcgtccgggctggtgggctcttcgatccagtggatcccgtgttggcccaggcgtcggacattggtgacagcctcgccaacgccccagcgctggttggcatcgatcgagatgaggatgtcaggaccgacgaggccacgaaccagcttgacgcggcgctcgtcgtcgtcgatgtcggcaccgaccttgagtttcaggtgagtgaagccgtcctcgatcgcctcaccgaccagccgcgtgaccttttcgtcggagtagccgagccagccggagacgtcgtgtatgccggataaccgctctcccgcagctgtgccatccgcttgcttctggtcggcgccgatcgctcgagcagcttcagtgctttctccggagtgat

SEQ ID NO: 76340 - DNA, 526 bp, Arabidopsis thaliana landsberg
tgcatagattagtgactctgaaagtgtgtgcgttgggaaagggggctggtttggtggaaagaaagaggctacataaagttgtgggatctaagttaaaccttaaaccatgggggcggacgggtgacaggcgtataggagcgtaagccagcaatggccccgatagctggtaaatagcgtttaaaaaggggagtgcaaggagggattgatgcgtggaatggtatgggaaaacataggagttgaggtaggatagtgatagggcggtttggtggaaagatatgaatgaataaggtcagcgccagagtgggccgttggataaatagagtgtggaaaggtggagcgtagaaaaacgccacagagcggggcagattaacagaaaggcgacgaggaaacgtggcgcagaagcggagaatttatgaaatagcgaaagagggcgggacgacgttagaggggagcgagaacgggggtaaacgaaggggagaagtgcaaaagcatagggaaaattgagcagcgcggtgggggggggggg

SEQ ID NO: 76341 - DNA, 515 bp, Arabidopsis thaliana landsberg
taggattgaggcatgcgaaaggtagcattggggggcaagcaaaaggaaaagtgttacggggggagggtgaagaagaggaacaaaagtaggacaaagctagggtgaatgaagtgagaggcacgggggggtaaggaaaaacaaagtggtggtaagggaaaggagaatacgaagcagcacgagagcgaaattttagaagtagaatagatcggatcggcgcaggagacgaatgagacgtgtgagaagccccagaggggagtgtgtgacacacgtggggcacacgaaggtgtaagaaagggggagagggtaagggggtttgcaacagaatagggttggggggagacagtttagtagcgtgtgcggtttaaagacaatgcgattataagaaaacaacaaaaacacatagagagagtgccgtaggtggggggaggggaagaagaaaataaggaagaaagaaaaaaaaacggggtggattgatggttgaggtgaggtaaaataccgaaaaagaaagtgtgggg

SEQ ID NO: 76342 - DNA, 588 bp, Arabidopsis thaliana landsberg
gactcaatctaatggcggtgcaggtgcggtgcggtgcagtgccatgccagctctatccacgccgtccacgtacccgcccggctcgacacgcgcggggttttttttttccgctccggctccagctccagccccagcctccagcgcagggcccactttgggaagccactggccttattaatagcaaagattagctgtggcagctcgtcattgaactgctctgggaccgccctgtaacatccaccaactcgaggaggaggaggaggaggaggaggaggagagatcccccaccgagcctcggtttccaagcgccagacgaagaagaagagacaggacacatggcggcaggtttcggcccgaggttcgcgccgcgatgctccggcgagacggtgtaactggagcggttctcgaggccacacgcccgtcgttgcgtcctcagctgctcgtccaaggtaatgggtgggagatgatacggtttttcactttgcctggctttcttgattcggcctgtatgttttcttgagaccgatatgccttggtgtgcgagacagtaatagcatcgtttgctttctagttgaaaagatcgcggca

SEQ ID NO: 76343 - DNA, 449 bp, Arabidopsis thaliana landsberg
  unsure (1)..(449): unsure at all n locations
tgcaaggtcggtagatggatatagctagcctggaagtgggcacataactagagcatgatgcctaccagtaattaccgactaggtagtcagtatcctaaggttttcttatagttgtgtaaatctaagccaaacacacaaaccatcaccgtggcattcgtagtggggctttcaacatccagcagtgggcctccatgcgaagtatggtcacgtattcgtcataatggggttctagttcacagggtaatttgtaatgtaggtannnnnnnnnnnnnnnnnnnnnnnnnnnnnnnnnnnnnngcaatacgtgttcagcggggcgtttatcatggttttatgaacgacaacgttgcccgtaaaccgcgaaattaaatgtaataaggttggtaaaggaccgatgaaatatacgtttctcaatgtagtagtcagtcgaatagtctttcgcaaggaat

SEQ ID NO: 76344 - DNA, 376 bp, Arabidopsis thaliana landsberg
ggtaaaacacaccagctgttgtacctgaatgttttcctgcttcgcatattctcttgcttttaccatgcgttgaaaggtaaacggctgtaccttgaacaggtctgggctttcgctggccgaaactgggttaatgaggtgacagaaggtataccttgacatatgcgctttgctaaagttagtaaagcctccaataccatatcaagatttaaaatggcgataaaccgtggcggcctggagcgcaactttaggtcatttatttttctgataaccattgttttaagatgaatcgggcttttggtctttttgctttgggcttcaccggcatccttaacttttttgtagtttagtgaaatgaaggggaccctgggtatcaaca

SEQ ID NO: 76345 - DNA, 600 bp, Arabidopsis thaliana landsberg
atacattccgacggatgatctggcccaagaacatcattttttctattttaagttgattttgggtacttcataagttcatacatgtgtcgtgtgctactccaaaattcacgaaacgtaataagaaaataaaaatagctgaaatagaaacgtgaaagttttgagaatgtgtctctagagagttatgggacatggactcatgccttcaatgtttaacgtgacgtggtggactacgtaaaatatttactccattgtcatttttttgggttcaaccccattgtcgttactctttaatgttatatttatattacaaactctcatccaaaattttgttctaacgagcaatcttatttaaagaacattgtataaaatcaattatttatttttttattttaatcatagaacggtgaaagagtatacttttgctgttttttttttaccaattatacaattctaaacaaacagtaaaattacatgataaaacggtaatttaatgatttgcacaagaaagcaaaagacacggtaatataatgttggctgatttaaaaacacactcatatgccaaaataatactaatgaaatacgttttacatttttaagaca

SEQ ID NO: 76346 - DNA, 435 bp, Arabidopsis thaliana landsberg
cggggtttttgatcattaagcggcggttcggggcgacgctttagagtggtagatacaatagaacacaggcaagagtaaataaaacaaaacacggacagcagcaaacataaaaagtgacgacgactaaaagcgttaagcccgatataggccgagaaaatacgatgggggcagtccagagtcaggggcacacggatggggattgccaacacagaacgatgcagtacggccactggcactattaaaattctagaattatccgatgttcccggtaagtgcacaaataccgttaacaataacgacggtagagaagaggataaatgacgagaatgtggttggggtggcacttcgcgcataggggagaaacgtgggggattgggaatgtaacgttaacgtggttaagcgtagtggtaagaataagtggtagattaggcgagt

SEQ ID NO: 76347 - DNA, 464 bp, Arabidopsis thaliana landsberg
ttgcttttcaataaaaaacttgaaaacaatgatttaatcgcctcaaagtcagaccaaaagtatcagataacacatttttttttaagtaataaacgtaatgagtaccaaagccagccaaaagacatatttccagaacatggatatactaaggttcatcgcggcctatatgattgttatactccattgcttttttggctggaaaaggtattttggcaaccctggttttcttactgcacatacatcccccggaatattcaataaattagaaaacagcattcataattttacaatcggagttgatatattcttcataatcagcggtttcctcatcacctacctgcttttatccgaatatgaaaaaaacgggaaagtggatgttatgaaattttatatccgcagggcctttcgtatatggccactctattttgtgatgattcttgtggcaccgcttttaacttattttt

SEQ ID NO: 76348 - DNA, 351 bp, Arabidopsis thaliana landsberg
gcgttggccactgaatgaaaacagtaataggaggccaagaatgacaacaagaatgacaatctgtagtttaattagaaaacgggggagttagagtagagagaaaatccggtggcatggagacgacgtggggtattaccactaaaatgagttagcgtgggatggactgtattgtgcgaggttaaggtgtttggacaaaatagaaaagggaattatgagggggttagacagtggtccgttgtgagggaaagcaaaagataagaataagacagcaagacgtaggtaagcaaaaaaggcaaaaacgtagaagggggggcaagacggtaggggtgaggtacacgaactaaaatagag

SEQ ID NO: 76349 - DNA, 407 bp, Arabidopsis thaliana landsberg
cagggatgttaaattgatgattacgatacgagtaatatcattttgcattatttaacaaattatccgaccgtttgatactggttttaataagaggaaaatatatattgaagctcaactgttcttaagtacaacataggtgatattttttaacatagattttctcatctgcactatcattaaaacaaaaaaattctctgaacattcgatcctagtctttagcattatacacacttacaatatatttgctaggtttataaccgggtggataatcaacagtataaggtgtttaaccgtatgggtaaccatacctatatattgttaccgataatggttaaggtttttaaccgatggatatggtttcagaccataatatgggtacgcgatcatgaagttgcggaatatatttg

SEQ ID NO: 76350 - DNA, 556 bp, Arabidopsis thaliana landsberg
tgtcagtcacgacgtcacggtcaacctgcacgggcaatgaaaggggctgttggttttaggggcagtgtaaccattggtatggccaattctgtgtgaaagtgtgaaccgggggttggtgcggccgcatatggcggccacagggcagcagcgtaaatgggaatggcgtcgcttgtttaccgggcacagtaagtggattaaagtgcatagtgaggatggtgtttatgcacgttaacaaaacgtggttgaacagtacaccagttggacatggggtagttagtgtacgtatcagaaaagtaggaccgtattgcgatattaggaagtaggatgcctatagttgtgacaacatgcaaaccagtgttggcaacgggtgagtactaccgagtaaccacagcgtataccatggcgatgcaagcaagtgtactggttggcttatacacaagcctaggaaatgcatgcaacatgttgacagtatagacataaggctgcaaacgtaaggcttgaacgcaatagcgtacacgcaaacagttagcagtggttactggtgtgcaagaagttg

SEQ ID NO: 76351 - DNA, 432 bp, Arabidopsis thaliana landsberg
agacgagggggaaatccttcaagtactagaggggggcaacttttcgaatgtggttgtacttacctggccctacaagactccactaacagaggacgactagactaaaaagctgggttgtagtaggaacgtaggaaaggtagagcgggctgtctccgaaggcacaatgtgtcccacaagtcagcatgctagtaaacagctatggcggacgatagtgcaaaaggtgcaaggcctgaggcgaaagacttttacatgagacaagaaaccaggagtttcaattgatattcaccgaggcatccgcaggtgtaaagagtatagaatacaagcgcagatcagcacagacaacgtaagacaaatagacatataccgaatcccggattcatgtggaatcagtaaagtcaatttcggtaggtggataggtgcaaggtggaaagg

SEQ ID NO: 76352 - DNA, 541 bp, Arabidopsis thaliana landsberg
tgagaggggggttgggggtgacggtggtggttaacgctaccagaattttacccccggatcccgggggggtgattaaggccacgtttgtttggtagttattgttagccccgagccagtcataccgcggtagaatgatgttgtggatgataccatggggattgagttaatagggtcagttcctgtgatttaaatggggagccgggattttaatagggtttatggcgttcatgcggctgcagtacggggccgagagtaaatccattgtgttacaaccgaaggggaagcaccttgagggttttgtggggctaagtacgggtgtgatagtatttctgatgtgagtgaaggcgttattttggttacgcgcagggtgagaggagcgagcattgcgttgaaccatagagtcggcaacgacaggtggtgggggcagtaagtaaaattttggtttaaatgcgataactggtggttaactagatcgtgggtgccacgacagcagcagagtgagatcaagccagtggagagagagtcgacaaggtggtgagag

SEQ ID NO: 76353 - DNA, 498 bp, Arabidopsis thaliana landsberg
  unsure (1)..(498): unsure at all n locations
tggacatgaggttatgggtaaaaaacgtgggaaaaggcaaaaggcccaccttctaagcactctcttttgaatggtaattcgtgcctgtcaaagcttagactatgtcggaaacacaaccccaaagccacttacttcatctctttctctcttttttatttatttattttaaaacaaaagcttgagagataaagtttaaaattctacaaaccccaagaaaccccctaaaaataagaggaaataaaatcaaactgaaaataacattagtagtttttttgtttgcttgctctctgttttcctctgtctggagtctggccattgggattaaactaacttctcattctcattccaccttcttcttctttggtcttgggtgctactaaaaatcaagaaagcacaaggagacanataaacctatccatttcattaccaaacaagccgtacattctttagntatgggctcttcttcttcttcttcttcattttcttcttcaactactt

SEQ ID NO: 76354 - DNA, 161 bp, Arabidopsis thaliana landsberg
ctgctaatggattttttttttgttgacttgtaattatatttccaactaggacaacttaatactccaatcattcacctccagaagtggatatctaaaagtacaagctcacaggttttacctttagttgcataggtcaagaagaagaaaaaggcccatagaag

SEQ ID NO: 76355 - DNA, 331 bp, Arabidopsis thaliana landsberg
tgggctggcggcccggtccatttgaaagcagtccgttccgggtcagaccaaataataattgattattgttttaaggaacaaaatatcaaaagtctattaattaagagaaattgtgacaaattgcaccaaattttgttttgaggagccggctaccaaaaaaaaaatcaagttgtgaggtagcttactttgaaagagagttatattggatatgttttgagagagaatgaacacttggttgtgaaccctcgcgttttacaattgggggaaaagaagaaattattgatactggagctacaaattctaagaaggagagcatttggttgcagatatg

SEQ ID NO: 76356 - DNA, 474 bp, Arabidopsis thaliana landsberg
aagggggtacttcggccaggctgatataatccagagagaagtggcaattagttaggtgtgtacgtaagacccaactacggttcccctacaagttagtggagtcacagttgtataaatggagtgggccggctaaatatgataacacaacggctaaatggtgcgtgttggcggcgtaatacgtgtgatatacggagatcagcttagcagcaacaccggcagtatggaggccagaccgacacgtggtaggggtggcgagtaaatagtacgaatggggcggatattggcagtgcgtgggaacgggtggaaagatgcgcgtacaaaatagagtataaacagcagcgctagcaaacgtagcagaaggtacttacgacacgtgacggctgtaaagagggtagcgacggtagtaagcccaaaagaggatgcgaaaagacgtaacggcgggcatcagcagaccgaaagtggtgatcatgaggg

SEQ ID NO: 76357 - DNA, 597 bp, Arabidopsis thaliana landsberg
  unsure (1)..(597): unsure at all n locations
cgttccgccgaaggagaaggtaacctccgttcaatcatctggttcttcaatccatggacttaatcatatcgcttgggcccacttgaactgttgatgcacccgtcctaagtcccatcctccctctagctcgtctggtgactttccaggtgcatggacacctcggtacgtagaagttactctatccgactggtgcgttatgcgtggggtaattaagtctcagcattaaggcgctcaagtaatccggttgtgtcgatgaccggcaaggatgagtctcatatccgtagtacgacccgaaaatgaattgcgtgtatcatccgtgaaatttagtgtatcggtttgagccgcccgcaataagttaatatggccgcaaggtgctggtataagcagaccaacacgttgatagtcaaccagtaaaaactaatcgtctgagcaatcgtgcctgcttatacgttacggagtttgcgccgaatggggtgcatattgtgactggtaaaggttcaaacgtgaaaccagtcagaccttatctgngtatccggtcgaggtcgatgcaaaagtacaagtaaatcactggggatttgggcgggttatatcacaggg

SEQ ID NO: 76358 - DNA, 585 bp, Arabidopsis thaliana landsberg
gcaaactgctacaactaaaaatcttcacaagggtgctattacaattcaaaatgataggagagtgttttaaatgataaaagtggttagtgaacgtgtgagataataagtggatactcataaaataattaaaactaaaataaggtaatatgtcacataatggaagagtaacaaataaaaatacattaccaaggagcaaggaaattggggtgtgagatagcggttgcacgtcattaatggtggtagttagaccgacagtaacgcatcgagttaaagtttatagatgattgtgagtagtattggtggtagtaagtgtattattattaagccagcaggtgatttggctcatagggtgatgggtgtaagggtgaaaatataaaatttgggtcgggtgagaaatttacaatttgaaaatattgtgagagtggtaaatttacagtggttatgaatttaaaattgcaagagatttgcacgggcaaagtattagcgggtaaggtgaaggaccagcaggtcaaaggtgtaaggaatacacaagtgataaagtttgaaaccacaaagaaataggcaaaaggtatagcgggatataaa

SEQ ID NO: 76359 - DNA, 577 bp, Arabidopsis thaliana landsberg
ggcagactatcctgccaggcacgcccgcgcacagccctttgcgccaggttcatttgccctggtacaggccaagcgccgtgagttcgcgcgcggtttcgatgatgcactggcgcagggtttcgacgatctcgtccacctgcgcatgggtgacgatcaacggcggcgacatcacgttcaggtgcatgatcggccgcaccagcaggcctttggcctgggccttgctgtggatgcgttcgccgatgttcacctcgtcggcgaatagcgccttgctggccttgtcggcaacgaactcgacacaggccatcagcttcatgcagcgcacatcccccaccaacggcagctcgcgcaggctttgcaggcgctgctccaggtagccgccaacgtgcttgacgtgcgccagcaaatgctcgcgctcgatgatctcgatgtttttcagcgccgcagtgcagcacaccgggtggccgctgtaggtgaagccgtgggtgaagcagcggcccttgcccggctcggcgatcacctgccagatgcgctcggagaagatgcacgcccccagcggcaggtaggccgaggtcaggcc

SEQ ID NO: 76360 - DNA, 506 bp, Arabidopsis thaliana landsberg
tggagtgcgtcccggtgagggctcgggtgacggtggagacgcaagcagaaataaaatagtaacgtagagggcatgatgataatatagattaacgtggtggtggcagtgtgtaaactggtcagcctcaacttctatcgatggagcactgggggtgtggtgcaagactgaggagtagccgaacctatgtatgggatagggtgtccaagctgtcaaggaccaagtgccgtgtgagagttacagtagcgtatagaatagtgatgtagaggttatgttcagatctggattccgtggtggtggcatggagtgaaacggagagagacgaagaggacgtgtggaaatatgaaattgaaatgtgactattagataggtcaacattgaaaagtgagttttgaaatttgaaatttgaaagatgaatgctgaagttggaaattggaagtgtgcgatgagagatttgaaattgcatatgaaattgtaattagcgtttcgatggaaaattgaaaggtgat

SEQ ID NO: 76361 - DNA, 563 bp, Arabidopsis thaliana landsberg
atgtaaccgcctctgcgcaccacccgcaagatgactgcttccaacaaatactactatttcgtggagtagcaggctagccgccaggctgggcggatggcgtaggatatgcatggcaagctcaactggtaacagtgtcgtacagagggtgccgtatgtcagtccccgacggcaggaggtccctttactctttagagtttagccgggaagtttggtgtgaggaccgtttctcacacttttcaccgttgagcggtaattttcggtacagctcgttgtggagcttttggagttgggctatgtctggtttgttggtcgtagcagctctggtatagttgtgcgtgacatcgggtttgcttacagtatttgctgatcgttgtgtacgcaacagccttctcgctgtgtgccatggctcgcaatccgcagaacgttgcgcagtccgaactgcagtgcagtacagccgcgtgcatccgatcagatatcatgttgtcagcagaaggttctggtggtgttatgctttgccaggaagtgctggcatcagatgtcgatgtgcaccggtcacgggagtc

SEQ ID NO: 76362 - DNA, 318 bp, Arabidopsis thaliana landsberg
caccaacagatgtggtaacttgagtgtggctttggctggacctgatggcggcatcgtaggtggcagggtagttggtaatctagtagctgtaacacaggtccaggtacagaatatgaactgatgttacagaatccttactattgtgttcggtttaagaagacgggttctttgatgttcatatgcgtcctagtgtgatataggtgatagtgggaagctttgctgcagaagcagagaaaccgaagcaaagtaatgataacattgctcggaggcagaatcctgaaccggctttagcgcccgttaacatgttgaactttggat

SEQ ID NO: 76363 - DNA, 220 bp, Arabidopsis thaliana landsberg
aagacccgtccgatttgggagctggtctctggctgatggactcgcggatactaagggccgacttgaaagattcttgtccttctcaacatgatctgcttaaactctgggggtaatgccgacagacctgtgggggttatagggactctgagtgatgcacctcttgcggacgtgaacgaccgttcccacgaaaaggatgaagtaacaccacacggaagattct

SEQ ID NO: 76364 - DNA, 581 bp, Arabidopsis thaliana landsberg
atcttcatcggcccgtcgaagccggcgttttgcgatttcggctaattcggggtcgccttgaccgcgcggaagtgggcgtctgccgtgacgcggcgaacgaacgccgacttcgtgaccttgtgcgtcggcaccacttggccttgcgacgcgcgatgccccagtgcgtaccagccgccgccgccgagcgcagcgagcaccgcgaccgtgatcgcgagacgcttcattgcgcccccggttcggtgcgagagatgacatcgcccggctgcaggcccgagacgacctcgacggcagatgcgttgcgcttgccaagctttagcttcacgcgcgcgccgtctttgcgatacgcgacggggccgtcgggggtcacgaacaccgcttccgccgggacctgcacgacattgggcaggcgctccgtctcgacgtccgcgcgaaaccgcatgccgggacgcaacggcgccttctgattcggatcgatcgcgactttcaccttcacggcgttactcggatccgcttccgacttcggtcgcacggacttcgcgatcgactcgacgctgcccttgagctgaacgtcgggtagcgcg

SEQ ID NO: 76365 - DNA, 521 bp, Arabidopsis thaliana landsberg
  unsure (1)..(521): unsure at all n locations
gtacgcagtcagggtgaccgggtcgtcgaaattgaaggccggatggttaaggatcgaaagtaaagacggtaaattctatgtaaaccgaccctagggtttagggggagaccaatggtgcgattagaaataagccgagtgttaaggagacttttgtgccagcgaaaagagagtgtggtgtattagttttagacgcgagcacataaagcgagctagggtcaggacccgtgaggtgagccggatcaggtgattagagagcgtgggcgtagggtcgtgaaaagtgaggggatccgagacatctggagcattgtttttgtgaggttgcatccgaaggaggttgtccataggatcattgggattataagcagctgctttatcnagtaaaggagggatcgccaggccagggtatggcatgcgtgatgctgttaggctgcgcgtgtcacgacaacggggcgagaaagcgagtcttacgtgatgaacgaggtgcagagaccggtggggtgggtgaacacagccaagacaag

SEQ ID NO: 76366 - DNA, 354 bp, Arabidopsis thaliana landsberg
aagtctcccacaccacttagtgtgctaatcttttttaatttcgcaaaagagcagcaactcaaagggatggtggagtctcttacatcaaaaactacctaccctagaaacagtaaaaccacttctcatcaccctactcacatctcctaacaaaagctacacctctaaccaacacacgcaagctttcaacaacaccttatcgttattcagctgtaaatcatcttctaaaccaaaaccacaaagcagccagaatataacgttaaaccctcaatgagtattgaccgcaaccattctaacaacaaaggagaagactccttctaactccacaacaaaggatgacccatgctctagctaaca

SEQ ID NO: 76367 - DNA, 448 bp, Arabidopsis thaliana landsberg
  unsure (1)..(448): unsure at all n locations
gaaataggaggggggggataataacaaacacagcagagtaaataaagcaaaattgacaaaaaaacaaatatagacggggtgaatttaaaaaaattgaaacatacaggggcggagggtcaggagctgccagcatctgaaaccgcggggagcgttaacagatcggagtagcgaagggtggggaaggggtggggaagaaacccacatattggtgtttgtatggtacaaaaaaaatacaaacacgccgcaacatcgaacggggcatgcgaacatggaggtgggcaggangttgaaaaaccaataaaaaaaaagacggcgaggagcaacgtgagtaaaacgcgttgggggaaatgttgattaaagatgtcgaacacggcgggagagaaacgtgggggagggggaggggtagcagcaactaaaaacacggtaacaagccaacagggtaagaaac

SEQ ID NO: 76368 - DNA, 467 bp, Arabidopsis thaliana landsberg
  unsure (1)..(467): unsure at all n locations
gatgaggaatgcagcaaatcaaatgatgtaaggattttagttggaccaaggtgggagtgcaggcaggggaggcgggatgtgatgctcgcgatgctagttgcgagtcgctggaggggaaaggggatgaggatgcattgcagtgcattatttcggcgtgcctatacatcgctacgtacgaggttgcggataggagtgcgtgcggatgtcattgcgtatgtcattatattgagcgtgtgcaaatgagtgcgcggccgtacgcgggagggcgggtgctgcgaggggtgcggggtcatagcggtatggaccatggtgacaatgtattaaaagttcaggaggcatgccgtgcgatggancgatggtgcagtatagtggcaggcggcgtagtatatttagggccaggcataattggtacgatgataatgatacgagacgcgtgggaacaggaaggcagtggaaaaattgaggag

SEQ ID NO: 76369 - DNA, 500 bp, Arabidopsis thaliana landsberg
  unsure (1)..(500): unsure at all n locations
agggaggtatattaaaacaactggtttaaaagggtgatttatacttttctcatcatagctcgtcgccttctgtgaccgggtgtgatcttctttttagttaannnnnnnnnnnnnnnnnnnnnnnnnnnnnnnnntctttaagaaaaacatgcagaggaaaattaaaaaaagcggatataatagagaaaaaggtaaaggaaaggaatagtgagagagacagagggagagatggtcttcttgtttagaacatgttgtttccaattattctaagaatgtgcgtttacgtaaatgatcacagcttattacagatggaagagaagctgactcaatttgtggtttagattcgtcagagaggatcgtgtggaatctgaaagttttcacttttcactaaaaataggattagactttaaaagggggaataggaaacggggacacacaattctttcaaatgcaagctgtgcactttgtcaccgatctcaccgttggtctttttatatcca

SEQ ID NO: 76370 - DNA, 645 bp, Arabidopsis thaliana landsberg
  unsure (1)..(645): unsure at all n locations
gaaactgtgtggggcaacaacacacaaggcccacacagaaccgtatgtcctcaataaaaaagcatgtggtcgggggtggtgggcttggcccaggggagtggtgtacgggcgcggggcaccagcagcagcaaaggattcaaggatttgtctggtgagcgccgcaacgggttaacaccctgtgtgggcacgtgatgtgggaaatgcacagtcatggtaggccgtgtacgttaaaagagagacacgggtgggggggagggcaccgaacaacgataagaagtagggcaccggaaaagggcaaaaataggcgagtaggggaaaaaatacgaagggggggcgtaacaaggggtaagggggaggcacgaaagggagaagaggggacgtatgggggccaaacgagggatgcaggaagagggacaggggaggagctataaggtgttaaagcggaaaagtggttttaaccaaaagcgggnnnnnnnnnnnnnnnnnnnncccgggggcaatgtagcacaaggaaccggggcagagagtggtgtgcgatgaaaaattagggggattatatagtagttgaagaaaagaaaatagcgaaaaganaaaaccacagaataggggcacaggcccggggagaaacaacaaccaaagtggggg

SEQ ID NO: 76371 - DNA, 440 bp, Arabidopsis thaliana landsberg
atctgccaagtattaggcatcaaaatgccgagagacggcccccgtccacagaatacgatgccggaagcatacgtgtgctggggacaaggatcgtggatgtctgtaatagctcaggttacggaatatgggctaggtagtgtgttgccaaatgtggggtgggttgcgtaccggcggggacacgatttggcggtgaaagagcgtaaagtgccgggccgtgatagtaatttagcgacaagtacgatagttatggctgagcaccagcagatggttaaaatgagaatttaagtcgatagcgggtggggtctacggtgtggagcacagcagagccggtaatcataccggtgtacgcgaagcggtacgtagtcagagggccacacgaatagtggacgatatgggccgtcgtgagaatcccaacaggaataagcagcgaacgtatagac

SEQ ID NO: 76372 - DNA, 236 bp, Arabidopsis thaliana landsberg
ggctgagaatgaacatatcaataacgcgtgttgtatgtttattattgggactacctctacaactgcctactaacgagcaggagccgatcttgaaaatgggacttaccttgagaaatatttgtgatctggagaaacgctctctatgacggatcgttcctacacccactgtataggggctccaaagagggtgagagccacctcgagcccggtccctataaactacctagggcttgcta

SEQ ID NO: 76373 - DNA, 605 bp, Arabidopsis thaliana landsberg
atatctctctcttctaagatatcttcttcttcacctctctatttatggatgattagatatggtacggaacggtcagtgacacacaaaacacactctagatataaaggattagatacgtaacatatcctttttttggttactagggtttcggaaatttggatatcaaattttaacatcaagcaaatcatcatccgtacgtactcattcatacttttgtaacaaaaaaaaaaacacaatctaagatatctatcaagatcttaagatatctacatttatagagatgtttcgttttccggtaagtcttggaggaggtccacgtgagaatctgaagccatcagatgagcagcatcaacgtgcggtggtggatgaggttgactttttccgatcagcggagaagagagatagggtttcacgtgaagaacaaaacattatcgccgatgagactcatagggttcatgtcaaaagggagaattcacgtgttgatgatcatgacgatcgttctactgatcacatcaatgtaagcagatggttaactcatcgcttttggtttctttgtttttttttattatctagaaggtcaagccaaaattctacatttccgagat

SEQ ID NO: 76374 - DNA, 557 bp, Arabidopsis thaliana landsberg
  unsure (1)..(557): unsure at all n locations
catcacaggacatcatggcattgcttgaattcaagattggcatttaacatgaccctacagggtttgtccttaattgatggaacgatgagtctattgacttcaatggttgtccttcttcatggaatggtattgtctgcaatggcggtaatgtggctggtgttgttttggataatttgggtttgactgctgatgctgatttcagtctgttctccaacttgacaaagcttgtcaagctatctatgtcaaacaattccctttctggtgtgttgccaaatgatttaggcagtttcaaaagcctccagttcctggatttatcagataatctgttctcttcttcattgcctaaagagattggtagatcagtaagcttgaggaatctttctttatctggtaacaacttttctggtgagattccagagtctatgggtggtttgatttcacttcagtcgttggatatgagtagcaactccttatctggacctttgccaaagtccttgacaaggctgaacgatctgctgtacttgaatctgtcttctaatggattcacggngaaaatg

SEQ ID NO: 76375 - DNA, 465 bp, Arabidopsis thaliana landsberg
gagacatctggttcgaattcgattcagatgatacatcaaccggttttgaattctttccggtttgaggagaatccgtttcctcctcctgctccttgtgaagagcagactggtaagaagagaaagatgagaggcagcattgcaacaccaacggtaccgaaagctaagaagatgcgtaaaccgaaagaagagagagatgttactaacaacaatgttcagcagcagcagcagcgtgtgaaaccggttaagaagagtgttgatcttgtgattaacggtgtgagtatggacatttctggtttacctgtaccggtttgtacttgtactggaactcctcaacaatgttaccgttggggttgcggcggttggcaatccgcttgttgtacgactaacatttcggtgtatccatttccgatgagtactaagcgacgcggtgcaaggattttgggtaggaagatgagtcaaggcgcg

SEQ ID NO: 76376 - DNA, 127 bp, Arabidopsis thaliana landsberg
tctaagaacttaagtctttctaattttatcccgccgaaatcattccggctcggagattctacttcagcaacgaggtaatgagttttctaagatttgacattggctgatctggtatctgatttaagag

SEQ ID NO: 76377 - DNA, 399 bp, Arabidopsis thaliana landsberg
tattgggattggtacacctgatacgtgtacatgctgcaggggcggtggtggttagcccaatagtgcaggcaacaatggtacccctgagggtgggttgtaaacgcgtgtagagtaaagcgagttcgggcactggtgctcaggaaataaacgagaaaagaccgagacgcgtacggtgtgttgcggtgcagtagcccacaggctacaccgacagggggggagatgttgatcttggtggcaatgacgggtacacgacgacgacgaattgacggtgtgagaacggtagtgcaagatgcatgttgcgcaaaaaccgtagcgggatgcaaggacgtgttgtagacggatagtatgaaaagtgaggtgatacagtcatacggatatatagtatatcagaagttagtg

SEQ ID NO: 76378 - DNA, 487 bp, Arabidopsis thaliana landsberg
  unsure (1)..(487): unsure at all n locations
acgtttaagacgttacaccgactactatcagtaccgnnnnnnnnnnnnnnnnnnnnnnnnnnnnnnnnacttatacgtagggacacccgtttggcctatagtggctaagcataatatcgtgtattatttaaatggccggggtcatcctcaagtactaagcggcgcgtacgtaattaaggtggtgttgacgttacggtgcagtggaccaaggtttgcagttacaagagtggagttgcaacgccatcggtaacgatggaaatcacgcgcccattaaaccgtgtgagaagcagacggtctttgtagtggggcgttaccaggcctaggtgtaaaccacaaacagtgcagtacccaaccaggcagtcagtaacagtacaacaccgacaatcaccaataaggaatcaaacaaccgccaaacccgtgaaacgtagtgcgtggttatggtatgtggtacaacaaacggcccccaccgggataaacgtttggaggg

SEQ ID NO: 76379 - DNA, 171 bp, Arabidopsis thaliana landsberg
ctctgaaattatttcaatattgaaccttggacatataagagttccgaatcttatctcttttgaaagaagatcttgggactcgttggggcccgctccatcccccttgctagtctttcgttattgggattgcctgtctctgttcttgtttgtagcgttgcccatggcgtcttt

SEQ ID NO: 76380 - DNA, 482 bp, Arabidopsis thaliana landsberg
  unsure (1)..(482): unsure at all n locations
atgtattaacacaagcatctacgtccaggagtgtttgtgtcgccacaacagaacactatcaagaattgttgccattaattcggggggagtgggactcccagacaggataaggcagtaacgtacggtgagtgacgaggataaatggggcctgtgtgcgggggtcgggattaaacgtggcgtggtacacagacacaacagcggggtactggggggcaccgtgcccttagagtgaaagatgaacaacgtaaaaagcgtggccgtccacgcgcgaactgcaaccaccaaccacgtggcccatgaacgttatgaaaccacgtcaagcaacggacgggctgcaaatgtagggccacaagaggcgtcatgaccgatgtgggcacccgaaaaccgcggaataaatagnnnnnnnnnnnnnnnnnnnnnnnnnnnnnnnnnnnnntatcgcggaccggttccgagcccacaaaaaggtgaaaatcacacag

SEQ ID NO: 76381 - DNA, 459 bp, Arabidopsis thaliana landsberg
  unsure (1)..(459): unsure at all n locations
nnnnnnnnnnnnnnnnnnnnnnnnnnnnnnnnnnnnnnnnnnnnnnnnnnnnnnnnnnnnnnnnnnnnnnnnnnnnnnnnnnnnnnnnnnnnnnnnnnnnnnnnnnnnnnnnnnnnnnnnnnnnnnnnnnnnnnnnnnnnnnnnnnnnnnnnnnnnnnnnnnnnnnnnnnnnnnnnnnnnnnnnnnnnnnnnnnnnnnnnnnnnnnnnnnnnnnnnnnnnnnnnnnnnnnnnnnnnnnnnnnnnnnnnnnnnnnnnnnnnnnnnnnnnnnnnnnnnnnnnnnnnnnnnnnnnnnnnnnnnnnnnnnnnnnnnnnnnnnnnnnnnnnnnnnnnnncccggccggtaaaaccttttcnccaagttttttaagggaaatttttttccaaagggggggggcccccaaattttgggggaaaaattttttaaaacccccaaaaaacccccccctttttttttttt

SEQ ID NO: 76382 - DNA, 453 bp, Arabidopsis thaliana landsberg
  unsure (1)..(453): unsure at all n locations
tggtgggttcggaatacaaagaggcgatgcggataaaacaaagtagcaaatgtgaaaccgagcaataacaggcgttaaagtgatggatatacaaatgcgcgaaatgatgacaaaaaccgggtagcgtaactgcatacctaaaagttatgggtggcgggaggggtggagggcgagaacgttgtaaattctggtagaccgactagtacagtacaacgaatggggctaatacagattggtataggagtttgaatagcgggaggatagggtggatatctagagggtgtaaaagtgggacaagggcgcgaatgcgtacgtgttgtgggtaagcaagtgcgtggtaagagagtgacgtggaggtaatcaaagcgggtacgagagacgggtagagaggtatangttagatagcgcgataacggctgaaaccgcgttggcaaacagtggccaaagtgtagt

SEQ ID NO: 76383 - DNA, 538 bp, Arabidopsis thaliana landsberg
  unsure (1)..(538): unsure at all n locations
tctgcccgacgcccaaagccggagcacgccaggccttgagtgagtggagagaggacgtaacagagtggcctggggttagcgagccgcggcggagtttgcagatatgtgtgtaagagaagcatgtgacttaggcagtgtgcaaaggggtgccatcgccacgcggacgtgattagaggacaatagccatggatagaggnnnnnnnnnnnnnnnnnnnnacgcgcaggacgtttagtgagtagaaaccgaagggcccgagaggaggagtgtgagtgaagattaacggcattcagtggtgaaaggaagggtcacggattcgcgggtaggcggttgggtaaaggtaagcaacgcacgacgtcgaaaggttataaggggcaaagaccaacaatcgacaattaaacggcgggtcggcggtgaaagtgggggtatgcgagagtgcgaacaactatagcttggacgggatgtgtaggtggggggagggaacgtaaaaggtagtaaaccagaataaagaaaaaacagggcacacagccaacaacaatg

SEQ ID NO: 76384 - DNA, 528 bp, Arabidopsis thaliana landsberg
gagtgcggctcccgtcaccatgttggtgttggttttggtggtaaatgttcaggtcgagggggtagacacgaaagtgtgcagtaatcagacaataacagttagtggctagtagagagaacccagtttggccggtccactcaaaaactaagcgtatgtcagtaggagtaaatgcatgctaagtgggggatgcgttcgcaccgagtttattaaactcttggctatggtgaagaccttgcaatgacagttgaagtaggtgtaatgaagttagaacaacgcagttgagggggggtagtcccgatccgcgacacattaaaccgtggcagtcattgagttcgtcaataatgtaaaacagaaacaacgagtcgcaagggtggtacatgtcggttacgtgtcaacgattagggcgataaagaacaagttttggtcggatagcagggtggtggtagagacagacagagaccagtgaccccgtaaggatggagaacgataggggcggtaatactttggttgagtgcagacaaaaccagt

SEQ ID NO: 76385 - DNA, 466 bp, Arabidopsis thaliana landsberg
ggggcggggtattaagtattagtggaatggcacaacacacagatcaggtggggaccacggggacgtggtcgtgggcgttggaggcggctgtaagaattgtaaaacaggggataagagaatacacgtatatggcctaagcggatcacatatatgaggagtagtaataaaggggttgaacatagtagggcacgggcgtagcgtggtgccggtaccgtgccgatgttaataagaaattgatttggtaaaggagacgagggagagagagatttaacgggtagtcgagtgaaattaagagggactaaaaggaacgtaattatgaatgcgaaacgtattaaaaaaatgaaaattataaaagttaaaggattagcaaagtcaatgcgaaagagaggttccagagagataggcatataaattcaacagaattaaatgaggggtacggagaaggtagtgtctcggagtagtgggc

SEQ ID NO: 76386 - DNA, 139 bp, Arabidopsis thaliana landsberg
tacaggaagggagccttggttatccctacagcatcttatacaatccaaagctactagagaagcttcacactggggcagtttaatttaaaaagcagccctccccacccccaaaataaatattaaaaataaacataaatat

SEQ ID NO: 76387 - DNA, 527 bp, Arabidopsis thaliana landsberg
  unsure (1)..(527): unsure at all n locations
tgaaagctggatacggacagcaaatgagttacagaaacttacctcaaaaacgactctggcagccgcaaggctgggtgtaaacatcttgcggggaatatattagctgtggatacctcaaactacattgcagataaacgataaacctcaatttcggggactacgagcaggaattgtaagatccgagtgcaacgaaaacgaatagtatgcgggaaacatacgacgtgaacgaacaggggccacagcacatacgacgtgatagtatcgaacgtctacatgtaaggaggtagggtatcgggtctaaaccgggagatcttgagtcgaggtgggtgcataggagtacggcggggacggttggagggggggcgacataaggagcagcggtacacgatgccggagagtccccgatgccagaggattggcaggaggacngcngtatcgcgcgtaggccagacngaggtgacggttaggacccagagaggtccaccagaggcgcttgccatagtgaaaagatccaagaggagggaaac

SEQ ID NO: 76388 - DNA, 287 bp, Arabidopsis thaliana landsberg
  unsure (1)..(287): unsure at all n locations
nnnnnnnnnnnnnnnnnnnnnnnnnnnnnnnnnnnnnnnnnnnnnnnnnnnnnnnnnnnnnnnnnnnnnnnnnnnnnnnnnnnnnnnnnnnnnnnnnnnnnnnnnnnnnnnnnnnnnnnnnnnnnnnnnnnnnnnnnnnnnnnnnnnnnnnnnnnnnnnnagtcgaaactggcaaaacagatctaccggactacctataaggcacttaatgaaaatggatacgcctgcatcaccataatcaatgaattagccaaccctcagagagaggcgaaacccgaatcgtaccc

SEQ ID NO: 76389 - DNA, 550 bp, Arabidopsis thaliana landsberg
  unsure (1)..(550): unsure at all n locations
cnnnnnnnnnnnnnnnnnnnnnnnnnnnnnnnnnnnnnnnnnnnnnnnnnnnnnnnnnnnnnnnnnnnnnnnnnnnnnnnnnnnnnnnnnnnnnnnnnnnnnnnnnnnnnnnnnnnnnnnnnnnnnnnnnnnnnnnnnnnnnnnnnnnnnnnnnnnnnnnnnnnnnnnnnnnnnnnnnnnnnnnnnnnnnnnnnnnnnnnnnnnnnnnnnnnnnnnnnnnnnnnnnnnnnnnnnnnnnnnnnnnnnnnnnnnnnnnnnnnnnnnnnnnnnnnnnnnnnnnnnnnnnnnnnnnnnnnnnnnnnnnnnnnnnnnnnnnnnnnnnnnnnnnnnnnnnnnnnnnnnnnnnnnnnnnnnnnnnnnnnnnnnnnnnnnnnnnnnnnnnnnnnnnnnnnnnnnnncttcggccgtttaaaaatactatatgctaaattaaaaaagccatctacataatacatttctactgtaaatagcacatatgcagcgcctgtctacactttttctccgataaagccagacctatggctattaatctagatataccacctactgt

SEQ ID NO: 76390 - DNA, 557 bp, Arabidopsis thaliana landsberg
  unsure (1)..(557): unsure at all n locations
acccgcactcacgccaattcaaatcgtccgttttgtatgcaatagcattccagacatgttacacccatatcccatgatcctgcatgggtccggggcgatgcatcttcaatggctcgcccgtcccacggtgcgctcaggcaatgcaacgccgctgtttttctcaacccattccgctgcagctattaaaccaggatcgtcgaagcggcgacccgcaagttgcacacctatggtgcgatggtctcgtgtgtatccggcgtgtacactaatcgcaggctgctcggagaagttatacggtacggtgaaggcaatgtgctgcatcggaagacgtggatccttgaagggcatcggccactccgccgggaaggccgccatcggcgcaacaggcgacaatacgaagtcatacgggagcgttgcagcgactgtgacctgccgcatccgctggatcgactgataacagcggagtacaacagaaccagngatgtccgcgccgcagttgcaccattcgacgatgtatggcagcaccttgcgcttgctcgcgacaggcaacgcagcgaagt

SEQ ID NO: 76391 - DNA, 284 bp, Arabidopsis thaliana landsberg
  unsure (1)..(284): unsure at all n locations
aataaaaaaaaagctataatgactaaaatctttaatatcaaagaagcgtttgtcctttgatccgataagtttttattaacataccctccctcccacccattaaagtttataagatagaactgaaannnnnnnnnnnnnnnnnnnnnnnnnnnnnnnnnnnnnnnnnnnnnnnnnnnnnnnnnnnnnnnnnnnnnnnnnnnnnnnnnnnnnnnnnnnnnnnnnnnnnnnnnnnnnnnnnnnnnnnnnnnnnnnnnnnnnnnnnnnnnnnnnnnnnnnnnnntcat

SEQ ID NO: 76392 - DNA, 559 bp, Arabidopsis thaliana landsberg
actattgttgagaactacctgctaagctgttcatgtctatttgttgttctgtacttcttttcaacaccttaaaaaccccgacattaaggcttttaccagggcggattacaaaaaacaatccttcccaaggaatatgggaattgtgaagggaaggtccagagctggtctctttattggattcttgttcattgtaaatgccgggctttgtgtgtctgctcaagaaagcagcaatgaggagagaacggtctgtttaaatggtttctgtctttgttcttatgttccgaccttgttttgttatgtacttatgtctgctcaaaattgtgactgatgaatgaaacgctttttgttttatttctgattgctgcagatatttgcagtgcacttaggcgtgaggcgacatgatgattctgagatggtctctgaatcacaccagaggatgttggaatcggttttcgaaaggtatatgacaaaaaccgagttcttgatttcgcttttctgatgatgatgtctcatgtttttcgagctaatgattttgtattgacgatgaaacccggaatct

SEQ ID NO: 76393 - DNA, 137 bp, Arabidopsis thaliana landsberg
cctatctttattgtctttttttatttggtatttgcatggaacggggacagtgatatccccgcgcggtccgcaaaagggagaggatttttcaacccatcacgcccctgcaggaaccaacaaagtccaaccccctaacc

SEQ ID NO: 76394 - DNA, 524 bp, Arabidopsis thaliana landsberg
  unsure (1)..(524): unsure at all n locations
ctgccgactaccgcccaaatgttccaggttttagtcttctcccatcaacgcgaaacacttacttactgaaaatcgacacctgaggagctacggccatgagcaacttcaaatacaaccgcctgaacaaagacgacgcnnnnnnnnnnnnnnnnnnnnnnnnnnnnnnnnnnnnnnnnnnnnnnnnnnnnnnnnnnnnnnnnnnnnnnnnnnnnnnnnnnntggccctggccgatcttgccaagttcttcaacctgccgaccatcctcaccaccagcttcgagcaaggccccaacggcccgctggtgcctgaactgaaagcactgttcccggatgccccgtacatcgcccgcccaggccagatcaacgcctgggacaacgaagacttcgtcaaggcggtgaaggccaccggcaagaagcagctgatcatcgctggtgtagtgaccgaagtgtgcgtggccttcccggcctggcagccctggaagaagagttcgatgtgttcgtggtcaccgatgcttncggcacct

SEQ ID NO: 76395 - DNA, 494 bp, Arabidopsis thaliana landsberg
gccaaattcgcggcatgaccgctcagatcaagctccagatgcgcatagcgctcttccatcgatcccgtcatcggccacctcaagggagaccatggcatgggcagtaaccatctcgcccattcgaaaggcgatgccgaatacgccatcctcgccgccatcggctttaacttcagacgcattctcgcatggctctcacttttgctggtaattttgagggcccgcatccatccgcaaagccgaccaaatcaatcaccgcaaatctgctaaccccagttcttcacgggcgactacgacgcgcgccggccgggcgaatatccgacgccgtttgagccaacagaatgggtccgaatagctgcaacatgctttagtgcccatggctccgatcagatgggcaggccgagcttgctgcgggcctggcagatcagctcggccgtgactttgtcggccgggccgctgatgtctatgaagaacacgtcccgttctgcagacggatc

SEQ ID NO: 76396 - DNA, 398 bp, Arabidopsis thaliana landsberg
actatggagggaactgttcagtggctcgctgttgagtgaatttatgtttgaggttacagtgctggtgcagcgggttcgttaaacactttaatttttacacgagctatcattcttttgtcgggaccaacagactcagtttgctaatatggaggcacagacgtgctataaactacatccgatgatccctggtatgaatagtctattgcagaaactacgacggatacacatcgttgttactcccacaacaagcaagcttgatatgagcctgcatactaagcataagcaccattaacacaacaaatctaataattgctgaaatataaacgttgcctatgataaactaaagtcctagaacgtgcatgacactaaatagttccagccccttagtacccacaatg

SEQ ID NO: 76397 - DNA, 459 bp, Arabidopsis thaliana landsberg
cggttatgcctatagcggaggacgctgcggaacccaaggccgcaaacacgcccagggtcagaaaaatgaagcgcccgccgattgcggtgattgcggttgtaaccatagtggttctggcgctggtcgggctggtgagctggcggctgctgtcgaagccaggcggcactgtgcccggcaccgaaatggcgacgacaacggcgccccccgtcgccgaggccaaggggccgctggcggtctatgccaagggcgcgctggccaagctggtaacgaacgaggcgcctgtcacaatagcggatatcagctttatcgaccgcaaccagaaaccggtcaagctcagcgatttcaagggccaggtcgtggtgctgaatgtctgggcgacgtggtgcgcgccctgccggttcgagatgccgaccctggccaagcttcaggaacactatgccggcaagggcgtgaaagtgt

SEQ ID NO: 76398 - DNA, 128 bp, Arabidopsis thaliana landsberg
ggagacaatatggaatgatgggagagtaaatgcagcgtcatggggggtggagagcccaccagctgggggggttgtggaatggaacgaggatgactgcttgcctggaccacatgtgctacatgtgtggc

SEQ ID NO: 76399 - DNA, 471 bp, Arabidopsis thaliana landsberg
  unsure (1)..(471): unsure at all n locations
agaactagaatcgttccaaaataattgttcaggagggagcggttacggaggactgacggagtgcaaagaatacaatcatatacatacggtaagggaagatggttgataagtaccannnnnnnnnnnnnnnnnnnnnnnnnnnnnnnnnnnnnnnnnnnnnnnnnnnnntacataggtctagtgcgccaacacaaatgagcggcggtgagacagcatgctgcaacaataaataaaccggagggacgtctaatgcaagcagttaaacggaataaaggttagttatcggaaacgtgatacgttaagacaagggcgagtcatgcgattcgcgatattagaacgtcatggtggttgagctgcgtaatggttaacgtttctaaaccagcaccaagattaattatatgagttttggcttgagtaaataatgcattcgtgtgtcacgactttcaggaggtagtgcatgaggagtattat

SEQ ID NO: 76400 - DNA, 401 bp, Arabidopsis thaliana landsberg
ggtgcgaatggtgggatgctttatcgggtgggccgtgggctgatactggttggagtgctaagggtttccgtgattcgttatccgggttggcttgcaacgggtgggagtagttggtttaccactacaggtctgagtattactggtgcgtggagcggtatgcgtgggcatgggagtgcccaggggctggtcggggctggcatacataatgttggtgcagcttgtggtttggcagggtggacgttgtataagggggatatggcggggtggcaccgaaataaaacaggaacgagcacaaaatgcagtacgtcatgtccatataagaatcgtaaacagtaaggaaaaatgaatgggcagaaaggtaaacagatcccaatttagggcagatgctactagtgtagaga

SEQ ID NO: 76401 - DNA, 472 bp, Arabidopsis thaliana landsberg
  unsure (1)..(472): unsure at all n locations
acatcctatgggtttattattcatgacagaaattcttttttattttttaaatatatgaaaaaaaaggggccttgttgggaggctattctgccatcgtatgcctggcactgtacgcaggtaccgcattctcccagcaggtagacctctttaaaatgcaggacagcgccaatgccgtaaaaacgccgcccgccaaagaccccgtgatcaatactttttattctacaagacttgtcaacagccataccgtggagatcaccggctagggcagtatggatttacgcatcagtcaccggtttgcaccgctgaataccggcctctacaatatgtttggtctggatgcggcttctatgcgcatgggcctcgattttggccttgcggataacctgatggtgggcatcggccgctccactatttacaaggagctggacggctatataaaataccgnctnctgcgccagcgtgagaatggtac

SEQ ID NO: 76402 - DNA, 395 bp, Arabidopsis thaliana landsberg
gacagaacaggcaggctaagatcgagagtgggtgccgcgttgcatgtgatcgtgcgagcgaagatttgcttggagtggtaccagacgtagcgacgaacgagccgatagtgtacgatggcgtaaacgtagattgatcgatgtaccagtgtcaacacgttggcttagactcgatacacaaactaacacatgccgactgtgacacgttcccccagtggtattgggatggagacgtcaaccctagcggcatcaccacacgtacgaggatgaagcatctggtgttgggagttaggggttggactgtctagctgagcagtggagtggctgaagtacggagcagtccaagtcggttggcattagaggccgtggagttagttgttgcgaattttgattaatgg

SEQ ID NO: 76403 - DNA, 580 bp, Arabidopsis thaliana landsberg
  unsure (1)..(580): unsure at all n locations
ccagttccggcagggctctgttctcgtaacggccatagattgtgggctcggttgccatgaccggcagcgccaacaacgacaggagggcaagcagaggtttcacaggcaagcttccttgaggagggtcagtgcttagactgcactggcaggataggttcgctgtcacaagcctaaccaacataatgtgaaacatttgtcctcgccgcagggcactggaaatttggcgtaggccactgccctgcttatcattgccaaccgtttatctcccacaacaagagtctctttatgcgtcgcctgctgaccggcatcctcactaccaccctgctgctgctcaacaccctggtgttgatctgcccgctgctggtcttcgccctgctcaaactggtgctgccggggcgtgggcgtgactatgcctcatgggcggtgatgtgggtggccgagacctggtcggagatcgacaaggctatctttgccctgtgcattcctacccagtgggnnnnnnnnnnnnnnnnnnnnnnnnnnnaggacacttttgacctggccgtcaacaaccaccagacctggggcgatatttcggagc

SEQ ID NO: 76404 - DNA, 464 bp, Arabidopsis thaliana landsberg
gagaagtgccaaactactaactataggttttgtccactttctttttttattttttattcctcctttttgtatttgtcttaatcagtactactcgaaatacactttgttcactacttgtaaaaactcttaacatacttgaataggatctgttttctataattaacagaaacattacaaagaaccaaatgcataatggtatgcaagaaaacaaaccatatgagtcattgtttaaattgactctccttgtacagtgaaacttctagctaattactttttttggtgactgaaccaagctaaatctaatggaacaagtgttattcaaaataaataaattgatagctactaacaagagcgttgagaacgttacaattaatatgttaaataatcagattttaaattttgtgcagtctccaaaacttttctgctaacactgtacatggatctttgattttctttgatcaaag

SEQ ID NO: 76405 - DNA, 363 bp, Arabidopsis thaliana landsberg
  unsure (1)..(363): unsure at all n locations
taaacagtgctactgccacaaggaaccggatgacttaacaccaatcgccagaatacacgggcgagtctgcacctgccacttagattatgttggcgacacgtggtgagttgtatnnnnnnnnnnnnnnnnnnnnnnngtgcgcatagtgtggtgcaagtgggttagaaagcaaccgcaataaaccacgttaggcaggcaggtaccacgttagaatccgagagacgacaaacgttgaaacaatccgacgtagccgacgtgagacgacaatgtgcatcataagtttgggggtacgggagtgcaggagacgagnnnnnnnnnnnnnnnnnnnnnnnnnnnnnnnnnnnnnnnnnnnnnnnnnnnnna

SEQ ID NO: 76406 - DNA, 146 bp, Arabidopsis thaliana landsberg
gactttactgatccatgttgctgtgattggcttacttaccttagcggagaggggagatcggctagcagtacttatttgcttggagactgctccttctccgaaccagctcaccggacggttaacgggttggaaccgtgcgctttgag

SEQ ID NO: 76407 - DNA, 280 bp, Arabidopsis thaliana landsberg
agagcacaaaatctccggcttcgaaagggcggtcaaaaaatatgacgaagtaattgaaaagatccccaagaatattttgcgccggcagtgctaccgcgataccgccaattcctaaacctgtaatgatggggttaacattgtaattcagattggcgagcaggaacacaattcctattacccaaattaccatggtaatgatcagcatcagcccaccgagctggttgattttatcttcacctcgatcctgtctgcgaatcttggtctgcaacaacattaaaat

SEQ ID NO: 76408 - DNA, 443 bp, Arabidopsis thaliana landsberg
  unsure (1)..(443): unsure at all n locations
gcaggacnnnnnnnnnnnnnnnnnnnnnnnnnnnnagcgtgaaggcgccgccgttgacgcacttttggaagttgccgttggcggcagacggtgcgaacgtcccggacgattttgtaccggcatcgtagtcagaagcatcgaacccgacggtcagcgtgtccgcaacgtcggctttcagcgtgtccgcgtcataggcctgcacgtccgtaccgatgaccaggccaagattcgtgcgagcgccagacgcatcgcttgctccggtcccgccatccgcgacgggaacgtcggtgccgcctgctcggaagatacggttgccttcaaccgataggtctcccgcactcagtcgggccagtgttgtatcgctttcatggccaacattaacggcggtgaattgcgggctgtctcctgtgcccacgccgagatttgttcgcgccgtcgtagca

SEQ ID NO: 76409 - DNA, 658 bp, Arabidopsis thaliana landsberg
taattgatcatgaataaaaatatacatattttatatatatcatttaagatctactgaactttaaatatgagataaatgttttaacattcttggagaactaatattttataatttaagttttccccaatcttggtaatcatttcagaatgtcacttgactagcttagtcatatgttcaccatccaactagatagcctaattatcactgttcattgattaaatatatagttatcgactattcaactagtatagtgtcttccaatcctaaaaagtttaaaatttgctttcgtaaaaacattttgtggattcacgagtatattttaggtttttccttaattatatattactcagagaatggctcgaatatgaatccattttgatggtaaataatcaccaagaattagtagtcgattgagttcaagttggttagaccttcaattaatacttgactaagaaacaaattaattattaacttaatcaaaataggaataaattattatttttaaaaacgtatagcaattgatggagatagagtagagaaggtgaaaggaagtgttccgcgagaacatgaaaagttgtctgcttacacatataatgctgacaaaagctcatttgctgtcttaattaaaatggaagatgactttatcaggttttgttct

SEQ ID NO: 76410 - DNA, 682 bp, Arabidopsis thaliana landsberg
agctccacataatatttgcatgggatagaattttgtcgtcacctttgacgtaagctttgtctcgctaccattatgaatccaatggaccattttactttattcgttttaacaaaatgcctaattatcatcaatgttattttttgttcttatgtgccatgccttttatataaaactatgttgtacataatccaggactaaaaggggatagttccaaaatatttgaaggaaaataaaaacgaatattttcttacagaacagtatttgaaaaaaaatagtacatgaaacaaagaaacatcactatttacgtatagtagtatttttaataatcttcattattaacaatgtactattttgaaactgatagtaaatatgtatattctaaacagtgccttctattgtttatatgaacattgtttacgttacttcgtaaaaacattgttcacaaatcacaattaattattaaattttttgaaacaacattccataatattttcatgtcatagctgatttttttttaaaatgtttagtttcattagtattctgttaaatgaagaaaaaaaatgcaaactgtagtataaaatataacaagtccccaaccaggcattcattagtcattcattggattgtcctatatcgaattgaaatcgtacattgacttcttgaggttcgcgcgaaaaaaaaa

SEQ ID NO: 76411 - DNA, 494 bp, Arabidopsis thaliana landsberg
tagatgtagtagaagtactagttgtagtagaatcttcatcagcagaaacagaagagaaggcttcagctcctagttgggcacttaaatcagcctttaagaattcttcaatagaagcatccaaatcagcatcagaagaagcagaagaaaaggcttcagcagcttcagaagaatcaacatcagcattaacttcagagaaaactccagcagcaatagaatcatctttttgggaatcttcatcttcagccaattcatcagcacttccaccagcaaaggccacagctccaccaaaactaaattgggactgttggctttcagcataatcatcagtgaatccagcagcctctaaagcattctcttgttgggataattcaccataatgatcaattccatcatcgttgagagattcaaataaagaaccacttaaaccaactttagaagaaccaccattagtgttgggagtagaagaaggaggagaagaaggagttggggttggt

SEQ ID NO: 76412 - DNA, 587 bp, Arabidopsis thaliana landsberg
ctgtccacagcgctcaccggaggttacgccgatagagcacgcttcgaacttacctccatgtgccattgaatttttcagttcagccccagtcagataagtctgaaccagatacgaaccgcctaaagcggggcgaatagcattcatgttcaacttcacggcggcgaagtcctggtgttttcccgctcccttatcgttgaccgaaccgactactgttccgatctggaggtagctattacctttacctttccactccaccacgcttccagcgctgccgcaatgtcctgcggtgagaaagccgactccaccatctttgaagtccacgtatggacctacagagcagccttggtttccaattttgatgaggtcaccaggggtgatacctggaatgctggctgaagcgtacggggcggagacgagagcaccgaggacgccagcaaccaccgccgaagcggcgaggagccgtgccattggggtggttctggcagacatgtgtttctctttctggtgtggtctggtatgcgggctttccgcatatccaacataactgtatttagaaaaatgtccgtttgtctagttgatgttgggga

SEQ ID NO: 76413 - DNA, 579 bp, Arabidopsis thaliana landsberg
caacctacagctcgccgatctattttgcgaaagtttcgatcgttactttcgcggtcacgacgcggtcgccaatctgcaagctatccgcgacgttctggcccgagatcacgctcccgacccacgtgtaacgaccgtcgaggtgaggcgcgcgcgagtgcatgatgaaccactgtgagccggcgctatctcgcccggcgtcggctcatgcccacaccgacctgcacgaaccccggtccatcgagaccgctcgccggttcggccggccccgtgaagcccggccctccccaacccgactgcgtcggatcgccgccctggacgacgaagttcgggacgacgcggtgaaactcgatgttgttgtagaagccgcgctgcgtgagcgaagcaatggtggcgacggcccacggtgcgacatccggccgaagctcgatgtcgatgtccccgcgcgacgtcacgaggtgccagacgacgtgcttgccgatcacggtcgtcacgtcgaccggcggcggcggtgcgatgcggggcttcgcgtcgacggtctcgccgagctcgcggaggcactcgatggcagtcttcgcgctg

SEQ ID NO: 76414 - DNA, 493 bp, Arabidopsis thaliana landsberg
taagtagatgaaactgcctgtttatgctcattggtgccctaatattcattagacccctatttctcttttagagaagcaattaaaatgaagtgtaaacataagaatatgtataacaaggccaaattagcttaattctcttaaaggtataacagaaagcttgcttgccattttttatctgtctttagatgaacacctgtacctaggaaaagcaatatgaagatacctgaaaggcaacctaaatatctctgcaagctaggaataatgcaattcccagaaacagactctagctggtattgaaataagtattcttggccttacaatgttgaggaattaaatttattttcatattagataattttattgaaagcaatcatactttttgtgcctttaacagaaacagagtacaatggtgattgccaagatcaacacagatgaagtttacacgataaaatgacatttacaaactataaagggtacagaggattactatcta

SEQ ID NO: 76415 - DNA, 717 bp, Arabidopsis thaliana landsberg
ccccccccccccctttgaacccgtgaggcccagtgctctaaagaacactgttgaagcaggttccaaactccctaaagctgacgaaatttcagataatgggacttgtgaggctaatcagaaagctgatgactctgcagagtctattgaccgtgtcaccaaagctgatgattccttaccaattattaagcaaggcagagaaagttgtttaccagagcctggcccccttcttcggtgtccttatctggatgagatctctgattctagcactaggtacatcatcaaaatctattcttcatctatttggtcgcataacaagcaatctcttaacctgtctattacttaaatatgtgtaaaaatatacatcgaaaatatcacccaatctagttgaagatttttggatcgtctttcaccacactttatggcctaaccgtactgataactttacgataatcttgttgatcgtgtttgcaaagtattacctgtatattgaaagaatcctgtgagccgaaatcttaattattgtgtattagtggttagagaaattttcgtattgctttatgagggtttgcatttttttttgtctttcatacttctgcaaagcatataacttgctttttgcagctttcaggctgctccatgtgagaggaggcattctaggaccagtgcagatgatactgagacagatgaagcatccttttctgggcaagaagattcaag

SEQ ID NO: 76416 - DNA, 385 bp, Arabidopsis thaliana landsberg
  unsure (1)..(385): unsure at all n locations
nnnnnnnnnnnnnnnnnnnnnnnnnnnnnnnnnnnnnnnnnnnnnnnnnnnnnnnnnnnnnnnnnnnnnnnnnnnnnnnnnnnnnnnnnnnnnnnnnnnnnnnnnnnnnnnnnnnnnnnnnnnnnnnnnnnnnnnnnnnnnnnnnnnnnnnnnnnnnnnnnnnnnnnnnnnnnnnnnnnnnnnnnnnnnnnnnnnnnnnnnnnnnnnnnnnnnnnnnnnnnnnnnnnnnnnnnnnnnnnnnnnnnnnnnnnnnnnnnnnnnnnnnnnnnnnaaccgatataccttccaccgcaaacaagaggtgggccgggactcatcggtgtctgggatactccatcacggggggctggtcatgcctatgtcacaggagagctttcatcatatg

SEQ ID NO: 76417 - DNA, 196 bp, Arabidopsis thaliana landsberg
gtactttttgtccctcagcaaacacctccttcagttacttaacaccctttgttctttggtaggggcctgtaccttaatacaacacgcaacataaatgcccattaataggtaagcttacctcttgcgaacgtttagccacttgtaatataccttaaacgcaggttattttaccttaagcacatgggggtaaagccta

SEQ ID NO: 76418 - DNA, 114 bp, Arabidopsis thaliana landsberg
acctaatcttcaactacaaaaatttaaatatgaaaaactaatttcaccgataatattctatggcgctgcataatgaataggtcacatataataatctatctatgacttttattg

SEQ ID NO: 76419 - DNA, 538 bp, Arabidopsis thaliana landsberg
  unsure (1)..(538): unsure at all n locations
aggttgaaactgtacagactgacgcatcgcaaaccggcagcgagccacgaccagatgagtacttaaaaattcgtaactaatagtggataacagggagaaagcgtgtatagcgcgacgatggaagacgtataagggcatgatataaattgtgattgatatgaagcgactaaggagagtagcggagagctgtggaacgagacgagcgagaataatagggtaggtgcgaaaagagtagtagggagagtaaagggagcagagagaaaagagtaggagtaggggaaaagaatatgaaaagaagtagcgtaaggttggagaagtggtagagcaaatgcgtacgaagttggccgcggttaaacaggagcagcaggagacacacgtgggcagggagccagggttagtggcgtaaaaaagcctgnggagaaagccagacactgggtggacggngttggaacagagatataataccggatagagagaaggacaggggcgtgaaaacaaagacggagacgaaaatgcgaaaaatgatgatagatgaggg

SEQ ID NO: 76420 - DNA, 606 bp, Arabidopsis thaliana landsberg
gagcacctcggtgcggatatcggaatcgccgcgctcggcgagcgagcgaacgatcagtttagacgggttggtggtgtactcacgaaacggcccgaacccttgcacaacagcgaacacctcggtatacctcccttgcggttgccagcaccgtagcatcttgttgaacgatcctgcgatacctaagttggaagagatgtagatttaacacttgagcgacccgggtctgggaactaccttttgcggaaactagcttttccccgacggctaggtttcggtgtgcggctggctttcgacgaaaggacaggcagtggcaggtatcagcgatgagatggctgccgcactgagccgtgagcggcccgcgctgacgcactccagcacggccgggcgggtcaccgacatcttgcgcacgcacatcatcgagggactgttcccgccgggcacccggctgtcggaggaggccatcgggcgcgctctcggcgtgtcacggaacaccctgcgcgaggcgttcgccctgctgtgccacgagcggctggcgatccaccacatgaaccgcggtatcttcgtgccgacgctgacccggaagacgtttcgagatctacacggtgc

SEQ ID NO: 76421 - DNA, 562 bp, Arabidopsis thaliana landsberg
gatcacatgtgctggtggtcaccgcaacactcgcggtgcgcaacttgttcactttagtcccgtacgattcccgcggtggtcccgtcatctcctgacgtatcgccggccttgccggcattcccttttttgttccggttgtgcgcccccgttgcggttgcgcgcgccgtacgtcatctggagatcacatgaaacgcaagagatatgcatgggccgtcatggccgctgcagtgcatgccgcgaccggccatgcgcaagtcaacaataccaatgcagcaccggcgacactgccggaagtggtcgtcaccggcaatccgctgggcagtgaactgttcgaactcgcggtgccggtttcggcgctgggcaggcagcagttgttcctgcagcgcaaatcgactctgggcgaaacactgcatgaactgcccggcgtgagttccaccagcttcggccccaatgccagccgtgcggtgatccgcagcctcgatggcgaccgcgtacgcatcctgcagaacggcgcatgcacactcgatgcatcggcgctgagttatgaccatgcggtcagcat

SEQ ID NO: 76422 - DNA, 543 bp, Arabidopsis thaliana landsberg
aaatttagaactgatgtgctttatttcttaccgagtacataatttaatttcaaacagatcaacttcaccttttggccgggcgattcagcctatccgtgacgatcattgtcttaagcgttgcaagccaacatctgcactcattccattcagagctcgacatatgcccctgcacaccagagttaacaaataacagacaaaactctatcctatattcaacatttataaatacgatcacgccagattactagaagattcacaaatacaccactttttacctgtatctataacgctgcaccaaaagcacgttcgtccagagcttgacagatctgactgacttcttaagcaccttacttgagatgtccccattatttagtttcgaaaacctagctcctagctatcttgagcaattatcttctgactgacgctacaaggcaagagcatctcttggataacctcttgatggttcatatgtctctgataatagccttgataatgaagccacaatacgtttctgctgggctggatcattacataacatcatga

SEQ ID NO: 76423 - DNA, 555 bp, Arabidopsis thaliana landsberg
ctttcgaatcagtgctgcatttgacatgttcaaaacatgattctactttttattgactattgaggtcgtgtcgtgttatgacatatgatttcgttggaaaactgtaaatacactaaagattagagattcgtagtttcatttattaataggtctaggggagttaaataagtttttgttttatatggtttttctaaactcataaaacccgaaatacagaatgaattaagtcaaggattaaagcaaatgattttgattgtaaatgactacatcacatgtagctttctagacacgtaaagtcaaataaatacaaataaattagatcacgacgtgagcaatttccttatccgactgtatttaaacgtctcaacaaactgacccgccaaaataatcataaataaatttccataattcgaattatataaacttaataacataaacaattatccttccttaatcctattttgtttttacttgattcttcattctcagaaatcttgaccatgaaggacgatcgtcgtcttcctcacaaacgcgacgcctttcattcttgaaacc

SEQ ID NO: 76424 - DNA, 100 bp, Arabidopsis thaliana landsberg
gaaagaaagagagcaagaacagaagagacaacatttgactttgaaagagaaacgagagaaaagacgggagcgcgagaagacaagcacaacgacgggaaag

SEQ ID NO: 76425 - DNA, 331 bp, Arabidopsis thaliana landsberg
atgtctatgctttttcacatgggaatatgtccacacaaacattcccaaaaatacctttattgatgcctttaaatgtcagagaaagaacagattgatgtctttaaataaaacataacacgctttatcactcagaagtgtaaattttgctgtgtcacagaaaaatctgcttcgtatttaatagattatccaaggaaacttgaaaacaaaggaaaaacctcggttgaagaatcgatgagtctcacagaaaaatgcaataaaaaactcacaacacattttgtttatgaaagatatactggttttgatgttacattttaatacgtttgatttatat

SEQ ID NO: 76426 - DNA, 563 bp, Arabidopsis thaliana landsberg
  unsure (1)..(563): unsure at all n locations
atgttggacacgcacgcgtcctatcagagcgttgcggcccggccaatcgcaccatgcagattgctgtcattcaattatttgatctttttcgagtgaccggatgcaatcacgcgccgtcgcactgcatcacacgaattgacatccccatcacaaactatcgttttccgatcgnnnnnnnnnnnnnnnnnnnnnnnnnnnnnnnnnnnnnnnnnnnnnnnnnnnnnttctccgtcatcatccgcgaaccgaaaatccgcattccggcgatcacgctggttgcgctcgccttcacctatgcctcgacgctgccctatcagtcgatcatcggcattaacgagctcggcatgagcgacggtgcctattcggcgctggtgttcttctcggcgcttgcgaatgtggcgaccagcctgacgctggggatatggtcggaccggctgggagaccggcggccgctggtgctgatgctttcggtctgcggcatgatcggcttcggctcggtcttcatctttcacacggcgccggtcttcgttgtctgcgtgctgctgctgatcccgatgagcaac

SEQ ID NO: 76427 - DNA, 524 bp, Arabidopsis thaliana landsberg
ccgatttttccggctatcccgattgccgcaacgacacgctgcaagccatgcaaaaagtcctgcaactcggtgtcgaacggccgtttgaaatccataccccgttgatgtggatcgacaaagcgcagacctgggcgctttcgcaagaactgggcggcgagccgctggtcgacctgatcctggaggaaaccaccacatgctataagggcgagcgtgtggagcgccatgtctgggggtatggctgcggggaatgtccggcctgccagttgcgcaagaccgggttcgagcattttatcgaaaatgcccagccggcggatcgctgatgtacagctttaaggaaattttcctaaccctgcaaggcgagggtgggcaggccgggcgcgtcaatgtcttcgcgcgttttgccggttgcaatctgtggagcggccgcgagcaggaccgcgccaccgtcgactgcaccttctgtgacacggattttgtcggcattgacggtgaaaactgcggcaaagttcaaacgccggcggatg

SEQ ID NO: 76428 - DNA, 546 bp, Arabidopsis thaliana landsberg
tgccgtgctacctgaccctcgaagggcaaaaccaaggcaagatcgaagggtcgtgcgaagtcagcggacacgagggcaagatcctcgtccaggccgtcgaccattccatcgaactgcccaagaacccgcaaaccggactgccttcgggcaagcgccagcacctgggcatcaccctggtgaaggaaatcgacaagtcgtctcccaagctgtatcaggcgctgtgctcgggcgagcagctgaagtcggtgctgctggagttctaccgtatcagccccaagggtacggaagaaaagtactacaccatcaagctcgaaaaggcggtgatcgtggccacgcacctgtgggtgcccaactgcctgcagcccgacaatcgccagctgggccacatggaagacatcggcatgacctacgagaagatcgtatggacgtgggagccggacggcatcgaatcggaagattcgtggctggcgccgaagtaactgcgtgagaacgatgcgcccttcggggcccgccactgacccatgagagaacttcgattgctggaac

SEQ ID NO: 76429 - DNA, 619 bp, Arabidopsis thaliana landsberg
gattgaagatccaacacgagtacaagacaatagcagagataaaagactgcaaatccggctttaagcttattcgttcaacgcatatcccttcgcaaacaagtttccccagcaaagaagaaacatacaaaaagaaaagcaatcttcagaatatacgaatcaaacagaactttccaatttctgcttcttaaaacacaaaaccctaaattaacccaacaacaatccagtctagtacatagcctcaaactcagatccgagaaacttaagcaatcgcagaatcttccatacgcagacccagaaaacaaaatagcttcgttagagcatcacaccgcaccgacaagcatttcaccgcttcggtatgtagagttgagagagagtgaagaaaaaggaagaagcaatgagctttagttaaagtaaattggttacactaaagataagctcgggaaacatgaaaccccaaaaagagctcatgagaaagcaaaaaaaaaagctaaacgaaaaaagagagaacttttaaaagattcaaaaaggtttttggaggagagtaagaaagaacactgtggcgtatagagacagagattagagacgaaggcaacaccaaaattaacctttatacttctac

SEQ ID NO: 76430 - DNA, 319 bp, Arabidopsis thaliana landsberg
aacggtggttagtgatttatttataactgttaacgagccgtaactaggaagggatgtctgaccggatgatagagaaatacttgataaccgaggacataataggaatctcaggtgttaaacgtgcctattaatacgtgaatggatgggttctcggttgccgtctgaaaagaactgatctaatcgactatgatgaaatgagaggtggaaagggaacacatgcggtatgatttcattcggaacaatacaatgacttcaagattgctgtctattggatttggcatatataggttactggccttcatggctaggatagcgcata

SEQ ID NO: 76431 - DNA, 555 bp, Arabidopsis thaliana landsberg
aaaggccctcacccctaaccctaaaaccaattaatttgaagaaagttttggaagatgaaattaatgaagtatgcccactcatttactcaagcaaccaaaccaacagattacttaatcgatcacaaatattgtataaaattgaacgttacaaaacaaaactaacagtaaccgaacaaattttctggaatgaacgtaacttggctaaagattttctacaaatcagaccacaataagtcatcgaatagaccaaactgatttgttaacataaaatcaaaaagggttatcaaaatttgattcgattttatgtgtgtcttattggttaaatgaagaaccaataaacaaattatttagtccaaaataagcctgttaattcatgggaatgctagttcaactcgacattggcactttagataacaactgtaattattgactctgatacatatcaaccaacgtaagttgcaaattaaaacatgctgcgtgttctaatatgagcctacatattacatcagctaatatgttatcacaataatataaaatgatagtagtgatatctaa

SEQ ID NO: 76432 - DNA, 648 bp, Arabidopsis thaliana landsberg
  unsure (1)..(648): unsure at all n locations
gtttcgctgtggtttgcactaatccataagaaaatgtataacgatgcgtaacaggatcgcgcactaagggaccatgcagaacgatttgatcggcggcaaagttcggcttgttaggtaaattcaattctccttgcagtgtgacttttgagctaaagacaccaacttggtagtcaagaatatggatttgtaccgggccctgcgtgcttaaattttggagataagccagataatagtttttgaaaataataccatgggcccacgagcttaacgccagtgaaacaacaataaaaaacatgacaaaaataacgtgatatatgcgcataataaattataacatatcgttattagcgataaatagagaatacctatgggaacttataattttgaaacgtctaaagcctttattaatacaatacaagtcttccccttaagctcaggcaaactcgataatttgacctttgctgtaaaagacctgattgatatagcagggcaaatcacaggatgtggcaatcctacttggctacaacaatctctgcccgcacctgctaatgctnntatgtgtgagcaattattatcagaanggcgcacttgtcttggttaaacgnataccgatgaattcgcatatagttggataggggaaaaattttt

SEQ ID NO: 76433 - DNA, 183 bp, Arabidopsis thaliana landsberg
aaacttaaccgatccatcggtgagctatatctacatgaccgatacgtagatgaaacgattctgcatgcgccttggcgcttgcttatgtgaattgccatatatatgcgtcacatatgtgacacacgtaggattttatcaagtggtacgtaaaaccacaataatacgaagttggatttagccgta

SEQ ID NO: 76434 - DNA, 425 bp, Arabidopsis thaliana landsberg
  unsure (1)..(425): unsure at all n locations
gttgaaannnnnnnnnnnnnnnnnnnnnnnnnnnnnnnnnnnnnnnnnnnnnnnnnnnnnnggtggtaggggtaaattagtggacactgcaaaacagagttatttgcggcattagtaaccagaaacgtaagtatttgagatcagcgcaaaggtgtaaaaaaacagagtcaaaatcgttgcaccgggagatgtgcgggtcggctacgaatagagaacatacaaattctgaggggttattccgaggtgcgtatagatacggatagttatgttcatcgtaaatgaagtagtcttccagtaaaacaacatgcgacagaaaacgtatgcgtacgcagtatgccagtggtcgtgccgggaccgggagtgatcgttaacgtgggagtacatataccgaaaccatagcgcagtagcgtgcgtacgaatgggtg

SEQ ID NO: 76435 - DNA, 511 bp, Arabidopsis thaliana landsberg
aacacgacgactattcggttctgccgcgcaacatccccgcgttctcatgcttttgaaaacgccatggcgctcgatgtgtcgatgggcggattcaccaacaccccgctgaacgctgctggcggcggaccctgatgctgtcgttcattgcaccatgtcggacatccaccggatttctcgccgggttccctgcctgtgcagaggtggcgccggtcaccgataaataccatattgaatacgtgcatcgcgcacgcggtattctgaccattctggccgaactgtcccgtgccgattagctcaacctggatgatgtctatgcgcacaggacatcgctgagccgggccatctctacctgtgacgtgaagggcgagcaggccaccgacgaaatccacgatttctacatggcttcggcgggcggcattcccacccaggtggcctttgctcaggatcggtaatacgccacgctggatatcgaccgcgaagcgggctgcatacacgacaaggcgcatgccta

SEQ ID NO: 76436 - DNA, 487 bp, Arabidopsis thaliana landsberg
agttctaattactttccactttccgagaatttaaaagaaaaaaaaggatgttcttgaatgttacatcgtactattgacttagcaagcaccttattatttattctatttggtcaacaagttgtttttctttaaaaatgttatgaaaggtgccttataagttgatgttctaagttcgaccaaattttttttaataagatagtattataagcttattgcgaaacatcaaatataattacatttcaagactatgaaatatttcatttacttaattcagttatttttagtaactagttggattggctcagtttctttatgggtgtgaacttggatctcatgttgtaattcacagtttcttacattgttcggggattttaacgcatgtcccaatgtctatgcatgacaggttcccaataaagacacatggcttatggtcagataaaaatagattagatttgaaattctcttggaggcttttctttcttagatc

SEQ ID NO: 76437 - DNA, 592 bp, Arabidopsis thaliana landsberg
atctagcgccccccgggtgtgagacccctccgcccacttcggcgttcccgtgccatgcaccaaagatcttctccctttgggccattctcctcattcctcaagaggaggtcccctgtcaaacaactgtcaagccatacgtatcacgggctcgggagttgtgtgagatccactcttttccctggcgtttgctttcccagagcttgtgcccggcaggctgcaatccgtccggttaacacgtcctgtgctatcgatcatcctggcggatcctctctcgtcccgtcttttgacaacgtatcgatcgattccgtaagagcacatgaggtgaaagaggagtccaagtggaaaatccctcggcttcttccgagatctgtgtccttgtccttagttggcacagactgagggtggcttgagccctagctaccacctctgtgtcacagtcaccagattgttcagaaacaaagattatcagatcacgacattatcagaggacccaatctgtaagttatttgttccccttaaaacaaatgtagaaatcgaatttcctttgacactgaattgaccctatgacagccaagtgtcagcaacttgatca

SEQ ID NO: 76438 - DNA, 613 bp, Arabidopsis thaliana landsberg
tttagggcagatatgccaggacagttttatgaatagcgacaggcagcaggtacgctgggagtttattgatgtagccgaaattaaccagctaagcgaactgaccgatggcgccgaactttattaccagatacaggaacccgccgatgccgacctgtatatggcctgggcgcaccataaatcggctttattaaccgtagccaattaattaataccctagttttgaatagccatacctcatcatcatcatcactaaaactcgactgggcctttgccggctgtggcgcggcatggggtattttgcaaacctacattgttcacagttttggttttgaatggtatatagccattattgatggtttggtaagtactgttttattatcggcggcatgctggcttatcaataacaatctgcgttattatcagcctggaaagggtagttatattaatttactaatatggtgcctgtttcttgccgacgcaagtatggtgggcagccggtggttggtgccattgatatatactgatcaggcttatcttaattttttatcacaatcgctggtcattcgtttctttaccaatttcctggccataggctggatggctatgataagca

SEQ ID NO: 76439 - DNA, 528 bp, Arabidopsis thaliana landsberg
gagtcattacgttagcggtcaaaacgttttggaaaccgctcgtgccgttttggattcaagcaataatcatagtgttgtagcaagttcactttagtttgtaggatttgagtgtgtttagatatttggtttattagctttgagatatttggaattttaaacataattatgtactatttaatcaatgattttaagataacactcttatttgagaatttcttgtagaaacccttatatcgaaaaaatttcaaacgcataatctaatttgttaccaatatataaatgaaggacatgacagtatctctctacctcagacgaagcaatgaacccaacaagaagctcatcatttgctatctaacctgaccatctcgagacagtgcagagcatcattcatggcataccccaaaactacgttatttcaatgttcacacaaaaatctatgcaagtgctctgatttctctccagttttagtcagtcaacagctttgattaagtttcagtctcgtcgcctcttcttctcccgccttgactc

SEQ ID NO: 76440 - DNA, 588 bp, Arabidopsis thaliana landsberg
ttcgcggtgtattccggggtctcgaagctcaccgcgacatggctcatggcggcaaggttatagatctcgtccggctgcacctgctggatgatgcgaatcaggttggtcgaatccgtgagatcgccgtagtgcaggacgaagttcttgttatcgacgtgaggatcctggtagagatgatcgatacgatccgtattgaacagggaggcgcgacgcttgacgccatgcacgatgtaccccttgttcaacagcaattcggccagatatgcgccatcctgcccggtcaccccggtgatcaaagccactttattcattagacgactacccttccgtaagtatcttcaaatctgacgatatcgtcctcgcccacatagtcgccgcattgcacctcgataatgctgagcggcgcggtaccggggttctccagacgatgccggttgttcttggggatgtaggtggactcgttctcctgcagcaggatctcccgctcccgttggtgatcttcgccgtgcccgagaccaccacccaatgctcggagcgatggtgggtgcactgcatcgagagttttgcgccgggattgacgacgatgcg

SEQ ID NO: 76441 - DNA, 576 bp, Arabidopsis thaliana landsberg
  unsure (1)..(576): unsure at all n locations
gatccttgcccggcatgccgaggtatcgcgcgagaacctggctggtgcgatcggcgtgtactacctggtgctgcatcagatgaccacgcgcgcgaagggcctgcccgtcgacaatctaaaaaccgtatacaccggcttcggcgacgatgcggcgttcaatcgcggcgtgcaccgctacgccggcgatccgcatgccatccactatctagcagcagccacctcgctcagcggcaagatccgcaagccgctggtgctgcagtacaaccacgacgacccgctcatgaccgcgcacttccagtcggtctacccggccatggtgcaatccgcgcacggacgcgcaccgacggtgctgccgtcggtcggcgaagggcattgcgggttttcgccggagcagatcgggcaagcgtttcagacgttgatccgggaaggcgatggctaacctgtcttagaacagctctgcactttcatggtccagtgcgactgcctgaccgaccttgtncggcgcggcgccccacgaccataccgncccggcaagcaaccgatcacccgcttgaaagcggcatcgggacgtactat

SEQ ID NO: 76442 - DNA, 462 bp, Arabidopsis thaliana landsberg
ccgaacccgttgacgtcccccgcggcgacgcgcgcctgcccctgagcgacgccgagctggacgagaagttccgggactgcgtcttctactcgggcaccggctgggacgcggacgccatcctcggtgccctgcgccgcctgccgcaagcgcccagcgttagcggactcgtgccgctgggggaatagccatggcgcaagcggatagcggcgttcagtcgcgggacggcgccgccggacccagagccctggaaatctccggggtgtcgaagtcagacggcagagtgcccgtcctgactgacatcgacctcacggtcaaccgcggccaggtactgggcctgctcggctcgaacggagacgggaaatcgacactgctgaacatcatcgccggcagcgttccctccagttccgggacgatcagcttcgacggccagacggttccggacgccagctactgcgtgagcga

SEQ ID NO: 76443 - DNA, 575 bp, Arabidopsis thaliana landsberg
  unsure (1)..(575): unsure at all n locations
tttcagattatcgcgtataacgtgggatataaagtaatataggggtattacctttagccttaatgcaaaatcttatgatctaccacctataaaatagtaagcatgcatgtaagcataacacgtactacatacttcttagtaaaactaaaaagaaaagtatttttctctagtgatatccatggcgatatctcacacccagcttttgcttcttctccttgtgtcactctttttctcacctgctttatgcggccccaaattccaaacttgcgagagtaagaatcaaattttattttcttatacatgtagaacaaaaaaaagaattactttcatttgtggaagttaaagaaaaaaaatatagtatatcattctgttcttcttgttgtagctggtaaagagtataccctaaaggtcagttctgtggagatatctccagacccggctaagcgtagcggtaatggagagattacgataaccggtgttacaagtaagtaatgctaaaatgctttttcccgcaacattgatgtaaactnttccattattatgtttttatcctgatacanattttggtttgaaca

SEQ ID NO: 76444 - DNA, 411 bp, Arabidopsis thaliana landsberg
  unsure (1)..(411): unsure at all n locations
ccgggattggcagannnnnnnnnnnnnnnnnnnnnnnnnnnnnnnnnnnnnnnnnnnnnnnnnnnnnnnnnnnnnnnnnnnnnnnnnnnnnnttcttggagagagagagagagacagagtgagaaagagtgagacttttttcgttccttgcatactcgggagctactcccgtgactctgtgcgaggcgaagcttgtctcggttccgggttcaaagtggaccgagcaaagaaagacctatggttctctctacaaccaaccattaatccggtacaaactggcccgatacggaagaaacatgaaatggaatccgcccttagacactcgctcaggattgattcgtataagccctctgctaagttgggagaccagagacgagagttactgtacggaccggtggatcgactaagcca

SEQ ID NO: 76445 - DNA, 586 bp, Arabidopsis thaliana landsberg
ttgaccgccggtgtttagtactcgaataaagttctttgaattatgaatttgtatctctatcaattaaattgtgatgcatttctaaatttatgatgagataggaatatttaatctaacaaatggacagattattcaagaaactgctgacctagaaaaagtgaaagcgagaatattaagaataagtctcaaataaaaaattatgtcaaaaagaaaaaggaaaaataactgtgggcccatgtgaaacagttcagactccgaaattaccaatttgcctacattttgtttaattaagaaaatcgctaagagaaataaagcacgcacgaaccaacggctatggaacggtcactggataaattaacgaaatctgagccgtccacgtcagattactcgggcagatggatcgggcaacgtcattaaacagatctgaaccgtcagatcttgaatcaacggtgaggagaagcactaagcgttttaacgggcagatttcaatgtcccttaagaagagacgatgcctcaccttgtttttcctcgtcctcctcttcaaacaacaatccctttcttttctttcgatcgccggaatgttttt

SEQ ID NO: 76446 - DNA, 410 bp, Arabidopsis thaliana landsberg
  unsure (1)..(410): unsure at all n locations
aaaagcagtatattgggagagatacatggtaaaaagcggctagttataagaagtatggggtgtagcatgggaaagttggtaagcctaatttttaaacgtaataaagacggatgggaattggggggtggtagtgaagattatatgacgtggcacgttccaggtattggtgtgaataaagataaagaggcagaaattagtggcaaatgtgatgacccatgacgtatcaagagtatgaatagtgacgggggtgttttgaggacgtacggtcnagagagcgaatatacnggcagattagcgcggggaatgcaataaccgttaaggaccatggggactacagcccctgtgacgatgcattgacagaagtggtacataagatccggataatgaaataccacgattggagggaactt

SEQ ID NO: 76447 - DNA, 213 bp, Arabidopsis thaliana landsberg
aatttaacagattgaactaccaaatcgatcaaccaaatgtttcgtctaggaaaacagaataaaaaaaaatacagtcgtgaaaatcttaatctaactgttttattttcacacatttacgtttatcgtttaatttgtacttaaaaaaaattgcaatcttatgttattcaatcatagataaaatagaaatgtcataattcaaagagacgtgtattt

SEQ ID NO: 76448 - DNA, 591 bp, Arabidopsis thaliana landsberg
ttaggaaagatccctgttgaagctcatctgcaaaaagaaaagggtgaccttatgaaggagatagaggtgctacgtgctcaagttgacagaaatcaggaagttaccaaatttgccacggagaatttgcgattgaaagaagagatccgcaggcaagaagactctctgaagatttcctatttgtggaccctcagctatatacatcttttctaactttcacttgctacacagattgaaatcacaaggtgaggaaggggaacgggatatcttaaatcaacagattcaagcgttacaagccaaggtgagtaatatattctgtcatttcgagacctcagaagtttgtttacgatttttattagtatgtgtaacttgaatctatgtacagttgctagaagctcttgactggaaactcatgcacgagtcagattcctccatggttaaagaagatggtaacatcagcaatatgttctgctcaaaccaggtaagggcttgattctctttcatctgagctgatattgcctcacaaggtctgttaatttctggcaagcgaataagttgttttttcgcgtcttgacctcgatcttgttgtttttg

SEQ ID NO: 76449 - DNA, 428 bp, Arabidopsis thaliana landsberg
aacgaacaaacacttagatagaaacaaactgtttttttttcttaaattaagaaattctaaaaaactaagatacaaaaagggactcgcagcggcagagagataagtatcttacgggccagcagataatttctatgttacgtccctttcatccccattgcatattgcatatgaagacaacggatattaactaaaatcttccaaaattacggtataatgaataataatacacttctgtctcatatagtattctattatattgttcgaaaatgttcttatttacatatctatttatattgttaattgattgcggctattactgtggatatccatcgtaactattttaatcaatacaaatcatgcaaaatagtgaatgacttagaaaagttgaaaccacatatgattgagtttagggggaaaagtataaaaga

SEQ ID NO: 76450 - DNA, 331 bp, Arabidopsis thaliana landsberg
taaacttattgaatttgcacaaagtcattactttaatttcagctttttctgtttacttgagatctgcttaagttgcagtattaccgtgcaccattcactacaccatcgatattgatgcacgcaaatgtcacttattgataggaaataaatactctcaaaacttttgatctatcttttattgtaattgctccttcattaatatcacaaacttgtttttttttcagaataagaattctttttctaatactttttcacattttttcaatctacttttattttaaatcttatttaatttatttttttcttttaattttttactttttttttcata

SEQ ID NO: 76451 - DNA, 691 bp, Arabidopsis thaliana landsberg
tacgtttaaagagtatgtcggagaaatattttccattttatacagcgctcttaggtgttacaaataggagatacattagtatgtagggttatatataataagatattattttttaaaggtggtaccaaattatcaagtggttcaattcttaccttatagcatttaaatgttgactaaaataattattgacaagtactattcgttgcatatatgttcaattcatttaaaatcaaaattttcaaagatttggttataaactttaatatatgtgtgactgtttggagtgtgtcgaccgacccagcatggacccaaattcttgatgtaaggcccatttaagagtaaaatggcacacagtccgaataaagatacccgaaacgttacgcagtgtatttgctgatattcactaataacagaatggacaattaataactgatgaaactaaactagaaggtttacgtcgacatttttaagtttttttatttgtttatcagcaaaaaaaacaggtattcaaagttcaattctttgttgcagtggtggagataaccatcacaatcatgtatattaaatgatgggttcctttatctaaagaacgagttataagtctcacatttgctatgagttaggcatgtctcaacgaaaatgactattctgaaaaaaaattcaatgtttctatcggatttatttttcatgg

SEQ ID NO: 76452 - DNA, 479 bp, Arabidopsis thaliana landsberg
  unsure (1)..(479): unsure at all n locations
gagatcttaagccagtatcttagaagttcatatttcaagatccgaatttttatttaggttagaaagtaaaaatatactatagctaaacaaaagtaaatataacattaaataagtccttgcatataagtttttttttgggatagggaataatgaacaacatcactatatagaaagcattcaaaagaacgctgntatgttactacttaagtgacaaagattatgaaagggtaaagttgaagaaccgaagatggttatgccacgtgatccggttaagatagttatgaagcttatcaaatatctttgacattgcaagatattttgataagtattttggttagtgtagaaactttattgccaaacaaataccaatccagaggaaaatcaagaccaaattcattagggtgaaagcttagagttagatgtaacaaaagactagaggaataactgtaatagagcgaaaacaaaaggaatccagcagc

SEQ ID NO: 76453 - DNA, 576 bp, Arabidopsis thaliana landsberg
  unsure (1)..(576): unsure at all n locations
gcgcgtcgtcgnttcgaccggcgccagcctgcacgcggcggcctgtgccggcctggcggcgctgtccggcccgcaacacggcggtgccaccgcgcgcgcccacgcgctgatccagcaaaccctgctcgaacgcgaccctgccggttatgtgcgcgaacgcctgcgccgtggcgaagagcttcccggctttggccacccgctgtatccggacggcgatccgcgcgcagcactgctgctgcgcatgctggccgacgcgcgcccgcgccccgccgaatcggcgcgcatacagcgcctggtcgatgccgtcaacgacaacgatggccgcgcgcccagcctggatttcgcgctggcggcgattgcctcggtgtacgccttgggcgcggatgcggcgttgtcgctgtttgccgccggacgcatggccggctggctggcgcatgcactggagcaacaggaaaatggtggattgatccgcccccgcgcgaactatgccggcaccatgccggcgcgacgcgactgaggcgcatcgccgcacgtcgattcgcattgccgcacttgtccgtgccgatgatggcccca

SEQ ID NO: 76454 - DNA, 486 bp, Arabidopsis thaliana landsberg
taacatttttataaatatatagttgactccatcgatccgttgcattatgttttcttaattgttttgaataaagcgaccatgcgcgcagataaatgtagatttcttatagactaggagaatatcgcgtttgatttcatcttggatatttaaatttaaacaggagtagtcatgtaattaaataatcaaaacaacacaaacccaatgaaaaattcatgtttggttggcgggcactataaagtgggcatctacttccgcatttcaagccagctactaatcatcatgtgttcatacacagtatttacattattacatttactatattccgaccataatatacgtacgtccgatagtttatgaatatttcatacttgaaaccgtatattatcatcatttcaggttaatgaaatgtaaactaaacgttaagcattgaccaaaatatgtagtgtatataaaaaataataatggtgaaatggtttgttatagagt

SEQ ID NO: 76455 - DNA, 363 bp, Arabidopsis thaliana landsberg
  unsure (1)..(363): unsure at all n locations
ccacgttttttaattttccttcttctgtcgtttttatggtcaactttgttataatttattattataatctttctaaacattttttaacgaaactggaattttgattaacagaaacatccaatatcaacatttaataggttttacaatnnanaaacaaaaagggtttcacagtttgactctctctatttatgctaacacactattaagactaatttcctatttttttaattgaaaatcagaatcttaatttgaaattaagctccgactatttaaagcttgtccactgttccgttaacatctataatcaccctggcatacatacttgtcgtctccctttctcacgtttctctcctctgcaaattc

SEQ ID NO: 76456 - DNA, 480 bp, Arabidopsis thaliana landsberg
gcttgtagtggagcatattgctcggagtggggaatacagcgcttcgtttacttaaatgttttattgcataagcgttgttctttccagtcatttcttcaactcacttggcccattaaaaataccccggggattttcttgttgaggtatccacgaacgaaaagaatcggaaaacgacgccgagggtatgcgtgttcaactgtttatggagttgatattgtgtaacgtagggtataaacgtccatgacacgtaagtgtaataccagtggtgggttttgtggaggtgcttaagtttgggtttggccagcaccgggtgtgcgagacgacatacccataagcccaagtgtcggaagttaggtagatgtcgtatgaaggacagcatcacgtaggccgtgattggacacacgtagacggatgttcgatgggatttctctgccggcaagggtggtatgggcataggtacagtatgccgtagaaagtata

SEQ ID NO: 76457 - DNA, 585 bp, Arabidopsis thaliana landsberg
  unsure (1)..(585): unsure at all n locations
cacagagagcgtgtgacaaaatgagttataagattccgttatcgtcttcctgattcctccaaatctccggcgaatttgcactctttacctctctttgactccgtgaggttttgttttctccttatcaatcgaattccatttcgtgctcgttacgtgatttttgtagattttttttatggggatggaaacttgtttattatctatagatgatgattttgttttctccatgagaatctatgcttttaaacttttttttttttgttttttgccttcggagctaacttttggagcttgtctctgtctctgttttctctccactaaaaagataaaaagctttttgccatctttttttttttctcaataatctatcacatcgntttttttctttgcttttttctccatttgtcttcattgagttcatagccacataattattgatttctttttcttttagtgtttctgttactgatgcgtttcattatttatacttctcacttgcagattcgaggattgttagtttcttgagatgtgtaaacttttgagcaggggatttttattgtattgaggaagaagatggggtttgag

SEQ ID NO: 76458 - DNA, 226 bp, Arabidopsis thaliana landsberg
gaatggggcaaagaggtaaatactcataatttataggttctaattcataatattgcaaaattgctaatacaatgaaataattattttcaaataaatagtatattgacaaaatattaaaagctaatttgaaaaacactaatttaaacaaagtaatttgaaaattatattataatttctaaagattagttaaaatctaaaactttttttaatcttactcaacattttt

SEQ ID NO: 76459 - DNA, 598 bp, Arabidopsis thaliana landsberg
  unsure (1)..(598): unsure at all n locations
tcgcaaatccatgggtccgctgccttggtggcactacgtccgccacgaaagcccggaagggctccatactgacattgatagcggtatccaggatccataaaaagcccgcggccatccaaagcgcggaagatcccggcataaaaaggagcgcaagcgagctaagtaatgctcctatgaaaaaataaaggccgccgcctgccaaaccggttccacgtatggtcgcttaaactgccgataagtggctgcacgagcatccccgttaaaggtgctgccagccataataaaggaatagcttcgggccgggctccgagatactcgtaaatggcactcatgttgcccatctggaggccccatccgaactggataccgaaaaatccgaaactaagattccatatctgccagaaggaaagggtcaggggtgggattgcgcgtcatcggagcgtgttaacggtcagaaaaatagcttacggttgcgaaagataccatattttcctatttctaatcgctgaaagtgcggtcatagtataatgtcaggagccatggtttgatctctttttncgaggggcgttggcagcttgaaaacaaataacccaggaat

SEQ ID NO: 76460 - DNA, 622 bp, Arabidopsis thaliana landsberg
  unsure (1)..(622): unsure at all n locations
agcccaaacgccatcaaccatggtaatttgatctaacagcgagtgcatatgaatagttgctgctgcagcaacgtcattgcaagctgctgtacgcgcagagtgtctaagtgcagtgcaaaagttcacctgctacctgcgttgctatagccaccctgacggctgtggcggcgaacggagcagctgggagcaacaccaggaagctagctgatcactctcttttggcggacccactggtagagctgtgcgcggaggtgtgctgcagacggcaatcaatcgcggagtgctcagtgagctgggtgtacgtgctgaatagcctgggtaagccggggtcagccttccccgtgagctgttctnnnnnnnnnnnnnnnnnnnnnnnnnnnnnnnnnnnnnnnnnnnnnnnnnnnntcaggcaggtaaacgggccgtgacacctgagtagctgcattctttcaatcgtggtgcactatcaccgctgcgcactcacgctgtgtcagccgaaaatacggngaaatgcgccgtggggagcgtcttgcacgaccgtgcagtattaaacatctgattacgacggtctacttgtgatatcgaatacgacttcgctacgcagtcactcagtccagacgtg

SEQ ID NO: 76461 - DNA, 498 bp, Arabidopsis thaliana landsberg
  unsure (1)..(498): unsure at all n locations
accgtgcggggagcctgaattttcacgccttaaaagtacattttatttcttgaaggtacacttcaagagaacggggaagttataccaataaataattgtatatacaacataagtttaaacaatgtgatgattttcaatcatcttccttaaaacgcgatttaaattttctatttaaggcttaatatattctcggcattgttggtcaaatacgccctttcttctttgggaatgatggattgtttcaggatctccagtgtttttttggcctgctcttttgcctttgcaatatcacctttgcccacatacgtatcggccagcccattgtatgcataaggcgaaagaggaaactctttggcgtaaagctcaaacacttcctgggaaagcccatactgctgatgatcgaggaaatcgtgtcccagccgcgtcagcaatccgggtaaccttctgtcggccggagaaacttcggccagcatttntacggcttccagggcattgggc

SEQ ID NO: 76462 - DNA, 172 bp, Arabidopsis thaliana landsberg
agatgccaaatttgcggcgactacggagagtctataaatcatgcactattcactctttttatggcaatgaccagtatgggcttaatcacgcgggcctgctaacacaacaatctattatactccctccaaaacttggtatcattaagaccacagatggcggcaacattgatat

SEQ ID NO: 76463 - DNA, 562 bp, Arabidopsis thaliana landsberg
aaaccctcgacaactcaacattctttccgtacaacgatgccgtgttgcgccacttcgtggtcaaggccaagcatgcggaaacggcgccgtccatcatgatgaagtcggtcgagcgcgaagaagcccgcaaggccacttcggaaacggctggcgcggcacaggcaaagtaaacccgtacggctgccaggccagggcgtgaacaggctcgagctggacgcttcggtggtggaagtctcgccgcttaggtacaccccggcaggtgtgccggccttggaaatgaaactggggcatgcgtccgacgtgacagaagcggggggatcccgccatgtcgaactcgagatcgcggccgtggcactgggtgacgtggcgctcatgctgggcggtctggctgctggcacggttttgtcggtcgaggggtttctggctcctgcccggaaaggcgcatccaggctggtgctgcatattcagcaggcaagccgctccgcctgacccgacgggtagctgtttacgaacaatgcggatcgtggggcacgggcccgcacaaaacttacgaggcacatca

SEQ ID NO: 76464 - DNA, 567 bp, Arabidopsis thaliana landsberg
  unsure (1)..(567): unsure at all n locations
tgaaactgtcgctgccactcgttattgtctacatgttattacactacgtttgaccttagtccggacctaccactaccacctactgtaccacactacactgtgactcacacgttttatttattattcggcacgacgtctgcgaatgtatatggggttttgggggaggtagtgggaggggcagggggagcggagtgagaccgtattgggttgggcaaggcggggtatattcgacgtcgcgcaactaacgtcccccgaccgcagtagggcgtgatgaagtgacgtggggcgaggcaggcatgggggtggcangtacgggcggggagtcacgtaaaagtcgcgtggggaggcacgtaaaagcggcggggcacaatgcgcagtggggtcaacacaaggctattacgtggcagggcagcgttggcccattaggggactatgagggcagaatggccaaccgtaccaaaagtgagtatgacagtctggaagaagaagtttgagtgttgcaaagggccagcaagagactgggtgtggagtgagggcaatggaagtccatggaagggagtgtatgga

SEQ ID NO: 76465 - DNA, 524 bp, Arabidopsis thaliana landsberg
ggacgccatattcgtcacgtcgtcgggagaaccgtatcctaggaagaggccaaagacttgctgggtgttgggacagtaggtgacgctcatggccgtgtactgggtcaagatcgagtccacggatagtacgtacactgggctgctgagtgagctgatcgcaagcaccgttgagtttgacttaccttcacacggctggccctgcaccgagctctttagcttcttaaagacggttctaggtcgctttaccatatcgatgaaaactgagggtacgtgcatgcgcgttaagacatccttgaacttgtccttctgaatggggatccaggacaaggccatgcgataatgctgcactcgcgagaactctttgggattaacctcggtgatttccttccgagggcacattctaagcagttgttagaagaaacgcagcgatgatgctggtggggatactaacaggagggagaaagatggcttggagctgctggtgacggctgggacacactgatatggatcagctagtgatataa

SEQ ID NO: 76466 - DNA, 336 bp, Arabidopsis thaliana landsberg
tttataattgaaattttgcaattatatcacattattggtaagagtctgaatatcaactgatgttattcaaaatgccatctattattctaatattacaaggtttgataaaatttattaaccaaatgaaatcaataaattaattgtatattgagtgctactctttaatttaaggtatattcatattaaaaaatttttgagtcatttaatataaattgtgtctatagaaaaataggattgatttaagaacaaactaaaatatagatttagagaattttcaaaaaaattcacgtatgagtattatttataaacatttactattatcacactatgaatttg

SEQ ID NO: 76467 - DNA, 583 bp, Arabidopsis thaliana landsberg
gtggtgacacctgtcacgagtacaacccgaagggagcgtgacgtggccgtgctgggaacgccggaggcggacctctacgattgggcagagtcttacggcgatgacgagggagggctggtggaggtcacgcagccgcgctaccggcaggtagtccgtgaactgcggagccagatcctctcaggcgaccctgcgcccgggggtgcactcaaagggcagtcgacgctggcggggctgctcaaagtcgattcggcgatcgtcaaccgcgccctggcggcgctcgccgccgaggggctcgtccgtgtcgagcacggacgcaggacggtggtgctggaacgcgaggcctggcatctcgagttcgaggcgcgcgtgcagccggacgagaatgcacggaaggaggccgaggcatcggtctcagcggcgctggaaacggcaaccgccgggcagcccgcgataggcggcaccaccgtgcagaggtcggtgcacggcgtcaccgtgacgatgaacgttcagtcagccgacctaagcggagccgtcgtcgccgcgctgtctgttgcgcgggcggctttgggtcactgccgatcac

SEQ ID NO: 76468 - DNA, 391 bp, Arabidopsis thaliana landsberg
gacaaacaggattattggtggttttccttttggtaactaataggggtctcgtattgagttgcctttgcttgatgtgtacttttagagtgcagtgagctgaggcctgtgccactgtttctcaagtgtttccggactcatttaaaaacgttgctttaacgcattcttctacttcgctctagggttaactcaattggatcatgttcttaacaactgaattacagaaaaacaggctccacagtgcaaatagttgaattttcttcgagttggtcctctatgaactgatctgatgaagctaaccctgggatcctacggcgtttacagaacatatcaacagaaagttccatctaaccacattttcatgtgactgcacctcctgtcttttgcggtagac

SEQ ID NO: 76469 - DNA, 428 bp, Arabidopsis thaliana landsberg
ggccttcccggcccagcgtgtacgccacccgccccgacgccacactcgttttgctgttcgtcagcaggtagccctcgacgtcatgcggggacgcgctcggtcggcttccgtaatcgtcatacatgacgccggcgtagacgccggtgcgggtgccgcggagggaggtggggtccgatcccggcgtgctcgatggctttccaggcggtctcgaggaggagtcgctgctgggggtccatggcggttgcctcacggggcgagatgccgaataactcgcggtcgaactggtcggcgtggtggatgaagccgtcctcgcgggcgtaggaagtgccggggtgatcggggtctgggtcatacagtgcgttcaggtctcatccccggttgaccggtaactcgctgatcgcgtctcgttcctacgtcaccaggttcca

SEQ ID NO: 76470 - DNA, 253 bp, Arabidopsis thaliana landsberg
  unsure (1)..(253): unsure at all n locations
atcccactataagatgctaaacaatatagtgatcctggtaacaattgaaggacaccgcaaagggagcggcggcggacgcacttgagatgaacaatggtcccgactcttatcctcgtgagtacggnnnnnnnnnnnnnnnnnnnnnnnnnnnnnnnnnnnnnnnnnnnnnnnnaggtaaccaacaaggtaggatgcgggagatctgagtccacataagcgaggttggattatcggttctctctcataagataga

SEQ ID NO: 76471 - DNA, 623 bp, Arabidopsis thaliana landsberg
  unsure (1)..(623): unsure at all n locations
nnnnnnnnnnnnnnnnnnnnnnnnnnnnnnnnnnnnnnnnnnnnnnnnnnnnnnnnnnnnnnnnnnnnnnnnnnnnnnnnnnnnnnnnnnnnnnnnnnnnnnnnnnnnnnnnnnnnnnnnnnnnnnnnnnnnnnnnnnnnnnnnnnnnnnnnnnnnnnnnnnnnnnnnnnnnnnnnnnnnnnnnnnnnnnnnnnnnnnnnnnnnnnnnnnnnnnnnnnnnnnnnnnnnnnnnnnnnnnnnnnnnnnnnnnnnnnnnnnnnnnnnnnnnnnnnnnnnnnnnnnnnnnnnnnnnnnnnnnnnnnnnnnnnnnnnnnnnnnnnnnnnnnnnnnnnnnnnnnnnnnnnnnnnnnnnnnnnnnnnnnnnnnatacgaagatctttgcgcaagaataaagattaatcccgatcaactggacttgggtctaatctcctttttttaagctaataaaatatccctttttcccccccataaaaaaaactccccgggaaaatttttttttagtaaaccccctttttttttccgggaaaactttccgctttataaacccttttttttttcccacccccaaataattttttcctcagggggtcaccaaaccccccttttttttttttttaaccccc

SEQ ID NO: 76472 - DNA, 459 bp, Arabidopsis thaliana landsberg
  unsure (1)..(459): unsure at all n locations
agaccaatggttgaccgtcatttgttcatctaacgctccaggagacaatgatattgcctcactcgcatcatcctcaaagcccatggaatgaagaaacaatcacacatgattttacaaaaatacataaggaaacatgcatgtcacacatattacaaaaaactagcatgtcgtacctagattctcttttatgttgtctacaaattgatgacttattatcctaatagagtaaatgctcttctaatctttgggacactattnnnnnnnnnnnnnnnnnnnnnnnnnngaccacgcaagagacaaatcggcgatatattctctatcgactagcctataatgttcatcggctggtgagtacaacaatctagtaggcatgtctactagattttattcatatacagaagctgaatgtagccaaaaactgtggaatgttagagcaatggctatctgccccctatatct

SEQ ID NO: 76473 - DNA, 559 bp, Arabidopsis thaliana landsberg
  unsure (1)..(559): unsure at all n locations
aaccgactgaaccttgtgagagtgaatgctattgagaagatatgtgtttttttgagcaaggtctattttctctgagttggcatgctttcgaaattcttgcttaacaaagtctaacaaatgagacttgtgatcttctttaccaacatgtttcaccactgctttgagaaggtcacgataaactctagcagctaaaacaacttcaccactcatcttcttctttaccctatcaacacattttcaaaagagtgacataaattcgggttaaagactcaaaaatcgaatttttaaaacccaattcgttaataactattacttgagctatagattgattagaatcatcaaataatcttattttggtttagaactagcattattaaaaactcagaatcgaaacaaaagttggaatcggattgaacaaatcgagatagaatcagaaaaagcgcagtgcggactaatgaatccgaagattgggtcttttcgatagtatgttcaatagaagaannnnnnnnnnnnnnnnnnnnnnnngccggcgccgatcggataaagtagactgagagac

SEQ ID NO: 76474 - DNA, 618 bp, Arabidopsis thaliana landsberg
  unsure (1)..(618): unsure at all n locations
aataaaactttaaaacaaataccttctccgtagatgtaattaattcttgcgtcagatcataaatgctcatgagctccgggaatttcaattttggatgaagaagagcgcgaactcctagtagctttgcccacctaccatgagtaacctcacaagccgcaaagacagcttctgtgttttctctcaagacatcggccctaatataaatcagaaaaaatgcctaattttagttcctagcgtagaacaaggcatgnnnnnnnnnnnnnnnnnnnnnnnnnnnaaaatgcattgaaaaagggaactaagaaacctgaagtttcttgacatgttcatcaagcttgatgcctcactcgattttccctgcaaaggaggggactttgaggtagccttacccaatggagaagacactaatgacccgccttggaaacctatttcttgagctgtttcggctgctacagcgccaacagcaattgcagctgcaactgaatcagcggcataatgtccatcgatattgcagagaatccattcaattgcttttttcacttccgaagcccggactagatgtgcctgcattcactaaatgaaatgaaatcatattacatcttaatcaaacatctaact

SEQ ID NO: 76475 - DNA, 582 bp, Arabidopsis thaliana landsberg
agaaaaaaaaaactaacttgttatcaaagttagttcaatctctttgtaattgtatcagttcgttcttgagcttagggaataagattatttccgcgacactacttcccttaattaagcttgccggtttatatgtgcagatttgactcacacaatagacattagacaatatagtatgtttttgaaatatattttttgaggttatttcatgataagtaatactgcaaaatataaatttttcaaacataaatttatacattgaacctcatatctatttgtttctattatttaatttattttaatgacaatgtgttctatactatatttaaattttagtaaataattttcttaaattatataatttttcaatactttcttaataaacttctagatgtgaaatagttttataaaaaaaaaacatattctggttatattttttcatatagaaaagaaatggtgtgattcatattttttcaagttttctaagaaatcaaataatgagtaagtcaacaaataaaatctcatatagtggctaagaacttgaagtcatttagtgagaagggaaccaataaaaaaatttaccta

SEQ ID NO: 76476 - DNA, 205 bp, Arabidopsis thaliana landsberg
  unsure (1)..(205): unsure at all n locations
acccaatatgagttattctttcggtacattggtacttaattggcatgaaatcatgccccnnnnnnnnnnnnnnnnnnnnnnnnnnnnnnnnnnnnnnnnnnnnnnnnnnnnnnnnnnnnnnnnnnnnnnnnnnnnnnnnnnnnnnatattgtggccaacgactatggctcatagcgatttcttctgtttatttcgatcaaaaata

SEQ ID NO: 76477 - DNA, 223 bp, Arabidopsis thaliana landsberg
gaacatccacgaaactatagaagctaatttgatttctctttcctgcagaaagccagcggttttggggaaccgaactaataaagcaacgaagcaccctaagcgacgatcatggctcccatatatgtatggatatacataaagacattaaaggagacttcacgaaagagcttacggtggaggatgactaatggcactgccacggcctccagagtccttgtgatga

SEQ ID NO: 76478 - DNA, 341 bp, Arabidopsis thaliana landsberg
gcgaacattaaagaacacgaaagaccaggacgacgagccagacggaggagacaagctcttattactttttgggacaggcaaaagatgggaaaaagaaggatggaaccaggtagaccgaccaacaaaaagagccacgaacaaaatttaggaacgaccaaaaaaaaaaaagagcgtaagacggaggggccaaatacactgacgaaagcagactttaaaaggtcgtcaatacacaacgagcggggaaagcaggaaaggaaacaacatgcaaaaaactgcacagaagggcgggaaggccgtaaaaacaccccactcgatgagatatgaacgaacaaaccgtctag

SEQ ID NO: 76479 - DNA, 649 bp, Arabidopsis thaliana landsberg
  unsure (1)..(649): unsure at all n locations
tcgaatttttttttnnnnnnnnnnnnnnnnnnnnnnnnnnnnnnnnnnnnnnnnnnnnnnnnnnnnnnnnnnnnnnnnnnnnnnnnnnnnnnnnnnnnnnnnnnnnnnnnnnnnnnnnnnnnnnnnnnnnnnnnnnnnnnnnnnnnnnnnnnnnnnnnnnnnnnnnnnnnnnnnnnnnnnnnnnnnnnnnnnnnnnnnnnnnnnnnnnnnnnnnnnnnnnnnnnnnnnnnnnnnnnnnnnnnnnnnnnnnnnnnnnnnnnnnnnnnnnnnnnnnnnnnnnnnnnnnnnnnnnnnnnnnnnnnnnnnnnnnnnnnnnnnnnnnnnnnnnnnnnnnnnnnnnnnnnnnnnnnnnnnnnnnnnnnnnnnnnnnnnnnnnnnnnnnnnnnnnnnnnnnnnnnnnnnnnnnnnnnnnnnnnnnnnnnnnnnnnnnnnnnnnnnnnnnnnnnnnnnnnnnnnnnnnnnnnnnnnnnnnnnnnnnnnnnnnnnnnnnnnnnnnnnnnnnnnnnnnnnnnnnnnnnnnnnnnnnnnnnnnnnnnnnnnnnnnnnnnnnnnnnnnnnnnnnnnnnnnnnnnnnccccnaaagaaaagaaatttgcgtttggcgcctttatagatataaatcctctaaaaatgatgatcatgatatttt

SEQ ID NO: 76480 - DNA, 395 bp, Arabidopsis thaliana landsberg
cgaactgtaaaggtgaacttgctatgccctgcggggacaagaagacagagtggctgctggtctgtttacgtgggcatacgcctcctcattctttcagcgacgtatataagagcgtttagctgtactcaccagactctgcttactattcagctagagctcttgcaaaggaactgtgctggattagagtgcggtcatagatgacccgagacagctagtccataacacgctgtgaaaatgacatcgaatgtggtaaaagagtccaaccttccactcatgtgtggtgacattacttaaacgttatcatacatggatgtgggatatattgtcctatgcagacgatgacatgggatactatgctcactggtgaacggctgaccatgcggaagtcaatgtct

SEQ ID NO: 76481 - DNA, 204 bp, Arabidopsis thaliana landsberg
acgtccgtgagcgggctgcgggaccctttgccctgatgggcctttattgatgaacatgggacaggcctgggacatgggggctgtgtctggggatacgaagctctttggcgcgactgtgacacaacctctgactctcagccggcgagtgtaaacgtaccatgttgcttgggtacctcaccatcggccgtaactgatcattgtttt

SEQ ID NO: 76482 - DNA, 110 bp, Arabidopsis thaliana landsberg
acacaggggttggggtctgatttctctccccgtaagacttttgcgtcggtttattccgggacatcttttggggtcatagaacatagcgtcctaggggctccctcttgggt

SEQ ID NO: 76483 - DNA, 430 bp, Arabidopsis thaliana landsberg
tcactccgttcactttcttgggctgtttttaccacaactatcctcttttcctcgacataataattgcacaaaatttggaaccatgtttatctttctatcgtttttatcgttagattcaaagttgagacaaactaatggcgtttcagttagctttcaccaagaaagtctcaagaacaagtaataaataaattacctgagcaccatataaactttggtatccttcgttgatgtcatctgctaatctctacaccaagaaacaatttctctctaagtgcaatgcctaaatgttatattgaaaagaagacatatttttaaactaaacatgcttttattgttaagaaaaatagcatctttagtagctttacatatcctcattctttctaccaaactcagattcaaattaaacatgattgaattaaagagaaaaaaa

SEQ ID NO: 76484 - DNA, 263 bp, Arabidopsis thaliana landsberg
gagcctcgtgctgcggtgtctgctggtgatcgtgagggtttgttggcggggttggtggcgttgtcttcgggtgagccgggtgtgggggtggtgcaggatcgttcggtgtcggggaagacggtgtttgtttttcctggtcagggtgcgcagtgggtgggtatggcggtggggttgttggattcttctgtggtgtttgcgggggaggtggcggcgtgtgatgaggcgttgggtgggttggtggattggagtgtggtggacgtgtc

SEQ ID NO: 76485 - DNA, 314 bp, Arabidopsis thaliana landsberg
tttgtgtcagtggtacggtggttttgctgccgtatcactgagtgcttatctgtgtgactctaactgcgctgctgatacgtctacctgactatgaaagtgggattaggattcaggagagaacgcctgttctttatcgtcgtgtaccactgccttggaaaacaggcctgcgcgcatggtacctgtctgttgaccatctgaaacccagggcaagacggctagagtgtacatcttcgatatagaggctgatactgttatgttcctgcgagtcaaggactgggtgtaagagctactctgaactcaaccactccacaaat

SEQ ID NO: 76486 - DNA, 218 bp, Arabidopsis thaliana landsberg
acatatctgggggtcttcaaagagtgtctttatcacattctgccttatgcgtctatgcttcgggaataagagggaataatgaccgagcgcactccaagggcgagtccgtgcaacacttaacacaccacattgccggctttcatcgctgggtcccatgctcatgctcatgcacgttacaagcttgacagtctatctctggaaactcactctggctgacc

SEQ ID NO: 76487 - DNA, 550 bp, Arabidopsis thaliana landsberg
gctttagcttaaattctaaaacaacagtaaaacaaggtttacctgtttgtcaccgagctcgtgaacttttcggtgggagagaagtctatcaacagaatcttcggtctggaaggttacaaaaccaaatccccttgaccttcccgtgtggtggtcatacatgatctgatgctcaattatgtcaccatatacacagaaataattcttcagttcatctacaaatatgaacacacattatcagcaacagttataaccacagacaataacagaaaacataggagaaacttttaccttcttccaaaagtggtggaagtccaccaacaaagattttcctggtctttgataccgctttgatatcagtatccttgtcccctctaggaagtgtccttttcagatcaacctaacatttaaaaggaattaaccaaagcatccaaacagctaaacaaaatcagagcagacgatttacgacatacaaactaatcaatcatatctacctttcggtcatctattacatgatcttcctccaaactttctcagcaacagctgaatcagc

SEQ ID NO: 76488 - DNA, 161 bp, Arabidopsis thaliana landsberg
gtggctctaagcatacccaagcgtgtccatcaggatactcctagactcacgcgaaccactgctgtggagttgggcatgctcttcatcaccgtttcatcgtcgtatccactacgatctgactgtacaacccaacatacttctttggactctatagccatggt

SEQ ID NO: 76489 - DNA, 164 bp, Arabidopsis thaliana landsberg
tcgacgacgcgctgaacaacatccacatcggccgggatgtactttagcgatcccggggctcggtcgtacgcgcggggcgaatgctcgacttcgtcgacttcaatcacctccacgccggcgggcaatgtctggcctcgcaagcacgcggcatcgtccccatcgat

SEQ ID NO: 76490 - DNA, 556 bp, Arabidopsis thaliana landsberg
  unsure (1)..(556): unsure at all n locations
aaaggccactccttgtcgcggctttactttcagaccaacacacttctcattatcatatcttccattcatatttctcccattgggctgggagaaaaccattctgttttacaactcaaaatcccaaccatgttaaatcgaaagaaagaaacaatgattacctcgaatgggaacatcgtctctccaccttcttcgacactcgataagaacaataggaaagtcacgacctgcattcatatgttgagccatgagtggaggatcaacagatggtagttttgaatcaactttaataaaatccgaagcaagaaaacgaagttaggttgctnnnnnnnnnnnnnnnnnnnnnnnnnnnnnnnnnctgctgaatggaaagcatcataatgtgaatcatacttctggccaagctgatacctcaagatgttgaatgactggagaataaacacaagaaggtcttattaatatattcataagtaggtcttattgatcatatatgcattggttgtgtattgcttacttcgtaataatctttggggaatcttgtggctaaagctattttctc

SEQ ID NO: 76491 - DNA, 326 bp, Arabidopsis thaliana landsberg
aaaaactagaacctattaccgtgaaaaaactcttcataaggtttaccctgaacaacaaaaacagaggcgcacaggcgatacttctttaggatactccatctaagccatagagagcacattgtacatttgaccgtgagagccagtcatgatggacacgatgttctgagtatgacggattctcatacctagaagatgcattagcacggaagcctttattctagttagcgagttagtagatacaagctcaactcatactgcgcacctcatcgacagaccctcataccttactgattcatcaaatgattgagtaagaacatgatataaat

SEQ ID NO: 76492 - DNA, 440 bp, Arabidopsis thaliana landsberg
ccgcagacttactgcgcttcgatttttgttgacttccttttttatacttattgctgtatggtaggcataaaaacgtgacgttcttaattttcagttagttaacttgcaaatccctatttttggggttgcaaatttacatctaatcctgaactgtacaataggtacccccgtttttttcacaccaaatagtggattattattagaaaaagcatgaatattggggaggagaccttaaaaaagtttatcaacagcttgttcaaaaacacacaataaaaaaaattattaacaatttagtgggttttgcgttctttttgatcgatttgggaccttttttgtttttccggcccatgcatgaccgcattctgctccggctaatttataaccataccttgctttaccggactgcccgaatcaagttttatgttttcattgaagaacat

SEQ ID NO: 76493 - DNA, 437 bp, Arabidopsis thaliana landsberg
  unsure (1)..(437): unsure at all n locations
ccttctgtaattattaagctgtacagcatatctagttgatattgatactgctatgtaatgtgatcacgccgagcnnnnnnnnnnnnnnnnnnnnnnnnnnnnnnnnnnnnnnnnnnnnnnnnnnnnnnnnnnnnnnntcgtccatattccactacgatggtctataatcggtttatgcttgggaaggactagggtccaaaatggaaatatatttatgtaattggaccaggacaccagtttgtcggtgtttgacttttatacatggatgatcctgaacttattgctctctgtggtattacaaattgggaaacaatctaggtgaattggggaataaaaaacatatttgagctattaaaggcacttagctcgaaattgacgagggaccagcgtgttggtctgacagatctaatgctctaataacgaaacggcgaatgatc

SEQ ID NO: 76494 - DNA, 400 bp, Arabidopsis thaliana landsberg
agatttgctgagttgacgctctaccacgtgcgaacatggacaataatacaataaccagggatacgcgcacggcatgcggaccatggctggggtgacatacatatatggcgtggaagcgataatgacaagaactctgaccagtcttgtggagaaggcacaacttgctgaggtataaaaccagcccacagacctggccatgactgggctacgaaacgatctggacatgccttatatgacgctcaaacaatatgtgtcatgccttatattttcacaaaaagctgaggttacacacgccaatatatctgcacttatcacagactgaactcgaatctgagtagatctataactgcagcacaaatgactatgctgcaaaggactgcggcacctaacaatggaggag

SEQ ID NO: 76495 - DNA, 230 bp, Arabidopsis thaliana landsberg
gtcgtccgacgatattcacagttctaccggagttcggcgtttatctgtccatcggatgtcttgggctggacaaggtcccaacaatttagatcgagaccgacgatcaggcaagcactagagacgacatggttaaatagcctgttgacttcaatgaatcgattaccaagaccaggaatgatagttctgcatcgacgactctgcgacctggcttgctacttaatctgccggat

SEQ ID NO: 76496 - DNA, 307 bp, Arabidopsis thaliana landsberg
  unsure (1)..(307): unsure at all n locations
acgatagattacccggcccgggcgagctatctgcgtttctgatcattacggctcactgctgagggaagtatatctttctgcacgagaggtcatgaactctatgaagagagggcgtctgtaactagccttataggtggccatgcctgctaactgagctgctacgggaactacatgcccccagcactgatgagagccannnnnnnnnnnnnnnnnnnnnnntgctcatgcaagcttacatggaacggagcataacctggtgtagcttttacgagccgagggtgctctggggctcacagcctgacaccta

SEQ ID NO: 76497 - DNA, 409 bp, Arabidopsis thaliana landsberg
aaccgaggtggtactcatgaggataaatggaccgagctatgtgggagccaatgttaaagcgagttgctatgcactcctgggattcggctgctaccccgggcactatggctgctctggacccgaatgcagacagccgttatcgctgtatgtgcgggtatatctcgggcgcctgtataggcgcagcctctgtggcaaaatcatagggtgcacgtatcaacgttacctctcagaacactgactacacaagcacaccttgcattctggggcgacggacggatcgtaccgtaacctcctcttcttcgtgccttggaaccatcgacgggaaatgcgagcatgttcgcctgaggatcatagagtgcgtctggctaggtgagcatgggctctgactgacccttcgtggactatcatt

SEQ ID NO: 76498 - DNA, 405 bp, Arabidopsis thaliana landsberg
  unsure (1)..(405): unsure at all n locations
nnnnnnnnnnnnnnnnnnnnnnnnnnnnnnnnnnnnnnnnnnnnnnnnnnnnnnnnnnnnnnnnnnnnnnnnnnnnnnnnnnnnnnnnnnnnnnnnnnnnnnnnnnnnnnnnnnnnnnnnnnnnnnnnnnnnnnnnnnnnnnnnnnnnnnnnnnnnnnnnnnnnnnnnnnnnnnnnnnnnnnnnnnnnnnnnnnnnnnnnnnnnnnnnnnnnnnnnnnnnnnnnnnnnnnnnnnnnnnnnnnnnnnnnnnnnnnnnnnnnnnnnnnnnnnnnnnnnnnnnnnngccttgcaagtttataagctcatagcatattgcatggagcatggtgatacctgtctactgctatggtgtaacctaaacctaagtcgttgtgcataaggcataggttaagtgtaatcgtgtcc

SEQ ID NO: 76499 - DNA, 263 bp, Arabidopsis thaliana landsberg
ccagtcgcttcatattatgtatcattgaaggctaatttatcaaataccgaactataaaactttgaaattcttcatattaaagtatggagtgaaatttattcgaaactcatattaaaaaaataaaatacaagaagaagactttaaagggacaggtggggtaagactttgggaacttccgagccttgcgcaagtgtacgacgtttactagtgttaattatcgcttacgcgcatactttaggcgcgtgtttaaaactttaaggagt

SEQ ID NO: 76500 - DNA, 518 bp, Arabidopsis thaliana landsberg
ggatttgcgcgaccgggccatcctgatgctcgccttcgcctctttgcggccgccggcgcagcgaagtggccgcgctgggccacgagcagctcagcgtcgaggatccggtcatgctggaggatggcagcgcccttccctctttgggcatccatctcggccgcaccaagaccggcagtgccgatcaggccgatgtggtctatctcaccggccagcccgtcgaggcgctcaaggcctggctggcggccgcgaagatcgaaacggggagcctgtttcgaaagatcgatcgctgggggaatgtttcgcgtcggccgctcgatcccagtgcggtcaacgacattgtcaaacagcgggctaagctggcaggcctcgcgccatcagacttctcagcgcatgggctgcgctccggctatttgaccgaggcggccaacagcggcgtcccattgccggaggcgatggagcagtcgcggcatcgctccgtacaggtcgcgtcggcctattacaacagtgagacgcggcgc

SEQ ID NO: 76501 - DNA, 581 bp, Arabidopsis thaliana landsberg
  unsure (1)..(581): unsure at all n locations
gccggttcatcagaacggcaggtcgtctgccgcgtcagcgggcggcggcatatcattataggcatccgtttcaccggtgccgagtttaacagattccattctccaggcatccagattggtgatataattctccctgccatcctttatccatttggtacccttgatgttgaactgcacttttacttcatcacccaggcggaacctgtcgggcatggctgttctgtcctgcacacattgaaactttgcataattggtaataactctaccaccaatatcttctgttttttcaataacgaattcccttgttttaaaggtttccgtgcgctgaacgatatcaaaaaccgccaccagtttgcctgttatttcgtatgacatgatcgtgtaaattttactcggtccaaagtaatggtaaaatccgcaggaaggctaaaaaaaatagcctaccctgttgaaatagtactatcttgtcaggaacacgcaatctcgtaccgatggtatctnctgctatattggttcccgtaaaccatgcaacctgcaggctggcgatcagtcaatctcggtaaagggttgatgtatagcgc

SEQ ID NO: 76502 - DNA, 487 bp, Arabidopsis thaliana landsberg
ttcctccacggttttctttttccattaaccaatctcatttcctatataaaagcatttgtcaataggtcctatttaaaataactttctcatgttgtcgcttcaccgaaatatgaaagaagctacggcatacgagctccaccaccatccttttgttctcattcaatgtagtttattattatctttctcttttttgtctttataaaatatatgtagttcttcataaaatattagttcatatctatctatatggctaaattcaattcgatagtaggttctatctcctccaaccatatactcgcctttgtaagtttctgcttttgtttgaaacaatttacattagatctttgcttttattctgctatctaattagtactctgttaggttttttgaaggttgtctaaaagaattttgacaatctaattcacaaaccagaggtcttcagcaagatgaagtttaaaagtttttgttgtttacgctgggctgggtc

SEQ ID NO: 76503 - DNA, 275 bp, Arabidopsis thaliana landsberg
gtctaacgtttactcgaccttgttagattcatggagtcaacacctgaatcctattcacgatgaggaagcggatttaaatgctgctataagactagcctagaatccggctcacatttgggagcttggccattctgtctgctgtagtagatggatgggacgctgttaaatgaattaatcgggttgtacatcaaaaacaactgctgaaactttcacatctgaggatgcctgtcatcgtatatgctgtctctacatatattggcagagggaggaatcga

SEQ ID NO: 76504 - DNA, 215 bp, Arabidopsis thaliana landsberg
cattaagtttatataggagcacgggatcacctgatgtttatatggtcaacagagagtgccgtgtcaacgcatatgcatataatcctgatagtggtactcggtttggtggtagagtgatccactcaccgtcatttttttcatgtatatcattctcgcatatacggtctggcaatcagatcccgttgccgtctattttcgaccgattttctccgtca

SEQ ID NO: 76505 - DNA, 383 bp, Arabidopsis thaliana landsberg
tgtatttccacactgttgaaagacaaaatgaacttttatgagaaacaaaacagagccatgtaccaaagtcaaatcttattacttacagagagaatctccaattttgaatcttgttctgcctgaccattggtttagtgtttcatctctagattctggaaccttccatgtgttagatttgcctcccaccagaatctctctaccttcagacaacaaaccaaacaagagaagcaaacaacaacacatcattactgaagacattctggttatacaaaaaagtttaattatgtttctgtgatgattaatcatatgatgagaatttgcaagaataaataagagaagataggtcagtggcttcttgaatccaaacaaatccttcccatgat

SEQ ID NO: 76506 - DNA, 665 bp, Arabidopsis thaliana landsberg
ctcctaaatgatcagcaacaaaactaaagtttctaactttctagatcatctcattgagcaagtgttaacagacagaggctaaaaagactaaactttctcagcatccaaaaattggagaaaatggagaaatcaaaataccttctttagaggcaaacgcgtcacaggaaacaaagaggaaccctagaacaagactcataagagaaagctgcatcgttgaagataagtaaagtctcattcttttttcctccttgctcaaagatttcttcaaattctagcaaaacccagaatttctcacattatagtcatcacaaaagaccaaataatctccagcctccagcctccaggagacaattaacaacaatgacaagagcttaaagagcaaagcaagatttagcagaaaaaggaaaatgctttaattaataatattacgggtatttagcaaaaaaaaccattaaagaaaaagaagtttcttagtaagtaacagagatggtgacaaaagagagagacttggattcaaagacagctttttttttgttgttgttctattctaaacggagaagaagacattttgcttttcaattttgtcttttagaaaagaaagatatcacttttatttaaatatgcgtccctataactttgactaaaaataagaatattccacattt

SEQ ID NO: 76507 - DNA, 381 bp, Arabidopsis thaliana landsberg
  unsure (1)..(381): unsure at all n locations
tgagctgatcggaccaccgacaacgcgnnnnnnnnnnnnnnnnnnnnaacccgtttgatcagttagaacgacccctggcatgtggagcgcgcataaacagcgctctccgacatctcaagcactaaataaggcaagcgctagcttgccttcgcgctgacgagcgccaatcacggcaaagccactctggcagcgctcaaaaggaacagcaccgcacacatggccacgaggaaggccaacggaacgagaatcaagcagggcattgacgaacgggctactcccccgccactggcgggcgagcaactcgctctacatgatccagcacatgtcggactcgttcagaaagcttatactgatcgctatctagctgaccacaggcggcga

SEQ ID NO: 76508 - DNA, 726 bp, Arabidopsis thaliana landsberg
aacaaagtacaaatgtttagatcatgatcaacaactgcattatgaactagaaacaagaagaagccttttcggcaattacattggtggagcagttaaagaagattgcacacaagcttctaagaagtagaatgttttttttaatttcaaatgcacacaagctcttactcgtcttctctttctggaggaaggccgcaaggtaagagcattttctgcaaaaaaaaaatcaaagaagtttggagttagtaaaagctattagcaaaaatgcaaagtcattgactcttgagtgtagaagaaccagaagataacagtttgaaacaaccctcaagattggtagtttcctgctaacttacgatatgatacaatctgtttttgacaaatacagggtaagggttaaaagagtttcatgctgctcccctttccggttgcagaggccaagtaaatatctttgaggaagttccattctccattcttaagggtaaggagttgttgctgatatcagaaggaggaatgttgaaaaactagaattatagcaggttttcttgaggcccacaagttccttgaagagaaagatatttactggcttctccaagctaaagaggggagcagcaggaacactttaccctgtttgaaacaaccctaattgttcctctcccttaagacactaacacattaacattctcaatatgattccttgacatgatggcagaagaaagatagtaaacaaac

SEQ ID NO: 76509 - DNA, 333 bp, Arabidopsis thaliana landsberg
  unsure (1)..(333): unsure at all n locations
cctgggatatggacccgagtgnaaccacaggagnaanggtttaatttttccccatcgggacaaatncattggctccgtatatagtttggntataaacttcatcagaactcaccattattcctagctttctcgccacctcagccacctatacgtcataataaaatgtttaacaaaagttttgttcaaagaaagtaaatagttttcacttttcacgtactttctttagatgttcatatgtatagacatttccacacgggttgtgaggattcattatcaccacagcaatggtattttcgtctgccatggcctcaacaccttgaagatctatctccc

SEQ ID NO: 76510 - DNA, 332 bp, Arabidopsis thaliana landsberg
gcaatgcacgcttcttacatggaattcaatgtatctcttttcattttttctatcaactttctcttttcattgttttgtttttttgagaattagttcttaataattgcctatatctgtgtgtgtttatcaggaagtattacaagcaactcggaatcagctggagagagagctttctttggatgatattcatcggattcaagatcttcctgcctacaatctcttgttccaatagatttttttttcttttgttattttcttagtttgatttcgatttttatgttttgtacattaacctgaatttatgaccgaaatgaaaatgataatcaatgaag

SEQ ID NO: 76511 - DNA, 619 bp, Arabidopsis thaliana landsberg
  unsure (1)..(619): unsure at all n locations
tttcggngtgtatagctttagtttcactcacgccaaacgcaaacatggtataatatactttagaaagcagataatgacattatattgttgttttctataattaaagcacgtagcgtaatgcagtaatggtttgtattgatattacagtttgtgtcataaaccgttttcaaacttcagtatgtaaatttttggtaaaagaaaatatttcttcttatttttattttgtagtaattgaatttatttattgggtggatgcattgtcatttcaaatgaataagccaattatcaaatcatgaagtttagagatttatgaactggtttacaaaaaaaaaataaaaaaaaaataggagatttatgaactatcttaccaataagaaaatggctaccacatttgttaagaatataccgagagtttgtatgggatgacaatatgagattagctaagcacattactggatggatcaaagtttagaattgttgtattttaatatgtccatggttctaaggactagatctatatgacactacatattaagaatacaacatgaattgtttttgaaaaacaagaagagtaatttttttaaattgaaataatactgattgatgacatgagtggttt

SEQ ID NO: 76512 - DNA, 559 bp, Arabidopsis thaliana landsberg
  unsure (1)..(559): unsure at all n locations
gggagaaagtgggaaatacacaattatgtttataggcgagtactctctcacgatagatgataagaaaagaatatctcgacctggcaagttcaaaaaggaactcggcaccaaagtcgtcgtcactcgcggtctcgataattgtcttttcctttttccctacaagacgtgggaggctatttctaaagagactgccaagctcggcatgatgcaatccgatacaagaggattcaccagattcatgttcagcggagcttcagaaatagatatcgattcgactggcaggatacttatcccggattatttgaaagaattcggcgatcttaagaattctgtggtctttaccggcgtccatgatcgaattgagatctggaannnnnnnnnnnnnnnnnnnnacaccaagcgaattgaatccgaagtggacatgatggccgagaagctcggaagcgtcggaatcaaataatatccggcaataaatcatgaattccaacacgtctctgtacttttacacgaagcaatagacaatcttgatctatccgaaggggatatattcctcgacggc

SEQ ID NO: 76513 - DNA, 294 bp, Arabidopsis thaliana landsberg
  unsure (1)..(294): unsure at all n locations
acgcttgaactctttaaaaacgtcctgaaatgccttgaaatctttaaaaccttttttaaatcccttgtgaaacttttaaaaacgttgtggannnnnnnnnnnnnnnnnnnnnnnnnnnnnnnnnnnnnttgtagatgattttaaacccttacaaaatcccctgaaaatcattttaaaacttatacacacccttgctaaatttaaaagaatgtttgtaaagtgacaaaaagcccagactacatccctggccaagacgataggcatgcactaacgaggctgctgtactcaaaacca

SEQ ID NO: 76514 - DNA, 510 bp, Arabidopsis thaliana landsberg
atcgttgaacaagttggttgtagtctacccaagtcgttttactaaggggcttaccaaaaaaattagtcgtaccccttggaatatttaatttgaagtgcagaagaagatgcacccaggattcaaagagaagcaaatttatatgaagtagaggtgacatcactttgcaagcaaattgcagttaacatataggatactaacacattaccaggtccccttctatttctcactgggtacagcacccaggattctatataatatctaaactttaacagaatcttctcactcaaaacggcaattttctattctagaaccattcagtacgccaaaaaatgtcttatcactagttgtagtactaataagagccaacactcaggtctagagcacctaaacatgttattttcatgtcaatgagacaacctctagtagtacattggagttaatacaaacagataccaaagaaaccaacaagaataggatacattcataagagacgagaagtccctaaatgag

SEQ ID NO: 76515 - DNA, 624 bp, Arabidopsis thaliana landsberg
  unsure (1)..(624): unsure at all n locations
gaagtatagaaaggaaaatcgttacatactgactctcatgaacaaacatattttgcttaatgaaaagtcaactcgatctttattatttatgaggataaaaatcaaataggctttgtcgacaaaatgaaacaatcagactacccttttagaatatatttaaaattaccaaaaatattaaaattttaggaaattacacatgatgagatgaagctatatacctccaactccaaatgaggatattttagcatgtggaggtctttattcgtacggactattttgcaaatcattttatatgattgtatataccataaataatcattactcttagtcccataatttgtatatataatagtaattcgtagacatagatgatcaaagttctttgtaatcttactacatacacaaaaagtaataaaacacagacatttttggtgtattaactgcgcttgtccttttgacaaagaataaaataataactgtgcttgtcctttctcgacaagtttgtgttataatcgtctcacgttcatttcaagattacatgcagagattgtcgaatgaagtctaaatcatcaaaagtaattantccttatttgttctcacttgaatataaattaacgaaatatg

SEQ ID NO: 76516 - DNA, 313 bp, Arabidopsis thaliana landsberg
tacacatgaccaatacttctacttactgtgactacaccatcaacacttagggacgcatgaatccggtgggtatggggactggagccctatattacttgacgacatgtgtctgagtgtgtcttaaaactacaaccgactggggtctgaaacacccaaagattgcctctcttgacccaagattcattgacataggctcatgatggattcgggcaagccatctaagctgataaaggcatgaccatgactggttggtgcaaaactgagaaatgtaactatatgtcgcgtgtatgaatgaggatgcccactaggacca

SEQ ID NO: 76517 - DNA, 527 bp, Arabidopsis thaliana landsberg
aaagtgaaacctttgtttaaaccctcctagtcctttatttgtcccctccttccatcttccggcgcaagggaacttttccctcgtcgcttacttgccgccctgcaacacattaattgtttgattagcagtcatttttcttttttatcgaataacacctactttatcgactctagtttcttcgtacaccatcaacaaatataatatgtaaatatttctttatcctgctatttcgtatattatcatgatattctcaaaattatcgataatccaaagttatgagcaacatcttctttcctgttttaaaagccatagtaaaagttttgttatcgactgtttttctttttgaaaaatgataaggagatatatatataggtacacacctgagacttaaatgctttgcgtctctttcttatacggacaatatatctagcggaaagagcctaccgattctctattcgtatagggacaattgtgtcatctttaattggcaagaaaatttacacctaaataacgaaatgatatataga

SEQ ID NO: 76518 - DNA, 326 bp, Arabidopsis thaliana landsberg
tagtgagagagaaaagctctgaagaagaaggaagttgttttcgagatgcgagctactaaaggaaccttctctgtacttcttctctttctccttttgattctcattctgcccagtctttaattttttttcctttttcttcttctttctctctatttcttctttcttcttcttcaatttcactcttgttgggtaagacaagaatcgtccaaagtctttttttttttttttcttgggtcgactggtattggatctggtacttcggcctttgaaagattggctaatactttgattttggggggtcacgcttagctcctgggttatttgcc

SEQ ID NO: 76519 - DNA, 424 bp, Arabidopsis thaliana landsberg
gcccgcgaaacgggcgaaaggagagccaatcgacaacccaagttgtttacaaattatggcgaagtgtgcatagaccctacggctaatgattagaacaaggtagtgatggagggggtgctggatattacatatgggcagagtgacacacatgacatgagcgagatacatgttgaagcctcattattgacacggcctaggagtggctaaattatgacaaagacatgctgccttactggaaccgcgagtgagagaacatcaggcttaactgatagacacagagggggtctgttaaagcagcataattgactgcttagaccctgcaattatgacgcccgagtcacctacgatttgcatggtctatgccgcagacccacttccatattcattacgactaatgaatccataaaaccggctactaaaaatc

SEQ ID NO: 76520 - DNA, 550 bp, Arabidopsis thaliana landsberg
aaccccgaccaatcttaacaaaactccgatcgatgtaccaaaaatgttaaggttaagacatcccacccacatatctatgcctattattgactatacgcattagaataaaccatcaaacatatcacattcttgacattttgtaaattaacacaccgttcattcacaaataacaagtttgtgacaaaactataaatttaatccaacattttatgactaacataactcatataaccgcaatgttcataaactgctgctctatgaaatttaaactattctcttatggattgaacttacacattgtacttgatgattcaaaagaacacaatttctttatgatcaacttaataggacattgtgtggtatctatgatcccatagacaaaaactaagacattgagctttttttctaactcctgctagacaactgaaaaaaagatagcactatcgtactagtactagtcctacagcttcttcttcacgccattctataacaccaactgtgtatgtgctttattccatgtgatatcccactcttccttctctctataaaa

SEQ ID NO: 76521 - DNA, 335 bp, Arabidopsis thaliana landsberg
gagaggataggggaaaattaaaaacaggacatgggagaactcaaatcttctgtctagactaaaaaatatataattccacctccatcttcctgctacaccaggcctcctggctactgctagattactgccaaggttagtgcgttgcgtttgtactgaaatatatcagaccaacctaatttggttcccttttgatgtatttagcggagattaaatacggtttatgagtcactctggctatatatgctagagaggacttgttctctaaaactgcgacccataatttgcatgcgagatcgatgaattctagagagggaatcatctatctgccatatgag

SEQ ID NO: 76522 - DNA, 545 bp, Arabidopsis thaliana landsberg
ccgggtcgacccacgcgtccgaatatgctgagctgattaagagaggatcaactgcggaggacttgggagcaggacacgctgaagcagcacaagtgcagggtctaggattgtacaaggcccctcgcgatgagggtggatcaagttctttgagccttgaccctcctcaaatggagcctgagcaggctgaacccctaccagcacccaagcaggaggatgatttggaagataataggaaggggaaaaggccacgtgaacgtgacgagaagagaggggagaaggagcggaaacgagacaggcatggtgatggaaaggagaggaggcgggacaagcacgagaggaggcacgacttggaggacagatcaaagcggcaccgcaaagacaagcagaagaggaggcacgattccgattctgattgataacggccctgcgcctgctcctgtatgactactgtatactgcgatatttcaaacccatggagccgcttttgtttgatgtattgcctacgcttaaattatgttgccctaatgatgtttaaggataaaatg

SEQ ID NO: 76523 - DNA, 338 bp, Arabidopsis thaliana landsberg
tgtagctcgttcactcaatttcatcaactttaaagcttttcctgaacactcataccttacatggagactgatattgacagtgtgtgaaagatgttctatgccaccatgcaccatctattttcgtcgataacgtcttcggagaagacgccgacaacatgagaagtttgtttttcacgcggtgcttctgagatacggccatgatgggctcaaatgtgtctaggacacaagggccagagggatgcgatgttagccactgccagatgttagatattgaatggtctaccgctgggctgaattacccccattagatttaactatgacacactaggggagaccac

SEQ ID NO: 76524 - DNA, 509 bp, Arabidopsis thaliana landsberg
  unsure (1)..(509): unsure at all n locations
gcctacgcccacgcgtccgtgcatttctggaaccaattcatgaaaccatctgttagggttttgggtgcatttctggcactaatatggccgtgcggatagcaagtagtctgcgcagatgccatatatccgtcctgtgagggttgccattgcgtcttgatgaagcataactatccaccacatttcttatgatctgtgatataatgtggtaataaactcaaccgccatgctccgctggtgagatttgccgtgtttggagcagggggggagacaaactgagaaatttaacaagcctgataccgacagatgctgtattcatacaggcctttctcaaaaaaaaaaaaaaaagnnnnnnnnnnnnnnnnnnnnnnnnnnnnnnnnnnnnnnnnnnnnnnnnnnnnnnnnnnnnnnnnnnnnnnnnnnnnnnnnnnnnnnnnnnnnnnnnnnnnnnnnnnnnnnnnnnnnnnnnnnnnnnnnnnnnnnnnnnnnnnnnnnnnnnnnnnnnnnnnnnn

SEQ ID NO: 76525 - DNA, 299 bp, Arabidopsis thaliana landsberg
gggtatggttcagataggattatgacctaaaacatcttgaatgctgatgaggtggttcatggttgacatggtcctcgataagtctcaaaagcgtgaatgatgctctagacggacatgaggaaggcatatgatcggtaggagagggctgctgttgatggcatttgacaggtcgtgggatttgctccgctctggatatatgggatcatgggccgtgtggctatcatggcgatcacaggcctaccaatggggataccatggggtgatcacacctggccaggtatacgaagggagatcctgtg

SEQ ID NO: 76526 - DNA, 114 bp, Arabidopsis thaliana landsberg
  unsure (1)..(114): unsure at all n locations
cgcaccgggacagggacccaaaaacgacacgcaaatggtagcgagagggaacccacccaaaaagggagggcgctgagcgagagaccgccggaagngaccggccaaacgcccacc

SEQ ID NO: 76527 - DNA, 299 bp, Arabidopsis thaliana landsberg
gctggatgcaatccaaactaccgatctatgtcacagatcctagttctcgacaatccatcgcctgggaaaatgacgtggaccgtcacctgacgtgttgatggctacatctaacgacggcagtgttgatgcgcgtatctggccgtgaaaaacacattggtggacctctatcttctcatatcacttatacaacataaacctttatttggtcttgccctattagttgtctatttcacaaactcttcatgataaaaaacgcccttatgcccggcttcatgcaactggctaacttcccgttgtca

SEQ ID NO: 76528 - DNA, 295 bp, Arabidopsis thaliana landsberg
agacagggctagagacaaaggtcctctactgtacaagctgccgccccacactgggtgcggtcgattttaccggatcattcacgaaccctaaaacatactagtcctacatccagagccaaagtatgcagactgtctctagtggctgacagttcccgatgtgacgggagtacgacagagatatatgccgtgctcagaaaacccacagcggaatcaacatttgattgatactactgagactatgataacctcaggatggagaaaacgagtcgagtggtatcactggctatttgaacac

SEQ ID NO: 76529 - DNA, 634 bp, Arabidopsis thaliana landsberg
ctatcactttaacaacaaggtcatgctttggttgttcttgtgacttacctgattgagaagaaacatgattgtctttaagcttcctcctaggtttagttctcttcatcatcatcatctctggtccaagattcttgagatgttcttgcccaaaccgagtttcaggttggagattggaagaagactcgattgttagacaagtcttcttcctctgaaccatctttccttttttttgctttgcctcaagaccaagctattgtttgtttagagcagaagaaaatgggaagatttcaatagtggtggtagggtaaaaagatgcgtgtgcggttttgtctcggtgccttttgtaaactttacgtgaatttggttcacacttcatacaaatgaaagatttgaataacttttgtgatttggacaagcactactgatattgtggtgcgtgggtctacttctcttatattatagtggccattttttaagggatgattaactattgcttcttcgtgttacacgaaataatgcgcattctgttctttgtgttttctctatcaatcctctataggctcctgtctatctcacaaataacaacgatctcaatttttttgtattgggacccgcaaagatacttttttttttt

SEQ ID NO: 76530 - DNA, 413 bp, Arabidopsis thaliana landsberg
agtgttagtgtctattacaggctgaaagcactgctaatgtcaagcgtctaaggctgcatctactacgcaaggaataacacgtgaaaaaaatggcgtaaacagattatatgcgtaacgatacccctataagacatcctcgaggattcgttatgcctgacagactgatgaacgagggaagccatggattgcggccggcgaggatggcctctaagatgattgaagctgatgtacctgggacatcaaaagctcttgaacagcggttacttgattaacgcgtcgttcactaggactaagtgaagcgtgatactatgattatatggaggatattacaagcatcgagaagagatggacttgatgcacaggaggtatgcggagatgcacagggcttagcatcatactgtgaaggcatatct

SEQ ID NO: 76531 - DNA, 583 bp, Arabidopsis thaliana landsberg
  unsure (1)..(583): unsure at all n locations
ttccaaataaaacgttgaaatcaataatgagttattatattttagtttaagcggatatgtaactacgtatagatactaaaatatgtatatgtgtgttaatttggaatacggacatatatagtagtatctagtctaactcatgtaccacgtccatgcaatgcatgagacatataaccaggtaaacctaaaattggagatgatcttataatggatcataccaaattatatattaacctgatcagcatcaaatcaaaaattataacaaatcacatatcctcaatcacaagaccaaaataattaaactaaaatccaacttacaagatattttttatggttctaaatttggatatctatctatttgtaaactttagtgtcttattttgaatggagacaaaaatacagaaaaacctatcactctatcattcatacaaatgctgacctcataaagacacataacagtgtttggtgggtctgccaccaatatatatgtgtagtatatcagatcttatattattacatatgtatatatatatatatatgggggaaatatagntattacttacattataggcatctaaatttg

SEQ ID NO: 76532 - DNA, 277 bp, Arabidopsis thaliana landsberg
cagaataagcctacgctctaacactatctaccttactttcattaactcttcagacctactctcccatgagggagtgccagtcacagagaaccgtaaccctctgcggactaaatagttctacaatgattaacagactataccaacacccgctgctctgccccgctatacaggcggactggatccctaagatatacaattacctgcgtgcgctgctactgatctatgactggctctacccccagcatcggagtatacagaccgcactaatacgccatcc

SEQ ID NO: 76533 - DNA, 565 bp, Arabidopsis thaliana landsberg
  unsure (1)..(565): unsure at all n locations
ttttatatagctactttactttttatgtttaatatctatcgcggactttaagagtattaggattagggatatgtggatttccttccattctatacttattggattcaaaccatcagtagaaagtgctttggtccacatttgatattctttctgttgcaaaatgttagatattttttcgaaacaggtttagttccaaaaagttagatgtcttctatagtttcattttatttctcaacatctcaatatcattttttagacttagaagaattatcttaataataatcaaacaaaaactcaatgatatacttgtaatgacaaataatatatgtgtgaaatcttatatattgtacatagagaaactatatatggagtaatttttacttttttcttcatagatattttctttttctattacattatcgccatatatattaacggaaaataaaacgattaanaaatgaaataattaacagagagaaatatactaatagatttgtagtaatggcaccgctgattcttaccgcatttttgactaaatatatgttactgatgagataaatttctt

SEQ ID NO: 76534 - DNA, 469 bp, Arabidopsis thaliana landsberg
ggccacatgcatcgaccgcttcttccacgagaatctttgtgtcacatgcactccgtgctgcgcaagaccacgtagcttatcagcaacgcgctcgccatcacccacagcctcggcggcatcctgaagaagatggacctcggcatgttcagcaaggactcgcgccgacgactgctgtcgtcggagcaggatgagaagggctggcccgtgtggatgctgtcgccggagaggaagctgctggcgtcgggcaaccagcccaagccgaacgccatcgtggccaaggacggcagcgggcacttcaagagcatccagcaggccgtggacgccgtgcccaagggccatcaggggaggtacgtcatctacgtgaaggccggcctctacgacgagatcgtcatggtccccaaggacaaggtcaacatcttcatgtacggcgacgggcctaagcaaagccgcgtgaccggccgcaagagct

SEQ ID NO: 76535 - DNA, 163 bp, Arabidopsis thaliana landsberg
taaagccatgcacgagggctcttatgtgagactgacatttcttgattttatcatgcgaacgcaacaccggggagccgagaaatgatgacgagggctaccaaccaaaagtacctcgagaatcgacactccatatccttgcaagataaacaaacgaaactaacct

SEQ ID NO: 76536 - DNA, 596 bp, Arabidopsis thaliana landsberg
  unsure (1)..(596): unsure at all n locations
ccctctcggccaccatgctgatcgtcatcggggtggtcggcacccttgccacctgttcgagcatcggctacctcggcgcggagctggcaagcgggcacaccgacagtcgcggcgcccggctctacggcatcctgaccccggcgttcctggcggcgatggcgcttgcggtgtcggccaacaacatcggcgtggtgtggatcgccgtcgaggccaccacggtggtcaccgcctttctggtcgggcaccaccgcagccgtgccgcgctggaggccacctggaagtacgtcatggtgtgttcggtgggcatcaccatcgcgtttctgggcacggtgctgctgcacttcgccgcgcgccatgccggcgccggcagcgagaacgccctgcacctcgatgtcttggccgcccacgccaccgccctggacccggcggtcacccggctggccggtgcgctgctgctgatcggatacggcgcgaagatgggactggcaccgtttcacacctggctggcagatgcccacagccaggcacccgcgccggtttctgcgttgatgagcggngtgctgctgtcggtcgcgttctcggtgctgatccggatc

SEQ ID NO: 76537 - DNA, 251 bp, Arabidopsis thaliana landsberg
aaaaaacaaaaaaaccaaaaaacaaataggcaagtacacacaacaaacgagaaagaacacctagggaaacaggaggaaaagaaataccttcacaaaacaaaatactcaaacaagggacaagaagctagggtttcaagcaccaacagcaaaagagcttaagtgaaaactcacaccaggacgaaacgagaccaactcgaagaaggaatatacagaaccaagggtagaaagacaccgtcgaacaaagaacataa

SEQ ID NO: 76538 - DNA, 574 bp, Arabidopsis thaliana landsberg
cactacacgcgaaggagcccaacgtgcacatttgtgttaatatccagttcaagcatctaagagaataaagtttaacctgaaagacatatgggcagattatgctcttcagattccggcatattctaccgagttccgatccttctgtatggcataattttttttattttcattcaaaaaagtttatatatgtatttttcttctgttttcgaagacattttacatttctacaatgtttctgtgtatcttatattactatagcaaatagaaacctggccgacatacatatgttaaggacgaaattaattaatttgagtctgtgactgacatttattaattttggtggctaaagcctctataaaaatatatgctgataatataccatcattctacatataattacgattctttctatatacgattcttcaactagtaatctaataattttgtgttattaacttattatcatcgatatgcatattgtacgaacgtaaaaaatatagtatgcattagctaatatggatctttgatcaaagatatcatcggctaatagaaaaaaccaagaaactaaaattac

SEQ ID NO: 76539 - DNA, 335 bp, Arabidopsis thaliana landsberg
  unsure (1)..(335): unsure at all n locations
aaaatgtatattactaatcagtttttacttctatttatataaagatgcatcgtacatgcatgtattgttatatttttatataaatatcgttgaaattggtattgtgtcgtgtaaaggtggttataatgtttaataattcaaaatttctcttcggtagtgtgatcatttcttttacttaaaaacatcctcttgttaaaagtgtaagctcgtatactcaatcaatagggcaatacttctattatcgacaaaacaataactantttgggttttgggacaaccaaaaaaaggaaaagttcttacagggacatgcagacacgagaacagactgtcacatg

SEQ ID NO: 76540 - DNA, 621 bp, Arabidopsis thaliana landsberg
atcttctttgtttctctcattagattcaacttcaacacaagtctctttcttatcttccatatctaacaaacaaacttcttcattccctgtaaccacggtttcgtttagcggcgacattgaaacctcgtgacaattttcgaccttatcaatcaatttagctttcttaatcagaggttcctcttcaacagaatgttcaattgctctcatactaaactcgaaaaactcagaatttgcatcactaacttacttcaatccaatctgttgaagaagaaagtataacaaattcaaagagagaaaatcaaaatcaagaacaattaaatgattctttagttttaacttttaacaataacaactgattaattaagataatgcaaagttaaatcacaattaacgtgtaataagccaaaatctaagactttgtaataacaaagatgatctgacttaaaagcatttatcaaaacagtagttcgtacatatatgtccgtatcattacacaagtgatcgatctggattttgtattccgtacaatttttccggacaattttcagtaagaaacttacagatgaatttggagaggaagaacaaaagttggagacggagagaatttcaaatgttgacctt

SEQ ID NO: 76541 - DNA, 615 bp, Arabidopsis thaliana landsberg
  unsure (1)..(615): unsure at all n locations
aaaacaaatatttcttctcttttagttctatgattgtaactaataacaatgataataatgatttttttgtgtgtgtgtcgtatcactcgatgatgcttaaagattattgattgatcgcaactacaaatctactgattcgttttttgactttttattctttgtttattttggcggggactcgtgtgtagtttaaaggagagattaactataacattaatagtaacaaaaataaaaccagtttaaatcaaaactaaggaaaatttcctcccaaaaattcggggacaagttcgttttcttctacacgcgcaggtcttgaacgtgaggctgtggaatcatcgtgttgtcatgtattacaatatttgtcatcgtttttatttgttttcacgttatctaaactattatacatttgttttctttttctcttatttgtcatagattcttaaccaaaaagtcagaatacttcctaagacttttggtggaagataaacttcttttgtcattgagagtatgttaaatagattaaataaataaaaaattagcttccaaattagatagaaataaaanataagaaatggatggtctgaagaggaagtcgacgtctgtgaccactacaac

SEQ ID NO: 76542 - DNA, 122 bp, Arabidopsis thaliana landsberg
atgaagctccgacacgtgaaagcttcctttttcttctattgcctatagcgcatatggagggagggaggggcttgtactcttgagcactaatacgcgcctgaactaacaatatactcttaata

SEQ ID NO: 76543 - DNA, 527 bp, Arabidopsis thaliana landsberg
gatcgcctactttctctcgcccagagcacctccatcttaattttctttcttatggtaacccgctgcatatggagggtgggggctatggccctgatggcatacccctgactatccaattcttataccctatcgcaacgcagatgtcaggttagatctccctgggcactcccggatcctgtctccttggagtgtaggctgcattccttcacaggtaacagatgaccagggagtaacccgtttgactgggagacctctgtctcatagataagcacgtataacttggtggagctcttcttccatggccaggaacattttttggaacgggagaaaggcatagttatctaaaggctggctggtaagaataacatccctgttgctgatggaaagccccatgaatcaaggttatctacgcaggaaaacggacacttgcgctcttggcccaatggataaaccaagactatgtgattcatatcctaaggcttacatcctttatatactaacagagctcgggttcaaattcaaaaaaa

SEQ ID NO: 76544 - DNA, 292 bp, Arabidopsis thaliana landsberg
ctctctccttgcgcctatttcgctttagggggtcggttcacaggtactttcttcgttacttgatggaatactcatggattgggcagttcgtatttagaaggatgcaattctttaaccgctgcacctactactcctgctcatagaacaccgcattgttttgtgttactgtggagacctgaaccacagggagaatttactcgatgcggtcaataatgtggtctatgggctttggctagctctacacggcgctatcatattaataggttatatgcgccatcaataccaacttgct

SEQ ID NO: 76545 - DNA, 309 bp, Arabidopsis thaliana landsberg
ccaactcttcctccaaagtacaacacaccagataactgctttacgaattttcctccgatgtctgtttgattttaggaaaatggtccaaatgtattaccgcagaaaactcaacaatcccttaatctgacaggtataactatatatatctcattcaggttcgcttcatctgctcatcatgtaaactgagcttggatctgatacacactaattgagattacaagtagcctctttaggctaagtttagccttccggttcagttaggtatatatggattaaaccggactcatcttcatggcaatgaaagaaagt

SEQ ID NO: 76546 - DNA, 629 bp, Arabidopsis thaliana landsberg
atctatctccatttgatagtatacattttggaattttacccagagttattttcttttgatttacctaaacgaatcatgatggcttttacatagacagaaaataaaaacttgttaaaaagcaaaagcagtgaccatttatttgtttgtttggataaacgaagataaaaaatcctatatcaagtaaaaaaagcatgcacatgtctagatagataaaacacataaatgtaggaattatgaattcggatcgtgatagagatttagacgtttaaggtaaattttgaaagaaagaaagataaaataaaaatacttatgtagacagacaacaagataaaacgaaatgggaccccctaacttatttatttcgttattgaccagaaaaattaacaaaaaatagtaacggggtccagcaaaaagcaaaacacggcttttgtataaatgtacgtatgcttcacccaaaacactcgaggatgaagaatccaatgactttttcaattccatagtgtttttcatttcttttgagtggccagatcaattgtacaattatgcaatagtttgtctgctaaaattccatatctagtaggtaataagagggattattataattttgtagaatttgaccacccgttgaa

SEQ ID NO: 76547 - DNA, 382 bp, Arabidopsis thaliana landsberg
ccagtcctggattcccaaggctcagaccgatcgaagattgtgctgaatgtggacacgggacaatcggcgacacatagccacgtgttgcggtgactgacgggactgctgcggtgacaacgaaccggcctcggcttctttgctgaccgatcttttcttgcgatgatgctcgtgctgagcccgccatatgcatatgtggcacgactagagctattgaatatgggtatcatacatgtcctatacggattgctttattcatatatggctgcaggaccgtggctcttgctacgaatcttcattagatctattgaattactggtggatctagcgctgagctctgtgttaggatgagctcattgggcacccatttggagatcgtaccgct

SEQ ID NO: 76548 - DNA, 662 bp, Arabidopsis thaliana landsberg
  unsure (1)..(662): unsure at all n locations
tccctctnatttntcaacttcaaactttttattttttccttagcatttatttgcgagcaaatctgaaatgtgcattaagctttttaagctacttttattttcaaaaatctggaattgatgggtaatgaacaaggagagagctacatgatattctagtttgggaagctcttaaaaagcatcgaaacgctagaaaagcacaaatccttcatgggctaaaataaggcccagcaattgcaaatgcctttttcatatatgttttttttggataaaagtgtatttgcaaatgttgattagtttacctatttaaataagaagagtatttggagttataaagtgtattagttggaaaaaaaaatattataagttgtaattagggtctatgacattaataaagatatgttgccctgcatccattacttgctttcatatccgccttagacaagattcatcgttatcaagtaaataacacataacgttttagtatttagatactcgcaagtacggataataagatttagaacaaaacaattattcacgactagttttattaaatttctgtttgaatgttactatttatagagatatattttatttaaattagcttctaaaagtgaatataatattattgttttaaatttaaattaaatttaaccggaaaaaaa

SEQ ID NO: 76549 - DNA, 532 bp, Arabidopsis thaliana landsberg
  unsure (1)..(532): unsure at all n locations
cttgggcgcgcggctcggtgatcctttatgcaggaaatccatcacatcgcgccagatcggcgcagcgccggtcacgccggaaacatcccacatcggttcgccatcgaaattgccgatccacacgccaactgtatatcggtcggaaaatccgacgcaccagttgtcgcgcatatccttgctggtgcctgtcttgactgcggtccagtagccggtcgccaattcattcgacaatccgaacgtcgtgctgcgcgctgcacggtcggacatgatatcggcgaccacaaatgtggcgcgtgcatcgagcaggcgtttcctggctggagactcacgtgcgatcaagctggcggtgcccgtcatgccgccttgcgccaacgtgcgataggcgttggtcagctccnnnnnnnnnnnnnnnnnnnnnnnnnnnnnnnnnnnnnnnnnnnnnnnnnnnnnngattcagtcaagctgctcaatcccaagtcccgcaggcggttgtaaaactgttccattccgagcaataccagcgtgcgcact

SEQ ID NO: 76550 - DNA, 476 bp, Arabidopsis thaliana landsberg
  unsure (1)..(476): unsure at all n locations
aataaaaaancattccttgtaggtaagtttttttttttgttcttcctgctaaagtttcttttttttatactaattgatacttgtgtgttcctgtgggtctagcggcaatgagtttgtgttactcatcctgctaaatacaacaaaagggtgaagtagaataaagttgctttcttttttaatcaaaaacagttggatgatcacagtttagcttcttcgatattgaaaatagggttcttgatctgtttcctttagttccctctttcctctgctgtgatcgcttctgtcttgatgatgatgatttaccccaataaggttctgattagggtttataaactcagtggaatcaaagttcatggcttatagannnnnnnnnnnnnnnnnnnncgtttgattattattgctaatggaatgtgcaatcctctgttaattaaaattgtatgcatcttgctttagaacatcatatttctctgtttcaa

SEQ ID NO: 76551 - DNA, 507 bp, Arabidopsis thaliana landsberg
  unsure (1)..(507): unsure at all n locations
tctttcttctccatcctccgttctcgagaccctgccttagacttttctgttcgaagggatgtacgggacgagttgcggtctcaggattgccccgttctcctgtccgaagcggttcggatcatcaaagacagcagcttctggctagaactcgaggctgcgatcgccgtgctgaaaccggtgaacgactttcaacacgtttctgaggctgatggggcgggaattgcacacgttgtaaatcgctggctgcaaatcaaaagcaaatgggctgaggtgagagaggctgatcagtttcctgatattccgtgggacgatattgacgctatattcaaagctaggcttgataagcaaacgtacgatatacattggatcgccgatgccctccggcctgatacaacaggtccaaactcgaaacttccgcctagcgtctttgcacgcgtacaaggatatntgcagaaacagctggtaaatgacgacgagtatcaccgtgccctcttcgaatcacacact

SEQ ID NO: 76552 - DNA, 122 bp, Arabidopsis thaliana landsberg
cttggcagcgtttttgctgcaaaaacaagtgaactcccttccattcttgaacatgtaagacatacccatttcacataaaagagaaagcgtaaccaaatatagaatcgatgttgcgctcttat

SEQ ID NO: 76553 - DNA, 537 bp, Arabidopsis thaliana landsberg
  unsure (1)..(537): unsure at all n locations
gtggctgctgtcggcacaggcgctgcaaaagcaatggcccgccgactggccgccggcgccgaacccttcatcggtgcacggcatcgagctgatgccgcgcgatgtcgagcgcgcgaagcaggcgctgggcgacgccgccaggtttactgtcggcgacatgtgcactgccgacttcggccaagccgattgcgtggtgatcctggatgtcttgcattacgtgccgattgctgcgnnnnnnnnnnnnnnnnnnnnggtgcgcgatgcgctggcgccatccggcacgctgattctgcgcgtcggcgacgccgacggcggctggccgttcaagttcagcgtgctggtcgaccacgtggtgacgtttgcacgcggccaccgcaacagccgcctgtattgccgcccgttgaaggattggcaagccgcgctgacagcgctcggcttcgatgttgacaccatcccaatgaatgaaggcacgccgttcgccaatatcctgctgctggcaaaacttggcgcaggcggngcagtctaacaaccatgccg

SEQ ID NO: 76554 - DNA, 177 bp, Arabidopsis thaliana landsberg
aacatgtattcgtatcttttttttgataaaagacaagcagttgaaatagaataatacataatcgttaatttatcaaaccattaggaatggatggttctggttacagatatgatagaacacttgaccaaattacgatactacaattcctagtattgatcaattgtgataattgacaag

SEQ ID NO: 76555 - DNA, 570 bp, Arabidopsis thaliana landsberg
gacgtccgaaaatataacttactagtgccggatagagttccgtggattttgcagtatgcatgattgagattcgttttcagtgaaagttttgtacttaggacaatacctgatcgcgttgaatgagatcgcttgggcacagcttgaacaagccgataccgacaagtccaccgagtacgggtgccgttaaatatacccataggctggttaacgtgcctgacacgaccgctggtgccaacgatcgaatcggattcatggaggcgccacagatgggcccggcgaacaacgcctccagtcccaccacagcaccaacggcaattgctgcggtgactcctttctctttagctcctatggcgactcgtaagacgacgaatatcaagatcgccgtgagaattgtttcgagcacgaatgattgctggatggtccctctgggcaatgttgaacctagcgtcgcatgttgctggaacagccaacgcaaggatacactggccatgaatccactacgatctgtcccacatatagatgggcatttcggtcgaggcaatcgtttcatagccagaattgagcgtgaca

SEQ ID NO: 76556 - DNA, 658 bp, Arabidopsis thaliana landsberg
  unsure (1)..(658): unsure at all n locations
taaaatcaatggaattatgataccatatttccgattggttataaattgagtaactaatctcttttaatgtaccaaattatacgtcctgtactttataacgttggatttctaacatatcagtttaagatcaatatcttttattgaggtataatatacctaccatatgaagattcatagatttgcattcaaaccatatgtagaagactgtcctttgtatattcaatttgaaaataataatgtagtggttatcaaaaaacaaaaaaataatcccaagatagtctacttcagtgtgattcaatattttagctaggaaaaattttacacaagacaaaattattttacccaaactggatgttgatttatggagttaaatcttggaaacactatttgaccctccaatcgaaactgtttttcgttacccttaattatattaaggttcatgaagcatattttggatattntaggcgtatgctccgttgttagaaattatatatatataccctttttttttgtcatcgtttctaattgtattagaggaaaaaaattgcaattaattcccaacttatttgagtaacccgcaatgcaganaatggacatanaagatgaattatactacanattatgtgtatgatggtcgatgatctgagatcaaatttta

SEQ ID NO: 76557 - DNA, 478 bp, Arabidopsis thaliana landsberg
ctcgtaaacgcctttccagtgtacttctccggtcaatggccatagccatctttcccttggatggtctttatcatctgctgcttctgctaagtcttcatccatgcttttcagtaaagtgaagttaaagtactttgcccacattaaaccttttcgttgctgcaacggatgttgttcttcgagtgagccatctctcgggtttatgtacaccatctttctcccgctatgatatgcccagacattaaccaacagttccagaacccggcagtaacaatgctttctctaataattgttggaaaaagaatcataacaatcagatatttgtgaatatcagagaacataagtcaagaagtaagaatctgggttttttacctcgagcagtgatgaagccagtgagcaacttttggagtcgtcaagattgttgtgcactgcatctagagattctgagaacattctgtgattgagggtgaaactggggcgg

SEQ ID NO: 76558 - DNA, 182 bp, Arabidopsis thaliana landsberg
gaaccttaaccccaagggggggggtggggaacgctatgcccatgactccccctaaactcatcacacaggtaacccgctctggaaggagcaggtgcctcaccttctatacagggagagctcatgctatttggctatatacgtatgacacagcttcacacccaaaaagaacggagcttcctctg

SEQ ID NO: 76559 - DNA, 471 bp, Arabidopsis thaliana landsberg
ccgcgatgactcctatatcagtcgcatgctcttttatcaaatcaatgctcttataacatttgttgataaaatcatcaaactccaaaaaatcccttggcggatagccacaaatagacaattcagaaaaaacaatcaaatcaatgttgtctgcttttgccttctgtattgcattgattattttgcccgtgttgtaatcaaaattgcctatatgataattctgttgagctacggctattttcatgctatagtttacgtctcattttatgcttttttatacctgcaaaagtcgttcctgcatcagtttaatatctttctaccctacgtgcagctttacccattaaataatggtgcaatcaacataaaaactttttagacaaactatccttcttttttagggagtcggtaatgaatacttgtacgtttatgtgcaaatccagagtcatccgagaaatgccatagtcaccaaccctc

SEQ ID NO: 76560 - DNA, 610 bp, Arabidopsis thaliana landsberg
  unsure (1)..(610): unsure at all n locations
nnnnnnnnnnnnnnnnnnnnnnnnnnnnnnnnnnnnnnnnnnnnnnnnnnnnnnnnnnnnnnnnnnnnnnnnnnnnnnnnnnnnnnnnnnnnnnnnnnnnnnnnnnnnnnnnnnnnnnnnnnnnnnnnnnnnnnnnnnnnnnnnnnnnnnnnnnnnnnnnnnnnnnnnnnnnnnnnnnnnnnnnnnnnnnnnnnnnnnnnnnnnnnnnnnnnnnnnnnnnnnnnnnnnnnnnnnnnnnnnnnnnnnnnnnnnnnnnnnnnnnnnnnnnnnnnnnnnnnnnnnnnnnnnnnnnnnnnnnnnnnnnnnnnnnnnnnnnnnnnnnnnnnnnnnnnnnnnnnnnnnnnnnnnnnnnnnnnnnnnnnnnnnnnnnnnnnnnnnnnnnnnnnnnnnnnnnnnnnnnnnnnnnnnnnnnnnnnnnnnnnnnnnnnnnnnnnnnnnnnnnnnnnnnnnnnnnngcgcagctccggaacgggcgtgccggcactgtagcgccgcatttggcgctacggcgagacgcgctggaacggcgcagtgcgggaggcgatcccggctggtttcacccttgcaaggcccccttgacggacggcgccctaatgcttgaccagcagca

SEQ ID NO: 76561 - DNA, 551 bp, Arabidopsis thaliana landsberg
aatcataaatctccattcattaaaaatttatttttttttcttaattatataaaacatatagtggagggtgaattaatcaaaaacataagctttaacactaatcttcatctcctaaaccactttgttgactttcaattcaatctagtctttggttccccaaatgttgaataatcctccagctctatgtgattgcggttggaattctctaaatccagtcattgtatctgtcaatgttgtctcaaaggcttgttttctacgggcacctcatgaactacttgcgatagcaactcttgagcttcctgcctctttttgtattacttgcacagcttacattcccccgttgttgagttatgaaagaaggaattcgggtcgcatcccgggtgaattcggttgaaagacgtgattcatcttcaatgtttacacgatacacctcttcattttcttgagtgtcgggaacttgagatcgttccctatgacttccatctatgtctgagatcacatgctctttttcattatcaacacccctcgtcatcatctctacttttctttgg

SEQ ID NO: 76562 - DNA, 571 bp, Arabidopsis thaliana landsberg
  unsure (1)..(571): unsure at all n locations
gagccaggtaaaccctgtggtggataccttggcttcccgtactgggatcgttaatcgtcgcagtggccgcagtgattggtgtcatggtcagcaataagactaatataaaagcaatggatgcggcagacatgcgagcgcaaaatgctcgtgaggaatctcagcgccgtgactcgcaggcgcggctgagggatgcggaacgtgagtttcgaatttggcgtcgaaatacgatcatgaggatcgcgggggatatttcgggtgctgctctgagtgcggtcgatgcctatcaagatatcgcgacccatgagacctcaagagcggacgaccctggaacgctcgcgccattcgaagaggcggttcgaagcatccatgcgcttgcgtcaagtcttctgtttattggtgagcgcgaccttgctgagatggctaaagaattcagttatgatttacgtgacaaaacgctaaagagacggattgtcaacctgaatatcgcctttcggagaatgcgagagcctgatccggcttccgaactgtgcgcataccgngatagtgtacgggaggcgcttctggaggagtt

SEQ ID NO: 76563 - DNA, 558 bp, Arabidopsis thaliana landsberg
  unsure (1)..(558): unsure at all n locations
gagtgagataagcgtgtctataacaattgtttaagcttaaaactcaaaatctacggatagagcaacagacgacctagtacatatcattgtattaatctgaaataaatttcatatacatacgatttgtgcttctattaaatattaaaacatttgttagatttatactataattaaagctgaaaaataagaaattgtgttgatggaggagccatattcctctatttcaattgctgaatttttaattttgtcgttattgttttctttctattggtcacaaatgtttttattcactatctaaattatttacgcaagtactttgaaatatatttcttactctagtaatcttgctagaagagttttcgtatatctagctttttgttctcattgaacgatatgaatctagctagcttgcagtacaaaggctttaagtgcaagttgaataactaaggtatagaatctcaaacataaatcatgtgcattctnttacaccaaaaaaaaaaaaaaattacactaaaaaccatacatcatgtgcctttccatttttgatttttttatcga

SEQ ID NO: 76564 - DNA, 575 bp, Arabidopsis thaliana landsberg
  unsure (1)..(575): unsure at all n locations
cccccaccctccggatacgggatgcccgtatgccggaaacgcatattgtttcgtgacggcacaggatcggcctgtgccgttgacagcctgccggctttcgctactttcgccgtaggaaaactcgccggacgctggatggccaccctcataccgacccgcaacagctgcctgccgcgcatgaccagcggcgagaaacgcgtctcggaacgactcgaacagaagctcgaggacgactacctgatctggtacgacgtgcccgtcggcctgaagcagcgccatccggatttcgtcatcgtgcacccgcgccgcggactgctggtgctggaggtgaaggactggaaggccgagaccatccagcaggccgacagcacccagttcaccctgatcaccgaccgcggcacggtgaaggagaacaacccgctgctgcaggcgcgcgccttcgcctggaggtnggcgtggtgctgcagcgcgatccggcgctgcactatccgcccgggcaccgtcacgccggcatgctggtgatgccgtggggctgggccgtggtgctgccaacatcagccgcagcagttcgatga

SEQ ID NO: 76565 - DNA, 392 bp, Arabidopsis thaliana landsberg
aatagatcgatggattatataagacggcctgtcatactacacaatgcagaggatttataccacactttctacatctgcttcctgtgacaccttttgaccaattctttacttatgggggacgactagtggcttggactgtatctattatgcgactgactgatatgacactgtctacatactaaattaactacagatgattgtctagcaataagtgccttatgcggctctgtacaagctaaaatcgagctgctttacaatctgatgaccttggactgtacagagctaccactcgctgaacaattatactatgtacagaacaatgattcctgtgtgtctttgaggacacatagtgcatgaagagaaagctaagatcaatgatttcgggtgttaat

SEQ ID NO: 76566 - DNA, 509 bp, Arabidopsis thaliana landsberg
  unsure (1)..(509): unsure at all n locations
gcgaggaaagcatgcaagaatcatcggaataatggcccgtgtttgtttgttcctcgtcgtgctcctcctggggggcgttgtggtttcaccgttcgcgggcgccgcacccgtggacgttgtggagggtaggtccatggcatccgccgatgcaccggaggcggcggccgatgctcccgctcctagccccgactccgcctcatccccagactcgtcatcggaggcgccctctagnnnnnnnnnnnnnnnnnnnnnnnnnnnnnnnnnnnnnnnnnnnnnnnnnnnnnnnnnnnnnnnnnnnnnnnnnnnnnnnnnnnnnnnnngtacgtgcatcagtgtatggaatgcgagtggcaaacacatggaatgtgcttgcctaattattgnttatttctttatttattatatgtctctctcgttcgttttttatttttcttaatgcaagtaatataatttgttatacccaataaaaaataaaaaaaagnnnnnnnnnnnnnnnnnnnnnnnnnnnn

SEQ ID NO: 76567 - DNA, 648 bp, Arabidopsis thaliana landsberg
gctatgtgcctgcgactgcaggtggggaagcagatcatccagatagcgtcggcgccatgtgtcgatgatgttcgcggtctgcgccagctcggcctcccacggcaggaacaacgacgcttccgcaaccggttggcttcgcagcaggctgttgcgctgcttcagcgcccgctggtaacgccgccacgccagcaggaaatcatgttccacgtggaacacaccccaatcgaggtagcgccgacgctcgtcggcggccccggcgatcagcgcatgcgaacccggctcgaagcacaccacggcgcacgcctgtacaagttgccccagactccccttctcgccatcgatgcgggcttcccagcggctgccgtttcgacccagtccgagccggacggcgtgcccgtcggcatggcgccattcgccgaacacgctgagcgcgttttcgcctcgctgcaacagggcttcgcgcgcaccgctgcgaaaagagcggccgtgtgacaacaggaaggccgcttccagcacgctggtcttgcccgcgccgttaggaccgatgagcacatgcagtccgtccgacaaactcagttcgacctcggtcaggcagcgcaagccctggatacgcaagcgttccagtttcacgaatgcgtgccccgcata

SEQ ID NO: 76568 - DNA, 378 bp, Arabidopsis thaliana landsberg
cggaaggacataaaccattaagtggtgatatttctgtaatagttgcgtaccacaactctccgtccttctacattatcgagttccctgaaataactggaatcggtaactaaatcgggtgataaacgatttgattgaccttatgcagttgggcctaattccacatgggcctgtgttgtgaatcttttgtggtttgagactctgtttgcttcagaggtttgtcttgtgctctaatattattaatgtattctcagatgaggtagaactatgtttctagttctctttttataaacggaatttgacttcgaggatatcagccgtcgaagttaactactccaacatacctatacaattttatgaagagaaatacacaattaaatt

SEQ ID NO: 76569 - DNA, 609 bp, Arabidopsis thaliana landsberg
  unsure (1)..(609): unsure at all n locations
tttcttccacatgtttttgaaagggaatatatttccaaaacaaaattctgagtcaagtcaaattctgcgtgattgtatttttgcataagaacaaaaatcagatctgaacttagaaatcttcaaaacattatctaaaatacaaatacaccggtatagacctagaagacagagagagagctgacaacatctcccaagttccctctacaccttatctcagagttctctactcctgccaataaacagaatttaagacatcagaatcatctttatacggattcaacatttttgtatatgatcataatcatacattaccctgaatctttttcggcgtaaatcatcctgattgcatccaaaagactcgtttctgtatccgccatctctgttatccaacggctttctcgagtttctgaagaatccaatcttgtcccatgttagttcatagtctgcctttagccgagtgccttcctgctcagatgacaaaaccagaaaacatcagttatgtttcaatgcctacaagagagatacgacacanataccagttgcctaattatttctgcataaacaatcatattaaattaaataaatcgactatcaaacaagaagtattgg

SEQ ID NO: 76570 - DNA, 451 bp, Arabidopsis thaliana landsberg
ccaaattacaatacgcgtcttatgtttgtcttttgtatgagggctaatttaaatttttacatatgggaaaaactttagtttcaaacttttttgactcatgagtaattttttaaaaaattatttttcagtcaaaggttagttactaatattatcctaaaaataatttgtgacccaacaaaaggaaaggttttactaatacataatgaagttatagcaatgatggtgtttctaaagaaactaatttgtttggtgagaaattatgaggtaatctatttgtttacatagaggttagtatttacaatcctttttggtatatgattaataactacgtataatttgcttaatctttttttctattttaaatctttcattcttggacacttagtaaatcattacttacacatcatcgtaaattctattgagtttttagaaagaatttgatgtatcttaa

SEQ ID NO: 76571 - DNA, 511 bp, Arabidopsis thaliana landsberg
  unsure (1)..(511): unsure at all n locations
cgccgnggatcgcggccgacgagggccgcatgggctctgacggcggcacgtcgccagtggtcacggcctgctccacgttgaacgtctccacctggggcaccacggccggtcccgggacgcccgccggggcgccgcccatgctgaacgcggccgcgccgaccccgccgacgaccgccagggaggacaccgcgccccacatcaggtagcggcgccgtggcgaccgcggggagaacagattgtcgtcgtcccggctgtcctgctggccagcgcccgtggccgccatggccagcaggcgtgtggtcagcgcgtcgtcaccgccgaaggttcccaggtcgcgcagctggctcttcagcgcgcgcagcgcggcggcgtcaccgcggcaccgctcgcaggaggccaggtgagcactggcccggtccaggtccgcaccggcgagttccccgtccacaagggcggaaagagcgtttcccagatggctcacgggtcacctgcctgcccgtacggactcgcg

SEQ ID NO: 76572 - DNA, 419 bp, Arabidopsis thaliana landsberg
gattggagtgacgcttaaatatgctgcgcttgtgcaaaaccagtacgaacatttacatgagtactaggatgtttagaggatgtgttggaacggccaacatggatctgcacaagactattctaaattaattgacacctattgttactatgagaggaaatggcctctagtacccactatatgtttcgatcaaactaggagttgttgataaacaccgaaaatatgaagacggctactaaaaagatattcttatcaccggagctaactacatgtatatagagggctgcgagtgtaggatgtactgaaaatatgtatcaatagcaagaaataaatatttgttgctaggaaggtcaaatttactattaaaagctgcaagttaaacagtgcttcatgtacatgaaagagacacatgatatggcgtg

SEQ ID NO: 76573 - DNA, 458 bp, Arabidopsis thaliana landsberg
aaagtcgcagaaacatataggaagaagaaggaaagaaactataacctgatcatagacaaatcagtggtttatgaaaatattttctttctctttgacgagttttgttagatccgatccgattagtgtccgagagagaagaagaagaagaagaagatgtttctttctttcgtattctttaaatttgctttcttcaggtgaatgaagaagataaagagaaagttcgatgtttcgtcgtttaatgggaaagtttttttaagcaactttttaaactctcgatcttgcgatgttccctcaaaagcaaatttaattactgtaattaagtagggagccgcatctaagcactaattagtaagattatattatacactcgttgtgtatgaatcttcgtgttatgtttttgttatgtctaggctataaagtttgagtattagtatagatttagtggtgggtccgaaaaa

SEQ ID NO: 76574 - DNA, 496 bp, Arabidopsis thaliana landsberg
ctgcgacttagcttgtacttagttttttcttttaatctcaaattgaatttctttattgtttcttatacaagaactgtgttttgaataaacttttttattggcagtttcaaactctgtggtggaagccaaggggaaagaggccacaatcaaattttcatgcaaaaagaattcggactgttttacaaacattgcttgttatgctttgtactgattaccgatgtgataaaggattatgtaaatgccatggttttggtggagaaaaggaaaatcccacagctgcgccattaactgcttaatttctccatttcttttttaaatatatcttttgttttcttgtaatgcaaatggataattaaaaagatttcagatcaaattatatcctattaattattttaaatcattatattttatctcatctctgcttgatccttttacataaaaatataataatcacatcgtccatattttctatctgcattttgacatgataaaaact

SEQ ID NO: 76575 - DNA, 597 bp, Arabidopsis thaliana landsberg
  unsure (1)..(597): unsure at all n locations
atgtggggaacaattagcaataggtctcggcccattgactactattcatagctaacagccaatagccaacagctaaaagcctcaattcaacagctcacaaggcttcagccccgtatgtttcttaaatgctgcggagaaatgggagatggaggaatagcctaacagggcggatacatcggttacgcttaatcctttttcatacaggaggtatttcgcatgttccatgcgctgctgctggtagaaatcgaatatggtggtgccgaatacttctttgaatccttttttcaggtagcattcgttcatggccaccttacggctcagttccttaatggtgatggggtcgccgatatgctgcagcaggatatccctcgcctggtaaatacgcagcctgccgctttcgtctgccaggaatttacagctgaagccctcttctttttcgtctaccaggcattcgaggctgtacagcagtatctcgtgcatcttggcgttgnnnnnnnnnnnnnnnnnnnnacctgaataggtatggttcagcatcgcatccagcgcacttcttttccgcgggcaaaccgggaaagtcttggtgaaggcatgcgggtg

SEQ ID NO: 76576 - DNA, 550 bp, Arabidopsis thaliana landsberg
tacgattatggacggcgacgcgcacgaccttcgatggcgacaggcgtcaccggtagcgtccggtgtcgccatggacccccgcatcgcccggacccagaaggcggtgctcgacgccgccaccgagctgctcgtcgagggtgggccggccgccctcacgatggatgccgtcgtcgcccgctcgggcgtggccaagtcgaccctctaccgccactgggagacccgcgacgccctcgtcgccgcggtcttcgactcgtgcgcccccgccatggaggtgcccgccgacgccgccacctgcgaggagggcctgcgggcgctcgtacgttccctggcccgctcgctgtccgaggagcactgggaccagctcgcaccggcgctcatcctcctgtcgcgccagcaccccgagctcaaggacctcgactcggagatgaagcaggcccagcacgaggccaccgaggccgtgctgcggctgggcatcgaggagggcgtgctcgacccggcggtcctcgacgacgtgtcccgcaccgtcgccctcgtcatcggggccgtgatc

SEQ ID NO: 76577 - DNA, 639 bp, Arabidopsis thaliana landsberg
gagatactgctgtgcttacattattcattttccatgatggaaaagtataggacgctccaagaactttaatgaaatagtgagtccaaaagtagtttccgacatagctgaaaacaattatccagagatttgcctgtggtaaaaacatgttccaatcagtacaactatggatgagatcttgagaactctcaccagtactccttaaggaagttaaaacaagttctaaaaatagtttgaaactagaactggcaagccaaaatgtcatgcacatagaaaaaaagcttgccttaacccaatagcggtccttccaacataaacttctgtcggcctgaaagaataatgcatatattctgagtccatatggtaaggaaaacaatagagatttgcattcaattggaagcaagtagctagtagacaaacaagtatagcaccacgaacacgttagctcacagtgaaagcaaaagttgtcaaaaagtaacctttccaacgagtaacatgggtataacgaaagcaggaacagctgaaaccaaagctagaagcagatactccaactccgtgaatgtctgctagtttgcaaagtaactaacacttattagtacttcttcaataccacttaaaagacaacttcataccaacagtaaa

SEQ ID NO: 76578 - DNA, 393 bp, Arabidopsis thaliana landsberg
ggatcaagatagagggaaatcaaatgtttcagacagagctgacgatttgttttggaaaggtagtatgggatcagaatggtattgcagctcaggaatatatgagtggcaggtagcattatttattacagactgaattattcatttatcagacacatttatggagtcggaaagaaataactatcgaagggagttttattaaaaaatcggtaattgctgctgcagggctgacaatggtccctggattcattttaggaaaggacggtattccatttcttacccgggaagcggctcaaatgatatcttctgcaggagagggaataaaaaccggtgcctttattgcaaatgtatattttaggcgttctcatgcagatggtacccggacgaaattttatg

SEQ ID NO: 76579 - DNA, 335 bp, Arabidopsis thaliana landsberg
gaactaagtaacacccttagatatctaaacagagataaactttttatttttgaaagtgatgtttggtctgtgtgtcctagtaattaggaagcaaatgaaatgatctcatccacttagcaatttaattaacttgattaaattctcccccaaaagagctaataactgcctcaacttaaaactatgcacttaagggtcttaattgttacaaaattagtaataaacggtcccatttcggatgcaataatccatttattattaacatccattgaattggaccactaaaacgtatacatacacacacacataatcataaatatatcaaaagaaactatcta

SEQ ID NO: 76580 - DNA, 337 bp, Arabidopsis thaliana landsberg
tcttctcaaagaaaaatcggtctacttctatgaatttactccgataccaaacgctaacgttattcgcggtttatctttcgttacttcccgccttaagagatctattccaatgttaccatctgtgcctgaaatatgcacaacatgaatccactcaacccatagaataagcacgctgaaccgaccctaggaggtttaggtctaacgaatgaagaaagcacttatgaaccagacttatttgttgaacctcgagatctagcggggcctcctcagctgagcgggagatgtccgaccactctacccaatccctgactccaccggcagcagtttttacactcct

SEQ ID NO: 76581 - DNA, 579 bp, Arabidopsis thaliana landsberg
  unsure (1)..(579): unsure at all n locations
acgcgtccgcccacgcgtccgctcgcgccgagcccatgtgatgacgcgagatccgcgcccgccgtcgggctgtggccgcctccgtccnnnnnnnnnnnnnnnnnnnnacttccaccttgaagatggcgatcggattactagcgtttgagagccaccaggggctctggaacagcggatactattcacagttgtttggaattggaggagttctcatcactcttaccattcttatgttatccacgggctactttgggggaattggtgccccatttgctccatatttctggccgtatctaggacaagttccaaagaagagggaacgcaaaatgcctgtgagagtgtacatggatggatgctttgatctcatgcactacggccatgcaaatgcattgcggcaggccacattgctgggcgatcagcttgtagttggagtggctagtgatgaggagatcgtggcaaacaaaggtccacctgtcctttctatggaagagaagttgactcttgttagtggtctcaagtggatcgatgaggtccttcccaatgcacnctatgagataacagaagatttcatgaatactc

SEQ ID NO: 76582 - DNA, 676 bp, Arabidopsis thaliana landsberg
  unsure (1)..(676): unsure at all n locations
nnnnnnnnnnnnnnnnnnnnnnnnnnnnnnnnnnnnnnnnnnnnnnnnnnnnnnnnnnnnnnnnnnnnnnnnnnnnnnnnnnnnnnnnnnnnnnnnnnnnnnnnnnnnnnnnnnnnnnnnnnnnnnnnnnnnnnnnnnnnnnnnnnnnnnnnnnnnnnnnnnnnnnnnnnnnnnnnnnnnnnnnnnnnnnnnnnnnnnnnnnnnnnnnnnnnnnnnnnnnnnnnnnnnnnnnnnnnnnnnnnnnnnnnnnnnnnnnnnnnnnnnnnnnnnnnnnnnnnnnnnnnnnnnnnnnnnnnnnnnnnnnnnnnnnnnnnnnnnnnnnnnnnnnnnnnnnnnnnnnnnnnnnnnnnnnnnnnnnnnnnnnnnnnnnnnnnnnnnnnnnnnnnnnnnnnnnnnnnnnnnnnnnnnnnnnnnnnnnnnnnnnnnnnnnnnnnnnnnnnnnnnnnnnnnnnnnnnnnnnnnnnnnnnnnnnnnnnnnnnnnnnnnnnnnnnnnnnnnnnnnnnnnnnnnnnnnnnnnnnnnnnnnnnnnnnnnnnnnnnnnnnnnnnnnnnnnnnnnnnnnnnnnnnnnnnnnnnnnnataaanaaaattcattataaaagatggaatccattggaaatcaaaatacgctgtcggataaatgttgtgctattgtccaaatacgatcactgatact

SEQ ID NO: 76583 - DNA, 572 bp, Arabidopsis thaliana landsberg
gtcgacccacgcgtccgaaaatctctccatcccggcgacgactggcgacagccgctgccggcctactccaggtccccaggtctacgtcggacccttcgccgcggcgaacaccaccagagatctgtcactgattttgcagtcctcttgtcagatggcgagcacggggcggtcgatgctgctgtcactgctcctcttcgcagtgacgctgtcgctgctggagatgtacagggccaagttcgcctcgtcggagctcatgaccattgccggtggattcgtctgctccctcctattcctgctactcctcacctttattggaaactatcaagaagctagtggagatagaactgggtggggtgcagttgttgtagcacaacttgtagctcttattgtagccggcactgtccaccgtgtctgtatcacaacatgcttcctgttttccgctggactcctttacgaggttgacaagctctctggcatgatccttgcgaggagtgagtctaaggtgaggcggcactaagcacagaagcagcacagagagatgatacatcgatatttttatggtagatgacata

SEQ ID NO: 76584 - DNA, 544 bp, Arabidopsis thaliana landsberg
  unsure (1)..(544): unsure at all n locations
gacgcgaatgcgcagtgcctgaaaagtgcgcgtggccggatgcttgccggcctcacgatgtcccaaaagctccaccagcagcgccgccagttcgccggtgcgctgaatgggttgctgcgcacgccgcgccacgatggcgcgcgcgatgcgcctggaaaaacgctcctcgccatatcgccacaacacgtcggcgatgtccttctcgctggccgtggccagaaaatccgcggcgctttcgccggccgtcggatccatgcgcatgtccagcggcgcgtcctgcatgaaactgaaaccgcgcgccgcctcgtccaattgaggcgaggacacaccgatgtcgagcagcacgccgtccaacccggcatccgtcgcatcccattgcgccagatgcgcgaacgtgtcatgccgcacgtcgacccgctcgtcgcgcgcaaaacccgcctgcgcggtggcgatggccgcggggtcgcgatccatgaccagcaaccggccctacggccccaagcggtcaaggacgggccgggcatgtncaccacgcccgaacgtg

SEQ ID NO: 76585 - DNA, 310 bp, Arabidopsis thaliana landsberg
agcggagggatgacagtgacaaagaactgggggctgaccaggaccgctacaacaggggtgaccggtcaagggagatcgcacatggctacaccgagagaggggaatacaaaaggacttgggagggtgaaggcaaagaatggaggggtgggaccgactttacatgggaggacaaagctataagaaaaggaggtgagcggtagtgtatgtgactcacacattgatgatgtaatacttacttgcattcatcgaaagtaaagatgattctaggtatccgtagactatgagggaggagtcacactgtctatttata

SEQ ID NO: 76586 - DNA, 119 bp, Arabidopsis thaliana landsberg
gctcacatactgcatgatgctatattcaagcgtaattgtttttacaaagggaatggagacaaacaagaaaaagggtggtctccagcctatcaccaccacaaccaaacagttattcttca

SEQ ID NO: 76587 - DNA, 547 bp, Arabidopsis thaliana landsberg
  unsure (1)..(547): unsure at all n locations
ggttgactcttgtactcaaagttctcaacgcaattaatatctatttaaaaataccagattctactgttttttgttacacattactgtaacgtataaacattactgccacccatatgattttcctacatctcacaactaaaactaatgcaccattaataaaaggttgaaacttttgatctaccgttgaaacctatgcataataattaaatataagatccaaagagttcaaaagcacttcataatatattaatatgtattcatccaaagtacttattatttggtgaatatttttatgatgtacataaatgatctaccatatggaaccaaaagagaaaaaggcatccactactttatcaattgtaaatttactatatctaataacatcaatataccatattatggtatagttaataataaaattagtacttaagatttatgttattattagtaatgacattcaactattgtatatgtaaattacctatacatgttcaaccttcaatagttatacaaaaaaatactaattcttncatcanaaaaaaaaaaa

SEQ ID NO: 76588 - DNA, 346 bp, Arabidopsis thaliana landsberg
  unsure (1)..(346): unsure at all n locations
aacccaaggggattgcataactcccaacgaatcttacacggtctagtctgctaaactatctgatatattcgttttgggccaacaaatataaacatgtaccggaggctaatacgagcgccttaaatatggggcgagctgcggtgagtaatgattgaaagcagattattgtgactagatgatctgagctgatgtcaactactatatcttaaacatagactcggtcttatggaaatatcatcccataaaatggacctnnnnnnnnnnnnnnnnnnnnnnnnnnnnnnnnnnnnnnnnnnnnnnnnnnnnncttcttattgcaatgaccaatgcaacgagtgatgtgggt

SEQ ID NO: 76589 - DNA, 475 bp, Arabidopsis thaliana landsberg
tgcacccggatgtattattttttgcagacgtggagttccttttttcgcggatccaacccgctgtgaccggatacggaatctaatcttaacgatgctgtgatgcgagacaaactacgaaaacagggcttggacgagtggacctgggttcgtcatccagcccagattacgcccatgcccgaaaacgtacttaagaggtcacaacattggggactacaaaacgcaaatggaaaacgttccattgttctgcttaacataaaggagggctgctttcgggctttcccaaaaggtgtcacctgccccgtttggcctcgcggaccacatgcactggagccatgaggttataacctttaactaacaggttcatcagaactgtgggctgccactctacgactaatgtgaatgtcatcggctactgcaaggacacttttgattcccggagcagggtatagtgtcacgtaaatgacatgtttctgat

SEQ ID NO: 76590 - DNA, 506 bp, Arabidopsis thaliana landsberg
ctggaagaccaagtgcgcagccaggtgcaggaactgcacgccgcgaacacgcggctggagcagcgcgcccagtccgacccgctgaccgggctgcgcaacttccgctacctggccaaccagctgccggccgacctcgcctggtacgaacgcgaacgaccgcgagccggccatgaggcgcggatgctcgcctttctcctggtcgaaccccgacggcctgcaggcgttgcctgccgcggaacgcaccgcagccctgctagcgtccgcgcagctgctcggctcgctggtccgcgcctgcgattacgtggtccgctgggaggacggcttcctggtggtagcgcgtccattgccggaacgcagcctggaagcgatcgccgcgcgcatccatgacgcgttcgcgcagcaggcggccggcaccggcgccgccgcgggcagcggcccgcactgctcggacggtgccgtcggttatccgctgcgcagcgcgcgccagttcggcatccgctgggaac

SEQ ID NO: 76591 - DNA, 439 bp, Arabidopsis thaliana landsberg
cttctctcttacttctcggttttggcctttggaggagaagcacaaaaccttctctaccatttgtctttctcttctaaataggatccactataaaacccattctttataatttattgctttagttgattaactaatgctacattatttttaaaaacggaccatgaccatcaagatggatgtataattctcaagatcacaaatacgaagcttatgttgaagaaccacgaaaacctagaacgatcatcgatccatatatatatatatcaaagattcattttccatcagccaaaccctgaatgaccagtcttgttcaaaaagacatgacagaactggagagaagaacacaaccataacatacattgatgaaaaggtatttatcgacaactatgcattaatggaccaaaaatcttctcattttctttcgcatcttgcaagaact

SEQ ID NO: 76592 - DNA, 578 bp, Arabidopsis thaliana landsberg
ctttattaatcagaagagccatcatcgactttgatagctttaatgaagggaacaattccgggtccgcactactcttaaggttttttccaatctttagagtagctcgtttggtgaacctcccatttgttgtgcatagtctcaagcttgcactgtccactccttactggttgagagacggtcattggatattgaccgttttggcatgaatgaaaataagaaaatgatggtgtagatcatagactatcctaatctttatcaccataaatccataatcatatttgttacataactataatcctaaccaaagtaaaatatattttgccaccaatccaatggccgagcccatccatttcgccactagctagagtttaaaagtataacaccaaacttctttaaaaattcaacttggacacgaatcttcgtacattagattttaacgatcaagaatccatttgctgtctttgtatgtgacctaatgtcctaaacatgttcccatttttattgtgttgttggataaatagaaattaatgaatggtgtacaattaaatggttaattgtatccattccgtttggagttc

SEQ ID NO: 76593 - DNA, 571 bp, Arabidopsis thaliana landsberg
cggccccgtccccccggcccgcctcccctcgtgttgtttctccttctgttcttcaggacgtggtcatggggccccgtcccggttcgccgctcttctctccaccaagcacagcgctatgggacaatgccagggcggcaacgccgtcggaagagatggcagcgccggacgagccaaaggaggagggcatcgaactcgagccggccagaaagtcgacctcctcctcgtcatcgtcgtcctcctcctcgtccgcgtcgtcggctgatatcccgtgccacatcgatgtcgtcgagctcgtcaacccgttggcagcggcgctgcccgaggacgaacacggcgcggtggtcaaaacggcccactcggcgacgctggaggacgaacgagccgctcccgccgtacacagcgccgaggccaagccggcggacggcgcgatgacgaaggatgtacaggccgctcccgccgtgcacagcgcggaggccaagccggacgactgggtgacgtggccggatccaccgcctccggccgtcgacgactcgttcgcgtcgtcggacggccgccgcgcggcgcggccgga

SEQ ID NO: 76594 - DNA, 452 bp, Arabidopsis thaliana landsberg
  unsure (1)..(452): unsure at all n locations
tagcacaatcgggaatgattgtgctgtactcttttgtattggactgcgatgatcgttgtatgagctgcgttgttgggctcgacccctgtgatgacccgggtggatcagattgaccatcatcaggctaccacagcactgaacactatgttcggtcctatctttacacattnnnnnnnnnnnnnnnnnnnnnnnnnnnnnnnnnnnnnnnnnnnnnnnnnnnnnnnnnnnnnnnnnnnnnnnnnnnnnnnnnnnnnnnnnnnnnnnnnnnnnnnnnnnnnnnnnnnnnnnnnnnnnnnnnnnnnnnnnnnnnnnnnnnnnnnnnnnnnnnnnnnnnnnnnnnnnnnnnnnnnnnnnnnnnnnnnnnnnnnnnnnnnnnnnnnnnnnnnnnnnnnnnnnnnnnnnnnnnnnnnnnnnnnnnnnnnnnnnnnnnnnnnnnnnnnnnnnnttcacga

SEQ ID NO: 76595 - DNA, 398 bp, Arabidopsis thaliana landsberg
tctacttgatgaagatgactaatacaggagaagaaactacacaccacaatccttcggagacaactcttctagccattgagatgatgactcttgtaaccattgatttcgggactttcgagcttggatcggatctcatactcagcttgtattctgctgcaaacttaaggtatttatgggtcgcgcaattcagtcgtcacatttttaaacgaacaggcttgtcatattactgtttacatcggcatataaacaaagaagagtgatgacaattgatggactataactatcaaaagatgtgctgaaacaatcaatacctagcatgtactgtataataatacatacatttgaaaagatggcacggacgaaacactgagaatttggttggtctatttcatcacatt

SEQ ID NO: 76596 - DNA, 184 bp, Arabidopsis thaliana landsberg
  unsure (1)..(184): unsure at all n locations
gggggcaaaacacgagggacacaacacaaacnaattttattattaaaaacgcaaaccaaaggggcgcgtttaaataccaaacacanactcacccaacacaaagaagcaattcaccccttaaaattcatatatactctataagatacaaaactccacactatatcacataaccaaataccaaata

SEQ ID NO: 76597 - DNA, 119 bp, Arabidopsis thaliana landsberg
ttaccaataaacttttgacagcttactgtcatacagtaatgagctgatattaccgatgattatgctataccgaacctatctttagctaacgagctcgatcatgagagtgaggatccctt

SEQ ID NO: 76598 - DNA, 596 bp, Arabidopsis thaliana landsberg
atccaatggaccctgtgcccgacctgggcgttgtcgaatctgagtttgtagtcagtcaatccgacccagtggagcagtaactttccggcgatgacgtgatggctacaggagacatcctcaaattgaccgattccatcgagaccaacgcagataaccatccgatcgtcggcaagctggtcgacgcggccaagagaatgtgcccggagatcatcatcgtggaccgccgtgagacgtcggcggcatctatcaacatagacattacgccggccgaagaagctcgagccctgcattgtgtcgtccgcgcgatgcacgatggccattgcccgaagagtggactttctgagggcatcgcacttttttgaggacaggcgaacgcctccgtacgttggcgttgtggcccatgcgtgccccgcctgcggttttccgatctccaatcccgaaaatggcccgaggaccttccctttttggccccaaatttttgttttaaaaacccgggggcccccccttttttttaccctcgggggtgttcccccccccccgttttttttatttcccccttttttttggccccccaaaatttttttaaaaaaaaaccc

SEQ ID NO: 76599 - DNA, 319 bp, Arabidopsis thaliana landsberg
ggataagcaaaaaacttcaccttactactcacaatgttatgttttaccaaaactaaccaaaaaacacggacgaggttatctaaaaaaaccattgataatataacatccgtataaaccagaataaggaccaacaaaactgaaaattacaccctatctaaaactgaaaaactaatatgtcacaaaacaaaaaaacaaactatacctctacgctcaaccttaaaaaatgatctctttaccattcaaacataccaagcgataaataaataaataaaattatgcttcataaaacctcaataaaaaaatagtcaaaaaagaaaaa

SEQ ID NO: 76600 - DNA, 508 bp, Arabidopsis thaliana landsberg
ttggcatttttaggcctactgctagcttacaaccacgtccttctctgcaaaacacccgctcttcatcgtaccaaacgaaatctgctgcgcagggctgcattaagctgcctcagctgccactttcccacataacccacccgccatcagctcgacaatcaattacttcacatctgcaggcgctgcacgcacagacttctttggcagcacgaattcaaaaaaatgcacagacagacttttgctaaaccattagcatactaaagatgtgctaataacatgtcatcacttgctgataaatcaattctgcttccgtctgcatgccgcaacaggctctagtgaaatgacagttacagcccaattgtcgtctattgcttccaggaagactgatactgcataataatgcgacaactcagcgaccgattttaattcgagttggaactacctttgttcttagaccttagatgaaacacctcagcccaacggaagtaatacttatccgccacattacaat

SEQ ID NO: 76601 - DNA, 388 bp, Arabidopsis thaliana landsberg
  unsure (1)..(388): unsure at all n locations
gggganantccaaatatgaagcccaaacatgtcanagagatactttctcaggccaatcgaaggtaggcatgagatatggtttatttagaaatactcgacaactcatcaacctatacccattttggatacgaagtttagatgttggtaataccaagaacttaactcttcttattgacaccagctcatacgacattatcgtcaaccccatactgtacaagagaagacctaattctgtcgatattcactctaactttactaatacttatagcaccacatatgacgatggctctggaactggaactgtacgcatgcattaaaccatcgaacgccctgtacataggctgacgcacgcggtgcataacaagttacaagtacattatacaactat

SEQ ID NO: 76602 - DNA, 307 bp, Arabidopsis thaliana landsberg
taccggaccacacccgaattgggttatatgcatgaaaaagaattgaatgggtcctacactcggatttcaactgaggctgggttcacaaaagggtccctacctcggatcatatgacttaggattaagaattggcgagatgggacctacatcttacatatatataaccttttgggaccctatgcacttgtatggttggactgccatagtgagggcagatcaatctgactgctcctccgtcagacgacctatatattaacatatacctcacgcgttcaccggaccatgcaaatctcggctcctaccagtc

SEQ ID NO: 76603 - DNA, 594 bp, Arabidopsis thaliana landsberg
  unsure (1)..(594): unsure at all n locations
nnnnnnnnnnnnnnnnnnnnnnnnnnnnnnnnnnnnnnnnnnnnnnnnnnnnnnnnnnnnnnnnnnnnnnnnnnnnnnnnnnnnnnnnnnnnnnnnnnnnnnnnnnnnnnnnnnnnnnnnnnnnnnnnnnnnnnnnnnnnnnnnnnnnnnnnnnnnnnnnnnnnnnnnnnnnnnnnnnnnnnnnnnnnnnnnnnnnnnnnnnnnnnnnnnnnnnnnnnnnnnnnnnnnnnnnnnnnnnnnnnnnnnnnnnnnnnnnnnnnnnnnnnnnnnnnnnnnnnnnnnnnnnnnnnnnnnnnnnnnnnnnnnnnnnnnnnnnnnnnnnnnnnnnnnnnnnnnnnnnnnnnnnnnnnnnnnnnnnnnnnnnnnnnnnnnnnnnnnnnnnnnnnnnnnnnnnnnnnnnnnnnnnnnnnnnnnnnnnnnnnnnnnnnnnnnnnnnnnnnnnnnnnnnnnnnnnnnnnnnntttttttccccacaagcccttttaaaaattttaaaaaaaaagggaaatttttataaaaaaaaggggggaaatatggggggggaaaaaaaaaggggccccccttcttgggggggtgttttttttttcacccccc

SEQ ID NO: 76604 - DNA, 610 bp, Arabidopsis thaliana landsberg
  unsure (1)..(610): unsure at all n locations
gtgatttgtgtttttatagtactttaacatttgttaaaggctatgattttgatctgtaatttcataactagacctctattttgctttatggtcaatgaaaacttgcgagcatttgttcacaaatcacagatgagggttatcggggtctcgaattcgatttcgaaaatgagttattgaatttgttaacattagtatttcgattaacttcttgacatttgaagtccttgatcacgtccgaaaaaaaagaagaagaaggcaacttgatcagtaaaaattgctttaagtttattaattttctacttattaaaatatgactgaagtagccacaagttgatatataacggagtaattggtaattaagactttgaagtttgaaccttcaaagaagttaaataatggagatttgtaacgtacgccatctttattaattttatgagccaaatgttactatctacactaattccaaattaagctacagaaattaataaatttgtgatgggatatgtttactgaatcaaatgaaactaaactagctgaatgaatattctcttgatgacgttgcanaattgtgaacgaatgtcaaaattgcgatctttttgtattttcatct

SEQ ID NO: 76605 - DNA, 203 bp, Arabidopsis thaliana landsberg
ttggctaaaaagcctaaaatatatacaactcctttttttcagcaacttagaaaaatctcttgtgtctttttaatagatcggcatacgtacaagcgtagatagtatatttagcatgacgctcgtattgtcacatatcataaccaacagcgtaaaggaatctgataattaatcaatctcatatctttgatgtgttttcggtcttt

SEQ ID NO: 76606 - DNA, 561 bp, Arabidopsis thaliana landsberg
  unsure (1)..(561): unsure at all n locations
nnnnnnnnnnnnnnnnnnnnnnnnnnnnnnnnnnnnnnnnnnnnnnnnnnnnnnnnnnnnnnnnnnnnnnnnnnnnnnnnnnnnnnnnnnnnnnnnnnnnnnnnnnnnnnnnnnnnnnnnnnnnnnnnnnnnnnnnnnnnnnnnnnnnnnnnnnnnnnnnnnnnnnnnnnnnnnnnnnnnnnnnnnnnnnnnnnnnnnnnnnnnnnnnnnnnnnnnnnnnnnnnnnnnnnnnnnnnnnnnnnnnnnnnnnnnnnnnnnnnnnnnnnnnnnnnnnnnnnnnnnnnnnnnnnnnnnnnnnnnnnnnnnnnnnnnnnnnnnnnnnnnnnnnnnnnnnnnnnnnnnnnnnnnnnnnnnnnnnnnnnnnnnnnnnnnnnnnnnnnnnnnnnnnnnnnnnnnnnnnnnnnnnnnnnnnnnnnnnnnnnnntttgtggggttttccccccttaaatggtccccgggggggttttttgggtttttaaaatgtcccccttttaattttttgtggggctttttttcggggccccctttttcttttttgggggttttttaaaagagcccccc

SEQ ID NO: 76607 - DNA, 596 bp, Arabidopsis thaliana landsberg
  unsure (1)..(596): unsure at all n locations
cnnnnnnnnnnnnnnnnnnnnnnnnnnnnnnnnnnnnnnnnnnnnnnnnnnnnnnnnnnnnnnnnnnnnnnnnnnnnnnnnnnnnnnnnnnnnnnnnnnnnnnnnnnnnnnnnnnnnnnnnnnnnnnnnnnnnnnnnnnnnnnnnnnnnnnnnnnnnnnnnnnnnnnnnnnnnnnnnnnnnnnnnnnnnnnnnnnnnnnnnnnnnnnnnnnnnnnnnnnnnnnnnnnnnnnnnnnnnnnnnnnnnnnnnnnnnnnnnnnnnnnnnnnnnnnnnnnnnnnnnnnnnnnnnnnnnnnnnnnnnnnnnnnnnnnnnnnnnnnnnnnnnnnnnnnnnnnnnnnnnnnnnnnnnnnnnnnnnnnnnnnnnnnnnnnnnnnnnnnnnnnnnnnnnnnnnnnnnnnnnnnnnnnnnnnnnnnnnnnnnnnnnnnnnnnnnnnnccgggggtaaaaaggccccccgggggttttttttaaacccgggggggttttggggcccccccccccccaaaaaaaccctttttgggggccccgggggcccccccggcgcccctttttttaaaaaaaacccccccctcttttaaaaaaggggaaaaaaaac

SEQ ID NO: 76608 - DNA, 448 bp, Arabidopsis thaliana landsberg
cggcccgtcggagagttgacccaggcttgcagcaggctggcatcagcgattcgcttcacggtggtgaaatgcagcccgggggcgtgggggcggatgacgttgacgtccacgtgccccggctggcggcgcgcagtgctgaccgtgcgcttgagccatgcttcgtaggccgccagcgaagcggcgcggaccttgtgctggatgaccagggtcacgacgttgcggttgtcttggggtgcggtgttcatcggcgttccttgggatgagcttgcccgcatccactgtgcaacggcggacgggcgctggattggacaggtgtgctgctgttggcgggcaccggctggcggtgcccgcgcatgtggagaagattaaaactatgacctttctggcggtagatagcggtttttggctctagcgttctgttttatgaacgattgattggactggattt

SEQ ID NO: 76609 - DNA, 556 bp, Arabidopsis thaliana landsberg
  unsure (1)..(556): unsure at all n locations
nnnnnnnnnnnnnnnnnnnnnnnnnnnnnnnnnnnnnnnnnnnnnnnnnnnnnnnnnnnnnnnnnnnnnnnnnnnnnnnnnnnnnnnnnnnnnnnnnnnnnnnnnnnnnnnnnnnnnnnnnnnnnnnnnnnnnnnnnnnnnnnnnnnnnnnnnnnnnnnnnnnnnnnnnnnnnnnnnnnnnnnnnnnnnnnnnnnnnnnnnnnnnnnnnnnnnnnnnnnnnnnnnnnnnnnnnnnnnnnnnnnnnnnnnnnnnnnnnnnnnnnnnnnnnnnnnnnnnnnnnnnnnnnnnnnnnnnnnnnnnnnnnnnnnnnnnnnnnnnnnnnnnnnnnnnnnnnnnnnnnnnnnnnnnnnnnnnnnnnnnnnnnnnnnnnnnnnnnnnnnnnnnnnnnnnnnnnnnnnnnnnnnnnnnnnnnnnnnnnnnnnnnnnnnnnnnnnnnnnnnnnnnnnnctttttgttttccaaaagtccgggggaaaccttttggggccttttttccggtaaatggggccccctttttgggtccttttttttccccccccgcggcctttggggggg

SEQ ID NO: 76610 - DNA, 609 bp, Arabidopsis thaliana landsberg
  unsure (1)..(609): unsure at all n locations
ttacttgngcatagcctatttaagtactataatgtttttttttttctatagagagtagagaccgaaacgggttgtgcggcaaccaacacgtaagaaatcaacatcttaagattgtaaattatgcatgtcctttccttttctgntagagccaaatatatacatcgtcagttttttgataatgataaacaacatcgtaagtttaaatagtaccttttcgttaaacacaaacaaaacataagtagtacagtaactaaccattaatatttcatcaatgaatatatctaacaatttcgaatcccaattattatttactactgaactgtcatcacatgcatgaacatgaatcccaatttcgagtctgagtgtactttgatgcaaattttcatgagaaaagatttcactgaaaaattgaattattaatatataatttttttgttactttnagtgctactggatttcaaaaattagagaacacttctaggcccaaattcaacaaaagcccatttatttattaatatggacgtcccaagttccacattgacttgagaagaatagattacatgacaacagattaatactatttgaaaggcagagacaatcttttttttt

SEQ ID NO: 76611 - DNA, 421 bp, Arabidopsis thaliana landsberg
agaggcgtggcaatgatgaaccactgtctaaaataactcactttttttatcattcatgctctcaccacttatgaggagacatctactctcttcatccctatcacggaaactaccaaaccctcatcattcattcataaagcaagacaaccccataatacttaattaccaaacaacccctttcagagatactaaataaactcacattgatcatatcatatcacataactaaccatgattttttctttacaacacactattctttacctgataaaaatatcataactttcattaagatcttgcaggatatactgattattaaataaaagtggaatccatctcaggctctatcaaaagagtccaaggaagtggatacactccactaatatcaaaattaacaccctacattttatatcaattgcta

SEQ ID NO: 76612 - DNA, 541 bp, Arabidopsis thaliana landsberg
  unsure (1)..(541): unsure at all n locations
gagatattcgctggtgcgggcgtagcgctcgtccttggtgagatggtcgccgtcctgggcgagctcggcgtcgtcgccgccggtgatgatgtgcacggcggcgcggccgccgctgatatggtccagcgtggcgagctggcgtgccgcgacggtcggcgccgtgaagccgggccgatgcgcgatcatcagcttgaggtcgcgggtcaccgccgcgacatgctggccgaccaggatgctctccggcgaggtggaatggaaggcgagcaggacgcggtcgaagccgccatagtcctgcgccttggcgagagcctcgacatagttcaggtcgatgatcgggccggaacgcnnnnnnnnnnnnnnnnnnnnnnnnnnnnnnnnnnnnnnnnnnnnnnnnnnnnnnnnnnnnnnnnnnnnnnnnnnnnnnnngcgagggcgaggcgcccgcgtgggatgttgcggccaggcctttccagcgggccggggcgngctgatgccgcgcttcgggagtgttcgagccgggccgggaacatgttcgtcgtca

SEQ ID NO: 76613 - DNA, 393 bp, Arabidopsis thaliana landsberg
ggaggaaagaatgataactatagtgaattttctttttgtttgagtctgttttcaggggctgaaaaacatgtcttggcattgtattcaaaaaaatacatactgaatttgtaaaggggaaaatttttaattaactctcttgattactcgacaggcttattacaaatgaatttagattctttgaggctattaggatttgctcagaacaataaaagtcgtgtttttgtatagttacacatgtctaaaaagaagaaaattcctctatttatacaatattaaaccgttagagataactaacttttattattcgacttgaatcttctattttcattcttggcgattttctttatcaaaagaagcttcttttttttttttttggagggagaataacttttt

SEQ ID NO: 76614 - DNA, 568 bp, Arabidopsis thaliana landsberg
cgtccctatcgtctcctctctcaatatctagtctaaggaaagttgttttatgcattcacgcattccattgctgtgtggtgccgttgtagcctcatttttcacaacggcagtcgcagcgccttcattggctcaagtcgtccaactccctaccattcacaacttctcttattctggttccgttctggctccagatcgtggatcaacaagtttgggtggctccagttccaaccgcgcttattcgtcgcaatatggacgtcctcgttcgcgttcgctgggttctgcggccaacgctggcaatgctacggtctacgcgcacgttatcgacctggacgaactcgatcgccagattcggggcctcgctccggcaagcgcgcctaccacaccgggttctcgagttccgccgcgtatcaacaaacgttcgatgacttggcgcagcggtgctgtggctggaatacacacacgaccacacaaagacgaactgaatgaccctagatctagtcagcgccgccaaacgctcaacgactttacacctggcgattacatgattgctgctcaccatcccgggctg

SEQ ID NO: 76615 - DNA, 570 bp, Arabidopsis thaliana landsberg
accattgcgaaagttttgaatactaggcccagtgagtttcgaccctatatttttttaaaggaaaataagggtcaggggccatggttgcaagtgcaatgaaaaacataccgcttcttcctttgtttggtctatatcactaatttccaagaaaggtcactttcgttctttgataacaaaaaacacaagaagaaagagacatacattatgtcatgtgtgtcgtgtcgtcctccccatctctactaacactttgaatttattactaccaaactcaaatgtgtcctaaagcctaatcaatccctttattcacatgccacctctctctctctccattgtccactgtatccaaacccacatttgatcttggcttctttcttcttgttcttaaactggtgattaacaaaagtagtatatactaataaagtaatagtattagtaactttatgatcgaccatgagaaaaggttctgatcaaagttgtttagggaataagagattgatattcttgattcttgaactcttaattgcatctgaataccaagaaactcataccaaactgggatcttctttatac

SEQ ID NO: 76616 - DNA, 568 bp, Arabidopsis thaliana landsberg
ttattacgaacttactttttcatcggccaacaccaattcttttgactttcaaaaattgattttgtattagtagccatgggtggaagatcttaacctccactgctaactgttttgtaaggatgtaagtcgtttttgacggtaagagaggtcaattttattttaattgtatgctattcctagacctattgagaggtaatttataagttactcgtaaatggtagggtttaggtgtgattcgttatggagaaaatcattgcgagaaagtacaaaatcggaaaaatatagaattcatgatttaatgcagaagatttagtggaaaagtaaggaatatgccatagattcacaatttgcttgttgttattagttttggtttgcttattttcgtgagtatatttcaaaattatagagaatgtatagatatttctcgacttcatggtgatataagcattaatgaatcttatttgttaaccatatcaagaaaattctaccttaaaaaattctatattattgaaaccgattttttattttagtttacaacaaatagaaaccaaagtttaattaattttta

SEQ ID NO: 76617 - DNA, 510 bp, Arabidopsis thaliana landsberg
  unsure (1)..(510): unsure at all n locations
aaacccggggggaagcactatagnaatggaaacacaagcatagnnaaattaacatttaaaaaaatcaaacaaaggatgcagaaacaggtatgaacttgaaaaaacccaattattagacattttgtaaagaatcatcaaaaataaaacaatcttcttagaaatattttccaaaatgttgtctcggagaacatctattaaaattggaacgatacataaaagattagtatagtccgcataagacacgcataaatcgaaatatagtccaaattattttcaacaaagaaaaaattacttttcaagaaagtaaatattttgctaacatgtcattctaacattaaaactactattacaattttcaagtataaaagacaagtcagcatatatgttaaggagcaaagactttgcattcttgcagcgagccagcgaccagactctagaagtctgtaggggctatcaagttttcatttttaacgatactttatcaaatgggccgtaatcttggcccactat

SEQ ID NO: 76618 - DNA, 297 bp, Arabidopsis thaliana landsberg
gtggtaattattaatttagtatagtgctcttaaaatgtactgaggtgatcattccactaacactccccaaatctttgcagaatcagttttgatcttcaagaatttgatttggaatatacctgcgattatagttattaagattaaacagttgatgacattaatattattgcttctttcataaacttattctctctagtcaatcctcacattatcttttcattttactcttaatcttcattctatcttttgctttccatacccttatttttccttatcttgctttcccctatttacttt

SEQ ID NO: 76619 - DNA, 570 bp, Arabidopsis thaliana landsberg
  unsure (1)..(570): unsure at all n locations
agacacagaacaactgcaggtaagaaaattaccttaagaagatgcattcgccatggnggaaaggggcgagatggcggggttcattttcgtggctgccatcatccaagcccaactgttattcttacagggaaaatggaaaataatacctttgttccatggccgttaaacaaagctcactgatcatcgggcgccagccactcatagaggcgctgcaatcgggaaaagcgatcgacaagatattattgcaaaaaaatgcaacgggcgaagccttaacggccatcaggcaactggcccgcgaaaggcaggtgcctgtgcagcaggtgcctgcagaaaaattgcattacctcacccgcgccaaccaccagggagtgatcgcttttgtggcgctggtgcagtatatggacctgcagcaggtgatcgatcatgtaatatcggaagggcaaacgcccctgttcctgatgctggatggtattacggatgtgcgcaatataggcgctatagccagaacagcggtttgctgcggngcacaggcgatcattattcccgataaaggtgtgggcgccatgaatg

SEQ ID NO: 76620 - DNA, 554 bp, Arabidopsis thaliana landsberg
actggctgggcgccattagtgattaataaggggcaaatataaaaaaatagggatataaatttgacggtaaaaaattggtaatttgcggggatggtaacatttcgtcctggaacgcctcaagtctataaccatctttttaagtcccttcctatggggattgccgctgttttgtaaggcacaggaggatgccgacaagctgtttgcccggaggaattttgacgaggcctataacgcttacagccagtacccggttgaaaaattaactgaacagcaattgtataacctggctgtttcggtgctcaatggctccaatcccgataagtccgaggctgttaaactgctggaacagtacctgcagaagcatcccgatgaaggcaatgctgtttacctgtacggacgcgcattggcttattgcctgcggcttgacgaagccgaaaaacagttcacgcgttgcctctagataaaaaacatcagcaacgagaaccgccaggatgccggtcatgagctcgaatattgccagcgggccagggtgctcctgccttataagatcaacg

SEQ ID NO: 76621 - DNA, 617 bp, Arabidopsis thaliana landsberg
  unsure (1)..(617): unsure at all n locations
agtatctgtgatatgctgatgggcatagcaggatggatgtgattaactcttgtgctttctttatagtctccttgcctatcttcatttaaaaataacgcaatattcttgggtttatctttgtacacataataatgtgaatttccacaaaatagttaaaggaaatacatataaaaacaaggtagtctgaggtacaatggtgaaataattttaataatcaaccatttctaatttagtcatttttcaccacatagaaaaggatacttagaactttattgtctgtgtcatctcctcaagtcagccattgcctagaattgactactataaccccttcttttcttaaatttcaggtcattttgaagctcttattgatataacctattggaagaataagctgtgttaaaagcaaaaacaaagtatcatagaattggaatcaaattttaatacttagaaacatgctttcattttctatggaactctatgtatatgnttatacataggaaactctgtgtttcaatgtttaaacatagactctagaatactatcagtatattgtatttctaagtagtcacttcccgagtctggtcactatngtcataatngtcttatggaagtcacat

SEQ ID NO: 76622 - DNA, 551 bp, Arabidopsis thaliana landsberg
  unsure (1)..(551): unsure at all n locations
ccgggtggnggccgaagcgtaggagtcgttgcgaatccgttcgacgtcgttatcagctcgtgggtgcggccaaacggggggaacggtccgttgagggtggcgctcacgttgttctgcaggctctcgccgccgtcgccttcggtaacctggtattgcatcaggtacgggttgccggaggggttcaggttggccggtgcgcgctccatgtaggtttgcttgaagccatggtcgtccagnnnnnnnnnnnnnnnnnnnnnnnnnnnnnnnnnnnnnnnnncgttgtcgaagcggtgttccagttcggcaaaggtgttcaggttgctgcggtcccagcggttccagtcggcacccaggtaggtgctgcgtacgaaaggcaggggggcgccgctggcgtcggcggacaagttgccccaggctccggtggcgtcgagcttggtacattcgacaccggtggtcagcgtggtgctgtcctccaggtcgaaagccagcgagccgncgaacgccttcttgcgctacatgcgcgagtcctggaacaggtcgcggtcgtcatg

SEQ ID NO: 76623 - DNA, 456 bp, Arabidopsis thaliana landsberg
agccgtagccgctttgctcctgccaggcaggggccagctttgtattatggacctgcccgtccactctgacaggggtttgggggccgtgcggcgtcttgatggttatggtctcgccttccaccgcgccgatgagcggcgctgcgaccttctcgaccagcatcgagccgtccgccggcgcctcggcgccagaataaggggcgaacaggttcatccgagtggtggcgaagtcgtcgacgacgaagagcaacatgcgcatgcactcaccgtcaactttgacgcgagccgcaacgaccgatcgggcctctgcatctgccacgccaggaaaggcctttgcggcggtcagcatctcctgggacacctcgcccacatcgatcgtggcccgatgccggttggtactcatgtagttcccgttcacctcacgggtgacgatgccgtatgcagcgagcatggtggtga

SEQ ID NO: 76624 - DNA, 566 bp, Arabidopsis thaliana landsberg
  unsure (1)..(566): unsure at all n locations
attcaacgatccaactnnnnnnnnnnnnnnnnnnnnnnnnnnnacataaattttgcaaaatctgtatgttgcctgatcctgttgtgatctttggttaacattttcgttatttgtttcaggtgtcctttggagacatgattgcctgtgacaatgagaatgtgagcctgctctcccagcatcttattatttattttttaatgtatagctgttatgatgaaaccttttgttcctgtttcgacagtgccaaggaggtgaatggtttcactatacatgcgttggcctcacacctgagaccagattcaaagggaaatggtactgccccacctgcagactcctcccacagtcacactaatatcatttgtacctgtgagaaggtattgctttactatcatcagaactaagctctcctcctgcaatttccatgcattctgtagctaatataatacgtatggagacttgcacgtacttatgatattaattctcataggtgccactggcatcttctttggcaccttcccttcatgaccaatgccaccaaactcatctttttttgtaccacatctagc

SEQ ID NO: 76625 - DNA, 574 bp, Arabidopsis thaliana landsberg
actgttgtgtgaagatcaagccgctatttctgaacccatctaacggctcacgttgtccatttaggtcccactgtttgatcttaaccgttagattgataaagatgattggtcaagttgacgtacacccaccaaagaatgtggattttggaaccaccgacgctttctttttccttggcacatccgaccgtatatacggtccatctttatacatttatagacatttgtaatacaaaaataactcgaaattaaagttttaacttttatcatgatcacaccaaagcgagccgtattaactttctcaaaatcaaaattttgaaagagttttttctttgtaactggaaacagaacatattgattaattaaataatgtcttcatattaagacatttttatttctaataaagtacttggaattgatccacgatcaaaatcaatagttgaatttgagatagttacagtcagcatgtttttgacgaaattatttattttagtttcaacataagtattaaacttcaaacatttaacaatagatgagtcatacgatattgattaagtgtgaactaataataaggtta

SEQ ID NO: 76626 - DNA, 393 bp, Arabidopsis thaliana landsberg
atttcttctcctctacacactccctaatcgacaataaacagttttttcaatcaacatgaccccacctgaatagttcacattacattaaagataatactacactttttagagcttttaacaaatttgaagtcatgaaatacaataatctgcgctgtttgaaagcttgcaattcgaatatacagctttagttctataataccacatcaaattcaaatatgttcccatagttattttttttaatgtgcaccgtttccatagttttcttcaaattagctttctctaatgtgttttttttgccaattactaccatataattccagatataattatctttttaggtgcagcatgtctgtttcattcgattctctaaactcggaaaaagacatagaaagt

SEQ ID NO: 76627 - DNA, 401 bp, Arabidopsis thaliana landsberg
cgcagctgcgaagtgcgcaatacggctactccctgcgccaggccttggcccagcgcggcatgccgatcgtaggagtgtgacgctgtatcccctgctccggcggctggaaaagcaggggctgctggcctccgagtggcgcatcgacgatggcccgccgcgccgctactaccgcctgaacgacgccggcgaggcgctgctcgccaatctcacgaccgtgtggagcgacctcgtcgccaccatgggcggcctgctgaagggagcggaacatgaacccgaatgacgtgagcgaagcctatgtcctagatgtgatgcgccgaacgccccttcgggatcgccaacggaatcggcgggtaacgttcttatctgcaagcctacacgctagaccaacgtgcactgagctc

SEQ ID NO: 76628 - DNA, 440 bp, Arabidopsis thaliana landsberg
ccctggcctcaggtagttcacccaccttagtttacagcttttaccacttctattcaaccctaagggttaaggccatgaaattaaatggagcactataaatggctttgacatataacatggatataaaaaaattaatgcaacttgatgatctttatctatataatatatgagtatgaatctcttaaattttaacattatctcgatgaaaggctcgaataaaatgggtataatatatgtaaaaatgttcccaaaacttatgaaagtcaacttctgaaaacagaaaacaaggaatcataaaagatcatcttttgattattcggagaacaataaaccgtaaaacctttccaccatgacattgtcctctttctgtttgtgaaagtttgagactgcttctagattataaataaataaaaaagagacaaagaaaaagaatgtgagag

SEQ ID NO: 76629 - DNA, 129 bp, Arabidopsis thaliana landsberg
gcacacaatgttccttgtaacactattactaaacacaaatgaaatatttgagaggataaaaagctccataataaatatgagatgaatataaaagctccaatgaactagaaagcttgtgggttactccca

SEQ ID NO: 76630 - DNA, 585 bp, Arabidopsis thaliana landsberg
  unsure (1)..(585): unsure at all n locations
cctgctcgttctgtatttttttgccgccggcgaacaactgcaggttgtcgataaacactttcgccgcgcgcttgtcattgccgtcggaggccgacgcgttgtgcggcgacacgatcacgttcgggatgtcccacagcggcgaatccgccggcagcggttccttttcgaacacgtggagataggcaccggcgatctgcttgctttgcaacgcggcgatcagcgctttctgctcgcacaccgagccgcgcgcgacgttgatcaggtgcgcgtgtctgggcatcagcgccagtggtttggcattgaccaactgatgggtctccttcgtatacgggcaggccagcaccagccagtcggactgtggctgctgtgannnnnnnnnnnnnnnnnnnnnnnnnnnnnnnnnnnnnnngccgtcgcgtttcggactgcggcgcatgccgatcaccttcatgtccagcgtttggcatagccgcgccactgtcgcaccaatggtaccgaggccgacaatcaccaccgtatgaccctgcagatcgcgcggcgtatccttggcacgggccggatcccagcgccgttcgcgctgcgcgg

SEQ ID NO: 76631 - DNA, 468 bp, Arabidopsis thaliana landsberg
  unsure (1)..(468): unsure at all n locations
gagggatatcgnngttttnnnnnnnnnnnnnnnnnnnnnnnnnttttcttccgggatccgaagngagtaatgggctagttggacttggcaacgggcgcaaatcaaacaccaggttacggagaatccggcgggatcaggatggtttttttctggaagactgctgtgcatgcttcatgaccgctttaagggaatgccgggagggggattgcagtttgagtttgtctaactgcttcagtgtgcggcggagcagtttcagcctgtcctgtaattcaatatcttnnnnnnnnnnnnnnnnnnnnnnnnnnnnnnnnnnnnnnnnnnnttctccatacaggtaaaggatcagatcctcttctttgatttttttcataacacgatcccacttattataagaggataaggtgttctatttaaacggcgatcgtgtgtgattattgtgggatagcaaccggccggacgccaacgatt

SEQ ID NO: 76632 - DNA, 239 bp, Arabidopsis thaliana landsberg
catcattatcagtatccatcttgttgaacattactttgatgtcttctacttcttccggagataaaaattcggctttaacctggtttgaataagattagtaaagatatcttccgtttaagaagtgactcatgcgagtaattaagaatgagagtttatcagattaacaaacccttaaagcttttctcttgagatcgggccatcacttgagaatcgaatgcaaccattgatctttacagaca

SEQ ID NO: 76633 - DNA, 490 bp, Arabidopsis thaliana landsberg
atgcctcctgagcaagagtgagtgcattccgttggctttaatgaactctttgacagaaggtgcatccgtattggtaggtcggagaagcgacgcaggaacattggggtgaaaacctccagctaagtagaagggcgtgaatcctgtggaaggattgaccgagttattataagcaaattccaaagctggaaggagtgtgtcccaattgttctgttgttggttgacaaaggctcgaagcattatttctaacgtctggttggcacgctccgattggccatctgtttgggggtggaatgcagttgacatagccagtttagtgtccataagccgcgcgagctcctgccaaaacctactcgtgaacttgctgtcacggtctgacacaatagttcgcggcataccatgaaggcggaagatattgtcgaaaaacagttgagcaaagtctttagcagtattggtggatttgcttggaacaaaatggacctgtttggagagc

SEQ ID NO: 76634 - DNA, 493 bp, Arabidopsis thaliana landsberg
  unsure (1)..(493): unsure at all n locations
gaaccggncgctcggctgcacgccatccacgacgcgcaccattacgctctcggcggcaagccagaccacggcggcgcgcggccttttcggaacgccaaaagagccaccgcccggaacgggggtggctcttttcggctgatcgaagacctactgaccggcatggaccaggtcaatatttctagtaagccttcnnnnnnnnnnnnnnnnnnnnnnnnnnnnnnnnnnnnnnnnnnnnnnnnnnnnnnnnnnnnnnnnnnnnnnnnnnnnnnnnnnnnnnnnnnnnnnnngcagaaccggcgaccgccatactctagccagcggcgggcgacagcgccaaatcgacgggtgcactgggtcccgatacacctccccgcttcgctcctccggcactcgaccagcgtgcgcgttcggccgctcgaccggccagttcgctgtcagccgaccgcggcgcccgcatcttcggcggcgagatcgcgctttcaggtgcggaacg

SEQ ID NO: 76635 - DNA, 511 bp, Arabidopsis thaliana landsberg
aaatggccccgggctacccccaaatgagggcaatatcttccttacgtgaagtcttatgtaagaagatttttagtcgttggctgatcataaccgtctatattgctaaagttaagaacaccaaccccccatcgaatttcttaatcttcaaggatatttggtatttcgattttctttcatttaagtatcactagcactatgtgatgagtttagattataacaatgaaaatgattgcgggaccagagatgggcctcacaagtcacaactcacaaaaagtgatcaatgtgatttatatatttattaatttataaaagtaatatttgagtttaaatttcaattcaaaactggaaaaatcttaatttaacccaatgttaatttctggagggtcaaacgtatttttaaataatggttatattaagttttaaataaccttaattacagcatatcttttattggtattgggtttaaggaaattccaaattcaattccttatatatttttcaatggtaaaac

SEQ ID NO: 76636 - DNA, 457 bp, Arabidopsis thaliana landsberg
taatttatataattatggttaacccactcaaccaaaatgttgaataatgtgtggaaaataacatctctttggttgttattaattggaaaaaggaaaaggtctttaagaacccatggccatgacccatctttctttcacacaaaaacgctctctaactactttgacaacttcattacactaaaaaagcaatagcgtgtaatgattttctttttattcgcattgagttttcatttctttatttcttctataattcacctaagcacactataagatttgaacataacttattacacgatgataataacaataaaaatcattaaactatatgttctatcaacttttttttaattgaaatgttgatgaagccatatcttaagccaaaagttatatgtaagtctattggataaaaaaaaaaagtttagtggccaaatgccaaaattgtttgcattttttgaaa

SEQ ID NO: 76637 - DNA, 471 bp, Arabidopsis thaliana landsberg
  unsure (1)..(471): unsure at all n locations
taaaaaagggntttgcnattanaanngnnngaaangaagacnccgganggggaaanctatcgacanngaaacnacctancccccnanacnnncacacnngcccccactaaagaagnanacacganannaanagnnagaacnnaaaanngnagnggnnggnncctaangnggacaanaaccaaactatnncctcaccannngnncanccatacgaaaaggacagnctttacttgtaattgtttcatgtcttgtttctatccaatatatcaatgtcatgtctcaaccatatattgttttttgtctcggatggaaacataagcttctaattatatccctcatctaaaccacatggtgttttgatattttgtaccatttagtgggtgagaggatgatatttgcataggtacaaattaaaataaatttcccaaaattaaatcaaaaaaaaggattaggtcaagtgggcaacaatgg

SEQ ID NO: 76638 - DNA, 613 bp, Arabidopsis thaliana landsberg
catggtaactacgtatgaaaattactatgaagaaaagtaacaagtaaaaatagtgaaaagaaagaaaaagagaagaaggcacaatgtgggaaggaagtgcgacgagaagatcactagatttggtcggcacatcactttctctcttaaactcataaacacaaagcatggcccctaccttaacgtacccactttcttcttttcaaccccacaatttataatatcctcaagctcaccctctccacatttagtgtgctctttttctttttcttgttcttttacaaaaaaaaaaaattattgtaatttattttgtacttttgttccccattggattacaagtctactttgatcttcaatcttcgtggtcgagaggttgagagagagagagagacgtacaagtttcaagtatgagtaaagacttccaaattaagacattggtttgcaagttgaaattcagtcaccactacttcatcatatactttttgtaacccttctctttcaatacacgtatatacttgatcagtctgttctcatcaaaatgtatacattgattacaaaaataatttcaattgatgtgttaatttttagatatataggccttaatcgaacatgaaaa

SEQ ID NO: 76639 - DNA, 393 bp, Arabidopsis thaliana landsberg
  unsure (1)..(393): unsure at all n locations
tggggatttagaacgttctcgaacggaccttgagagacggttatataccaacatataatgctaacttttgcagtcacttttggtttcttcgctttccatagggtataatagttgagtgcacaatcgatacatcaagaggttccactgtacaatcgtattcttaagcagctgttaaatattggatgcatattacatgtatacacaggtctgtcaaaataaggtacaactagataggccataactaagtaatcatctttggatatagatacattgtgggcacaaagtctcccactttccatgcaagggtcgtccagtaaaatagtcattagtcaatctctattatgctgggttgacggcacattttaattctctaatactgaanatatttctttt

SEQ ID NO: 76640 - DNA, 429 bp, Arabidopsis thaliana landsberg
ccatggatagttattttataagaaaacaggataacttatattcttgtttttttttcaggaacagttataaatacaggcccggtggattctctttctagttttcatgagcccatgtgattctctttgctcaatgtcttttacctattgatagataactgtttattttattttattttcagttagtctctaagtttcacacaaaaacttaatttgcatctttgcttaattcaaatcaaaatatttcatcgcgtgcttactttattctttaaaatttggatatttgcttattgggtatgaagctaatttttctttcatacctttcacataatttcctttttaaattaaatatgttgtaatttacaacacatttaagatataattccacactttttgcaataaactgaagatatgggcctttattttattttt

SEQ ID NO: 76641 - DNA, 565 bp, Arabidopsis thaliana landsberg
ttgtttttaaaaaaaactacgtagatcgtgttagattaaaagaaaaacagaagcaaacaaacttaaattttgacttagcaaacaaaccagagtcaacttatgtggtacgagcaaaagaacgaaaacccatgaaagcttgtggagaagccgatgtttctataggaggaatggaagcgaaagtagctgctgaattgatcccattctggcctacgagagattgcagtgaagccgaagttcctacaggtagagaagaagcatgtgtagctgctgaattgtcctcattcctacctaaaaaggattgaaacatttgctccatagtgtcaagtcgtttatgaacaagcacattttcattacgactcttttgcaattcagtttccagctctttcactcggacagttaacgtttacacttatccagtactttgaagaggaataggcgcaccatctaaagacaaagaagttccattttgaagtgagccaagtgcaaatacacgaccatgttttgatattgcaggaacctacaagatatataagtgcatgaacaatgacattttaaaaattaaaat

SEQ ID NO: 76642 - DNA, 433 bp, Arabidopsis thaliana landsberg
  unsure (1)..(433): unsure at all n locations
gtgagcagacgctcaaccagttgctcgtcgaaatggacggtttcttattgtacgacggcgtgatcatgatcgccggcacgaaccgttccgacgtgctcgatcccgcattgctgcgcccgggccgtttnnnnnnnnnnnnnnnnnnnnnnnagcccgatctgaaaggccgcgaagagattttgaaagtgcatacgcgcaagactccgctggcgaccgacgtggatctggaaaagctcggccgcggcacgcccggattctcgggcgccgatctcgagaacctggtgaacgaggccgacctgcaggccgcccgtgaaaacaaggcgcgcctcgagatggaagacttcgaaaaggcgaaagacaaagtcatcatgggctccgagcgcaagagcatggtgatctccgagaaagacaagcgcctgacggcttatcacga

SEQ ID NO: 76643 - DNA, 134 bp, Arabidopsis thaliana landsberg
ataattaattatcttaaatccattacattaacctaatttctatttttttaccacacacgtaaaaaaacaagggcaggttttaatataatctacccatctttaccccaccatcattttatattaaaataacaatc

SEQ ID NO: 76644 - DNA, 409 bp, Arabidopsis thaliana landsberg
agacccgacctttttcgacggtgcattgaacggtaaccctcagccatttgtgttagcgattatcatcacaagagaaaataaccggctaatgctgattctgaaacccattgcaggcaaacaggtggcttctgccgagttctactacaccaacgacctgacctcggacaacgaacatcgcgtatggagccacgttccggcgacgatcaatgaggataggcagacgatcgttcagactattccaaaagaagggtataagtatgcgtttttctatttgaaggataccgatgggatttccgggacgacggtgtttttgaaagatggaaagatggattagcatgtacgttgatttttctgtgttataccattacctatgatcaattccccaaagaaatgggatggagctgattct

SEQ ID NO: 76645 - DNA, 322 bp, Arabidopsis thaliana landsberg
tcttaccattttaacgagaaatggatcgatctaagcagagttgaatagttgattactttcagattgtcttaaggtatatataaacacacaacataagggattgattcaaatatcacattagtaacataacagcattggatataaatgcatgcactctgtttggttttcttaaatttttaggtatctatttatggatatattctctgaatgtatttcatttgtagacttaattttcctctaatatcggagtgccatccaaggattctgtgtactgattcttgaaagttcaatgaattttccagcaataaaggaaataggcatt

SEQ ID NO: 76646 - DNA, 460 bp, Arabidopsis thaliana landsberg
atgtgtctgcaccatatgcccacagctcccatgcctggttttattctacaatgcttaaagcttgctaactgggatgagtgttccttcaatccttcacaagaagaaagccaccttgtactaactacgctatcttaaaatataccatcaagagatttatattccagctgagaataaaagaaacctggcttaagtcacccgtagtctcatacaatgtgacgtactgtttttaaatgtcttgaaggatcttgcgctgcaaccaagtctgaccctttcacattttcatcacgttacttgtgtgtttctcactttctaaaaacttcatccaatacatgaagcatggcgttctagctctctacacataaagatggctccttactcaatttcaaagaactgacacagacatctgtgccaccgttgagatactaagaattcaatttctctatatttttgcatcctttat

SEQ ID NO: 76647 - DNA, 558 bp, Arabidopsis thaliana landsberg
  unsure (1)..(558): unsure at all n locations
tggaacacgggtgccaccggcgatcgtctcccggtaaccacattatgttagtacttcgtgaccgtcaaaaataggtgcggctgcgagtctgcttctcagaaagtagccatgcaagtgctcaattcaccattaccagccaaaccgaagatttctgcctcaggggcacttaccttctgccagggtggagaagtgaacctgacttctgactcaaaagtgaaaagcgtttggtccaatggtgcaaacaatgccactattacggttgtcaactcgggggatttccgcgtgagggcgctcgacgatgtcggctgcttctctcctgannnnnnnnnnnnnnnnnnnnnngtaaacccgttgccgggcaagcctgtgatttcgctgagcggagaaacgacgttctgcgacgggggcaacgttacgatgacttcaaactatgattccggaaatatctggagcaccaatgctaccacgaagtccattgccgtaaccacgacggngaaattcactttggagcaaagggatggaaacgggtgcgaatcgacctcggatgaagtgaatgtg

SEQ ID NO: 76648 - DNA, 528 bp, Arabidopsis thaliana landsberg
atgaatcagcacaaaattataatagcattacagcatcatcgacttgttttaggacaactacgagatatactggggtagggaaatttattggttcacaacttcccatagtcaaaaagaaaaccccgaatcctaaaaagttcaaaatacattacgaagagcaatgtaatactattaaatatatgtatctaatatgggatttttgaaaacagctaaggatattagaaaaaaaaagagacaaagcaatgtataaagagtcttcttttctttcctttcacctttttttgaaaaccaacataattcgggaatcatttggtgaatttagcgatcaatttgtcgacatggatgatgatatcgtctatgcgcggtcgaacagcagcttgtggttgcagcatccaagttacgaactggtgaagagcttcagggtaagaagctcttggtccagtgcttggccatttgatctgagcgttcacgattgcaagctgaagactttcaccagattctccagcgcatactcgaatggagacacac

SEQ ID NO: 76649 - DNA, 403 bp, Arabidopsis thaliana landsberg
gaacgacatttagatttaccttgataggcaagaggctatggaacccgttaatgaatataagcggaacaagtcaaatatcaaacggcgagatacaaaacttacctactgaagtatgtttcgcgtaagtgtttacaagatgaataaaagtatacttgattaaaaaactaaatattgtaattatgaaaagtcaagcactatatgataaaattacctagaaaaacgttacttaaattccaaaaatacagaacgatatgtaacatataaaaaaataatgaacatgagcaacatacattcttaaatgtgactttgtgaaagacagcctgcaagattcatgaaacatactacgttttagaaaatagttaactaatacagataacaatacgagtgaaagttaaataaacct

SEQ ID NO: 76650 - DNA, 619 bp, Arabidopsis thaliana landsberg
ctctacactcacattcagaaacttaagacccgcataccacaggctctgttctcatcaatcatttccttactcctacgctacatctaccgctaccacttcttgtattaagcatttgctctctggcaggtactccggctttattgtcattaaccctcatatccagtttaaaggtcagttacttttattattccatgttatagttggggaaaccaagattcagagaagtagtatgcctctggtcacacagccactctgagccagaactgctgcccgctctctctaaggccgagccctgaatccctgctctctctctaaggctgagtcctacattcttactggaatgagaggatctgaagaagggatacgggcatgagagggagagcaacaagcatggcaaacccacacagaaggacttgactggaatgtagaacaagtaagcgtgcttagtgaagaagagagacagtagatgtcagcttcactagtgaccagagaagttggggagttcctgggctagcacagccctaaagcctcctcggacaccgggactttctctccagagcactggaagccagtgaggttccaagtcatgagtctatactaaaattctagtctcctctct

SEQ ID NO: 76651 - DNA, 389 bp, Arabidopsis thaliana landsberg
  unsure (1)..(389): unsure at all n locations
aaagagaaaaaaaaaaaagagaaattcaaaaaaaaaaaaatttaattaaaaagggcgaccaaaaacacccgggggnggggagattttaaaaaaaaaaacaggacaaccccaccaccagaaacagaaaaaaaaaaatcaaaaaaaaaaaagcacacacgaaataccaaacaacaagacaacacaagaagacgaggcaccagcggcaaaaagaaaaaaaaaaaaaaaaaccaccgccaaaaacccgaagaagcaaaaaagaacccgacaaaacaacaagaaaaaaacaacgggcaaaaggaaaaaaaaaaaaacaagagcaaaaaaaacaaattattattttatcccccgacaaaaaaaaaaggccaaacaaacaaatgtcaatagcctaa

SEQ ID NO: 76652 - DNA, 319 bp, Arabidopsis thaliana landsberg
ttcatcggcatcttcatcatcatcgtcttcatcttcgccacttgtatctgatgcatagatttagggttttgccatgaataaaacgattttcttgctaatttattacagatctgtcatcttattcttttattcaatggattctcttgtttcgctacttctttaacacttccaatctctcctaaattcccaaatgacttggatttccctttgtaatgatacgataaccctctcctgcaagtaacatcaagaaccctaaaaaaatttaatcaaagaaacaaaaaaacctaaagagacgatttttagaaaaaacaacagagtt

SEQ ID NO: 76653 - DNA, 238 bp, Arabidopsis thaliana landsberg
aacaatatcaccaactttagaactggcgcttttttaatgacaacactccacataacaactctaacgctttttatcttcctaatcaccgcctatttggccttcactatctctttatggctaaacagggcaaactatatctttccactatatctacataataacacactatcatgaaaactagttattcttacttggaaaaatctcttatttaataaagacgaccaaagctttttatcga

SEQ ID NO: 76654 - DNA, 562 bp, Arabidopsis thaliana landsberg
agaaaaataatagaatcggagtggagatgccctaacgattttttttcgacaattcaactatcgaaataaagaggagatgggaaaccagaagaatcataataactgtattgaagtaaatttattaggagaaaaaaaatcatactaaagaaatctaaaaggaacggaccgaaccaaacaaattgaaaagaaaataagctgaaaggtctcaccaaaaaccaaaaagtgataggaaacagaaaagcacattcaaatattaaccaaataaattacacaatatgaagaagaagtttgaataaattaaaaaaaggaatgcgagctttgcattgctttctttttctttctttgtcgcgcgtattagttaataagagagccaatacaaaatgcaactatgcaagctctctttatttagttcactatcgctgaagatgaagaatgcaagctcttggatcataagtttgttactacttcattcttcttactatggccttgagtaaataaaagtaagacgaatggtagttgaacaaccattagtaattattgagtcctcaaatattatattata

SEQ ID NO: 76655 - DNA, 242 bp, Arabidopsis thaliana landsberg
  unsure (1)..(242): unsure at all n locations
nnnnnnnnnnnnnnnnnnnnnnnnnnnnnnnnnnnnnnnnnnnnnnnnnnnnnnnnnnnnnnnnnnnnnnnnnnnnnnnnnnnnnnnnnnnnnnnnnnnnnnnnnnnnnnnnnnnnnnnnnnnnnnnnnnnnnnnnnnntctctttttcctttctattcttttccctagattcatttatttttaaaatatttttcttcttatttttattctatcttttcttatcttacctttcaaccttttc

SEQ ID NO: 76656 - DNA, 595 bp, Arabidopsis thaliana landsberg
gatttcaaaccaaccctagctgcgcagttgtcgcctccgtcgctgcactgtctagccgcttatgtccttctgggacccttgtctctatttgttcatcttctagagcgacgacttctaaaaccctaattctgctcgcgatctcttcatcgtttctcccgtctgttcatcttctccgacgatttcagcaatccttgctcctcaagtatcattcattcattagtaaacttaactctgaacactttacaacactaataatctcttaagatgattctcacactaattactcgatctccttgtatttatgttactcacacattcttgttaagactcaaacaacttcttctccctccggttcgatgtatctcctgttataaagattaaagacataaaccgtgggtcgtgtctctttttcttcaagctagtcaacgagctaaataatgttcaaacatagatatgtgaatgggtgtctattaactctaaatctcttttactgattttattcataaggaaatgagtgcataataatgcttgataatgtcaggttacactacaatcttttttaaggaaaacattttttggactgcgtgatgatttt

SEQ ID NO: 76657 - DNA, 208 bp, Arabidopsis thaliana landsberg
acgcaaaaaacaaaccgaacgaaaaaaagacagtaacagaacaaacacacaagatacggacaaaaaaaaaaagtacacaacaacacaaaaacatgcagacacatgcaaacacacaccaaaaaaccggcacggtaagaaaaaaagactataaaaaaataaaaaaacccaagaaaaaaaaaatcgaggcaatagccaaaaccatcaactt

SEQ ID NO: 76658 - DNA, 605 bp, Arabidopsis thaliana landsberg
ccaggtcggcttcctccggctatgtcgaatacatcatcgggggcaaggggttcagtttcgcggtgacgccggccgtcaatgggccggggccggctggcctgacactgacgccgtccggcatcatgccgccgccagtcgccgccgcgggtgacgccgcgaccgcgcctgcgacagctgcgttgccgagcaatttcaacgacctgcttaaactcgccaacaagtccgcgactgccaagtcctctaagtgagatagagaaaaacaatgcttacacgcctcctcgcaatctgcttctggtgttccctctcgttttccggcgcgctgcatgcgcaggaatcttcgacgggaacgaaaaacaacgaaatcctgatgttcgtcggcgaggtcaaatcgatcccggccgcaaaaattcagcgcatcgcggtcggcaacggcaaactgttcagcacgtccgtcatcgacaacaaggaattgctgctgatcgccgaagcggtcggcgattcctcgctggtgatctggtccggcaacaaccggaaaaccgtctataccgtgcgcatcagcccgcgcgatgcgggcgaagcctaccgcaacctgagcacggtactga

SEQ ID NO: 76659 - DNA, 547 bp, Arabidopsis thaliana landsberg
ccgcgccacggtgcacgctcgataccggcttgtacgatgtggcgaacggccgcgcacacgctgttcgcgtcggagaaacgtacttcctgtttttgcggatggacgttgacgtcgacggccgatgcgggcgcatcgacgatcacgaccgcgagtggatagcgcccacgcgggattaattcgccgtagcccatcgcgacggcatgcaagaggccgcgatcgcgcaccgggcgcttgccgacgaacaactgcacgccgcgcgcggtcgtttgcccgagctcgggcgcgccgagatacgcagtgacacgtacgccgttctcctcgccgtgcgtctcgatcatgcgcgcggcgatgcgatggccgaggagggcctgggcgcgggcaaagccgtcgcgatccggcgggacatcgagcgcgatgcggccgttgtggcgcagccgcaggtggaggccgtgatggaccatcgcgacgcgcgcgacgaattcagtgatgtgcgacgcctcggtcccctcgccctttaggaacttgagccgcgcgggcacgttgtaga

SEQ ID NO: 76660 - DNA, 551 bp, Arabidopsis thaliana landsberg
  unsure (1)..(551): unsure at all n locations
taacttcttaactgtattgtttcattcacggtaactagtgatcaaaatttaccactnnnnnnnnnnnnnnnnnnnnnnnnnnagaatcatggcttgagatattcttgtgataaaaaatcgtggctgaagttactgataattttggttgagtatctaatgtaaaccaaatcaagaagaaataagagttaaaatgttagcttaaagagcccatttatacggtacatcaattttttgttctatcaagtgacactcggtttagtaattttttaaaaaagagatcaaaaaatataattagaaaaaaataactagttccaatccgcttgtggagacagatatttccaaagtgatcagtttaaaaatagcctccagttccacagagattagaactctgatctgaactttgaggttataaaaaacacactttgttgttctttcgttttttggtttgtgatgattttatgggatgcgaaaaaaaagttattagctttagaggataatgaaagaataaaatttcaactttccaaaacaaaggaaaactataatttttaata

SEQ ID NO: 76661 - DNA, 288 bp, Arabidopsis thaliana landsberg
  unsure (1)..(288): unsure at all n locations
ctattntctaaacctatatacttatacttctcatatcaccaactttagagacttgccgttcttttatcctcaaactccacataaccactctaacgcttcttctcttcctaatcgccgcctgtattgccttcactacctctctatggcttaacaaagtaaatcattcttttcactatatatacaatacttcacactatcatgataactattattcatacattgaattatcgtttgcttatcaaagactacaaatgcatttcatcgaccgtcatttataacaacaaaacc

SEQ ID NO: 76662 - DNA, 113 bp, Arabidopsis thaliana landsberg
  unsure (1)..(113): unsure at all n locations
ttgaaagaagagggagagggggaaggaaaaaatggatgaaaaaaaaaaaattttttttttaagaaagagagagagaaaaaangaggggggggatcaaaaaaaaaaaagaaagg

SEQ ID NO: 76663 - DNA, 455 bp, Arabidopsis thaliana landsberg
ctgattaatgaatgaaaatggaatgagacgacaaaattgacttattctttttttaaaactgtttgaaatatcatggttgggtgtaaattcctacccactcatttgaactaatttaaattgtctcttaaatcatttgaaattgttaagtgtataataacttcatcgcaaaattctcaattttcaaattatgtaaaattttagaaccttttttgtgatcaaataattttagatttgaaataattttaacaaaacctagattcaatgaggcagaatttaatacattttttaaaaaatcaattcaataaagaaaatgatctaaaaagaaaaaaaaaatcaaattactgatccaatataccccattaaagttaaagctttttacattcaattttgaaaaaataaaacccttttcataaatgaatttagcgtaaccggcaaaagaagatctttgagttgga

SEQ ID NO: 76664 - DNA, 548 bp, Arabidopsis thaliana landsberg
  unsure (1)..(548): unsure at all n locations
agacaaatgcgattggctcatatatagttgttaagagggatgcaaagataagtggtagttgcgaaaacgaatgtacgccgcgaggtacgccatgcagtcattacccctagcgtttcccgtatacatacggatcatgtttctgcatgaagcggggtactatttcttcgggcaatgnnnnnnnnnnnnnnnnnnnnnnnnnnnnnnnnnnnnnnnnnnnnnnnnnnnnnnnnnnnnnnnnnnnnnnnnnnnnnnnnnnnnnnnnnnnnnnnnnnnnnnnccatttggataatcctttgccgccgtgttcgggcagtatgaacacatcggccaggtaagcaaacgtggctttgtcggtaaccagtcgcgcaaacccaacctgttttccctggtggaataatccgaagcagaaagnnnnnnnnnnnnnnnnnnnnnnnnnnnnnnnnnnnnnnnnnnnnnnnnnnnnnnattctgtggagaggtacccgtgaataacggcgatatccattttcgagggatcggtgctgatgctgtatgcaccgatatgcatg

SEQ ID NO: 76665 - DNA, 595 bp, Arabidopsis thaliana landsberg
  unsure (1)..(595): unsure at all n locations
ggccaagtgagatcgtagaaaacacccatcatcgaatgatatgtttatggtttaagactatatatgttataccagggaagggtagtcaagtcaattcaagtgaaagaatacaaacttcagtttgggacattcaaatatagaaaaggatacagtgatacacactattttcttattggatgtgcgcaaattttctacggtatgttttttatcgattttacattttcattttattttaattaaatataatttaatcaaatctatcaagcaaatgcggattgcataattggtttttaaaagattagtcaataaaatgcataaaattaaatcttgattgaaaaaatatccactatatagattctaaaacgtgtgcatgttaccacttagaattgaaacattatagataagatttaacatctatttcgtatactatagaagcttgaacctgttttcaagtctagccgtgaaactagagtcgnnnnnnnnnnnnnnnnnnnnnnnnnnnnnnnnnnnnnnnnnnnnnnnnnnnnnnnnnnnaggaagtataacactccagccacaatggctgctaaagatgcttgagttctacagaaattga

SEQ ID NO: 76666 - DNA, 335 bp, Arabidopsis thaliana landsberg
  unsure (1)..(335): unsure at all n locations
acnnnnnnnnnnnnnnnnnnnnnnnnnnnnnnnnnnnnnnnnnnnnnnnnnnnnnnnnnnnnnnnnnnnnnnnnnnnnnnnnnnnnnnnnnnnnnnnntgttcgttatttttgcaagctcatgtttatttacgataaattacaaaaacaaaaagaaacactaattaaccaaatagtcacacattattacgacacaagtatctataacagaaaagagacattattttgtacaacaaaattaaaacacagattatgagtgtgttacaactaacaagcattactttgacagtacagcttanacaattncctaatcgcaaacatattttttcaaactca

SEQ ID NO: 76667 - DNA, 545 bp, Arabidopsis thaliana landsberg
  unsure (1)..(545): unsure at all n locations
cacagaccccacgtctggtagccatcttccttcattcggatcatatgctttgttgttacgcttggtgattacgtatagcggnnnnnnnnnnnnnnnnnnnnnnnnnnnnnnnnnnnnnnnntaattatcactagggctaggcagcggattccaagtctgagtctttaggtcgaaaacttcaccacaattcatggattcttcctcactctttctgcatcctcctattacatatatatttccgtctaaaaaacaagacttggcgcctacccttgacactctcatgttaggagcacgacgccacctgtgagtccaacaatcaagtacaaaaacagctctggatcgcttgcccttgacagttccgccgattttgtagatttcggtaccagcagctacagtttactcgagtacgaggataagaggaagagagccttaccggttctaaacttagtttaccctcaatctcggctagggtgaaccagcgatgttctttgggtaaccacatgcacacgtacgggcaaggctctgtcgctccgatgtgggatcgg

SEQ ID NO: 76668 - DNA, 438 bp, Arabidopsis thaliana landsberg
  unsure (1)..(438): unsure at all n locations
gaaccgccaaaaacatgcaatagccatttgtggatcgacgtgtatttttgctttactgaaaagaagcatctgcaaaggcttgaagttgtaattcagcttgtgaagagtaaaacagacnnnnnnnnnnnnnnnnnnnnnnntagtgaaggatcttcatgactgccatttgatgagcttgacgaggagcatcagagtattggctgagcttgttaacggcaaagctaatgtcagggcgagtgatctgaaggtacatgaggcgaccaatgaggcgtctgtaagcttttgcatcaacaaagtcaccaccagtctctctggaaaaggtgatactaggatccatagggacactagaaggcttgcaacccaaaagacctctttcatcnnnnnnnnnnnnnnnnnnnnnnnnnnnnnnnnnnnnnnnnnnagcagcggagcgagcaa

SEQ ID NO: 76669 - DNA, 402 bp, Arabidopsis thaliana landsberg
cagttggctgtaccgcatccgtcccggcgccgcgcacggccgtttttttccgctggccgacggcgcgttccacaggcggtgcgacgagcagccagcctcgcccaaccgcctgcgctggaacccgctgccggcgcgcgatgacaaggtcgatttcatcgacggcatctggacgcaggccggcaacggcggaccggaacagcgcaacggcgtgggcatccatcagtaccaggccacggccgacatggtcggacgctacttctacgatgccgatgcggagctggtgatcgtgccgcaggatggccgtctggccatccatacggacatgggcgtcatcgacgtcgaaccgcagcagattgcggtcattccgcgtggcgtgcgctttgccgtgcgtctgcctgatgg

SEQ ID NO: 76670 - DNA, 588 bp, Arabidopsis thaliana landsberg
tcagagttgaaatgaatttgataaaaaccatatctaaattccttttattgttaccgtttgttgaaaaggaaggatagggggatacagatatgctcaaattcaagatatcaaagatttatagtacgtgcgtacaaatgattgtgggaaagggaaactattcatttaagaatactttgcttatcttatgcttttatattctcacatattcgacaaacatcacatcatctcaattgcggagacttcagtgagcattctttacgagtaacggtgactatcacgatgacctgtgcaatgagaagaaaaatgaactgattcatataagaaagttccaaagaaaactttttcacatgaaacggcaaagaagaccatgttagtttgggattctgttataatcgttcaagtaggattcataaaacatgtatcaagctatcaatcttttactctggaataccttaacaattaattttcttggcatgtgtcacaactgaatactagatatttgagagttttacgagttattgagtactagctatatgtgagaatgttctatgtaatcatgtttatttgaaaacagtaataattaattac

SEQ ID NO: 76671 - DNA, 246 bp, Arabidopsis thaliana landsberg
  unsure (1)..(246): unsure at all n locations
accccgggggccccaaagcagcaagaacccaangcacgacccgacacacacaaaagagcataaagacaagagcacaggcagagacagaccccgccaaaaccaaccaaaaaaaacagcccgggcaacaaggagaggcagaaaaggcccaagctcagaacgcagaaacagctaagaacaagcaacagaccgaacagcaaacccccaccaagactagagaaccacaaaagaaaaaaaccagcaccaagg

SEQ ID NO: 76672 - DNA, 365 bp, Arabidopsis thaliana landsberg
tctataactcgctgtgccgagatatgtattgcaactaagctgtaatgttgtaattgtaggcagagagatataaagctgctaaccagagggcattgcaaatgctggagaaggtttgttaaaataattgttgatatggagctttagtcctgtattcatgtttagattttaacttattgttattcatagtgtggaacaactcaagttgaagtagatgctagtggatcactaacatatcctaaagataaagttggtccaggagatcaaggtaaaaattttggctccttcaatatcttcttcatacgtatcatagttttgtttgtcgaagtttaaataatggtactttttgctttgttactctcagctga

SEQ ID NO: 76673 - DNA, 283 bp, Arabidopsis thaliana landsberg
taacttttctgtcttttgactgaaaatggaaaaacaaagggcacattcggggggatttttagggcaatacccgagcattccaccatgctgacactactcctaacagggcttatgctgcaaaccaggttcaagttatttcttttagtcattagattcttaataaaagtccttctttcgatatttactctccccttttaatctcttaggcgacgtccttgtagaacccccatgcataccataagcccgtaaataatatacaattaatccccaaaacaagaacaca

SEQ ID NO: 76674 - DNA, 583 bp, Arabidopsis thaliana landsberg
cagcccgttggcgcgtgcagcctcggcaatggcgtggccctgggcgtttgtcatgctggcgtccatttccaggtcgacgtggacggagatcatgtcgcccagcttgcgggtcttgagggcgtggatgcccagcacgccgtccgtctcgaggatgagctggcggatccggccttcggtgtcttcgtccacggcccggtcggtcaggtcgttgaaggcggaaaggaagaacttccagcccatgcggtccacgatgatgccgacgatcagcgccgcgagcgggtcggcgagcggaaagccggccaggctggcaacgatgcccaccgccaccaccagtgacgaggcggcgtccgatcgggcgtgccacgcattggccaccagcatcgacgagcgcacccgcttggccacgcgcagcatgtagcggaacagcccttccttcgcgcacagcgtggacacggccaccgccagcgccgcgttgccgacgtgtccgaccgcggtcggctcttgcacgtgccggaacgcgttccacagcatgcccgcgcccactgccatgaagatggcgcccagcgccagcgtggccgcggtt

SEQ ID NO: 76675 - DNA, 353 bp, Arabidopsis thaliana landsberg
gggaaccaacattaggttcagaggtagacttggagttatcgaagccctttctactctttaccaaccatcatattgcaatccttgtaaaaaactagtttctttcatatatgttttccttatatctataataatctgtggggactttttacaaaccaaagttttttttttttggtgaacagagttacttggtctttttgcgcattacaacgagacatttaggtcatatcaagaagagtttggtcgggagaaatgacttaatcatcaggtagattaacttgcggggcgtaacttcaattctctaatcacaagccaaatttcttttgctcatttgcgttaaactacagaaaaactct

SEQ ID NO: 76676 - DNA, 474 bp, Arabidopsis thaliana landsberg
tctagtccttcttgctgccttgcgcttctcccgttgtttcgttttgaagaacatgaacttgacccgggaggattacgtttaatatatacatataactccaccccactatatatatatataaacgctcgctactcgttgaaaatgattgccttcgactataaacacagggtataggtcgttaatttgccctcgctcatgccccttggttgaaaaaagaaccctctactcgtatgggtagaaaaaatcaccctcgaaatagtagaagttgatatacgcccttacccgtcaaaaggcgatggacgcttaggattaagagacacacctagcttcaatgatgctctcttagcaataataagtcggcgaatcccttaaaaaccccctcgccttcttgcccaaatccttctaggccaatactgcaaagtccgatcctcttctcgactgctctacccccagaaatgctcctcatgggtggaa

SEQ ID NO: 76677 - DNA, 572 bp, Arabidopsis thaliana landsberg
  unsure (1)..(572): unsure at all n locations
tttttataaaaagaatagggtatttttcaaatgaaatttcaatttaaggcattttttcaaaattactctgggtttggtatgtgaagctgccaaattacccttgtacgttttttattatgttgtctttgaatggaaaaattgcaatggcttgcatcgtaattaatctaccagaataaggttttttattttgaggattcccaattaatagtatagatagtgttttcaaactgaatcatttattttattttatatccttctaaaaaattataagacatcaactatttttatttttattttaattacattcacattcattctgcgagagcattcaataaacaatgtgaatattttaactaaaaatatgtatagttttagcgtaaaatgattttacatctaaaaacagtttacgaagttaaaccaacgatataccaactactattaaagatttactaataattttggaatccttagtaatttcaaacatgtataaatccttatctttataaatgcatganatacttatcttttaatcggagggatcctctttaagagtctgaaacggagatgatgta

SEQ ID NO: 76678 - DNA, 595 bp, Arabidopsis thaliana landsberg
  unsure (1)..(595): unsure at all n locations
cttgtcggcggtggttttcagcgtgtacagcgtccactggtcggttactttgaagtcagcctcggcgccgacattggagtggggggcttcgttgatctgcacacggttgtgcagcacgggcggctgaccgtcgtcacgcttcgccttgagaaagnnnnnnnnnnnnnnnnnatcgcccgccttgatcggcttgtcgaggctggtctgcacggcggcggcgtaggattcgccgacgccggtggccttgacctcgatggcgccgccgccctgnnnnnnnnnnnnnnnnnnnnnnnnnnnnnnnnnnngaccgtaaatgaccagactggccggattgggattgttgatcaggtgctgcatcgggtcgtcgtcggcgtgcgccatgacgggcaggcacaaggacgcggtggcgagggcgataagcaggtgacgcttgcgcatggtgatctccctagactcggacgtagagtcgtcctgttttcaggcaggctgccatgcagaccggaaattgacaactgagtcagaagctgcgagcggaacttgagtcccgcccgtggcttttatgccgttatcgggcgggggcggtactgaacgccgc

SEQ ID NO: 76679 - DNA, 505 bp, Arabidopsis thaliana landsberg
ccctcgatgatcgcctgcaggtgatcggcgccaccggcctcgcgaagcttgtgtttcgccatcggccccatcgcatgctgggggacgctgtagaccggatagccttcggcgaccgacccgtcacgcgtgtcataatgccaccaccattgcccatggatgccctgcagggcgcagatccgcgccgcgcagacatcggcaatcctcagcgcatcggcatcgccgatcgccgcgtgatagcgggaaagcgcctggatgggatagacctggtccgcgtagcagccgatatgtgaacgcatcggcccgctcgccgatgccggcagcatgtgcgggaacaaccccgaggccgcccggccggcgacgagcttgtcgtacgcgcgcttcatgaccccggacgtatctccaaaccggcgacctgcgagcgctgcaatcaatgcccaggcgcaatcgaccgtgggtgatcggcttgtccgaagcgagccgttcgcccagtttatggaagagtgtc

SEQ ID NO: 76680 - DNA, 530 bp, Arabidopsis thaliana landsberg
agcgctatactctctctaaaatcgaccagccttcagctaccaacatttaaatttgtttgaaactgatagaagctgagtggagaggggtgaagaagtccattatcaagcatgctcttcttaaaaatcgtgataatgacgtgagtcttttggtcactgtttgtgtcttcgaagcttttccggattttagcacctcatctaccttttgaagacgagtatctcagggtatatagagtcttttaagtcattcttcccaattatcacagttttatggctactcgcactaacattgtcatatccctatttcaggatatcttcactctctttattgctgagatttctgagctatctgatactgtaagcccttatttctctaagagggcgaaaatcttggagacagtctctcgattgaaattttgtctgctaatgctggacgaggattgccaagatttagttcacgagatgttcaaccatgtttttctctctttgttggtaagagatgaaacgatttattcatttcatggctactctga

SEQ ID NO: 76681 - DNA, 521 bp, Arabidopsis thaliana landsberg
  unsure (1)..(521): unsure at all n locations
aagccgaccgctaaatttctcattgaatgtggcattcacatagctcgcagttctttcttcttctggccttgattgtcggcattgtgagatcctggctgttgcaatttccgcttcgctgacttccatctcaagtactacctgcccctttggttcgcacaacgtttgcaccggatacagtctcatatttgaaggtatcaaatcaatgggcgttccaccgtgcaatcgggtatcgatatactgcctttcatgttgtcgtttgtcatcggtgtgtcaaccttctcccacaaattcttcacgcccacacgcttgcagctgcagcgatcgcgtccgggatttgctctgtaagggaaataaactggtgcataatctaatcactcgcatttacaagggtacgggacggtactggcatttgctgcttgtgtcccctctcatctccgtcgccggagccgcactgcttaccaaaattacatcgtccacttcgtctgcaacgntgatcggttttcagattttgcttggggtgc

SEQ ID NO: 76682 - DNA, 559 bp, Arabidopsis thaliana landsberg
  unsure (1)..(559): unsure at all n locations
tttggnaaagaacttgatatgatatatataatttctatttatatatcaatcttcgtcccgaatctaaaggtatgggatataatttgagatatttgaattcttgttaatattttctaagagataaaggcagaaagattcactattaaagaacattaaattcttggaaaaaacccttaattttaaagaaatcaagttctctatagaaagaagtttcaacttggtatagtataatttcttttcgtgttaaagaacttggtataatataatttaggaaaatatatcaatctgcatcccgaatccaaatatatctttgctttaacaaaaaagcatccaaaactattttataatttgagatatttgaatctttgtaaacttttaaaaacagatagaggcggaaagattcattattaaataacattaagttcttggaaaaagcctaaattttatttaatcccacgtgaaagtaatcataaagatcctaagttttataaaaataaaaataaaagacacgtttatttaagacaaancattctcttattttagtgcgttgtgggattat

SEQ ID NO: 76683 - DNA, 484 bp, Arabidopsis thaliana landsberg
  unsure (1)..(484): unsure at all n locations
gatcataatttttttccaaatttactgcgagacgagacgaataagaggcgtagaggggaaaacaaaaatcagagacgcgtaaggaagaagaacaccccctgaagacgtagcagcatagagaagccccgtgaaaacataagatccatcaaatccatcactgaacgatcaaatcatcgaacaacaatctagaataacagaaggaaaagtaaatcgcatgaacataaaaagccatcgatgcaatttagaaacaaaccctagaaaaatcaaatatcaatggaaaatccagaagaaggaacgatgatcgattcaaacaaatcagagacgcgtttagaagaatatcaccagagaacgcgtagaggaaacttagtcagagaaaggaagaagatgtgtggtagaaaggtaaagatggagaaagaggggagcattatttatagatgaggtatgaaagaaatngacggtcaacatttgataatgtaaatttcaa

SEQ ID NO: 76684 - DNA, 459 bp, Arabidopsis thaliana landsberg
aaatatataactcaagtatagtactaaaaagattactttaacttacaaacagaaacctattgtacagtggaatatcaggcagtgaattattaatcaaatagtaagggaaactaggatataatagaaaaagaattgccgacctacaaatcagagtcaatggtcaagcaagtcaagggaaagttcgtcactgttatgcgatctggacgacaaataaaaaaaaaaaattgtttaatagaagaggatataaaggaaacacggatcctacataaatatgtatgacgtacacatttttcttcaccatgggacactgaccagccgaaattattgactataccgaactttcttctacttgcttcttgtttcgacgcttttataacacatgcatagataatacttaactccttatcatttatttctagtccgtagagacttataaattgaacgtctcacgcctttgga

SEQ ID NO: 76685 - DNA, 362 bp, Arabidopsis thaliana landsberg
  unsure (1)..(362): unsure at all n locations
aaaggagannnnnnnnnnnnnnnnnnnnnnnnnnnnnnnnnnnnnnnggagtgtattggtttctattatcaaagaaattgactcagtgcaagattgagccaacggtgaactaaatgttgtgatcaaaacgttagaaagctgagaagatggtacacaaatgttcaagagttccgaagagaccatcataatgaatgtaagagagtcttgcatgttgttctatttatattaagcataacactttgacttaaacctagacgaataagaatatttatcgattaacgctctcatgcctacttttgtatccagagatacttaagcggttaacaactcttgaggaggattcatgcagtgacacaaacgaa

SEQ ID NO: 76686 - DNA, 388 bp, Arabidopsis thaliana landsberg
aggaggcctgcaatatatgaatgtgtttttgtaagtcccatacgttttacgccattgtgtaattatttttaaattgtttatgttatattggactttgaaactttgcgatattattcgatttcattttctttatggtcacataagcgattaatactttatttacgtttatttacgtgtcatggcgtaaatcgataaagcttacatattattcatttgggttagtaatgtaatttcacatgctgctgattacttaaagaaagaaatattgaaaaatttgtaataacaattgaatataactagaaggaaacctaagcccttattgcaaatctggaggtggcaacaagggaaagaaaccctaaaacgattgcctgcctacccgatgatttag

SEQ ID NO: 76687 - DNA, 110 bp, Arabidopsis thaliana landsberg
aaaaacggaggggggggaggaaaaagagaggaaaataagaaaaaaaagggattatatatgtggggaaaaaaagaagaaaaaagaaggagagggggggggggaaaaaaaaa

SEQ ID NO: 76688 - DNA, 375 bp, Arabidopsis thaliana landsberg
gaagcaaactaaagtgcccttttcatttccaggtctgaaattatgtaccgctttgacccatattacacctgttgagtttgagagagaggcaaaccattcacaagatacagataacaaactgcatcaatggctactgtatgctatgcccgagtgtgcgagatcacctgatggaaaacatgcgcttatcattgcatcaaccatagacatgtaccaccttattttcccttatcttaaatttgcattagagacccacaacgccaagctgttatgacgtatctacattcatagtctaaatgtcgaaggcatgtcattcttttaaacctacttgacatgctaatttaatcccatcttgattgaatgctttatcctagataa

SEQ ID NO: 76689 - DNA, 122 bp, Arabidopsis thaliana landsberg
  unsure (1)..(122): unsure at all n locations
ggggggaaaaaaaacaccgttctctacatcaacaacaccttttttttttactcagacaaaacaccaatcccgggnggggtgaattaaactcattacacactcccctccctttctcctataat

SEQ ID NO: 76690 - DNA, 498 bp, Arabidopsis thaliana landsberg
aatcggatacaacaccagttttcttcgcccaagatcttaagtctctcggattcaaatcctttttaggtaaaaagggttccactctgttgaagagagcaccaaactttctctcgccataaccattaccaccaccacttccattacccttattattaccagtatccggatcgaaacccgacccggaatccattgtttccaacaaagactcaaaatttaagaaagactagagaagcttgtgaagtgaacttgagctgtaagttcattttccagcttcttcttcttcctttttttgctaactttttggctctctgaagtgagaaacagagcgtaacgttatttcactttctcactcatgtcgacatcagaggtttgtctttacctcaactaaatgactaaactatccttatgatgtatgaaaatatcttattatatacatgattaaagccaataataacagttgctttaagactaagtattcaatattagctgcttaatgat

SEQ ID NO: 76691 - DNA, 506 bp, Arabidopsis thaliana landsberg
gcaccattaataaggctgctgctgctgcccaggctgttggaattgtttacgatttgtgcattctggtatgcccaggggatgccgtgcggaaatagaattgccggtagcattccagtttccgctgctgttaataatactgccgatcttaatggcatacacccgtgcgttataagcaataccagctaccccggtggagttattcgtgctggccccgatcaaacctccgcagttaatgccgtgggcatcgcccgaaaaaccggaagcattaaaacctgtacctgtggcatcaaatgccagttgaaaggcaaaatcaggatgagcaaactgcgccaggctgccgaagcaatctaatatagccaccttaatttcaggaatacccgtagaaagactccaggcattcaccatgtccaggtcggctccggctacagcccctgaaaattgagtgcctgtgttgttcacgtgccactggtacccataaagcgaatcgttagtagaggtatgccccc

SEQ ID NO: 76692 - DNA, 440 bp, Arabidopsis thaliana landsberg
tgctttatttcatctaggctaaacagaagatacacgtaagatttatttttcaagttaagtacgtagtatatatgaggggggggttaaataggaaactaaaataacttgaaattacactccaagttttacccactgcgtacgtctaaacgtaaacgagaagaaaacttctgagtcaagttgtgcgtgtttaaatacgaaatcgtgtttctttttgtaaagtgagggctaattttgtaattttcacccattacttgatcctctataaattgtcaggttgccaaaattaaaacgaacaaacaatcgctcttccgtaacatattccacaaaacgatcttcttgtttcttgaatttttagccatctctttttttttttctcattttctcggatactatggcttcgagtccacgctggacggaggacgacaacaggcgttttaagt

SEQ ID NO: 76693 - DNA, 324 bp, Arabidopsis thaliana landsberg
gaaacaggacacatacaactgttttatttatttatacgaacatttttctgcttattaatccatggggtatgaattgggggtattactcttgttcaactacatctacaacttgttgtccaatctggacctacctttcgtacatttaaactcatcacatattggagagctgctcgcaatctatgactacttttctatttttctatcactacctaattccttcagattatatattaccattaattaacaatggccattcttatactcgtctaaaacatataaactatatttcctggcggtgtggttctatactggccagctcctaat

SEQ ID NO: 76694 - DNA, 410 bp, Arabidopsis thaliana landsberg
tgaatagcggatgaagtggcgtatggcgagagtgtcagatatgtgtttgtgactatactatgcaaagcaccaatgtgcttccttcattagcactagataaattatggcgacggagcaagactattatatgaacaaaagaaccggggacatttacattgaacaataattaaaaacgccagagatgaccctatattttaaacgtttatgctctcggttattagatacgctaaagaacactcatactttttttgtaccatgcgatcgatggtcaaaagagacgatcctgctttggttgaattaggtcgaatgtatataaagatacgagaaccggagatctcaagcccacttgtcgaaattgatctgactgtcggttgatgattcctgatatttgggaatcatacgcgcatgta

SEQ ID NO: 76695 - DNA, 127 bp, Arabidopsis thaliana landsberg
agcgcatggcacttctaatcggccatgaactacagccacttcagttttaaccaatccataaaaagagaagggctggttttcattaggaacgggtagagacccaacgcctcgagcgaccgattcggca

SEQ ID NO: 76696 - DNA, 491 bp, Arabidopsis thaliana landsberg
  unsure (1)..(491): unsure at all n locations
cagcaataaggaaacaaacttaaggtctttagactttanatgaaaagtgaagaaggtttacttgagttgggcgtatgtgaggagagagaggttagattctttgatcttgctaatggctgctgggttcctgaacactccttttacctctgaaacaataccttgaagacctccttccaagcaaacttgaatggcttcttcgagcgagtttcttctctcgtcattgtgaatctcgtttcccgcatcagtcagaaagaaaacctgggttcagttcatatgacattgttaaatcttaagtgatttctccatgaagaagtcaagaagttttttttggtatttatcaaagaaaagagcgagaatggaacatacagggtaagtgctctgcagttccctaacaagcttagctgcatctggttggaaacttgagaagattactggtctgtctttagcataattagagaccacctgtagttttgtcacagagtggaaaaaac

SEQ ID NO: 76697 - DNA, 467 bp, Arabidopsis thaliana landsberg
attgtctttgcataactcttcgcgaaccgacaaggttgccgagttctttgacgtgtgctgatcgttgctcattaaggaccccgagtggaagccgtggtttggtgagagtttcttttgcggcaaaaaaaaaacaaacaaaacacaccgaatttaacactcgaaacactcatgcttcttgcatagcgctgttgtacgtgaagctcccgacagcggacccctactttgagaccttattcagtaagagctggatcgacgccttcacaatgtctatggacaactctctggccaccgtctttgctgctgttcggatcacattaacgacagaagttgtgcaagcatgacccagtcattcaataatcatttgtcagatatacgaatgttcatgaactgtgtgcatgaataacgatctaactcactcacatcactacatcactgactcactcacttacttactcacttacttactc

SEQ ID NO: 76698 - DNA, 331 bp, Arabidopsis thaliana landsberg
  unsure (1)..(331): unsure at all n locations
tctaccgcttataccattgttcaaagtgaaaacagaaatagtgttgattctcttattactgttgtctcaggagattctttcctacataggaattgagtttaaggtggaattcttctgttattttgttgttgcacgaaaatggaggacattgagaacatagaagaagatgagtatnnnnnnnnnnnnnnnnnnnnnnnnnnnnnnnaattgggtggggcgagtaagcgttctgcccacaagctctctgatatacatattgttgatgagcaggtgagttttgttgggtatgctcttttaaattatgcttttggtaatagatactttccttgac

SEQ ID NO: 76699 - DNA, 565 bp, Arabidopsis thaliana landsberg
ttccttctctcggctacatctctttccactaacactacaggaatcaaaagtatatttcacgagaatcattcctactgttgatacggatggaaccaatagaatcatcagtggccatctcttcttctgcaatgttgcccacatactcgttgatggcttcgccattgtttctctctacagcttagaatcacatcctagggtttacacagtaacaatcgatctcagaactttctaaggatctgtcgtcagtgatggagaaagcttggaacgaagaagtttagaggagagatttaatggggaaaagccgctaatcagcgttgactctttgcagaagtttgcacttcacgccgtttttgttatttagaaggaagttgattgccgtttctcagcaggcccccgatggaatcctctcttcatatttataatgggctttaaaaggcctatttgctaaaagcctaaaactaaactagttatgatgatagttaatgcatactatatgggtttaattcttttttttttcttaaactaagctaggcttcagattagttttgctgttacaattttggtt

SEQ ID NO: 76700 - DNA, 424 bp, Arabidopsis thaliana landsberg
gtagtactcttactcttgtaaggttattagtttctttttcttggcagtttagtaatcaccaacgggagggttttgtggcccgcatgttgtcttctttttcttctgtctttgcttctatttatgcttctatagacacttgtctttcgtagttcatttcctttatcattcatatctctctctttctctctctctctcagctctggagaattgaacagagaaattttctgggtaaatctcacttttttttttgtttgtggctataatcctcttctttacttcatcatttcatcaggttatatagcttcaagcttgcttcttgttgttgctgggaacggggtatcttctttgggtatgttcataattcacagaaaaagatttaacccttcttgccttgaagcaattgcttcatgtgattagaaaatct

SEQ ID NO: 76701 - DNA, 364 bp, Arabidopsis thaliana landsberg
  unsure (1)..(364): unsure at all n locations
gaacgggtacaaaataaattcaatcacatcttctttttttcaaaaaaacaaaaaaaaaacacnnnnnnnnnnnnnnnnnnnnnnnnnnnnnnnnnnnnntcgcgttcccataaggacagcacttgtggaatcgatcgagaacctacccttctgtgtcgacatgaatccatnnnnnnnnnnnnnnnnnnnnnnnnnnnnnnnnnnnnnnnnnnnnnnnnnnnnnnnnnnnnnnnnnnnnnnnnnnnnnnnnnnnnnnnnnnnnnnnnnnnnnnnnnnnnnnnnnnnnnnnnnnnnnnnnnnnnnnnnnnnnnnnnnnnnnnnnnnnnnnnnnnnnnnnnnnnnnnnnnnnnnnnnnnnnnnnnnn

SEQ ID NO: 76702 - DNA, 579 bp, Arabidopsis thaliana landsberg
ttcatcaacattgagcaacgaacataagaaatgaaaaatgtcgatgcaacatcggattccatatccgccgctcatgtggatttcgtcagtgtcagattctgaatcctcaccaccttcgtctcctctgacctcaaaatcaggtaatctagagaaaatgatctgaatcagctcatgcattgtgtatcttccatttcgttgcagcaaatctcctctaccgctcgattgttgcaccacttggaaacatgtattgactattgtgcaaaccgcttgatcttctaataactcctgttttaatacataacttattattactgtcttaaaagaggacaaaataaacatttgtagtaaaaagattatagttaatgaacgtacagaggatggatgtttcatgattccggttaaaacttgaagaatcctcatcattacagcatcttcagacaccaaatctgttttctccaaacgacaactagtaatcccggagacaatagaattcataacatcttttgcaccaggtgttttctcatcgacgatctcgattttacgatctttaagatgagggaagagcgacagctgtggcgc

SEQ ID NO: 76703 - DNA, 229 bp, Arabidopsis thaliana landsberg
  unsure (1)..(229): unsure at all n locations
gcacagtctactttcttagcaaacnnnnnnnnnnnnnnnnnnnnnnnnnnnnnnnnnnnagagaaagtcttttttgtgtcatatacttttccgcttattacccgttacacgatgaatgcctgaaattcgcctatctttctcatgctcttacaggaacacattgctcgctctgccgattcttacataaacgtatgcttttcaccgagtctaaccacaagcttttttttcc

SEQ ID NO: 76704 - DNA, 570 bp, Arabidopsis thaliana landsberg
aaatttaatttttgcattaatagataatgcatgacatattcatttttcaaaatggtattactacttaaataatgaagaggtaaaaagggaaaaatttttttgacccaaatatatttttttggtcaacttactatatacgacattgatgactgagagtattcagcaactgttatataggttttacgactataaataaagagtctttcactctattttcttaacacataaaaaacaaaaattaaaagaagaagagatggcgatgatgaaggtaatgttgatggtggtgatgatgatggtcttggttggaaccataatagtaataggtgaagagtcacatgcggattgtttgaaacggtgtcagcaactgtgcgttgataagcctttggataagaattgcgtccgccaatgcgtcttttttaattgcggtcctcctgctcttcctaccaatgttcatcattctaagtatagtattctcttttcttctatacctttggtttatcgtcttatcgataataaaatttaattatgtatatgctaaaactgacatggtttttcattttttgtgattct

SEQ ID NO: 76705 - DNA, 493 bp, Arabidopsis thaliana landsberg
caaaccgacaataaaaaaactatctatttagtttctatatttacctattttattattataaaattatactttacttcgagattggggatcgttgcgcttgatgccaacgcacaaaaactgaccaacgtacaaaccgtaagtatacgttcgcccgcaaatgttaaagttgacgctaaggctaatgagtggaactctttccaagcgtataataaaactactgatgcttattataccatacttaatgatgataaaaaactttacctggtgattcaggccacagatacatctattatcaaaaaaataatatctggtggtataacattaacatttaaccgttttggtgaagacatctataaaaataatgttactatcgcctatcctttaactgagtttaataaaactaaccttaatatgtggttattagataatgacgacaaaagcagcattaatatagaatcctccagaaatgaattgaatagacaatttagtcaga

SEQ ID NO: 76706 - DNA, 456 bp, Arabidopsis thaliana landsberg
  unsure (1)..(456): unsure at all n locations
aagacgatacaggaaaaagaatagccatagctgacatatttaaaagttcgaacctgcagactattgaagcggcgaaagagtcgcggtgcantgcagaagcgcacaaatactccatgtattccttctccatacattttaccgaggtacgggtacacccgcaaacaggtgtggtgcgggtaaaaagggtggtcactgttgctgattcgggaaagatcgtaagtcccaaaacagcggcgagccagatgatcggtggtgtaaccggcggcatagggatggcactgatggaagaagccgttatggaccaccgttacggaaggtttgtgaacaataacctggccgattaccatgtgcctgtgcatgctgatgtgccgcatattgaaaccnnnnnnnnnnnnnnnnnnnnnnnnnnnnnnnnnnnnnnnnnttctaagggaatgggagagatcgccctgatcg

SEQ ID NO: 76707 - DNA, 361 bp, Arabidopsis thaliana landsberg
tatggacgatgttgggacagggtttaatgttccaagctatgactccgtaagcaaaagatttcgctgaagagtgaagaagtaaataagatctttttacatcataagatagagttgggacctgtagaataaagatagccttttttttggagatccaaccaaattttttgtttcatctatctctcaagtttctgacctaagataagtccatgaaaatggtgacaaattacgcccatgtctccaatttcgttgttgcgtatttcttctcttcggttagtgaataatgattgatacgtttaccaactttttccagcttcaatttttaaatttctttcttgttaaagaatgctggcaaacataggca

SEQ ID NO: 76708 - DNA, 604 bp, Arabidopsis thaliana landsberg
  unsure (1)..(604): unsure at all n locations
tgttggcgcggtatctccatggcgacatggattattatgtccaactgttggcccaacgcgccggcatccgggacgagcgggcgctggtcaccggccgtgaccgcaccgaaaaagaggtctatgccgacccgaccgggccgcgcggcgacatctacaccaagggcagcctggtcctgcacaccnnnnnnnnnnnnnnnnnnnnnnnnnnnnnnnacgaatcgctgcgccgcgaggtctatggccggcccgatccgaaaccgggcaacttctcgccacgcttcggcacgacgaaagagttcatcggcatcgtcaactcggtgaccggcaaggattatggctggttcttcgacgtctacctctatcgcgccgccctgccgaaactggtgacggagcgaacggatgacagcctgaaactgcgctggcaaacgccggacaacctccccttccccatgccggtcgaggtgctggtgggcgacaaggtggtcactgtgccgatgaccggcaatcagggcgaaatcgccgtgccggccgacgccacggtgattcctgacattcattcaaaaatcctgcagcaatcggatgcgatcgatcgctaccaaaaata

SEQ ID NO: 76709 - DNA, 363 bp, Arabidopsis thaliana landsberg
  unsure (1)..(363): unsure at all n locations
ggggacattcctactgtcacaatgttaatttacgaactaactagtgaggtaatgacttaagctgaaagagtatcttttgttcctgtctaccttacctcttgtcttaaacgncttaagtgtctcatttgatcatggatggagtcttgaatgatggaatcttaacttgggggataaacaaagacgtgaagacacttgcttgcccataatttgtgtgggtttttaagcaccctatcggttggctgaacatgatcgtttttggagtcgcatttattgctgaactaccatgctgttagctaaattattctatcagttcgttacttgttgagaatttttgtgtagacccacatctcattactgattcgc

SEQ ID NO: 76710 - DNA, 590 bp, Arabidopsis thaliana landsberg
  unsure (1)..(590): unsure at all n locations
accgatatggnggtagattacctgacgcatgtgttgtttttgatttttctctaacttaagtagtcatttgaataatggggttgatattgtgtctttcttcaaatatgtattaagaagaatcctcctttattaactagttgtattttttattttatttttatgtatacaatttggaatctgagttctccacatataagctttgataagatgcaagttaacaaatcttaatctcaacgaggaaatgtatagttctcggcccaaaaacctttgaaattttcactttttaaaaatttattttgggggattgtgggtctcaacacatgtaacttacgctaaatatatgttgacactgttcttccaattgtacaaattcaaaagccgttacggtatttatgtaaaaaaaatcaagttgtaagaaacatttttggtttttcaaaatgaataagttgattttaacaaaacaaaatttgattatttaatctgatatgaaattgaatctgttagaatataggtaatgtaacttgaatgaaaactaaaaatctcttcgtaccatctatcgtacaatattcaatttagtgaaccataacatc

SEQ ID NO: 76711 - DNA, 575 bp, Arabidopsis thaliana landsberg
  unsure (1)..(575): unsure at all n locations
aaccgntaacggagctccttattcaggattcattttcaattttgcaacacagcagctgaacctgagcaccaggctgtcgtcaggcgccaacgtagtacagatcaccggtacaaacgctgcaggttccgacagcaagaacacgactatcatttaccaggaaccacaaaacaacctgcctccggtagtcagctttgttgatcccaacgtaaatccttacaccaccgcgagcaacaccaaacctgttaaagccattgttcagcatgtgacnnnnnnnnnnnnnnnnnnngtgaaactgaatggaaatcctgtaaccggttttgctttcatcagcacaacaggcgaggtgagttttaccgccaacctgatcaatggcgcgaacgtggtagaagtaaaaggggccaatccttacngaagtgatgccaagagcacggtgatcatttattccaaacccaatagcagcggtctggcttcggttgtggccatcaattatcctttatcaaatccatataacaccgcgaacagcaatgaaaatgtaacggcaacggtactcaatgtgacgggtgcangtgatattg

SEQ ID NO: 76712 - DNA, 333 bp, Arabidopsis thaliana landsberg
taaataattgccgaccctgccatatacaaccaaatcccatttttgataatatcttcttgacttcaactttaagatcctccacaaccaaatttgaaacaatttgataaaatcccattttttatcatgagaaatttgtagcatgttctaatgagtgttacctatatgttaggttaaactaccaaatattgatggtggtctaaatttgttcaacactagaatgaagatccatgttatctcgcctatatagaaatatgtatatgtagtcgtctgaaatatttaaaaatttcacattattatatttaggcttctatttttgattacttaaaaacttaa

SEQ ID NO: 76713 - DNA, 527 bp, Arabidopsis thaliana landsberg
taccagagggattattccaatcattgagagatcttcaaatgttatattctcattcgcgccaatatttttgctgggagaaggtaaaactttttagattattctataaattattttgctgatgttcccttacgaaaaaaacagtattcatttccaaaatggggggcacatataatcgtatagaccataagtagttgtcgaaattttatagggcaatggctcaagcaagtgaaacattgacacctatcccattcacatctatgtcactatatatgtgggttcacaaaggtgacgttttccttatgtgaatcatgtaaatgctataaagttttgtagtacatgagcgattatatattattacgaaactcctgaaacatatgatatataatcagatgggttgaggtagtgacaatagtttgtcagtgcaccaaaataccttttgagctattaagtccgaagtttaagtccttttaagttatcgaaggtatgcttaaaaaatttactaccttttatttttttttgcatgatcg

SEQ ID NO: 76714 - DNA, 278 bp, Arabidopsis thaliana landsberg
tccaaccaaaggaatatgaggcggggggggcttgataaggcacgcccgacatgactggggggagagagctcagcgggcatagcgccgctcttgcaagaggctcggagcgaggaccgttcgagcgtcgagaagcccaagcgaccatgagcgggatatggcacccacccagggggtacctgagctgaagttatgccgacatgggacaggacaggccaacgctagagatgactgagacgaggaagggctgcaaccaacgacgagggggaccgatggtcagc

SEQ ID NO: 76715 - DNA, 473 bp, Arabidopsis thaliana landsberg
  unsure (1)..(473): unsure at all n locations
cgccctcgcctccggcccggtgttcgccaaggtgatggacggcgcttctgctcctgctcgacattccgccggacaaggtcgggcgctggtacgtgggtggcccgctacagggcaagaacgggctgatcggcaacaagccncccgacgcgccaaacatcgannaggcacccgtggatcgggtgacgccatgagcggatcacgcctcgatcgcctgctgctgggctttgccgacaccgccgcgctgagcggcatcgtcgtttccgggctcacgctcaattcgcgcgacgcccgggcgggcgttgccttcgtcgcgctgcgcggcacccgccagcacggcatcgactttgccgccgacgcagtggcgcgcggcgccatcgcggtgatcgccgatgccccggcgccgcacgatgcgccagcgctcgacgtgccggtggggttgggtcgatgggctggccgagcatgtgggcgaaatc

SEQ ID NO: 76716 - DNA, 259 bp, Arabidopsis thaliana landsberg
atgcgtgacatatcacagattttcgtaccagaaacaaaaagtgaatcagattcatttttatatgattattaaaaaatgtacaaataaaaatccccttggttacatgatgtttgtttcgttgaactttacgaaacaaaagtgtttgaagatataaaaatggcaaactatgtcggcataaagaacgaaatggcaatcaggtagatgtttcactgcactacaacaatcctctaatagcaaatcggaatcttgttgcaccgct

SEQ ID NO: 76717 - DNA, 485 bp, Arabidopsis thaliana landsberg
  unsure (1)..(485): unsure at all n locations
ctttcgtgattcgggattgatgaacggggcgccgttgaagctggctgcacctactgcatatttttcaatatttattttcttcttccgcagagtaaccgaggttatggagtgcctgcggtacagactggttaatgatcttgaaatacccgccgccgctgagcttcttgaatttcacgagggcaaaatcaggctccacaccggtagtatcgcaatccattaccaggcctatggtttctgtgggtgcgatcaccgtggtttgcgcattgcgatagccgtatttctcttccatctgcacagctttattccaggctttggtagcagctttcagtaggtaatcgggacaatactgcgccttaataccctgcggtttgatcttccagcctacattnnnnnnnnnnnnnnnnnnnnnnnnnnnnnnnnnngtgcgcattacgcggagcatgtcttccttattctcttcgaatttgtcaaacgccccgagtatt

SEQ ID NO: 76718 - DNA, 339 bp, Arabidopsis thaliana landsberg
  unsure (1)..(339): unsure at all n locations
caccggaatccctntgaatancaacgaccacctttcaaggctattttcttttgcgtgacccatagcgaantagtaccgcgatgttaaatattaaaacaacnnnnnnnnnnnnnnnnnnnnnnnnnnnnnnnnnnnnnnnnnnnnnnnnnnnnnnnnnnnnnnnnnnnnnnnnnnnnnnnnnnnnnnnnnnnnnnnnnnnnnnnnnnnnnnnnnnnnnnnnnnnnnnnnnnnnnnnnnnnnnnnnnnnnnnnnnnnnnnnnnnnnnnnnnnnnnnnnnnnnnnnnnnnnnnnnnnnnnnnnnnnnnnnnnnnnnnnnnnnnnnnnnnnnnnnnnnnnntt

SEQ ID NO: 76719 - DNA, 204 bp, Arabidopsis thaliana landsberg
  unsure (1)..(204): unsure at all n locations
aacttatggcatttatttttatccgncgaatgngcaccaacagtgaggatggcaacatcctgtcgcatagtctctcaacttggtcacctctcattatgagtaccaaaccaaactacatgcaccaaagtataactaattttgggttataaaaaagctaagataatttgacaaattaaatacaaccaactggtccttttgacataa

SEQ ID NO: 76720 - DNA, 682 bp, Arabidopsis thaliana landsberg
agacaaggttttgaaaaactgccctctgataaggcagagacattttgtggagatcctctataggttgatgtcttgagttctttcttaggcattttgtgctaaagcattgtgcgcttgaagtgttttttttttaaattactttaaccaacattaaatttagaaaagtttaagatgtgttttctagaagaaatcaataaatcaaagcagaacatagaagaagtagttaatcccttgaaaatgaaatatatgcaatcccttgaatataggagctaaactgtatcaagtaactacccttgatcatatccaaactaaagtgtgtttaaattatacaatctaaatttttgaatatggaaattttggaaactgagtaacaagagagacagagtatccctggtaaatcaccatggttggggaaactattgattatttatagtatgcattaaattatatacaacattagttactctagttttcaagtcatgtttcctaagccatataaaagtgattcactttcctaataaaatttgatttgcattcatgtaagcgttcagagtctgaaacccttttttcccttagtctccgttgactgttgtcttagaacaacccttttcattgtctcttctcattaaggtagagtttagttttttttaaagcgtttggttcgaccttgacgtctttatgt

SEQ ID NO: 76721 - DNA, 585 bp, Arabidopsis thaliana landsberg
  unsure (1)..(585): unsure at all n locations
tgtgtgctataggtattgggtgacttttggattagtctgtttatttattgaaccatgtacnnnnnnnnnnnnnnnnnaaggcgaaattttatttatatatcttctcgttaaatagtatagttatagtaaaattctatatttcatatagagtttgtcatccactgttctattagatactttcagaacaaaaatccactcgtaacgctattgtcttgttttctcgcagagctgataattttgaaataccactccataaatgctctaaaattttcaaaacccttatatgattcttttatatttaagttgccaaatatatatgttcaaccagtgcataatcaaagaaattacagagtctcatgtactcctgttggagggaccgtcgttatcaaaaaagaaaccaacattttagcgtggtagtcgtctaccctttggctattaatcttatattttcttttgcttaatgacaagtgtccttttagggtatattcatttttcaccacattacttgttctttatatgtatttttcaatgaatattntgaatattctttacctataatatccatcataccaaattttatttttg

SEQ ID NO: 76722 - DNA, 561 bp, Arabidopsis thaliana landsberg
  unsure (1)..(561): unsure at all n locations
cattcaagattattgataactcatggattttttccggtattcatagggaaatttcgggggcatggacaaaggggttttggcgatgcctttcacgaaaagatactgcgcaagaccgtaggtgaccatgacgagaacgtatacatccttgttactgtcccagtgaaaacggttcagtcccaccagtatattttccaccaggaataccagcgccccgcttacaaaatacttcagggccatacggccannnnnnnnnnnnnnnnnnnnnnnnnnnnnnnnnnnnnnnnnnnnnnnnnnnnnnnnnnnnnnnnnnaacaccgtaagcctgtaacgggccatttccccggaaaggaaatgatagaatttatacgcgataaagatcagcactgcagcgcttgctgctacgggcaggcttcttttgagctgcggtttttccagcaggaaaaaagtgatggagtaagcaatattcatcagcataaaagcgatcatgccgctcatgaagaagtatcgttgatcgagatcagcaatacatccccgaacaggggcaggaacatacccacatag

SEQ ID NO: 76723 - DNA, 575 bp, Arabidopsis thaliana landsberg
  unsure (1)..(575): unsure at all n locations
cctggttgcagccgctctttccttcttcattgtcgggatgtatccgttgcatcggaatgcttaacagggcaaattcataaatccagccggttacgttcaataacgattcatgcaaggcaatgtaggctacattcgggtcttcatcgccttccacggcagccgggtcttccaccattctcactaccaggtcaaattcatcccataccggcagtatgaaaggatcgccgcagcggtcgcaattaacggttacatcccctgttacttcaaatttcagcaaaaagaacctgttctttttgtccagcttcagnnnnnnnnnnnnnnnnnnntcgctgaaatcgggggtgccgaaagcggcaaaaaacttgtcatcaatgtcgtaattaaactcatgctcacccgctttcagccctacaaatngcgatctcaaactgtctgtgtggtctcatgattcagctcccctccggaaattgagcggcaaaggtaataaatattcagataaattntactatcttgttgtgttccgggaaaaagggatactttaagtcgtcaatggtcaatcatggagatcgtttagt

SEQ ID NO: 76724 - DNA, 518 bp, Arabidopsis thaliana landsberg
tgaaccactattctccttacttctggaatatcttccttcgcatggaggtaaaattcaccctttgctttgcgcttctccatactacatacgctaccaaaatatggatcgtcctcaatagaagcttgcaagtccaaaatttttcttctcacatcgtccagcggttcattgattttcaacatgcccaaaatgaagcatttcgaaacgccctgttcaccaacaatgggcaccttcccttttccataaaatgttgtgtcaccagcttcgtcaagaaaacgatgccgtttaaaaggaggttgtataattatccgcattatgaataaaaaattatgtatcaagtgtgttgaccagactttcaaatcatctcctcccgcatcccaaactcccgcatcttccttagcaaccgcatcaaaatctcactattatcgaacgcgtacagcgcatgctcgcgcgagatgttcatttcgtgtgcaggccgcagatagtgcaggagcatatcgttgagaacgtgctccaattca

SEQ ID NO: 76725 - DNA, 295 bp, Arabidopsis thaliana landsberg
  unsure (1)..(295): unsure at all n locations
cgacgtggccgaacatcacatacagtgatacactacacacgtgctatcaaatcacgatagcaaccgnnnnnnnnnnnnnnnnntaattttacactcagcgttcttgaaatctagacacaaaatcacattcaagtcttgaaattcatagcccgttattgcatttgcgggagagtgacccatgaatcgagacgttcataataaactatcatctcaaactgtaactctacatgtgctccttcatgcgataactacgctacggtcacccggcggtttatattagacttgctgatgaacc

SEQ ID NO: 76726 - DNA, 511 bp, Arabidopsis thaliana landsberg
atgcgaccgtccatgcgctggccaacaccgagatcgacctcaaggacggcctcttctacgtcaacccggccggcgtcgagaccttcgtcatggtggagccggtcagcttcaccggcatgacggagacgtggaacctcatcatggaggtgcccaaggcgacgatcttcgcctcggtgaccaacacctccaacatcgcggcgctcgtctccgtcggcatgatcggcctcgccctgctgctcgtctggctcggcgcctccaccatctcgcggccgatcgcgcgcatgaccggggtgatgaacaagatcgccgagggggctttcgacgtcgacgtgccctatgcccagcgcaaggacgacgatcggcgacatggccagggcggtcgaagtcttccgtgagaacggccagcgcgtcgccgaaatgaccgaggcggacgccgcccgcatcgtccgcgaccagcaggcccgcgccgccatgatggccgagctgcagcgcgagttcgtcaggtggtcga

SEQ ID NO: 76727 - DNA, 330 bp, Arabidopsis thaliana landsberg
tgcgtttacctatgcggataacatatgaaacctggggaaggccgtagacaagagttacatcttaattttgctaataagctttacagttaccatcaattttctcaagtgctgaggtggtccttaccactcatagccgccttcaaccatagcctaatttaagtggaccatagtatataactttttaccatgctctcacagaatctatgtcttttatctaccctgatacaaaggtcatactgtttactttgaggcaacattacacatgagaggacgaaagtagtggacccaactctgagccagaacaattgtgtcttcacggctaatgttata

SEQ ID NO: 76728 - DNA, 625 bp, Arabidopsis thaliana landsberg
tgtacatactaaagcttataatgatgtattttcaagtaaaggttttgaaattattacttaactaaagacactttattcatctactaaagattaatttttggcatttgaaaaaaaaacatatatattcaatttaaaagtgccatctttttattgattccgatatttcataatttgtcttttcatctgttaatctgatataccagtcaatctctaagatgtccatgaaaaacagaatggatcccctccatcgcgtctagcacgacatggacctgtctcacaaatataccaaatacattctctacatattccacttgtactttttgaactatcgtctctatccgctctaaaaatatcgaacgtcttttcatttcctggccacgagaatttacaagtgtatgttgttggtctgcgtagattgacacgaaacctgaaatctatttgttctcgatattctatcttatgaagccctaaatcttcccctttattcctacagtgcacgtataatttccatgtgggtgcaaagtgttgatgattaaacatgtttaggtgagaacggaacataccatcgacagatgaaaagtttcaacgcttacgagttttgagatactagactggatagcatgga

SEQ ID NO: 76729 - DNA, 438 bp, Arabidopsis thaliana landsberg
  unsure (1)..(438): unsure at all n locations
caaagagcgccaaataacagnnnnnnnnnnnnnnnnnnnnnnnnnnnnnnnnnnnntgatagaatccccgtgggcgggcgtggcggaatggtagacgcaccggacttaaacgattgagtgcccgacgagaaatcgacggagtagaactgcccaaattcggggaaacctttactggcaatcccgagccaagcccggagacgggaaggtgtagagactagacgggcagcacctaaagcggcgacgccacggtgaagggatagttcagaccactaacgccctacggcgcggcggcgaaagccgaaggggtacgaaaatccgttgggccgcaaggcctgtgtcggttcaagtccgaccgcccgcaccattgtgtctgcgtatgttgaagcacggagcaacataccagggaccgggcaacagcatgtcgtttgctcattggcg

SEQ ID NO: 76730 - DNA, 573 bp, Arabidopsis thaliana landsberg
ctgaattcttcggaattatctttcttttgcattttcgcatttttttgattttagtatagatgataattcaatcgagttgtgaaagacatttcaaatatttttaacatatacacagataaattaatgtaaatcgtttgtaaacatttacttatgataaatcgtctacatgttgatagtaaagacaatttagaatattatattaattaaaacaatttttatcaagttagtaagaaaatactttaacatcaagttaacatatataaatcgcctttgttacgcttcttatttggttaagaaaaaataaaataaaacctttataatatataaggacatgtaaaattaatataaatattaataacttaaattcattttgatacatataaaatcgcattgatagatttgacacgtcgttacgatcatgcaacctttaaaaccatactatatataattattattttgtgatattttagatgattccactatgattctctacgcatgaaaatattatgattaaagtcactcttacattatcaataaccaaaattcactatattactatttaaaaattgaaaa

SEQ ID NO: 76731 - DNA, 348 bp, Arabidopsis thaliana landsberg
cgctgacatagaccccaccgaatccaacgaccattgcagacggacttaccactgactttcccgagccaggggcatgctaggatcagacctttatattctttctgcgcagctgcctctgattgaccagaactgccggaagtaatatcgacctatggccaaccatggagagaataataattctttcggagcattatcttcgacgccatacacttcgtgactggcttcaagggcttgtccccctttctacatagagatttggaaaacttcatgaaaaaaagaggcgtaagacctacggctacctagacacttagaccttttaaccgtccattgagtcagaatgatacatga

SEQ ID NO: 76732 - DNA, 152 bp, Arabidopsis thaliana landsberg
ccactcccctaaattactccataaaaaacaatccaactattctacacaattttttctacacttacaaaacaacatcttcttaactaatttccaacattacacaatctcttatctctactttacaaataatacttaacaatatatctaacctc

SEQ ID NO: 76733 - DNA, 470 bp, Arabidopsis thaliana landsberg
  unsure (1)..(470): unsure at all n locations
aaccaccctggctagacgacgaanaagacgaacatttcgtaagcgttatcaaatttctaccaacaagactccaaagggccctaaggcgagacttagagcgaatctcaacaacatccaaaaactacattaacaaagccaacaaacagatcaccaaaaacttcaaaccctatttcggcaacaaatacgcaccaaccatagcttccgtaatctctttcgtattcatcctcgtccatctactcttagtctcactcattttcaacagattcaaagcttatttctcactccagaacatcctaatcttcatccaaatctacctctcgacctacttatcaatcctatacctgtcatcgctcgtcaccggaatcgaaccactcaagtttctctacacaacatccagctcaacatacgtttgcttgcagatactgccaaccctacgctacgtatagtacctcttgcatcttctcatgtac

SEQ ID NO: 76734 - DNA, 621 bp, Arabidopsis thaliana landsberg
  unsure (1)..(621): unsure at all n locations
gaagaacagccgataatctgttcctgttggtaggtttttatctacatgtaaaaatatttttacttttgaagcccatatatttaatctgggatcgtgtaagtttaccattttactgaccagcgtattgcacatctttacccgcctgtaattgctgctgtcggaatcgtaaagcacattagtaggccaggaatcactgctgctgtttcctgcaaaatccatgagggcatcatcagaagctgaagtgatgaaagggtatttaacagggtcgcctacgatgttctcaatgcctgcttttgctatatccggtaacttctccgaaattctcatataataacgcagcgccagtgaatttgccagctttctccatttagtaggatccccgtgataataaacatcggcattatctacattaccggtatattcgtttttgggttttgataataatatattggctgtatccagggtagccagcattcctaaaaaatggttttctgagccgtataggccggaaaagtgtttgatttatcacctttatcccnctgtaaggcatctttatatgggacatcgccgtataagtcagtcaataggccaaacatcattgcccgcatcaccatgctgata

SEQ ID NO: 76735 - DNA, 277 bp, Arabidopsis thaliana landsberg
caacaccgagattccagtagataagtatcaatctttgattaaacaaactttttttttttttccaaaaataaataagttgggtggaaggacaatttttatgtcgccttaatcccgcgctcgatagcccagcccgttaaataatatttaatcagagataaataattaaagatcgtacagaataatcttgaagcctatttttattgggcaaaaataattatgaagccctttttttctcaacacaaagtcttacacataaatataattagaagggatattt

SEQ ID NO: 76736 - DNA, 194 bp, Arabidopsis thaliana landsberg
agaaaagaaacaagccgaggaaaacaaaccacaacgcaccagaacgcccaaggagacgaaccaacaccccgacagcaacaacgggaccgcgagcaacgagagaccacacaccggggaaaacccgaacccaagcccgacaaaccaagacggcagaacggacacgcaaaagaaggccaagaccaggcacagcagca

SEQ ID NO: 76737 - DNA, 495 bp, Arabidopsis thaliana landsberg
gatattgagtttgatttgagggatttggagaagatagttatattgttaaagtttacattgcagagaggtttatgattttcaaattcaaagatataaagccgataaattgctttccaaaagaggtgagggattattactataaaaatcttattgacatcagggagtataaaaggaatctgtttacagttgcggaagtgtctaataatttaaaggacattgtacgggattcaggtcaatataaaatcgtgccaaagttttatcaatcgtatatgtttaattaatttctatatcatggcaacaaaaaagaaagacctaactaaaaaggttgaattatcagtgactcgctcaagaattaactactacgtaacagacaagaaaagaaacgggcatctgtgggatgaaaagttcttaaagtttgttgatagtagaattgcagacctaaaaaatgaagaggcggaactaatgagggagctgggatatgtttaaatttaatgc

SEQ ID NO: 76738 - DNA, 309 bp, Arabidopsis thaliana landsberg
agaaacgaaaattaaaaaaaaagagaagaaaagccattagcttctttcgcgcaagatcgcttcatttgtttctagagggattcatggattctttaaactactaataatggtatctttagttgttacttcgttttctgatctattttacaaatcttactcttttgctctgttttcgtggttttgtttagataaaagtctctgttcttctagtttcttccatcagactgttttctcatggatcagtgatgatttttgtttcctgggtcaacttctgattttggaatttctgaaaattttggtaaatttact

SEQ ID NO: 76739 - DNA, 449 bp, Arabidopsis thaliana landsberg
aaacctccagtcagcctggataacgaatgaaatataaaaccaccacgagtaattttttatagggacaaaaaaaactagatgttagggagatctttacattcaataaaccaataaccaaaacatatccaaaaaaatcctgatgagtgcattgcgaacagacaaatacatatattactcctgacattattatctagctatttagcttaaaaactgaccattgaggctcttatacttgcaccatgatgcgtcgatatgacaaccaaatatgtcaccttcttataaaaaacaaatactatctttacctgacatctgctcatgctagtctcacttggccatctactcacatatgagagacaccacacacacttatgcgcataaccgaacacagcctaccacattctggtgatgtactctaccactaattcaagcctgacgtaccataaccatac

SEQ ID NO: 76740 - DNA, 778 bp, Arabidopsis thaliana landsberg
actgttttgacaagcgtccatacttttgccaagttatatagccaagtgtataatccctaagataaatgtcaagagatccatcttttctgtatgtgatgaattggaattataccgcaccaatacaccaagtacaaacaagatatacttaataacatggtatagtagactaataaattggtaaaatagaacaaggaacctatacagatgtcaatgaaatatgctatgcacatgcacttcatctttaactacaatttttatatttttttaatatttttgatgaaattaatctaaattttcttagagatcaagaagcttgaagaaagaaggaaaaaaaaaacaacgtgcatccaattttctccggaaagaagaccaaatctgcaaattcatcaccaaagaatcggagatggatgttgtgcaaagaaaagtgaaaaaaattggaagaaaagttgcttctttccctcatgttgaaactattggaagagctctctttgcctcctccttcttcctctcttcttggcatgagtaagaaacatcattctgattcgtacttggaattcaaatagatctaagtcagagtaatgggatctgataatttttgaaacttcatatatacaaacatttgaagatgacttgtaattgaatgattcttaggcatcagaaactctttgttttaacaacaagaaggttattgaaaataaagaaataaaaaaaattaaagaggttcttgatatttttctcagttgatgattaaacttaacaagtgggattcctttctttg

SEQ ID NO: 76741 - DNA, 181 bp, Arabidopsis thaliana landsberg
accttctaattgatgaaactgtacgattacatataagctagcgtctggatgacctaatacacgaggtgttatttgattagaagaagaaaaagaattggatgaatgaggtgaaggggacctggtatctgaaactttttaggggataccggaaattcataaatgtcgatgtctaccttactgt

SEQ ID NO: 76742 - DNA, 560 bp, Arabidopsis thaliana landsberg
tacaccagcatcccgttgtatttataggctggcatctggtagcttttttcctcttctgcatcgggcgctgtttcggtgagcgtttcacgcacctgttccaggtattcctgcgtttttggaggaaaaccggcaatgtaacggtcgacctcggtggatttttttgttttgctcatgggttcttgttttttgaaagataaagctttttctggagtaatggatatttactccacctcaatcgctggtgatttttcaaagaccaaagaatcatggttgaccatccagatgtaattttctcctgatttgtacagtaccgcggctgcatcaccctggtcgtcccacttgaacagggtatgctgatcgggcatttgtccttcatcctccatcaggctcgagtcctgcacagtgcccaggtaaagcatcacctggttctttcccacaatgctgcccgttactgccgaggtaatggtacccgtgggcatggtataataaccctgttcagccttgctcatgtaataacccgagtataaggttccgcttacacccctgttgtttttagtgag

SEQ ID NO: 76743 - DNA, 156 bp, Arabidopsis thaliana landsberg
tttaagggaagtaccaaaaagcaagccatgacgtcagttatgaacattaattttcccaaagtatgtgaacccctagtaaaggggcgtggtcccaatcttaaatagggatatagatacgcttcctttataggctctaacaattctttgctaactaca

SEQ ID NO: 76744 - DNA, 457 bp, Arabidopsis thaliana landsberg
gacctatttattccattttggtttggtgtggattagcttgggggttggtaatagataccacttacgccacaaaatgaccggattttgagctcgtccattctcctcttgcgaccgtcttcttttattctacgaatcttagctccacttgagctaaaactaatcacatatacatgtactcatttatcgcaaaccctattttcaccatctcgcgattacccacattctattttcccgcgcgactctcaattcagcatcgacgccgccaacttgattacgaacccactcaaattcgagtccgaaatcttgcttaaaatgcgctagggtttggcaattcgccattctttcaaacctattgaacggccgattaacactactcccgtcgatactcgacccgaactcatcgagctcgtcttgataccctacacttggacaacatcgcgtgtctcttgtcctatct

SEQ ID NO: 76745 - DNA, 588 bp, Arabidopsis thaliana landsberg
ttctgaaaagaatatcccaagaactcagcgatccgcatcattcaattttgaggctgctctctcatctcttgagacatggcaaacataacctttttcgggttttctcggctctctttccaatactctaatacatgatcccaaaatggtccgtatatactagaccctcggcaaaaacccctcaccatttcctccattgtgcatccaaccatctccttaacaatcaaatttttcatgaaatgccaaagtgagacaaacgcgtccttcgggttcctgcagcaatacacaactttacaggacgagtccttaactgactcagggagtgaccctacaggaatgtgtgtagagaagatcctaggagaagtatcttgagtgtgaaggtggaaaccttcgataaaggtcacgagagtatgcgggttgttatcgagcagaggatgggatactagaggggtttggaattcttgcctatgaatcacagcaaagacaagtgatttaaccaagttgtacctgacttaggaatgcttgcaaggacgatgtctgaatctctggcctgaaaatgcttctggctgtataggataccttctaagagat

SEQ ID NO: 76746 - DNA, 1748 bp, Arabidopsis thaliana landsberg
  unsure (1)..(1748): unsure at all n locations
gaaacgaaaactacctatgagacattgattaatatctacattttgcattagaccgagaggaggaacgataactgtgagaggttgtgattgtattaacagtcaaagagctaagctgattattgaactctctcctcatcgctctatacacatcctccaatccttcctctataagttctagaatcgtctgtggcatcggtggcagatttatctcatccgaagtgccttctaaaagcttaaccacctcacccatcgacggcctcatcgatacttcgtcttgtatgcaccagaaagccactttaagagccttcactacttcttcttcctctgctactccttgtagccttttatccacagctttcaaagatgtcccattcgttagttcctattcatttattttcaaaaactcgttaggacgttataatctttatgtttataactaatttaagccctttctttatattttagaaatcgtctaaatttaccttgtaggcccatccagggtaaaagaaatcctcagcgtcataggacatatcaagatttctcctaccacctacgatctctagaagaagcattccataactatacacatcggccttcaccgtgatcgggcggttactcacccattcgggcgctagataccctctcgtccctctaatcatcgtaaccacatgcgaatgctctctccccatcatcttggctagcccaaaatctgataccttaggacaaaaattatcatccaacaagatgttttcaggtttaatgtcgcaatgtataatcctgtttcgacactgctcatgaaaatatgcgattccttgtgcagtcgcaaccgctatttatatacgtgttcgccaatcaagtagattagctgtctgttctgaagagaatatccatttgtctaacgacccatttatcatgtactcataaactagaagcctgtaatgtcaccaaaaaaacatttattcaaatctgtttgcttgaaaacagagtaaaatgttttgtaaaagtcttctaagtcataccggtgtgagtcttccgagcagtaaccacacaagcgaacaaggttcatgtgatgcattgaaccaatggtattgacttcagtgatgaactctctctcgccatgagataatgctctgtctaatctcttcaccgcgactagcgtttcacccgctactgttcctttgtatactgtcccaaatccacctaccacatcataaaacaaagaaaataagatttgaaacacttctaagttaaaacttgttatatgatgattgttgattctgacctgatccaagaagttgggagaagttgttggtacagttctggagatcgcggtaagtgaaactcacaggagagtcacaaaggataagagagttctttgcggctctctttagtgttctcttcctatctaaattatagtataacaacatcccaagtagtgccacaagcacaagcatccccacaactataggaatcaccagaaccttttgtcttaatccgtggctcttacgcgatttagaatcattattattcgaatttgagggataagattcattagctctagtcttcacgaaaagggttgagccaggatctcgaaacccgccaaaattcagactctttaaaatccaacaataaggcttctcatcatctaaaccataaactgaagctacacacttgcaatctgacaaacacatctcaccgcatttcctcacgttgctgatatcgctgatantttcgatgacagaacgttc

SEQ ID NO: 76747 - DNA, 577 bp, Arabidopsis thaliana landsberg
caaagttcctccgaaacgggtcaaacaaccaaacgaacgatttatatccgagtttattttacaaagacaaaaagcattggacgtatatgtgaatcagattctgaggttaccaaatgctacagaaaatccagatgtgcttgcgtttttcggcttggtcaatccacttgatgacattgcattttcagatcaagatagtccagcaaaatcccaaggagatgatctagaaagcagtttggtggatagtgatattacattggaagagtttgaatcagttctccttattggaggtgaggataaactcgaccagatttgtaccggtccaatgagagttactcaagaatatatgtcaaaattagcaactgaaaatccgcttgagagtgtattgcgtggaatatttcgggtgcacaacgtttcccccttgatccgtgggtttgaccgaatgaggcaaaacaagacttctttgactgaacaagattttcaaatgtggtgtgagaatcaggtgccatccgctattgatattcttcgcgagacacttcgaaagcgacggccattcacaaaaacagataacggacggaga

SEQ ID NO: 76748 - DNA, 614 bp, Arabidopsis thaliana landsberg
cacagatttatacaaaacaaagagacaaaatatgatggagactttacgtataaacaagtgggggcgtagaaattgacgttctcgtgagccacatttggataatgctcctttattaatctctttttcttcccatctcattcaatctacatgtttgattaattactattgcgataggaataaattctttatcaaaaacaaaaagaaaggaatagaattatgtcaaacggattgacttgaatcataaagattataataatccagtctttctaatataaatacgttattgagttttctcgttgagcttctagtttcaaaagctctcttcgcaatcaacaaattcgaagacctatattcctgcaagatgcacttaagtacacgcactattgtaagtttttgagtataaaaacttccatagctatattaattattactaagttactcgtattaatcaaatttggtggtcgaaatattcaaagaaaagtaagacaaagtcaaacaaagataggagaacaaagcaactgaaatatgacaaacattaaaaagaaaatggttcacaaaaggaaggaaaaaaaacaaatcacatgagccgtgtataattgaagccttaccacatt

SEQ ID NO: 76749 - DNA, 272 bp, Arabidopsis thaliana landsberg
accgacatccgtgaggccgaacgcttccagagcgcctcgggcagcgattgcggtatcgccaacgtcaacatcggcaccagcggcgccgagatcggcggtgcgttcggtggcgagaaggagactggcggtggccgtgagtccggttcggatgcctggaaaggttacatgcgtcgccagaccaacaccgtgaactactcgcgcgaactgccgttggcgcagggtatcgtgttcgactgatcggctgatgctgcatggccgggggcctggccccc

SEQ ID NO: 76750 - DNA, 474 bp, Arabidopsis thaliana landsberg
  unsure (1)..(474): unsure at all n locations
ggccagaagacgccggcgagnaaaaacccaaaaccaatgatgttaatgaacaagagcacgcaaaccggaaangaacgaaacgaaggacaacacgcccncccaccaagnggagncaccaacgacgaacacagcagaagaaagagcggcagaaggcaaagaagagaaanacccaagcgnccacgcnacncgcagagcagaacgccgngacatcagacaggaggagaggccaaagccaagaacccaagcggcacacaaccgaaggggggaacaccaaaagcaaacaaaaagcgaaacacagaaccaaaaacagagggagagcaagacnacaccgcgaacncgaagnangaaaagggagaacaacgaaaacacacacaacaannaagnagccacatncaagaaaacacagggggcaaggggaaacanganngagacgaaaanccgagaaaggggaaaacgcannggctccccaagctc

SEQ ID NO: 76751 - DNA, 480 bp, Arabidopsis thaliana landsberg
acccagcgggcccgggagaaccggcggcgacgccagctcaaccgttactttcggatcgcacggggccttggcgtggcgctgatcgtcctggtcgcgatcgccggggtcttcctgggttccaagtactggcactccagcggccccgtcgtcgacttcaccggtgacggtggccagcaggtgttgatcgaggtgcacgagggtgacttcaccaccgcgatcgccgaaaccatgttggaggctggggtgatcgccaacgtcggaacgttcctgtcctccgcgcagggcaactccgccatcgcggcgatccagcccggcttctaccggttgcgggccgagatcccggcggccaccgcggtgcagcagctcaccgatccggagaatcgggtgggcaagctggtgattccggagggccgtcaactcgatgacaccacggacatgaagaccgagtcgtgtgacgccgggactgttcaccctcatcgc

SEQ ID NO: 76752 - DNA, 524 bp, Arabidopsis thaliana landsberg
  unsure (1)..(524): unsure at all n locations
cgacaaaaacaaaaaaagtaacaaatcaacttgaatttttttattaggaagtaatacattcttatacttcctaataaaaaaatccagttggtttgttaccttaacccaaaatatctattaatcaatatgtaaacttaccttataattaaaattttataaagtttattgccttttatgctacctccgccactgtatatagcggtgacccaattacaaagactgtaagtttgtaacatcgctcaaataaacctattgaacataagagaggcagccacatgacgggcctcgacattaatgggctttcgtggataagttttcttctaacatcataatggtgacaatcgcaaaaacaggaaaacaagaaaaaagaacacataaatatcactttacattatacaaactgcaacataatctgtatataaacngnatctcataaactnttcattttccagcaagatgatgaactgtatatgaagagtagcccaaaaatcaccttaattaattaatttgataatagtttcttt

SEQ ID NO: 76753 - DNA, 524 bp, Arabidopsis thaliana landsberg
tatatatgtttgatttgcaagaatgctctagtgtcttccgtcacacgactctctttcatattctagaaatcagacgcggaagttcttgccggagtaggtctgaccaaattgccagttactgggagcaatgttgttggaggtggagctttggccatcacaggttttgacttgtgaagaacgagattggcctgacaagaagtgcgtaggattgccagttttggccccagttccggctcagatctaaccattgtgtgttggatcctttcacactgaccttaatgacgtcttcagctacggctacgatagtgaccagcaccaagttgaagttcttgaatacataggatgtgaatctgataccttccttctacctacatgggatcctacaatcacacaaaaaatgatagaggattgtacgttatgaacgaaatattaatgtggctaataaaaaatttgaccccgcaaatgtatgtggtggagtgagggagcgttggtcctttgctcttggctgactttaaaggcaaaat

SEQ ID NO: 76754 - DNA, 165 bp, Arabidopsis thaliana landsberg
aacttcaattactatttacataacaatggtttccatactcaatgtcaatctgataaaagggtatgataacaaggacagacaaattgaaaggatttcttggatgcgaaataatttttgaaatcctactgaattgtaaaacatataagctttgaagagaagaaaaag

SEQ ID NO: 76755 - DNA, 331 bp, Arabidopsis thaliana landsberg
gggggacctaatatgtgatggcctagaattaaaaaatttcatattatataaaaaataataaactgacagacttacttaatataaatgaacaaaccaaccactatatatcctctaaaataaaaaataacttaagcacacccatatccccaccgataatactgatgttcataatataaacacataacttataatggactgatcttacttacatataataaataaaacacaattacattcataaaaattcatcatgtgaaacgatctttatagcctcttactcgacaaaaacattctctacattgatttataaattttgcaaaacaaaaaaatc

SEQ ID NO: 76756 - DNA, 550 bp, Arabidopsis thaliana landsberg
  unsure (1)..(550): unsure at all n locations
ggaagacgcacaagccgatgccgcctgaacgcttcattcgctttattttgcagacatggacgatagcggcggggccgggcttgagcacacgcgcgaggccgctaaagaagaacgacaaatgcaccttagcctcagggcctgccgcatctacgttaccgatatcgctcacgctgtccgcgtacgcatagagcgaaggaaacggcgggctgaaaactgctaagtcgatcgagctttcnnnnnnnnnnnnnnnnnnnnnnnnnnnnnagtcgccatgataaatgtcccactggttatcgctgaatacaggcatgtcctatttccttaaaaagttcctcttgctcgcgagtgtcaactttgacacgctcagccttgcgaagcacgttctccaagaacggcacttcgagttcagtaaccgggatatgtacgtggagcggtcgcgtcgatccgatgcggtttgaccgcttcaccgcttggtggaactcttcgtagagtccttgagtccgctgaacatctggcgagtacacacttggcgattcaacccgaagccgat

SEQ ID NO: 76757 - DNA, 238 bp, Arabidopsis thaliana landsberg
gttcttgaaaacaagatgcatattataaacataccttttgtttttaacactaccccataatactttggccagggtaccattcaaattcaacatgttaaatcaccacatcgttctactgaaaactgaattccccacttgcactaaaccaaatctaacctttagagacatcaaaatttgtcatcctctcccatttcattctagcatgatcaaataacttcgtagcaacataataacattt

SEQ ID NO: 76758 - DNA, 515 bp, Arabidopsis thaliana landsberg
  unsure (1)..(515): unsure at all n locations
gcgaagcagcaaatgccggaatggacgacagaaggcggattcgcgatcccaaaaaaaaaagcgcgccaagggacggggcattttatgaggccgagccgcaccgcccacggnaacggagagaaagccgggacaagcgcccaaccacaaaagggggcgagcgacaacaaggcgaaaacagccgcgcgaacgcagcagacaaagagcaacggaagcaagggcgggacacgggcggagagcccggccggagacgcccgaagaaagaaagacaaaggaccccaacagcaaggaggggcggctaaaccagaaaaaccgcggaccgagaacgccaaagcatctccacttaatctgcaaaaaccggcggacaaaaacaacttcgaagactcaccgcagaaaccggaggggccggtcataaaaaaatattatcagttgagtgctgcagccggccgaaatgaaaacctgacgcaaatacagggcggggctgcgattcgggccggataccaaagcggcaagggaaa

SEQ ID NO: 76759 - DNA, 509 bp, Arabidopsis thaliana landsberg
gctttgatgaagtagaaaaaagaagaactttgtcattccccccacgtttaaagagacttgccatcgatccttcacaagcttctcgtcaccactcctttcttctttacacttaatttccatcttccttctgcttctacacgtccacatgcaattttgcaccgagaatcctaatttgtgtccttcattttaaaggtttaaaaagcatgtttataaaaacatggaactggatggtttgtgagatatgccatcaaattagacaaaagggtccattaagcatgtgaaaaaaaaaaataaaaaaaaataagagacgatcataagagttaggtgtgacctgacaagattcttgtacacccgaacccgacttgtgaactgtgaagtcaacctctaattaacagttattttttattcctacaaatacggatccaacattattctcaattagttgaagtaatgtctgtctatttgcacattttcaaacccataatcaaacaaaagttacatatcctgac

SEQ ID NO: 76760 - DNA, 408 bp, Arabidopsis thaliana landsberg
ataccgttacctgccagccggcctctatactgttgaggtcattgttttcgtttgaacctgacaccagccatagtgggcccagagctgaatttcgtagcgttgttgtcaattttccaatgccatacattcatagtgactttagttccgtatatcctaggtggattttccatagaaccaacaacatactatatccaaaaaaaataaaaatatcctgattagttatttttagttttgtcattgaaataatgaaataataatatcgaaagttagttttgaatgaattctttaacatagaaatctaaaatagaactactattctaacattagcaaaatcacccaaacgttatctaccattacgaatcaaacaattaattagttttcaaatacaaagattgaataacatataac

SEQ ID NO: 76761 - DNA, 388 bp, Arabidopsis thaliana landsberg
  unsure (1)..(388): unsure at all n locations
acactgtaaaacctttacccactgacagatattaaaataacaatgtggggctgcctgctttcaaaagcttattctatatatttaccttcctgaaacctcctgaacacaacccacaggtattgcattatggctgccttgaatcctgcctccaaaattcaactcacatcaatgctgcacccactcacatcaaaacaactctttacacatcagtttaacaacaaacagctcaaaaccataaatctgcacgcataaatgttctaatctttaaaagtaacacaccagtgataagcctacataacggaatcatttagttagaatgatctacgctgattcaaaagatgtactctatgacataannnnnnnnnnnnnnnnnnnnnnnnnnnnatga

SEQ ID NO: 76762 - DNA, 389 bp, Arabidopsis thaliana landsberg
agcgactcagcacgaaggcgcatttgtcctcgacctatgccaatcgaagcggaagaaagcatgcttggcgttgaagtagccgatctgcaagacgcaatagacttgggcctgcaggctaggccggctgctggcgaacgccagttcagattcggtcaacgccaggtattccagccgctgagcatcgtcgaagtccggtaggccgtacaaggcttcctgctctgcgtcagaaaagacggtgagtagcttattcttgttgctcatcgaccggccttcccgcaccacgccaacctgctcgcgtgaatgtttcgatcaacgtagtgcgcttgacattgaagttgcggcacaccgccgccttagacatgccgccatcgagcgcggcgacgatggcg

SEQ ID NO: 76763 - DNA, 545 bp, Arabidopsis thaliana landsberg
aaagagattgcgcttgctaagtcttgtaacgatgtgtcgtttagagttagctgttttcggtttacatttcactgaaacggcaaacagttggatctttcagcaaataaacgacggggcgttttcggatcctcctcttcctgtgaagtctgcctgcaccagatagaagaacttagggaatcatatgaccaaagtgtccttgaaaatggggacaaataaaagttctttggaatatttgttttttgtcaagttctaagaaaattctcatgaaagtgaaatcgtaactacctgtcatatttatctgaattttctatttagaatgaagtgaaacgtatttgatgaaactaataataaaaaaatgatagagatattagtttttttttttttttttttttggcgagagatattagtttttttcattaatttgagacagttggaaattaaaatagtttattccttctattttttttgtttggtttgacatattctctataacagccaaaataagtgttaaccatattgctaaaacacttaatactttaaaatta

SEQ ID NO: 76764 - DNA, 578 bp, Arabidopsis thaliana landsberg
  unsure (1)..(578): unsure at all n locations
ccgcatgctgccggtgttgaccagcaaacgcgtgacgctggtattgaccagcccgcgattgaaagtgatcagggcttcatcgtccagccccagcaggtgcgtggatggcgacgctgatggcgccgccggaggtgaacaccagcgccgcgtcaccgcgttccaatccnnnnnnnnnnnnnnnnnnnnnnnnnnnnnnnnnnnnnnnnnnnnnnnnnnnnnnnnccgagtacacatcctgattgcgttgccagcgccgcagcgcttcctcgaaacgggcctgaaacgcccggcgcggctgcggctgctcgctcagccactgattcagcgccgcgcggttctgggattccggccagtaggcggacatcaggcttttgtgatcgtactcgttgaagccgctgtccgtggcccattcgttgggcagccccagctccgccaatgtcgcctcggcggtttcccggtgccggcgcatggccccgcataccacccgcggcaatcccagcgcctgctgacacagatgacgaccgagcacccggctttgctcccagccgtgctccgacaggcgtcatatcgtccgcgcc

SEQ ID NO: 76765 - DNA, 522 bp, Arabidopsis thaliana landsberg
  unsure (1)..(522): unsure at all n locations
aaaaagggttcacaaaagggctaaacaatttaagtaaacgtaccagtgcatcttcctttagatttgaagccttgacaagggctacaaaagaagagttgtcagatgaagaagagccagcttcggattgtgaactgttcttcctcacattttttactctttcaagctgatctgtgtcaaataaacaaatcccacatgttaaaaccatcttcggatcgaaaactttatgtttttaaaactcatcaaagtaatatagaacggaagtgatgatgaaaccggtcttgtcttgatcatcatgaccttcttctatccttagacgctgatgcttcttacttgtgtaaaacatgtaaaagatctccgttcatatagatgcaaacaaggctttttttttgtacagattttcgaaatctttcttcaaaggattgttctctcaactcagatctgactatagctcgttgattaaaaacgaaaatcatcagaacanaacgtaccgatcttggtgatatcattgttgctgggcatggg

SEQ ID NO: 76766 - DNA, 574 bp, Arabidopsis thaliana landsberg
  unsure (1)..(574): unsure at all n locations
gaatccctcaagcactcgaatactcagttaatgctttccggctcctccattagcacttacgagttacggcagttcggacccggtctcggattcctgaatggcacaccgggtatcgacctggacgtagccggagaattcggtaagctccgcgttaataaacttgatctcgattttaaaggacgaggatcgatcgatatcagtggttacttgtacaatctccatcaacctgaagatctatcgatggatcttaccgttgcagcccgaggcttaagcaatgcaacactccgatcctatgtaccaggtttgggtattcctgatctaagcaggctcggcattgttaatattcctaacttacgttataccggtgaaccgcttaatttcaagaccgttcttgatgtgcggacaacaggggccggtaatgtaaaaggaaacgcaacgctcgatcttcggggaagggagatggtctataaagccgatctcacaaccgatcacgtaaaccttgccggtgtgatcaaagatgaggcatggcanagcgatcttaacgcaaatatcagggctgagggtaaagtactga

SEQ ID NO: 76767 - DNA, 574 bp, Arabidopsis thaliana landsberg
atttaatatatgttataaaaaatatatttgaactaaagatgaaaagtttattaacaaactaagaatggggagaagaaactattccttcaaaaataataattgcataacaaaaaccaaaactgcttatattttattcattactatcaaatataaccactaatttttctttctctctaattttatgttatattaggtctaacttcgagtggggtgtactttgttttagttttttttttaattatgaaattttctatgaacatcttttatatgataagacaataatatgaataaaagttgtgaatatgtatacaatacaataatgtaaagtattttagaactagaattataaactatttaaatagtgaaagtgttgtttatttaagttagttttaaaattaatttgtttctttagaaaatctttgttgatatgttacggagagaaattagtttggttatttatgttctagacgttggatgaggtataattctttttggtaagattcattcgctgtttctggacttgattatttccctgatcagtttactctagctaatcacctatgatgttgtgatc

SEQ ID NO: 76768 - DNA, 514 bp, Arabidopsis thaliana landsberg
  unsure (1)..(514): unsure at all n locations
atacattcaagcgaaacctcgaaaacgtttagtccttatagtaccacaagcagttccgggcaaccgttcaacagcgaaacgtcgatatcgctgatcgaaactgaccgctccatccggtgcgtgcaaaaaaaaaaaaaaaacggaaaccaaaaggaaagacgttgacgtcaacagggttcctcggttggaagttcaactgtgacaaagcgctcataccaggttctgctccttgacgaggaactgctggagcggcgcgatagacttgacaatctgtgccacggagggttagcgcgacggaacaactggttgttggaagccatgaaaagcggtcacgccggcagtcgtagtccatgacgattggcagcccggaacgtctcagtgaatggctagcaacagncgaagtatgtggtacacatgaaaagcggtcgcactaccagtcgtagtcgctgacgattagcatcgaagggtctcaatgaatgccgtcaacatcccaagggagcacactgtaacgctc

SEQ ID NO: 76769 - DNA, 515 bp, Arabidopsis thaliana landsberg
  unsure (1)..(515): unsure at all n locations
aaaccacgaccaagcccgaagccacgcagtgcctgatgcgcttcatcgccatggttatccggcttcgatcgcgtcatggtgctggagttcatgcccgacggccacggcgtcgtcatcgacgaacaactcaagcccggggtgccgggctatctgaaccagcacttcccggcctctgacatccccgagaacgcccgtgccctgtacctcaagaaattgcagcgtttcattgccaatgcgcataccgatccggtcgatattctgtcgacacagcctcagccggtcgatctgacctggtccgagctgcgtgcagtccacccggtgcatacgcaatacatgcgcaacatgggtannnnnnnnnnnnnnnnnnnnnnnnnnntcgtgggaggacatttgtggggccttattacctgccataacctcgatcccaggccactttcctttgccagcggcagttgtgcgaaccctggcgtcggtgaccgggctgcacatgaccgggctgtcgcacctgcgccagg

SEQ ID NO: 76770 - DNA, 329 bp, Arabidopsis thaliana landsberg
tacttcctggcacatatactactactcacaatgataatgctattagtgcatgacttgattaaaggacatattcttttcaaaccaccggggaccgcccccgtcggacgggtccgaacattacaaattgatgaatatcacattttaaacaaactcttgtcgctgttcatatatgctgattttattcaaaataagacattacagagaattaactttttatattcaaggaaattacccgtctattgatatgtcgtcctagtggtttgatcaaacgatcagaaagaaaatgttgaaatgttgattaaaaatagtcgtcttagggtctttggacg

SEQ ID NO: 76771 - DNA, 638 bp, Arabidopsis thaliana landsberg
  unsure (1)..(638): unsure at all n locations
cgggtggggacgggagaaaactgctcaatctcctggaaatggccgtgaattcggtcccgggtaatacggtagacattaccaaccgcctggttgaaaatgccatcagcacacaaccggtacaatacgacaaaacgggtgaatggcattacgacatcatttcggcttttatcaaatccatcaggggcagcgatcccaacggagcagtatactggatggcacgaatgattgccggtggagaagatcctttgttcattgccaggagactggtgatcttggcatcggaagacattggcaatgccaaccctaccgcattgatcatggccaacaattgttttcaggcggtaaatgtgattggaatgcccgagggcaggattgtgctttcccaatgtgccatttacctggcctgctcacccaaaagcaatgcttcttacatggccattggcgatgcacttagtatggtgaatgaaaccggaaacctacctgtgcctttgcacctgcgcaatgcgcccaccaagctcatgaaagacttgaattatggggccgaatatgcttatgcccacgattacgaaaagaactttgtgatgcaggaattnttaccggaccagatcaaagagcatacatttttgagcccgaaaaaa

SEQ ID NO: 76772 - DNA, 562 bp, Arabidopsis thaliana landsberg
tagaatagagggccaagtgggaagggggttcacattagatttttaccttttgttttgttttgttgtgattctggaattaaatagtgcatcccccctttgatcatgaggcttttcttgaaactatattcgtccttccatatttggaacatgacgtgtctctttacatattttgctttagttggggaggtcttgatcattaggttctcttatgtttcctacaagtccttacctagtttggtttttatcccctaagcactttctttgtacgtagaatcatagtacgtattgttgcctttcttacgcattgtcttcctttacgctcaatttctcaaattaaccaataccactcaaataggatatgttttccatcctaattcctaaagtgacttgttcgaaacatataagaacaactattattttgacgggtatgaaatgagacgacctataataatattttgagataatgataagacaacgttggaatacgccagcaaagccaagactcgtgatctaattgcccactattttcggtttacaaagagaaaccacatatcttattgat

SEQ ID NO: 76773 - DNA, 558 bp, Arabidopsis thaliana landsberg
  unsure (1)..(558): unsure at all n locations
aaataggcgtccatgatccccgcaagccttccgatggtcttggccattatagagctcgggttcggtggttgatgcagggtatctgtagaagcattttcctcctgcctttttttgatcaggtagtagcggcaaaaatcttcaatgcccgactgcggatgctctttttcaaaatggtcccattcattgaccagcttaaccaattcactcatttataccggatttgatgtaaaattagaaaatattttccgaaaatgatctaatatacaacgaaaacgatttatatttgttttaaatatgacgattacgtatttatttgttgaaacaaatgttggagtatttaagcgggttttaccgttcaactgccggcttttaccgtgaaattaccagctcttcgcctttgtgctcttgcccggatgctaaaggctcacctaattttacaccgaaaacaaaccatatgaatgaaatttctacaataagaaaaacgattttaatcttctttttgctggtcctctaactcctgttttttcccngccgcgatcaacggaaagtaaaagaccg

SEQ ID NO: 76774 - DNA, 115 bp, Arabidopsis thaliana landsberg
  unsure (1)..(115): unsure at all n locations
gccaaaagcggcaaaaggatatgttaaaccaaggaccgaccccagcaaacacaggccggagtactacgacancaccccaaggaccccccccgcaaccagggggcacggaccgacc

SEQ ID NO: 76775 - DNA, 537 bp, Arabidopsis thaliana landsberg
ttcgctaacctaagctcacaaaaaaatcatgacatttttttttttgtaaatgtgtagttgtatataggattaagtgtgaatgacgatggagatattttcagttacttttatcaatcagccatttttttctatctatgaattcactacttataacatgcctgccacttaaagagccaatcacattgatatagttttgtataaactttttagtactcttgggtgtccatggaaaatttcaaagataccacacgaatatttcaatttttaatatagagaaatataatgcaggaataaaatgttgctagttggtgaaattcatatttattcttggtgttatctcatatttgacttggaacatatttcactaacgtgcttacgtgtccttatgaaatccaataagtacattaaacacaccagatctcttaactcttctaaggctatgtcctaagatcttgctgatcagtacataatatgggatgtctctgcatcaatctgaagaagacgtcaagagaccaacaccagacatcagtggagaac

SEQ ID NO: 76776 - DNA, 350 bp, Arabidopsis thaliana landsberg
aactcactgtatgtacgttaattttaaaacattattattttggttgggaaattttaattagtatactaaagtagaatcaaacaattttatattgtatttattaaaaatactaaaaataaaaattcttcggtaaaaacaaacaaagatttactatctatatttattcagtatattttatattctttgcatccctaaaagatattaattatgtatatttataaattattcgatcctaaataatttgtacgcggtcaaaaaatgtttgggatttatattactaatagtattttatacaaataagtcatctttttatgtactcatataagtttgaaaattatttttatttttga

SEQ ID NO: 76777 - DNA, 407 bp, Arabidopsis thaliana landsberg
ggtcgcgcggccggggccgcctcctgtcagcgtgatgatcgtttcgattttgttgagcgtcatgatcgtgatcgggatggggttgacgaggatcgcggcgcgcatctgcggaatcgtgacgaagaagaactgctgagtgcccgtcgcgccatcgacttcggccgcttcgtagagcgagggatcgatcgccttcagcgccgcatacatgacgaccatcgagaaggccgtgccgcgccagatgttggagatcagcgccgaccatggcgcgatcgacggatccgaaagccaggcgacaacgggcagatgcatcatccgcaggatactgttcatcgcgccgtatggcgcttcggaaaacaacatctgccagatgataccaccggcaattccgggcacgacccaggcgacga

SEQ ID NO: 76778 - DNA, 376 bp, Arabidopsis thaliana landsberg
  unsure (1)..(376): unsure at all n locations
nnnnnnnnnnnnnnnnnnnnnnnnnnnnnnnnnnnnnnnnnnnnnnnnnnnnnnnnnnnnnnnnnnnnnnnnnnnnnnnnnnnnnnnnnnnnnnnnnnnnnnnnnnnnnnnnnnnnnnnnnnnnnnnnnnnnnnnnnnnnnnnnnnnnnnnnnnnnnnnnnnnnnnnnnnnnnnnnnnnnnnnnnnnnnnggccaagaggaaaaggctttacttatggggggtgtgtggggagttgcagtctggaacccctttatcggtggactggtgcatcgaggaggatcgatatcaacaggaatgaccgacgtcggcgcggattttgcgaaaactttcgcacttttcgcatcggttgtgcttttcagtttctcagcgtctgac

SEQ ID NO: 76779 - DNA, 521 bp, Arabidopsis thaliana landsberg
actcgtcagctgaaataataggtgaaccgtacagcggggtactggtgcggagaactatttgttatccgagactggacaagatcatcccatggtctccaatgttggtatcaaagttgcgttctgatcgagacgtgcgcgaactttggtactgtaaaagagcaaccatggaacttgcatcttttccaatttcattgccgcggctataaaacaccccgcgggactttgaatcctccatgtctagtcttgtggcgtcgaaccactatcctggttgcggggtgcatgtgtcggggatgtggccgcccgccttggtttgacgatccacccgattccccgatatatcatctcgcttggcctctctcgactactctgttccgttgttccttggagagagaggtcataatggtggtttcatgacaataattttcctctgcttccctccgatcttctcatctccttgcggggcattctcaagagacgaattgagcccgcaaatgctccccgcagggtttcaagctagttca

SEQ ID NO: 76780 - DNA, 473 bp, Arabidopsis thaliana landsberg
  unsure (1)..(473): unsure at all n locations
atatatacattgttgacagtgcactcattcccagctaaatactatcatatacagtgacaaaccggcttaaagctttctttataaaatctgtaccggcatttaccaacaatcatggagggatatgatatgactgctgtagaaatcataacgaaacaatagtatactttgtgaactttacacaacactttatgggtcattatacgtagcgtctagaacctctttcaaacaacctttttatagattgaaaaatgttatttggttaatggatttcgtatcacaacaaatatttcatcaacgaacttcgttcaccacttgaatatgaaaccaaactggttttcttagtcccatatagaactgaatttgtccttccctagtcacacttttagcgatagcacgagcagtgacattagtccgaaccgcgaccaagtgaaattacaacctgatcaaaaccgtngctaaactgtgaattttat

SEQ ID NO: 76781 - DNA, 576 bp, Arabidopsis thaliana landsberg
cactacactaaattcattaataaaatattttattaatttaaagaggttatttaattatagtgaatgaaaagcttaacaaaggtagggatatagaaaatgccaacgccaccaagtagaaagtcggtgagaggagattatttcatggtctactaaatcctaattgaagcattcctctcatcgcttataattcataggtgcacttaccgcgcaatataatctaaacaaaacgaagctttcgcaacccccaaaataagcataattaattttatggtaaataagtagaattaattttaccgtgaagctttcgcaaccctcaaaatatatgagactcttgacgggcttctgttcccttagatcctcaataaccgcatcacatctgaacgattcgcaagtggagagaaggtagtgaagctgctagacacttgaacttgatatatttgtctagatcaatttgatatggaaacccaatttcatctatccaatgtccacttttgcttagggatttagctgatctcctaagaaatccttcgaggtttcttccatgtccatcaaacttgattctttgttcaataagaa

SEQ ID NO: 76782 - DNA, 609 bp, Arabidopsis thaliana landsberg
acccattaagattcaactactgatttaagtttgaattttataatctatcccttccacacggtatatgtccttatctggatttgtggaaaagaagtattaatcagctatactagaattttaaaacaatgcaattggctttattcttcctttgttcaatgcgtaaatggctcgcatgtctctcccactgtcccttctttccctaaaacaaacaaaacatctctctctctctccacaattacagcatcttaattttcaacattttctccacaattacaggcttatagttttcttttgttctccatccgtttggcaaatattttatcttttgtgacttatttgcttaactttttctatttatgggtttatttcatacgtctttctaaatagacatcaattctagttagaccccgatacggaaaaggttagatagtagaatatgttggggttctattagagggcaaagtttttccagtgatagacaaagtcctaacgtagtggtttcagaaaaaaatgaacgatatctcagtattttaaacaagacattcggtcaacaactaagtaaaatggaaaacaaataaaaagttgcatcgagttagaaaagacattcac

SEQ ID NO: 76783 - DNA, 448 bp, Arabidopsis thaliana landsberg
  unsure (1)..(448): unsure at all n locations
ggcggggctcgatgcgatgatcggccgcctggcggcaaagcttatcatttcggaacagctggagcaactgacgggggtgggtcgaaacgatgaaggaatcggcggatgcccgcaacgtcgaggcctactatccgttgaatgtcgaatttcacgatctgctggcgaccttcacgaataatcgtacgctggtcagcacgtacaggcgtctcgtcaaagagctgcacctgttccnnnnnnnnnnnnnnnnnnnnnnnnnnnnnnnnnnnnnnnnnnnnnnnnnnnnnnnnnnnnnnnnnnnnnnnnnnnnnnnnnnnnnnnnnnnnnnnnnnnnnnnnnnnnnnnnnnnnnnnnnnnnnnnnnnnnnnnnnnngcgcttgcatcatctcgatgatgcggatgcaaccggtcccaaggggaaagcggtcaaagcggacgcgtgatccggcat

SEQ ID NO: 76784 - DNA, 527 bp, Arabidopsis thaliana landsberg
  unsure (1)..(527): unsure at all n locations
aaaaaaaaggtattcggtgccctggaactagagttagagaagattgtgttccaccatgtgagtgtttggaatcggactcggggcttctgcaagagcaacgagtgctcttagctactgagccagacctccagtcccatgaacatagttttgtatttgggtttttggtctgatgtattacactaagatgacagtttgtgtggtcacaaccttcagtttttaacctgtatccttctctgttctcgaagaaagcatcggagttctttgagctggaagaggatgaagtgctgcataggtatgaattctttcattgtactggccttgacacccagcagggaccttatggggacactgatgtgatgtggctccgagaagaatangggcagggaggggagccatagccaagactgtgggtttgaacccctgcgagggttctcagactatgcaatgccaggcaaggggagactcttctgtcaaccaagacctttgccccggccctgtgtgctctggaattctagaaaatgcctggc

SEQ ID NO: 76785 - DNA, 561 bp, Arabidopsis thaliana landsberg
  unsure (1)..(561): unsure at all n locations
tggtcgagcgcggccatctgaaatcgacggggaatacctgatgaataccgtggtgaaagtcgcgcggcatgtcgatcacgcctccgccttcgggcgcgtggcggtggtcatgggcggcagttcgtccgagcgcgaagtgtcgctggactcgggccgcaacgtgcttgaagcgctcaagagccgcggcgtggacgcgcacgccatcgacggcattccggccttgctggacgccttgcgtgccggccatttcgcgcgcgtgttcaacattctgcacggcgccggcggcgaaaacggtgagctgcagggcacgctggaatcgctcaacgtgccttacaccggctcgggcgtgctcggttcggcgttgtcgatggacaaggtgcgcaccaggcgcgtgtggcagtcgctgggcctgccgacgccgcgttttgccgcgctgacgcacggtggcgacgtgcatgccgcggcacacgaagtgngtttatcgctgatcgtcaagccggcctgcgaaggctccagcgtcggcgtgacgcgcgtgttcaacgaacggatctggacgccgcg

SEQ ID NO: 76786 - DNA, 450 bp, Arabidopsis thaliana landsberg
aaccaatttactcatatttttgtttgcactctgcaatttccttttaattttacacaatatattttcttaaaagggtatggatgttagacataagaaaagctgattccaaccaaatcttgacaatggattaaaacccttattagtttgctgggatttttcggcacattaaaattctctcaaattcgttattctttttcttttgtaaaataaaaccgcacatgcatatgctaaaaacagattccacgaacatgaatattcattctgatttatctatcttcttacttttttgcaattcggatgataaaacataatggatgatgtattaacagcaaacattttatagagtgggttggttgacaccttaccattacactgactatgtaaaaaaaataaaaaaaattagtcaatgatactgcgactaaattcaatgaaagatcaatgagcgtttta

SEQ ID NO: 76787 - DNA, 481 bp, Arabidopsis thaliana landsberg
agcctgccgagcttctgtacggtcgtaggtgagacgcccaatttcgccttgattttccgcactgataggccctgggccttgagcttgtcgaacttcttgaccatagatggatcatcctccgccttaggacgcccaccaatgcgcccttgggccttggcgcgttctagacctgcaatcgtgcgctcagacaaccgtacgcgctcttgcttcgccacggctgcgagaatgccgataacggcctctttgaagatgccagtcgaatcaaggtactgctccgtgaacgagcggtagttgacgccatagcccgtcaaccgttgcagatggttcaacgtctccaccactccctcacggctgagacgatccaagctccagaagagtagtacatcgaactcgcgccgggaagccgccgcgaacatcttctggaattgctcacggtcgctacgcttgccagacgccttatcaacgtactcggaaacaacgt

SEQ ID NO: 76788 - DNA, 659 bp, Arabidopsis thaliana landsberg
  unsure (1)..(659): unsure at all n locations
attatgtgcgtctactctatacatttacacacacaaggtcgggtcagtttatttaatgcagtttcggttcaaaattggataccatttgggactttttaatactggaggaaaaacaaaatgcgacagatttaaaaataaaaaatttaaaaaataataccaggacaatagttatctaaatgtacctatcaaacagtatagttttattttttcgatttaatccagtacccaaatctctgtattattctagaatccagttcattatgtattaatatagaattcatgtttccattattatgataaatcccaacctttagtatacaattctatgaatcaagaattaaaattttcaagaatcatggagtattataaccaaaaaaaagatacgtaagaaaatgtaggtgacattgattgctatataactttaaatatggagagtagaatgattcgtaagattaggtggttgtgtgacctatatttattagacacatcacccactcttctatatctcttgctctctcacgatcgactgttacttactcgtataattgtaattcactaccaaattgaattattgtggataaggaaacagatctactctctttnttattttattcatggtaaatcagtagaataataatctttatcaaaataaaggaaat

SEQ ID NO: 76789 - DNA, 462 bp, Arabidopsis thaliana landsberg
  unsure (1)..(462): unsure at all n locations
actcgttttctttaacctcgtctccccaccgcgccgcccgctttttcattctccctcacttccttgcatttttggtttcttgcacgacccgcgcgctcttctttttcgctgttgcccgagtttctccttctccttcgcctccaagagatcgcagagagaaactcccgacatacgccaccgacgcaccgcacnnnnnnnnnnnnnnnnnnnnnnnnnnnnnnnnnnnnnnnnnnnnnnnatctcgattccctcccccgccttagaaacagccccccctcgctcgctggtctgcccaccatgcctaccattgaggagctcgacagcacggtccgggccttttacgaaggtcgcggcgagcaggtacgctcacctggcttgttggaatttcttcttatggcaggactgtattgaagctgaccctttctttttcgtgtttgctccatgtatagcaaaaagcagctc

SEQ ID NO: 76790 - DNA, 535 bp, Arabidopsis thaliana landsberg
tatcggtcatatgttataaattacaaaacaaattttacaatattcctattgcaataagccaatgggggtttgggtgatcaagtttacatgttttttaaatagtaatgtccttccaatgtttgtaaaatattcatgcgacatgcgacatatcaacattaacggtttcaataactaatcgcaacattaacggattcaataactaattgcaacattaacggtttcaataataataatatccgtgtatgttagaataaatattcatgccacatagcaacattaaggggttcaacatttagtttaatcgagtcatcgttcaattaagacacttacatgtgagtgctctaattgtgacccgtattccatcacaacttgccatgtgaaagtcatcataattatgattatgaaagtcattacacagtcatatatatatatatatatatctagtaaccataataaaaaagaaaataatgttgtttgtttcctcaatggaaaggttctacacagcataaccatagacatttatagcacttattat

SEQ ID NO: 76791 - DNA, 276 bp, Arabidopsis thaliana landsberg
agaaccatgctgataagatttatattgaatgaactttgcatttttctgacatgttagagaaagataagtaaattggtagaaaggggtacatatctcatttgtttataagaaagaattttaattgctcaaaattataatcaatctaacgttatccaatagataaaaaaaggtactataaaaatccccaactaaacttacatcatcaaatttagactatatcactttacagaaccttttgccagtaagagctttcccatttctccacttgccggatga

SEQ ID NO: 76792 - DNA, 601 bp, Arabidopsis thaliana landsberg
  unsure (1)..(601): unsure at all n locations
gcagccaccctgcgtctgctgctggaaatgccactnnnnnnnnnnnnnnnnnnnnnnnnnnnnnnnnnnnnnnnnnnnnnnnnnnnnnnnnnnnnnnnnnnnnnnnnnnnnnnnnnnnnnnnnnnnnnnnnnnnnnnnnnnnnnnnnnnnnnnnnnnnnnnnnnnnnnnnnnnnnnnnnnnnnnnnnnnnnnnnnnnnnnnnnnnnnnnnnnnnnnnnnnnnnnnnnnnnnnnnnnnnnnnnnnnnnnnnnnnnnnnnnnnnnnnnnnnnnnnnnnnnnnnnctcggttgcgcccgcgccctcaaacgcccgcagccggcgccgcgtgaagtacccgagcagtacaagcagatccagaccgatacgccgcgtgtggtgtatcgtcggcatgggccgcatgggccagatcgtcgcgcggatcctgcgggcgcagaaaattccgttcatcgccctggaaacctcggtcgacaacatcgagatgacgcgcatgttcgagcaggtgccggtgttctacggcgacccgttgcgcccggaggtgctgcatgcggccaagggtcgcgaagcggagtatttcatcatcaccaccgacgaccctgagctg

SEQ ID NO: 76793 - DNA, 583 bp, Arabidopsis thaliana landsberg
ctttttttaatttcttttgtccaatatttcttaaaatcgatgttgtatttattgtctacccacgaaatttaaaggggcatgtggattaatatatcgatcagcccactacaaacccttttaaatagactctgaatcctatcaattctttggaagttagtaacgttcacagacttggtcatttctacttgatcagacgtatttttaagccttttaatcgttttattccttcggagtcttggactctggattgtatatatttatcttatgatttagataaataaaaatactgaaagttattccagtactagtttctaggaatatcaaataagccacttgttaacattagtccaccgaaaattctcgtagaaaaacaaacagaggaaaatagtacatattttatttaaaatacagcatttgctttgctaaccttataataaatacatatatcctatttgtcttttgtcaaaactagttctttatatactttacaaattcaaagtaccatacgatattgaactaaagatatcacaacaaatattctttgttacattacaccatttaatactaaaatcacaaacaaatc

SEQ ID NO: 76794 - DNA, 583 bp, Arabidopsis thaliana landsberg
  unsure (1)..(583): unsure at all n locations
aaacagcngcagcatgaaatgctgagacccactcaaaaaaggtgcagcataaaacgcttagacccactcaaacaaacctgccgacgaactttgccgttgcgaaagcgagacgaagtcggagaaatcctgaaatgcgattatgaggaagctagtagtgtcctgtgggatgctgaacgccacctatgtttgccaaggagataactccaccagcaaacatgtcagatgagatctagggcgtctctttaacataaaatccaggcgaaggacagtcgaagacagccacagtgggagagatatctgcgaaacaagatacgcaaccaaccgctgcggttattaccatacgcgcgccaaagccaacaaagaggatacccttgagatctagctgaagaatatgatactaagctatactgatgaaaagttagtaggctcaagctggacttcacgnnnnnnnnnnnnnnnnnnnnnnnnnnnacacctatacacctcactgtctcgcaagaagtgcacacgtgcatgcacatcgaagcatcacatagcccagcctgtgtacctcatcacacngagagtacgagcttgagcttga

SEQ ID NO: 76795 - DNA, 386 bp, Arabidopsis thaliana landsberg
  unsure (1)..(386): unsure at all n locations
attccacatcactatgaaactaaaatcccacgcttttttttttttttctccttggatgttgttagggggggcgttccaaataatttatgcagcttcaacatcccccagtcaacgtaatttaaaaaagaaaatatcctattcttgagcatctcatatnnnnnnnnnnnnnnnnnnnnnnnnnnnnnnnnnnnnnnnnnnnnnnnnnnnnnnnnnnnnnnnnnnnnnnnnnnnnnnnnnnnnnnnnnnnnnnnnnnnnnnnnnnnnnnnnnnnnnnnnnnnnnnnnnnnnnnnnnnnnnnnnnnnnnnnnnnnnnnnnnnnnnnnnnnccatttcaaaaacatttacaatgcccactattttatcgctggcttcccttgctttatcca

SEQ ID NO: 76796 - DNA, 315 bp, Arabidopsis thaliana landsberg
  unsure (1)..(315): unsure at all n locations
aagcccatggtatactccacacaacattctggtacgacctataaacaaaagggtacctgggccggggnnnnnnnnnnnnnnnnnnnnnnnnnnnnnnnnnnnnnnnnnnnnnnnnnnnnnnnnnnnnnnnnnnnnnnnnnnnnnnnnnnnnnnnnnnnnnnnnnnnnnnnnnnnnnnnnnnnnnnnnnnnnnnnnnnnnnnnnnnnnnnnnnnnnnnnnnnnnnnnnnnnnnnnnnnnnnnnnnncactgttgggagctcagagcttttctctgctgcactgttcagagagtcagaggccacatgggagtcaaat

SEQ ID NO: 76797 - DNA, 147 bp, Arabidopsis thaliana landsberg
  unsure (1)..(147): unsure at all n locations
gaaaaacaccaaggggacgggggggaaagggaaggagaangcccccccgacccgcaacagagagaggaggacanaaccaagcacagagggggggcccccaaaaaaaggcgcccccggggccgccaccagaccgagacaaaggcccaa

SEQ ID NO: 76798 - DNA, 267 bp, Arabidopsis thaliana landsberg
  unsure (1)..(267): unsure at all n locations
ggagctggatggacaacatcaacgagcatggcaaagacttttatgttggggcaaaaaaccnaagcgccgggggcgggggaaaaaaacaaacncaaagcnggcaaaggacaggagaaggcgacagccaaagaaaggaaagcccgaaacagcagcacgacgaacaccaaaaagaagacacgggccacggaaaagaaggcggcacccaaacaaaggaaggcccgcgagcagaaggaagccagccgacccgaagccaaaaaagcccgagac

SEQ ID NO: 76799 - DNA, 493 bp, Arabidopsis thaliana landsberg
ctatatattcatcggcgacgccttgatcatgattctttccggtactgtttagaggaacaaaaatggcttcttcttggctggagattgttaaattgtgtggctctcctgtatcgcctccccgccataaatctcccataaaattggaatgtagaaaaagggttttcagattacccaattctaggagttggcatcgtcttagggtttcttcatctgctctcaatggtggtgataatcagtccaaaggtcacgctcttttttttttttttttttttggtgcttaactctctaaaagaagtaattagagttgatttttgattataactgatatttgattagtcaataggttataaagatgtgattttgattctttccctttttggacagaattggttgtgaatagttctctaatagtatccatagttctccaatctctgttctaagtcaaaaggggttttaatatacaactaatcccgtttacttggactctttcttc

SEQ ID NO: 76800 - DNA, 432 bp, Arabidopsis thaliana landsberg
acacattataccctctaaaaactggaatagcgctttttgtgtataagaatattgacggcaactaaacggggacgggcttaattagtgcttaattacttatatttttcttaagacatttgggtgaatgatattattatctgggctgattttctagtggagaaatttggattctcataaagtaaagcttcaagcttaagagttgaactcttcaagacttatggaatgtactctcgctggtcttagggtaatttcacttctccattttctaaagaattactagttcattatatatcattgctttctaattcatttatttctttcttataaattgtatgcattaggtcatgatgtttatcctgttgaatatcacatgtaataatcaatcatcttcaacaactatataaatattttgatcttaggaaagcgactttt

SEQ ID NO: 76801 - DNA, 622 bp, Arabidopsis thaliana landsberg
taatgttttgtacaaacccgaaaagaaaaaaaagacaggcagatacatgagtttgcatggcaaaagtagtcctaggcaaaataaccaaactctaaccaaaccgagaggaactgaatagaaaaacgaaccaaaattcgtaaatatccgaatggattataacttcataactgaaagaacgggaaccagactgaaatattcagcgaatcgaaatacatttatacacctaaaataattagttatttttagaccgaataaccaaaaatactcgaaataccaaaagttaggtggaaacaatatccaaaacaattacttgaatggaccctaaactcaaaaaccaaaaaatagaaccaaactaaaaccggacccgtaaactcaaacgtccaggcctaggcacaaccataacaacgatagtctcttaattagtgtattacctttttctgaagctgtgctatggactctaccatgagctggttctgtgctcccaaaccaaaacaataattactacatgattaggtgtagtttatctatatatctgtgtatatttatgcatacacaaaatgcacattattagatatacacatttggatatacaaaagatccatgcatgtatagaaaatatact

SEQ ID NO: 76802 - DNA, 578 bp, Arabidopsis thaliana landsberg
  unsure (1)..(578): unsure at all n locations
cccttagtaatataagcgttccttgtttcttttcatttttttccttttgcttatttctttgtaatgatgcctgcaggtcctgggcaaaaacaaacttgactgccctgaccttggaacgnnnnnnnnnnnnnnnnnnnnnnnnnnnnnnnnnnnnnggcctcgttcacttgctttttctttctttattttgtcctgataacccggttgtttgactaaccaaaaactatgtgttcataggtgttgaaaaagtggttggctgggctttcggtcaccatcttatgatatgcactgaacctatagttaaagacaacaagcttgttatctctgcagagaggtgagttttcttctataggctgtgtgtgatactaagatacatgtttgatgtataaattacattttggcacgtgttgcagcatttcatatggcctgcagacgttgcatgatattcagaacgaaaacaagagtttaaagaagtctctcaggtaatattatgttacttaatttctttcttcccaagctgcctagtaagttcccgattaagagttggtttactatactgtttcaggatgttgttactg

SEQ ID NO: 76803 - DNA, 430 bp, Arabidopsis thaliana landsberg
aaccaatcagtgactggataatcaaggacttttttattttttctaggactgatatccttaaccgggctaacggcgggatgaaaatgatacaaaaacactacactgacaactggcgtaactacctaccatgccgtagaacctgccacatacaaacagataatgacggtgagaccaactaaatctatgcaaagaaaaaacgagcaatctaatccttctactatataagaaccacatcatataatgctcgctgataacaatgaaaatgatcctacattcataacacatgctaattcactttatttattatatgaataattaattatcaccattaatgatcaaactttactatacattctttattagaaaaaaataaaggtggaacttgctacccttttttatgtattattgaaatttctttttatttcttttt

SEQ ID NO: 76804 - DNA, 579 bp, Arabidopsis thaliana landsberg
tgaataacttcatttggtccatatatatataattttaggttcactaatttcaatcggttattatttggagaagatacatgtagctagtaaactttattatatggtgaaacttaattttgagtcttttgcaacgatttgcttacattacacactagctagataattttttaactataaacatcgatggtactcaaaactcgtggtaatactttagtcatataaacttttaattttatttacttatccgcagaacagtacacccagccaataaaatcccaaacaatcatctccatgattaaaaaagggaagcaaatcaagatgataaaacagaaacatcaatattagcaaaatagtaatttctcggtgtcaatatgaacatcgtttcaatattttttaacttaaataagtaaagaaattaaatagaaatttatctctgcataagtacgtcactacaaaaaagatcattttatagcacttattttgaataatcatgttcctattttcacttaaatttgtttaaagatcagctacgtatttattgtaaaaagttccgttgaattttgttaaaatactaatttt

SEQ ID NO: 76805 - DNA, 600 bp, Arabidopsis thaliana landsberg
  unsure (1)..(600): unsure at all n locations
gttttttgtttttaatatttagtttctatttaagtgttgtattacatgacataataattaatttaaactggaaaaggtgaatacaaatgttcactcctagattgaacctaaaaattgtcccgaaagaaaatatcgtttgctatatagatagaagaagaacataatacagaaaacttggttatttattctaaacttggttataaatcttgataaataattccaactttgttgaagtttgtttttacggtaccaatttgttggttattgattgtatactgtagtactatttctttattttttagaaaagaaatccgacggtacgacaaaagaagaagaaggaaaatggaaggggagagacaagtggcagcaattcacggatacacagaactcagtaagtttttaaaatagtaccaaacacgcccccctttactaaacttcaaaaaaaaaaaaaagattaaaaaaatttgaactttcaaataaactcagaagccatttcccatttcctcttttctccgtcgtctcgtcggggncgctcttctctctctctctctctttcactcaatttcttctctaatcgtttaaattctttcttgggttcct

SEQ ID NO: 76806 - DNA, 566 bp, Arabidopsis thaliana landsberg
ccaacgaagagttgacctgtcactaattttaacaggttgttggataagttttatctaatctaatttgtcaaaattatgtggtatgattgtgtgttatttaaacgttgacgttatgtgtaaatgtatatgtaaatataagttgaaatctagtacttgtttaaaaaatattctgaagatttgataaattctcaagggctttgttaattgaaacatatattcataaacaaatcttagaagttagatgtaacctctgtatttgaaaactcatattgaaatcttgagaattttttttggtcaaaacatcttcagaatttttaaaatacccaagatatttctatgtaactaattaatgttcaagaggttttaatgtaattaatcaaacccgagtatgaatgaaaataacaatgtctacaacttttagtcaatcttgagcagctatcatcagtttgttatttattactataatatatataaaactaactttggaatgaggtagctaacatgtgaaaattcatataaagctacaacttgttctattttatagtgacttctatcagatattcata

SEQ ID NO: 76807 - DNA, 545 bp, Arabidopsis thaliana landsberg
gaaatcagcatttgaatgctacaaggataatctttacatagtgcacataaacattttgcctacactttgtcttacttgaagttctgtcttgaagttctttgtttcttgtgtggttgtgcatttatacactggccccttgtcctctggtgggacttgtgtgtggtggttggttttgggacttacctttaagccttagctttcttgtttgtgaagtgtgaatgttagcattaatggttctccaatccatagggcagattataagacaatacaagcttaggactttgaaaactcaaagattacattcctgtaaacctgtacaaagaccatgcttgttggaggaatgtctgatctctcttagtgtgacagactgagacatacaggaactaggttcagggaagacggggagcccctagtactgcattgatcactgaaatgagatgttagaggtgatgttcaagtggagatggctgtacttgagttcttcattggtgtaagtgtcggtcttacttaccgaccttgggtactgattgtggtcaaaaggaatg

SEQ ID NO: 76808 - DNA, 510 bp, Arabidopsis thaliana landsberg
gcattctctacaatgagcaagtcgtccggactcagctcgtcgaggccactggcattttcgcactgtcgtagcttcacgaggcggtcgtgatggccgcaggcggacagatcgaacgcggccaaacgcgcagcggacgttgaccgcacgaggactcgcagacgctcgacatgttgggctcgcttgcggcggtgtgcctccaacgtcacggaggtcaggtttgggtctgtcgttgccacgctcatgacccccgagcgtcgcacctcatgcggttcgtccgcagaagttgtccacaagccgcgtcctcggctggccggcttctgacgagtcgatcgcagcgtcatacaagctcaatcgtgccgagaggaccgtcgatgcatcgagaggacggtcgattcggagcatttcgcgcagaatcgagggtcctgtcggcaatcgccggtcctctcggcgaaggggcgggtgctttttccgccttgcgaggagtcgagccaggagactcagccgaggacg

SEQ ID NO: 76809 - DNA, 481 bp, Arabidopsis thaliana landsberg
accatctaacaatactaccatccgattccaaataaataaaaaattcaaaaaaatcaccaactttcaaattattttatgatttaatcttcaactccacataagacaaataaatcctaaactttatattaactttcaaaacacattacaaacttttagttgactaaccattagactcatatcctaaaataactaaacaaaacattactaccaagataatgtcttattaatttgataccttaacaaaaaaattttaccgccataactgtcttatttattacatccccttcaacaaaacaaggtcacttatccatactaatgtcctttctattacttacattaactttctttttgcctacaaaaaatttaactactaaaatactacctctcttaaatatcctcaactatctcataagactgaacatcaacttttaatccacacacatacacataaaattaaaaataactctattcaaacaaaact

SEQ ID NO: 76810 - DNA, 187 bp, Arabidopsis thaliana landsberg
atcattaccccaaactcacctttatacaaaaaaatacaaaaaactccattataaaacaacctcccattcattcctaataataaaaaattcacaccatatctatgacaccaaatatccataatatctaaaaaactttaccatctctacctacctaaatcacttttcaccaccacctcaacatcaaatc

SEQ ID NO: 76811 - DNA, 607 bp, Arabidopsis thaliana landsberg
  unsure (1)..(607): unsure at all n locations
caaacttgacgttttcgaagcgacctatgaagcggagtgtccgnnnnnnnnnnnnnnnnnnatctcacaaaggctcaatggggaggggcctacaaaacctctgaaggcaagctgaaggtctacagaaaacctgcggatgcttcgcaaaggataaggcaaaaaacctcgaaacgtgttagagtgatttctccgaaaacggcggcgaggctacagcgcccatgagcacgatgattttgttaatcggcgtcttcttgatcggcaggagtgtgcgctgtggcaagcgcgnnnnnnnnnnnnnnnnnnnnnnnnaatacggctacgtgtgggttaggcgataatatgacttggtaccgcatctctgatttgatggtgtgccgcgaggtgcgctatgaatgaaggccgctttattgttcaggaagaggtggcgcaggcaattcgggctgcgattgatgattattattctgatccgtatgaccgattgcggngcgataaacctcccgaaactgacgtatcatcattagttgccgaagtgctccgtcgcttgtttcaagatcctnccacagagcaacatctttcggatctaatgcagccttcatgagttcgttcg

SEQ ID NO: 76812 - DNA, 526 bp, Arabidopsis thaliana landsberg
aggctcgacgacctgttggcaaatgcattctggatcaccgtcatcatcaccagacccggcaccttaaaatcgccgtactccacacccgggggaaccggggcgcggcctttcatcgcctgcgcgaacaccagcagatacagcagcgcggtaatgaccggcgcgatgacggtctggcccaaaacagaccagaagcgcatcacttctttcttcagcagtgtgacgaagccacgttggtcgggcgtcatttcgcgcctcccgcgacgacgccatcggattttgccgaatggccggtcagttcgatgaaaatatcttcgagatcgggttcgcgcgtatgcacgtgctcgatgccgataccggcattgcgcagcgcatcgaacacacccccaatgggattgatccgtgtttcgagcttcagttcgagtgcgccgtcgacttcggccgtcaccaatggctgcagcgcgtcgggtaaccgcgcgccctcgatcagcttgatacgcagaaaacgatactgatgacgcgcgagcag

SEQ ID NO: 76813 - DNA, 523 bp, Arabidopsis thaliana landsberg
tcggcaggaacacaaaaaataaactacaacattaaagaatgttgaagatattatcgatttttttaaatcagagataaaaaccagcaagtaagaatttttagggtgcttatgatttgttttaactgttttcattataatattaatctccaacaccacatagataatcactttataatacgatatatgcccatatctaaaatttaggttgtaataaatattttggcaattttagttcagactatttacaagattgaagagataattatggttaggcattggggcttataagtcatgttcacaaaatttatgaacttcagttattcaatttgaaagaagggtatccagagttagactgaacaaaatcttcttaactaaattcaaaattataaaaatttggtttggttgtagttaaatatcccttgccgaattgaaccaaaaatttcgaaaatcttgggttaaattctgttggtattttgcttaggctgatatatatttttggcactttcttatgtttcttttaaaa

SEQ ID NO: 76814 - DNA, 324 bp, Arabidopsis thaliana landsberg
  unsure (1)..(324): unsure at all n locations
ggcgctcatcgacaagcacggcgacatcgcagcctcctcgtagctgttagcaatggcaactcggtcttattgcctggagtccctagccgctgtggtgatggagctgaaaaagacggttctgagggatttgacgaaaacgcgagtggcggatatcgcggcggtggtgaaagacatggagtcggagaaaatcaacgtgtcgtggctaaagacagcggtaacggaactggcggaggcggtggaatttttcggtcaccaccacacggngaaggtggagaaagaggtgtgcaatacatatctcacagcaaaaaagggggagatggagga

SEQ ID NO: 76815 - DNA, 638 bp, Arabidopsis thaliana landsberg
tcttactcattagcactcgcaaagaataaaaaaaagttgtatacagtgtatatatatggccaagtacgtaatcagaaatcgatcattaagccttgattatcttacaaaatattttcaaaaatagatttggatgacttattattatcagacgaatccctatagttcaacataagtgttaagtgtatattctggctgtaacctttgacaataaatcgtattataataaaaagaaaaattatactcaagatagtcaaaagctttatttatttcattgttagatccatttaagttttgtaattgtttcattgatgaacaagtcttaacgaagacaaaaaatgaataaataatcgaaatcatgtcgttagaaacatttttgagttatttgatataagttgagaatgaatacattttaaaaaaacattagcaatttatataattgttttgcagaaaacaatattgaaacttcacttcatatatatttatacgaaactttgttttacagcttacccacaaaatttaaaggttaatattccggtagtttggggtaaacacagaatttaattattttttaccatttggccttggacaaaaatatcaccttcacccaaatatttctttttgaacaatttttttttttt

SEQ ID NO: 76816 - DNA, 452 bp, Arabidopsis thaliana landsberg
  unsure (1)..(452): unsure at all n locations
ttatatcgagatccagatgcaaccacacctcattattcctgtcaaataagaaaggtcgttcactcacactggagtcggcgtaacacacactgcaacaataaagccctaattgcgtaaaaagaaaagctagatttatataatttgctactactataagaaaagagaagaggttttcaataattattgtcatgtttttatttattaataaaataatgtaaatgcttttataaagtaaaagtaaagtattctagttattcgtgttaaaaaaaaaaattattctagttattataattttttctgtggattattatagtatatttttaattttatgttttttaatccgaattaattctacttttttttaacttatttaaattaatttataagcaaaaaaaaagtttatgtgttattacganatttttatcaatagtcaaatatcaaatcctaaaaaa

SEQ ID NO: 76817 - DNA, 571 bp, Arabidopsis thaliana landsberg
tgcgacgctttagtcacatttgatctattaatatagtttattattttttttatcacatatctagattaaaggggttgggtgagtatctacccgaagaattgaatttgcgttatgacatgcatgaacaaacataacttaagttatgtgacccacatcacaactatcacttattatctagtattgatttgatttgatatttccagacacttttgtcattgttcgacatgtacatttttctagctgatcaatgtttatttcttgctatatgtgtttttaagtggtcaaaaattcatgtgacaaacaagttgattccttggattttaaattttcttcgttggtttcgttttctcgactgaatttggtatctatgttggaaaaggaaaaatatcacatcaaataaaaaaattaatcaatgatggttattatgttggtcacatatgatataacctatgtttgcttttgtatatgtcactatacaattttattttatttttttggtgctggcaatatcagtcaatgaaaattcacttgaagagttcattcttaactgagatgatactactcctttttc

SEQ ID NO: 76818 - DNA, 523 bp, Arabidopsis thaliana landsberg
cttgccgtcttcgtacaacaccacggcgcgcgcggcggtggctttatcttttgtgggccagccgtagcaggcatggagtgtgagcggcttcagcaccaggcgttgcatcaacaggtcgaagcgttcgccggtggcacgttccatcaccgcgccgatcaacgggaaccccacgttcgcgtagcgccagtaggtgccgggtgcgtgctgcgtgtcccacgccttcggattgtcgatgatgtccttgaactgcccgtcgagcggcgtctgccagtagccggccgcgtcggtcaggctggaggtatgcgagagcagcagtcgcagggtaatcttccggtccgggaacgcggggttgcgaagcgtccacccgagcgtgttggagacatcggcatcgaggtcgagcgtaccttgttccaccagccgcatcacgccgatcgcgacgaccagtttcgagatggaggcgatgcgcacggcatcgtcgatggtgatcccgcgctgagtcgcgggatcggcatacccatccacc

SEQ ID NO: 76819 - DNA, 392 bp, Arabidopsis thaliana landsberg
  unsure (1)..(392): unsure at all n locations
nnnnnnnnnnnnnnnnnnnnnnnnnnnnnnnnnnnnnnnnnnnnnnnnnnnnnnnnnnnnnnnnnnnnnnnnnnnnnnnnnnnnnnnnnnnnnnnnnnnnnnnnnnnnnnnnnnnnnnnntttcatttccntccctctttcatacattatcgttttcagagcaatcaaaacgctctctcactctacacatttgcacaaaacaaatcttcccttacccttcctgaccgttatgctcttaaactactacacgtatattaatctcaactttctccttcatcccaaccttttatcactattctcaactacacatctttcttaatcaatccaatggaaacacatccgtgaggtggatttcgacaaatatctgtctacttacaccacaatctcatcct

SEQ ID NO: 76820 - DNA, 577 bp, Arabidopsis thaliana landsberg
  unsure (1)..(577): unsure at all n locations
gaaaaaccagagaaagaaggattcaccaacgaatttaatgattcaagagaggaatcaaaatctatgggcactggggacgcacaaacagaatcatctcaaatcatataaaaaggaaagataaagcaatacctcttctttctgttccttcaacatctcgtcaaannnnnnnnnnnnnnnnnnnnnnnnnnnnnnntagttatcattaggaaccagcaaattcccaattcggttcaatccctttgaccttaaataagctccaggtagagagaaatcacctttaaatgtaggtgcaaggcattttatgagatcttcctcaacaccaccagttgtcgtgactataacatcaacctgcagaaaaaccattgaaatcaaaactaaagctcgaaaattttaacatctataaaaaagcagggtgataaagcaaaaatcacaaaccatatgatgctgaacaagataacgaatagtatctctaacaccagatgaaacaagatttgaagtgaaacctagaaagattttacacttgacagactctctaaacgatggattcttctcctcttcactacagtcttcagctact

SEQ ID NO: 76821 - DNA, 174 bp, Arabidopsis thaliana landsberg
ttgacaaatttataccaagacaactttatgatgtcccatttgtgatttataatgaacaattagtaattaaggcttctggggtggctttttacttacgctaacgcaatatacagagttggaacaaacatttgtcataaaacatttcttacaataataaccgagtcaaacatatta

SEQ ID NO: 76822 - DNA, 551 bp, Arabidopsis thaliana landsberg
  unsure (1)..(551): unsure at all n locations
aagaaaaatgcggatcacagcaatagaaattgccgtcaatttatttagtgaaacaagagaacctcttttgggattggattgcaaccttaaaccaatccaccattttctcttattcacataaaaaatagagttttaaccatctatataaaccccacctcacctagaaagtaaaatcatcccaaaaggagaaaaacaaacaaaaaacaaaacaaaacaaaaaccaaaaaaacaaaaaaataaatggcaagaatttcactagggatatgtctgatgttagtagtagcatcaagtgnnnnnnnnnnnnnnnnnnnnnnnnncttactaaaccattacttgaagaagaattttccaaaaaaatgcaacgagtttacgccctacgctaacaagggtatgataacgttggtgaccgatctcgaaggtagcagtccggccactaccagagtttaagactttctttacacaattcaagtcttacatgtctntcatcgagacaacatcggcctcaacaaaaaatgttgatgccgagatgacagctaaatgtgacngtcttt

SEQ ID NO: 76823 - DNA, 830 bp, Arabidopsis thaliana landsberg
atccacacagtttggtcattggtgaaacaccaagtatgtaatatcgaataacaaacctaactactttactaaacattcaaacggatataataaaggtgggatgacgaatcttagaccacatgaaatatatttgtataacacgtttatgtccaaaaacaaatccctaggatccccatatcgagtctctatgaccatatgccaggaaaaaaattctacgaccccgcttcctatattttaaaatatttgcattttttaaataaatggttaatcaacttttggccttttttttttggttttttaatataggttacacaatctatatttagcccccaaaaaaatataataaaaaatacagtttttaagttggacaaaccaaactgatcaacaatcttaaattacgccaaaaataagtctttttcctatgaattgccttcttattaaccgcaacattttaaacatcaatgccttattctaagaagatctatacaatcaattaagttactgaaattaaaagaaacaacatattttttggcgttgataaatagggatacatattgcaccctaatgtccccaaattccgaatttaaatggttgaaaaaaaaaaaatttataccgggaaaacagttttttttttggcccgggggcacccaggtattatttgttttttgccccagagggggggacttttggaaccccctgggctttttttttttttgtgaaaaaaaaggggggttcttccctttccgaaatttttatttagttttttttggggggggaaacacccaattttttaaaaaaattgcccgggggggggaaaaaaaaaatttttt

SEQ ID NO: 76824 - DNA, 654 bp, Arabidopsis thaliana landsberg
ggcatacctcatccagctgcaggttcgccgccagcgcgatcgggccgagcgggcagtgcaacgccagcgtcactttttaggcttcggccatcgccgcgatcttgcgcgtctcggtgatgccgccggcgtgcgagggatcgggctggatgatgtccacgccaccggtctgcagcacgcgcttgaagtcgtagcgcgaatacaggcgctcgcccagtgcgatcggcgcgggcgagattgcggccagttcgggcaggcattccaggtgctcggacagcaccggctcctcgatgaacatcagcttgtagggcagcagttcgcgcatcagcaccttggccatcggcttgtgcacgcggccgtggaaatccaggccgatgccgatgtccgcgcccaccgcgtcgcggatcgcctgcacgttctccagcacccgctcgaccttggcgtgcgtgtcgacgtactgcatttcctcggtggcgttcatcttcaccgcggtgaagccgcgcgccacggcatccttcgccgcgcgggcggtgtcggccggacgatcaccgcccacccacgagttcacgcggatgcgaacgcgcaccgggcccgcgagcattttcgataccggccggcccacgttcttgcccttgatgtcccacagcgcctggtcga

SEQ ID NO: 76825 - DNA, 566 bp, Arabidopsis thaliana landsberg
tatgctaattgggttatttagggtttatagctatgttaattttttctttatcacattgcttatttagggcttgggggggactttatttgtgccaatgcgattcaccaaaaaagctcgagattttatcgatacaatcagctacacttgtttttgttgatcttgtacaacgaatttaactgttctgttgattcatcgcttgaatgcttatatatttaatggcgtttgtggtgttgtggccactctttgcttttgagaagttccaaaggatcagtttgaacattaattgttaattaagaacaataaaagtgggtcgttgtaatattaatgttcttgtcatgacagtggaggcactagaagaaacgattgaggaaactaactaaagaggatgcacgagaagatgagacagacatccgattagtctccaagctataatgacgtacatcttcctacacttggaaaactccaattaattatcctctaccccgcttttattattacgtcaatattctcatccaatcacatgtataaagctcatagttcctttgttagtaactattctcacattg

SEQ ID NO: 76826 - DNA, 197 bp, Arabidopsis thaliana landsberg
  unsure (1)..(197): unsure at all n locations
accaacnnttttaacctttcggcaccgggcaggcgacagggcccaaacgaggncacacaacgacggggagaccnngcgccccaggaaaacagncgcccgggcccggncacngcgacccccaangcgaggaggcaccccaacncccgaagaaacagggccaacgngccgagaacccaagagagaggagncacgcgccc

SEQ ID NO: 76827 - DNA, 504 bp, Arabidopsis thaliana landsberg
  unsure (1)..(504): unsure at all n locations
gcgctggaattttgagaaagcggcaacatttccgtcatttttgttttatctcgtttgaaccgcatcatccgggtgccgggccgcgtcagccaggccctggtcgcctacaggacgcacgatgtccgccacgatcaatacgccgccgggagcaagcacgctcgccatatcgcgatagagcgcctgcttttcctgtgcatcaagatggtgaatggacaacgaagagacgaccgcgtgcggtggcctatcgaattgccgccatgcgaggtcggcaagatcgaatgacttaaccttcaacctgtctttcgccgcaccacaggtctcgattgtccggcgttgcatttcttccgagccgtcgagggccagaatctcgctgccttcgaaacgctcgagaattgccttgctcagtagcccgacgcctgaacagagctccacaacaaacgacgatatcggcgccggtgtcataagttcaagtacgatntcaatctgttctttccgctgcgggac

SEQ ID NO: 76828 - DNA, 476 bp, Arabidopsis thaliana landsberg
  unsure (1)..(476): unsure at all n locations
acgtatccaataggaacttttaattatctatcatcaaagtctttgggctgctttacgccttattacggaggatttacgtgtaatgaataagggctcgatcattaacacggggtcaggagcctgatcttgatccacaatgcgggttgtttgaactgggcaaaggtttcagctgtgaccaatgctgttgctagtctatcttttgaagttttgaagatgaccaccggttgcaactttaatcaccaagcggtcatcgttattaacgtatgaagggagcatgctctttttttcttttttaagtcttttttttgttgttacgtattgttaatatttacgcaaaaaatatgttaaattcttcccgcnnnnnnnnnnnnnnnnnnnnnnnnnaaactttattgtctttagactataaactcggcagatctaaaatcaactatatgagataatcactgagaactaaatgttatgtgttggatttc

SEQ ID NO: 76829 - DNA, 541 bp, Arabidopsis thaliana landsberg
  unsure (1)..(541): unsure at all n locations
cgaacagcaatcggcctagccgccggagcgtgcagctgcgatcgtcagcagctttcgtttcagcaacatgcgaaacactcctcgcacgcgtggcgtggccatccgttcgccgcgcagtctccggcccacaatccgtcgacgtcgacgtactcgtcgcagctggggcaccgttcacggctgtcatccggactaggcatcgagctggccctcgtcactgcgcgccgacgtattccaggccgtctttgcgatcgaccgccatcaacagcatcatggtgcggctgatcaggcggtgagtggtgaagtaggcccgcagctcttcgcgcatggcggcggtcagctccggcgacagcgactcgctgaggtgcccgaaggtgatccacgcttgcttctcgccgatcaggtcttcgtggctctcgtcggcgcgataaggcatgcccgttcttcaatcagcgcagatcgacatcggattctccgctgtcgaagtcgatgtcccagttggggtcccggtcgacggggccggataccatcgncggctcgatct

SEQ ID NO: 76830 - DNA, 207 bp, Arabidopsis thaliana landsberg
ttctctgttttcagcgcttgcggccaggtcgtaaacgcatgctctgctttttaaatacccatcttcatcctttttttgtccttttccttggctttgttgacttgattgaatgcatatcctgctgggatttatggaaatctcctccaaacatatacaacattaatcttctccttgaatttaaattttttaaatggatcttgagtttaa

SEQ ID NO: 76831 - DNA, 305 bp, Arabidopsis thaliana landsberg
gtgtgtttttaagattgaaaaactttttttgttacagaagtaacataatggtaggaaaacatttggcaaatgccactatgaaaatggagctaaatggtgatcacccataagatagtgactgtggtcaactggctatctgtatcgattaatgggcaattatattaagcagttggtgaatatgcaactattactgaaatagatcaaatagctattgaattattcttacaaaatctttataaattctaccaaaatgctgactttaaatgactgagctcataatgtttctatagacaactagaagttgt

SEQ ID NO: 76832 - DNA, 200 bp, Arabidopsis thaliana landsberg
aagacaaagactatatggactggctaaaccatatttttaagcagaaactggtggggtggagcaattatgagctcgtatatgtataaactaaaccgacctatctaagctagtggttcttatcagatcaagataagactattggctgggtacataacttggacagaaacttgttgttttgagcaattgactgagctggttga

SEQ ID NO: 76833 - DNA, 624 bp, Arabidopsis thaliana landsberg
  unsure (1)..(624): unsure at all n locations
gaacaactgcagaaaaaagaacaggacctccagaaagaactacaggatctgaatcgccagtacaccgaaacacagaagaggaaaggagtannnnnnnnnnnnnnnnncctcatcaagagcaagatcaacaaacgccaggaactcgtcaacagcatcaacaggcaggtacgccagctggatgagaccatcttccttaatgaaagggatatctaccgcctgcggcgtgaactggatacgctgaaagtgaaatacgcccagagcattgtatttgcttacaagaacaggggcagctacgagtaccttaactttttattctccgccagcagcttcaatgatgccgttaagcgtgttacctatctgaaaagctatcgccgcaaccgggaaacacaggcggagactattgttaaatccgataagctgctgcaggaaaagatcacttcgctcagctccaataaaaaagaccgactggccactttgcaaacacagagcgagcaactgaaagtgctgcaggaagacaggcaggagcaggatgcggtggtaaagcagttgcagggaagggaaaaagagatcagtacacagatacgcgataaggaaaaacaacgccagagagtgcagcaggcattc

SEQ ID NO: 76834 - DNA, 367 bp, Arabidopsis thaliana landsberg
acacagtttcgaactgactcggataaaaaagatatactagtaggatggtcgaaaggccaatcagcaaattgtgaggaagaaccgcacaaacgctaatacacagctgaacattaaccaacgaggagcgactaagtcactacacattcaacagctgtatatatacatacccaatgtgcacacattggacaattgtggaaacacatgagaataattaaccatatcaacccatatcgatcgcttgtctccatgatatccaacttaggatacacgcaactacacttgacctttcgacaattcccagaggagatccggacctgagcttaatagtccctgaagtctagagataccttctcattatgctacttag

SEQ ID NO: 76835 - DNA, 578 bp, Arabidopsis thaliana landsberg
  unsure (1)..(578): unsure at all n locations
tgcatgacttgccgtagcgcggcttcccgcgcggcggcgtcactgttttgcaatgcgcgatcgaccgcggcacgcaggggatccagcggcagtcgcagtcgacggctggcatcgacgacgaaacgttcctgtgcgtgcctggctgcattcatgcgggcaagcagccggcgcagtgccagggacagcgaggcgagttcccacggcaccgtttcatcgtccggcaggtcttgccgcggcgaagcgggatcgagagaggcgaccagcgatttcaacgcccgcagcgcggctcccaccgcgagccaggtcaccacgatcaccgccagcaggatcggaagctgcacaagcgtcgccagccacaccagacgcgcggcctgcatgcggcgtggcgccagcggctcgccgacggccaccgcagcggctccgccatgtgacgtcgcaaggcgcgccacccgggcggngccatcgggcataggcagatcgtagagagctatatcggccgacgcggcctttgcgcctccggtcaggggcgcattgcccgccacgtgcgtncctgtcggtcgacgacctggaagtagagc

SEQ ID NO: 76836 - DNA, 526 bp, Arabidopsis thaliana landsberg
tgaagtctaagtaacaaaaaagtttgtctgagtctctttggataattttaaagaagaagaagaagaagaagaagtagagggaggagaagatgaataaagatttttattgttcaatggaattagatttgtgtttccttatcttatgggtcttatcaaatgatcttgacccttgattcctgggagaaccttctcatatatctgtactgtgaaagttaatttatttatctaacctcctccaatgctttgattgttctcttctcttctctctgctcatatttttaattttattaatgaaaaattgcacattatttttcaaaattcaagccatgttgttgcttggagatggtgcagtggacagttcagtattaatagccgttgtccccgggaagaaaaaaaaaacgaatttatgttttctgagaggagagaaagagaaagtgtattgagacagtaaaaatcaaattgatgttaataatgtaaaaagtgttttttactaattaaagcacgtagcttttaatgggaggattga

SEQ ID NO: 76837 - DNA, 114 bp, Arabidopsis thaliana landsberg
tcatgttcatggtttgatcattatccatctccaattttcttatcatcactgctaagtcttcttctggacgtggtttaacatctatactactccactacccccacaactaataat

SEQ ID NO: 76838 - DNA, 588 bp, Arabidopsis thaliana landsberg
  unsure (1)..(588): unsure at all n locations
tttccaagcccctgagctggttggtaaagaatgtgtggaccatatcattttcgcgatttgctgtggggataatggaatgcgtacgtgttaagggtgaacagaacctacgacgggatactatagcgcgagataatcaataggcatacctagggacaagaatatacgtaggtaagtacggagtagtacttcctgaaaaggaaactgtaaatgaaggtctggggaccgatggaagaatttgtcataccgcgcttgaggcttgcacatcatcnnnnnnnnnnnnnnnnnnntcattagccaggctagacaccgtgtacagtaaaccaataacgtgaagatgaccccgtattgactgcagttactagaaccatcacattgattttaggcggtcttattgtgcctcatgatgcaaacatgctgtggattcccctagatctctcgagtccggcttgctgtagccgtagtccgggataaaacgcgcagattccggcgtggtttggttgggtttagttggtttgagttgggtgcacagtcatagatcggattttaataagcggagaatagcccgatgctaatcctgcacagggattc

SEQ ID NO: 76839 - DNA, 460 bp, Arabidopsis thaliana landsberg
ttatgaacgaaattgacttcataattacaaatttcacttttaccaacgacaggaaaaaagccatcgtagactgtaaatttcatcataccaaagcattctcacaacttaacttcctttgtggggacctactacataaactatatctttataccattatataccattcaaaataactatacatcaaacttttaacaaacataaagcttcaatctatgcaattatcaatactgattactcaattccaatcctagatatttacataaaactaacacatcttacctatatcttcactattaaaaaacatatctcatatctgataacatacataaatgattaaccgaaattaaccaatatacaagctatcgatcaatccaactaaactagttccatccaacgaaacttatccctttatcacccacattttcatgcactattgaaaaaactactcgtttatctttca

SEQ ID NO: 76840 - DNA, 389 bp, Arabidopsis thaliana landsberg
ctgctacatagtcaacttgggatgcaaccagcaatcttcagtaatttagagcaaggaactagagcagatttctcaagttttattccattaacggaaacaccaacatgaaaagtatacacttagatattctgtattaaacaacgggaaggatctttctttattgagtatgtgacgatacctcctttttcatgatctaaacacaacacacactagtttcgagtttcatcaaagttgagaagagttattggcaatagccccagcttcagtaagtagaggtacaagcttgccttgcttgttggtctccatcactcctgcaaaatttagaagccatacgaaaaaccgcagttagttttcccgcaacccgaatttccattattgtgcagagaatt

SEQ ID NO: 76841 - DNA, 427 bp, Arabidopsis thaliana landsberg
catgggaagatatatcctcctatccacaatatgatttttatcttttgtctgtcaaaaaacctggatgcaggggtgaaaggggaaatctcacatgtgatgatgcctatagcaggggaggcctttgggacaaacctttatatcagtcagttatctagactcgcccagcctatagtctccttctctatgatcagcgaacctgaatgtgatcctgaaggattagcatgatataccaagatacgagcctgacctattgattatgttcatgaatatctattattatttattgcattggacgggccagcccgccttgtgctgcaaaccagaatcgatgtcgtgccactatactctgtttgggattcatctaaattcttatgaggagatccaccgcgcagagtgtatgcattgcacatgtatgtgcacgatcaac

SEQ ID NO: 76842 - DNA, 480 bp, Arabidopsis thaliana landsberg
acaacaaccaaagcaggaaggatgggagaaacaaaaacagggcaaaccggagccaaaagagactgaccgcacagaaccgctcccgaggccaagggagcagagagcagacaagccctggcaaaagcagccgagacaacacagaagggagagataagggggagccacactgagcaacagcagactggaccaaggagcacgaacgtcaaacacacctgcacatagacagggaccccagaccagcccagagacggcagagagaagaccggcacaacagtgacacccgctgaaccccacacagaaaacatgccctacaaaaccaagagcgaaaccaagaggagaccgaagaagaacaaaaggagagcgagagagaggcctaacacttaacatcaaaagacgaaaagaatgcaagcacacacaaggagatctactgacaacaagacaggcaaaacaaccgagagaaagaaccaaaccagggaagcc

SEQ ID NO: 76843 - DNA, 622 bp, Arabidopsis thaliana landsberg
  unsure (1)..(622): unsure at all n locations
cttgtcgttatgcaactgcgacgactaatatcngtctctttagcattctgacaatcctcaactcgcaaaaagtcggcgactttgttattgcaatcgcttatttctcgatcccaatcgagctggtttacttcgtgagccgcaccaatgtgccttcaccttacaattgggtggtctgcgagtttatagccttcattgttctctgcggcatgacccatttgctcgctggtttcacctacgggcctcactggccttgggtcatgacagctgtcactgtcttcaagatgctgactggtatcgtctctttcctcacggcactctcgttagtcactctcttaccattgcttcttaaggctaaggttcgtgagtttatgttgagtaagaagaccagagagctcgatcgtgaggttgggatcattatgaagcaaactgagacgagtttgcatgttcgtatgctcactaccaagaataggacgtctcttgatcgacacancattctannnnnnnnnnnnnnnnnnnnnnnnnnnnnnnnnnnnnnnnnnnnnnnnnnnnnnngatcccgaatgagaacacgacggagatgaatctaactcatgagttagacccgggatttgtgatgagaatg

SEQ ID NO: 76844 - DNA, 569 bp, Arabidopsis thaliana landsberg
cacgacaaagaatgttaaatccttcactctttctcctttcaaacttacataatcttccttacttggcaataaggtgtctgggtcgatttttactcattcccatcactctcatattgatatacctatgtgtgtttatatttgcacatatgatctgtgggcttggcttctccatatgtacaaatatacatatactttctatacgtctccatatctgtataattttctatacataaaatgtgtatttgctatcttaggggcctatatatgaattatttgatgttaattaatatgagaattcttgtaattaaactatcaatacactatatatgcataatattttaagaaattaaagtatggatattcatgctaaatagactaaaatatttgatatgacgactatctatataacaaaatataattattcaataaaatactcaaacaaaattacttgtatgatccaacctacgatccaaaagcaagcctgaaaaattgagagtttagtatctccaaatctattgcaagatttgatggtcaacacgtcgagaaaccttttctctcattttttcact

SEQ ID NO: 76845 - DNA, 585 bp, Arabidopsis thaliana landsberg
  unsure (1)..(585): unsure at all n locations
ccatgcatgagaaaaccaaaaaatggagccaaaacttagatccgtanctttttgagcaggccacgccaaagacggaaacatttacaataggagctccatataagcagaatacaaccaatgccacgctgtaacataaacaaagacagcgagaatctgttaaagatctctcaggttccaaaacaaaactacaagaccccattatgatgttactgacatttaactaaagccttgtgctagttgatccttaaggaagatgtcctgtcgtgatgctcagttttatttcaaattcatatatacgtgtgtgtgtgtgtgtggcgatcatgattaataggttagagacagagagacaaaagttgtgggctttaacaaaccccagtaaagaacaataagtaattttgtcacgtaggctctggttttggctcttcaacacccaaagtacctgttttttgaagatgtgagacataaatttttacttatgaagctcaggtaataaactcatcaaatctggactacccacaattcaaacatgaacactagctacctttacatatagagtaaataacccttcatctattgagaaaaaca

SEQ ID NO: 76846 - DNA, 346 bp, Arabidopsis thaliana landsberg
cccggggaacattaaagtgaagagaccctaacccttactcagactcctttttctttcacaattactacatattgaatagaagatgtttttattagttaaatgtgaaccacccaagctgcagaaacgcattaacaaaacgtaagcactttagatgcgtagccatctcttgtatgtcttgagactgtgatagtgtaaaggaagggcctttctacctaatccatcgatatggggatcagagacacactacaatgacagagagggaaccatcacatagcgatggcttaacgctgatcgccttcactaaaggcgggcaagtactacccacactttaactcttctaatgcag

SEQ ID NO: 76847 - DNA, 142 bp, Arabidopsis thaliana landsberg
caccagctcgtatgctcacagctcaccactttttaatcctgttttttatatgaccaaccaaagagggtggatccaaagaccggatatatgaatcacctagaggaatgccacacattccttcagtgccaaagcatgcgtagtt

SEQ ID NO: 76848 - DNA, 372 bp, Arabidopsis thaliana landsberg
acagtaagcaatatttagtggtgcatgtcaagctttgtggagtctattttagaatccactaacgtagaggtcattttaatgttcatggttgcagatgtggaatcatttttgcttggcaacaagacgtggaatcatttgataaacggaaagattgaatcgttatatctgtttttcttgtcttttgaattgctcttaaaataaataaaaaggttattcaaaaaaaaaatcagatgaaacaaaacaaaatttgggagaaacgaacgaggtggagaaggcatcacaacactgaggccctacccatgtggtactgttagctcattggataaactttctattcgttgacccttgaatccgtttttctccttctcattc

SEQ ID NO: 76849 - DNA, 197 bp, Arabidopsis thaliana landsberg
aaacatagagggaacaatatctgtataacaatgtctatataaaatctttcacacttgctctggaaagattaaacacttagtcctttttaaagcaacaccgcgaaagctacctcaccaatcccacgtgttcgcgtaaactctgaggatttttccaagtatctaaacccttcattacaaacgtatcattcccaccttta

SEQ ID NO: 76850 - DNA, 473 bp, Arabidopsis thaliana landsberg
tggacacaagatctacgtatagtgtttgctggttttcttttttagccatagatggacagatgaagcgatatcggaaacgtttggtgtcgtctgtttggtgtcttattaagctgtaagtaacggaaacgttttattttatttataggtttatgaaacccttgctggaattaaagtcgaagggagacttcctgttctgaagaaacaagacctactgaaatctcttccagctgaatggccttcagaccctacaactgacatacatagactaaatatgggaaactcgaagacattggttgttcttgatgatgatccaactggcacacaaactgttcatgacgtagaggttttaactgaatggttagccttgcatctttctctatgaaaaactgaacttatcgtgtcaacaaaaaagatatcatgaatctttcactgaaataatttggcagtcgctagcctagaaactaaatggaggg

SEQ ID NO: 76851 - DNA, 401 bp, Arabidopsis thaliana landsberg
gtgacgtttggaatcgatttgagatgcaaatttgttaacgataatcgctatattgggtgtatggtaagttggtccgcgtaaactgacggctactggacgatttggacactgcaaggaatgttactatctcagagtaagtgtgggcgggatgagcgagccttacgggatcttgaatcctggttgggttcgtgtcctaagccggagtttcttgcgaagattgtggatcatctactccccactctaggggatattctatctgtggttgatgcacatgcatactttgctagtagcaacctcactaatttggtagactacagagtggctgttgatgaccatgaataagatgagaatttggaggaggctatttcacctaccattggagtggttttgtcacctactac

SEQ ID NO: 76852 - DNA, 476 bp, Arabidopsis thaliana landsberg
taccttttgcatccgatggcatacaacccagcaggctggtagctttggttctatctggagacaagcttgttaatacaggtgtgggaagcacaatgcttgagacatcaatccaggaacctacgctattgttatatccaaggccattgtttgtctggaaaacatccaggtgaatatttgttgcctgtcccaggccggtattggtgatcaataatttctgaacgctggcatttccggaaccaaggcaagggttcatgtcagggtttatgggtgtgatttcaatattaggaatcaggtttggaaatatcacattgccgcctgatgtagctgtctgacagacctggctgttgcattcccagaacgtactaaaatttgacgcaaccccgatacagctggttatttgcaccgtgtcacaaaaagtgatggattcaccttgttcaaacaggttgttggtattgccaattgatgcaaagttcgta

SEQ ID NO: 76853 - DNA, 146 bp, Arabidopsis thaliana landsberg
gtatatttgttgggcgatgatgggacgaacaaattacggtatttatggacaaacgctaataaaaatcgaggggcgaaaacgaagatgggttgcgtacttaccctctggattaataagggaccaaaagctgttgaaaggaaagcatc

SEQ ID NO: 76854 - DNA, 488 bp, Arabidopsis thaliana landsberg
  unsure (1)..(488): unsure at all n locations
nnnnnnnnnnnnnnnnnnnnnnnnnnnnnnnnnnnnnnnnnnnnnnnnnnnnnnnnnnnnnnnnnnnnnnnnnnnnnnnnnnnnnnnnnnnnnnnnnnnnnnnnnnnnnnnnnnnnnnnnnnnnnnnnnnnnnnnnnnnnnnnnnnnnnnnnnnnnnnnnnnnnnnnnnnnnnnnnnnnnnnnnnnnnnnnnnnnnnnnnnnnnnnnnnnnnnnnnnnnnnnnnnnnnnnnnnnnnnnnnnnnnnnnnnnnnnnnnnngccttgcaacttttgaaccacattgcccattgcctggagcttggtgatagctgttccctgccatagtgtctcctaacacctatgtggttggtgcatgatgcattaggttaagtgttaccggtttccgaccactatcggcacatattgtgtacgagctacgagcttcagacattaaacttgatccctgctatattgctaattaaaaaggaagaaggtgggttttcaacatt

SEQ ID NO: 76855 - DNA, 358 bp, Arabidopsis thaliana landsberg
  unsure (1)..(358): unsure at all n locations
nnnnnnnnnnnnnnnnnnnnnnttgtaaagatgaagcttttttcttttcatactggtctaacacggtaaggggctggggatggttctgaagatactgcccgtagaccaccttttgttaaagctgccctttcattctctattggtcagcgggcttcacaccgggcttcacaataattctttacctattcgccgtacattacctttttatgaaaaaaatggcattgatgacataagaagatctccaagttattgccgcagccagagccgtgaatatcctgatagggagagggatagggaccgaaaccggtcacagttcaaagacatggatcgggaacctgatataaacagggatctggaa

SEQ ID NO: 76856 - DNA, 571 bp, Arabidopsis thaliana landsberg
taaccttagaaatttgcccactttctagcattgctctcaaagtaaaggtgacgagggcacctggtccttgatgaggcaaaagctgctgatatctataaacgtacatttaaataattttttccaaggtctagaagaaggtaatttgttaatttgtttgttcttttcgtttgttttcggctatagagtttccctgagagaacacggtgacatgcgttgcagaaacaaaaggaacaaaagcaatccaacgattgactcctcctggaaaagactctcctttgcccctcggaggtcaaaatgggggattggatgatgcatcatggaactctgaacaattgattgtatccagagtttctgcacttatgttctgcacctcaacgatgttaactacctcgtacaaatccaaggtagtgagatatctttttctgttggattatttatgattcctctaaattttagacctggagagagttagctttttcgtacgtagtcgtaaatcgataggtgtgcaatttgggtgtctagattaacgatcactgttaaagcatcaagttaagcatgcccttgcttatgc

SEQ ID NO: 76857 - DNA, 340 bp, Arabidopsis thaliana landsberg
gagaaaagatgctccatagaactcatcaatacacacaactaatatatggaccctaattttaaatgtcctcaaaacgaaaaatctcgacagaaatagtctaattgcgtcatattacagcttcgtcttcgggggcatttatgtcaaacaacatccccagctacataattacacctcctaagtaaataactccgccttgaggaaaaaaaactaaaacggctctaaattgaaaacaaaagaagagagagagagagagacgaagaaacagagagattctctcgaaaatggccaccattagagtaccaaacgaagttccttcttcagctcaggattctgaaactct

SEQ ID NO: 76858 - DNA, 348 bp, Arabidopsis thaliana landsberg
agaaattactgaactttcattatacattttggttttcatacctaatgctatcgttaaggagtcttgtcaaaccttgtttttggagtaccagaaatgttatcttacattcaatatgatgttgcataatagctacacctttgttattcgaggcctttatccctttcatgaagctgataattctaggtcttaatagcaatgcatacagttctagatcattagtggtctatgattatctgatatgtgagaaattttaaatttttgatctattctactataaatggaccgcattgaggtagcgatgatttctgtgcttatactgcgttgtacgttcaggccttgttatatgag

SEQ ID NO: 76859 - DNA, 615 bp, Arabidopsis thaliana landsberg
  unsure (1)..(615): unsure at all n locations
acaacatgcaccggttttaaatgtttgtatcagttgtagactttgttgctttcaatttttttaataacattactggttttggtagcttaattgtttgtttttttgtctgacggcgttttaatagctttaataatcagttcttttgtcggcaaattatagttttaaaaattaggtacatgttaaaattttgtatggcccgtgaaagaattgatgagtaatttttagtagagagcatatatcattaaaatagagagcatatattatacaagttgggggtgatgggtcggtccttgtaatggcggccagcttttttgaaattgaaatggaaaatgtcttattaacatttgcataagattccactaacgttgtgatcaatgatgatgatgtgatttaatttatatttagctaacttataatttctgttaaagaaaacatgataattatccccaaatataatttccatctagaatatattcctgcagaatttgatggtgaaaaaaatggaaagtgcggacgggtcaatcacaaaatattttattccttaaacgtctaaatttgattgattgcgtttctactaattacaggataattatacttnntcttaactatttattt

SEQ ID NO: 76860 - DNA, 220 bp, Arabidopsis thaliana landsberg
gaccagagagtccgacatccgaacaacccaccggaccccaaaacccagaaggaacaaggaagcacagagggggaatcccacgaggaagcaccgacgaccgaacaaaataatcagaaaaggggccgagcgggagcctgccaagcagaacccgcaagagggcgaactacgccagagcggaagaaaaaccaaaaaacacccgagagaccacgcaagcgacaca

SEQ ID NO: 76861 - DNA, 526 bp, Arabidopsis thaliana landsberg
ctttgggctccggccactcgaaatgtttcaacactgctttttcatcattcttcaaagatacaacaacaaatggacaaacggtgaactaaataattccagaaactctgggaaaatttgaaagtttgattcataccaggtaagagagttcgccgtcgagccatttgacgaaaggaacaacgtcttcaatgtctgaaaacgcagcgcttccgacttctttgatcaagaaccttatgaaatctccttgcgtttctacgtcgggttttatctgcaatgttcgggttaaagttaaatcaaaccggtttatgattttaaattttgaacgttacttggaaaaggacgaggaagaggtggcatgatcagtcaattcttactgacgcaagacagtcacagaaactaaaccgaaatttactgagccggttaaagagaaactattaccgcgaggagataaaccgagcggttttcgatttctacgatcatgtctctggcgttggagttagcaagtattgctttcgcggtagcgttttca

SEQ ID NO: 76862 - DNA, 411 bp, Arabidopsis thaliana landsberg
aaacgaagtcattccgaacttcccccagataatgcttaaggcttgtcaacgattcgttctaggacagagcggtgagcattcgggctaccgtaggcgcgcaactcgagctcgtcgagagcaaatcgaattggtgcctctcgaccagcgtttctccgtggtttactcgtgctaggccgttggtacccaggagcagccgacacaccacggagcccatcaatgcccttgatcgcgccttcgcggctaaccttatccggcactaaaccccggcttcgcgcaactgcagagtgatgtccgtctggtagatgacagcaccgtcagttgtaggcaccaccttacgagtgacctcgctgaggccattgatgtacacggcgtacgtcccgcgccggtacgaggggctcaaatacgggtcga

SEQ ID NO: 76863 - DNA, 568 bp, Arabidopsis thaliana landsberg
caggtaatacgcatgcctatcgggcgcgcctgggaggcgcttttctttatgaaatcgcctgccgttcccttgggctcaaccccacacgcatcaagctgtcggcctttaccatgggggccacgtttgcagggctgggcggggctttctttgccgcccgccaaggtttggtcaaccccgaatcgttcactttcatcgagtccgcccttatcctgtccattgtggtgctggggggcatgggttcgcaggtgggcgttattctggccgccattattcttaccgtcgtgcctgaactggcgcgcgaattcgcgcagtaccgcatgctggttttcggtctggtcatggtggtcatgatgatgtggcgcccgcaaggcctgctgcccgtcaagcgttggcatatggaactggaatcatgaccgataccttactggaaatttccggcctgaccatgcgttttggcggcctgcttgctgtcgatgcagtcgagttcaacgtaaagcgcgacgaggtttttgccattatcgggcccaacggcgcgggtaaaaccaccgtctttaattgtgtgggcggg

SEQ ID NO: 76864 - DNA, 500 bp, Arabidopsis thaliana landsberg
atcacaaatttatggtcttttctaaaccaacgtcagttttttcatttctccaaaaaaactacatgaatgggaatttggttttatctacaataatacgctttaaattgacctagataattaggatcagagtaagctgcactaaactaaaagagaaaaatgttagaaacaaaactaaaaaaagaaagaaagaaaaacaattcttcttcttctccgatggagacacacgttcctccaactcgaacaaatggatgcatgcctcacagtgggtccattcaatccgatctgaaattaagcagactcaaaattggtccgagtgatctaaaccgaaatcaattttaattatgatgagagtttgtcgaaattaataattagaagggtcattaattatttcaaggagacatgtgaacaatctcgcgcattaaaatcaagaaagaactttgagtgatatcatatggatcaatatatttattatatcaattgggtttgacttttcctcttaa

SEQ ID NO: 76865 - DNA, 460 bp, Arabidopsis thaliana landsberg
  unsure (1)..(460): unsure at all n locations
ctgaagaagtactgtgactcgtgatctttgaagtttctttctttttaaattttataaaactaatatatacacagangaaactacatatgataatattataagatcgcgtcaggaatatctggacacaaaaaacatttgtaaacttttaaggaaaaaaattgaatagcagagaatgtgtcttattggctctttaacatatgtgcatttcaaaatcaatttacaaaatcgatgttcatgtaccggacgaatgtgatccttgtaatttaaaatctgcatctttaattacgcggaaaaaaacaagcatacatacacatttcatgcaatacattaccggatatatgaattttttttgagttatacacaattcataaacgtgtttttctatcacgtcgctaatcatttgagttatgttatcatttcgatatttgaaactttagtgacgaaaattttttcactccct

SEQ ID NO: 76866 - DNA, 584 bp, Arabidopsis thaliana landsberg
ccaccccgccgagggtccctaacggcctttccgcaccactccggctcgttgcttttcgcgcccggataacgctggtcgcggcggcggatgtactcggcctgctcggcgggccaccacagatcaccagccacgcgacacaatgtatcacaatcgaatacagcgaagacctcgattcgccttccgcgcggcggcaacgtcgccccgccggatgcaagacgtgcgtcaacctggggtacgccctgatccacgacgaccgcttcggggtttggggaggactgaccgaagcccaacaccgccgggctgcgccaccgaaccggctgaccggccgacctcccgactgtttaggcagctcactccgcgcccgaaccgaggacatgcgcgatgtccgattggtggccggtcaaagtggtccagagccccgggacggcgcgcatcgcgagcaccagggtcgccacggtcagcacggggagaacgacgctttcaccggttttcccggtgtgcaggcgccacccggcgggcggccgaattcgatcccaggcacagcccccggagcgaatgggcgcgaaaagtggacagcccgattc

SEQ ID NO: 76867 - DNA, 578 bp, Arabidopsis thaliana landsberg
  unsure (1)..(578): unsure at all n locations
ttccttttctaatcgattctccttggaacaaacaagctctgttacagagatcagagtcgaattcgttacaccattgttgattctctaaagcatctactgatttcaatnnnnnnnnnnnnnnnnnnnnnnnnnnnnnnnnnnnnnnnnnnnnnnnnnnnnnnnnnnnnnnnnnnnnnnnnnnnnnnnnnnnnnnnnnnnnnnnnnnnnnnntaatggtttatctgcaactgaaattcgtgataacaaatttttgaagtatccgtttttttttcgtcagatttatttgaggttgttgatcgaagagcaaaatcagtggttgaagatctttcagaagaacagaacgatttgcagttgccaggtactgtgtggagattaatctgatagtactaaaagctttctctttggtactggtttgatctgtatatgaatgattagaaacataggcattgtcctggagtttatctaaagcaaagcttgatggncatgtgtatatgtctcttatattgggtctttcttttctttggggtggctaaagcttctggtaggaaagggtctcaagggaagagaaacagttcaaa

SEQ ID NO: 76868 - DNA, 486 bp, Arabidopsis thaliana landsberg
gcaggtggttttattggaggccatttggttaatcgcttaaagagttattgttattgggtgagaggagtagatttagaatataatgaatacggaaatggaaatgcagatggttttgtgcttggagatttgacagacccggtagtttgtaaacaagtattagaaggtggatttgatgaagtgtatcaattggcggctgatatgggtggtgcaggatatatctttacaggcgaaaacgatgcagccgttatgcacaattcggcactatgtaacctacacatgttgcatgctgcacaacaggcaggcgtgaaaaaaatcttctattcatcatcagcttgtatgtatcctgaatacaatcagcttgaccctgaaaaccctaaatgttcagaagaatcagcataccctgctgctccggatagtgaatacggttgggaaaaactattcagggaacgtctataccttacttatcaacgaaatttaggtatcaca

SEQ ID NO: 76869 - DNA, 607 bp, Arabidopsis thaliana landsberg
  unsure (1)..(607): unsure at all n locations
agaagagagtaatacgtcggagacgacggaggctgaggttgattcggttgtaccattgacgccgtcaagttggatggggttttgggatgtgggagcaggagatggtattttcagtattcctccgttatctccgacgtctcccaacttttccgttatctccgtcacttaaaacttcggaaaagtcaacgtacgatgacgttttcacttgcgtcactctcatgatttcatttattcttgtataatataaaggtagcggtagtgtgcaaatatcaaataagtagtttaattagtaccaatcattttattcattattttttttagtagaatatttggatgttgaaaatataaatttaattttgtatttgttgatgttataaatttattgattgtataaacattcttagtcatcagtttcgttaagtccatatctaaacacttcatatctgctaaatagtcaatagattataaaattggatcaggaaaaagtaaatcggagctataaaaaaatagtgtgcaacgaanagacaattaattagttaaaaatacatacaaatctaaacaaattcaaaatttcaatagtggaaaacaccaatcaaatgggatatgc

SEQ ID NO: 76870 - DNA, 586 bp, Arabidopsis thaliana landsberg
cggaattcaccatcgatctaatctaacgacgttaatcacatccggttcaaagccatcttttccgtattgcgaacgggccagcgaaccgggagaggagttcagcgatggcccgtttcctgatcagcacgatgcccgcgagcggacacgtcaacccggcgctgcccctggcccggcgcctggtcgagcgcgggcacgaggttcactggcacaccggcgaggggttccgggagcaggtggaggcgaccggtgcccggctcgccccccgcgttcacgcgccgagcttcgaggagcttcgccccgcgggcgggcgccggggtcctggtgccctcagcgacttcgcccgccggctcttcgtcgatccctctccgggacagctccgcgactaccgctcgatcctcgagaccttgcccgccgacgccctcatccacgacgggatcggccagggcccggcgctgctcgccgacggcggcggacccccctgggccaccctcggcatcagcacgctgatgctcggcggacccgacgtcgcccccgccggcaccggctggagcccggcgcgttcggggtgggagcggatgcggaaccg

SEQ ID NO: 76871 - DNA, 607 bp, Arabidopsis thaliana landsberg
  unsure (1)..(607): unsure at all n locations
gggacagctttgccttcccggttttgacttttccgtaccttagtcatatgtcagacattgtagtatccatacagaatgccaannnnnnnnnnnnnnnnnnnnnnnnnnnnnnnnnnnnnnnnnnnnnnnnnnnnnnnnnnnnnnnnnnnnnnnnnnnnnnnnnnnnnnnnnnnnnnnnnnnnnnnnnnnnnnnnnnnnnnnnnnnnnnnnnnnnnnnnnnnnnnnnnnnnnnnnnnnnnnnnnnnnnnnnnnnnnnnnnnnnnnnnnnnnnnnnnnnnnnnnnnnnnnnnnnnnnnnnnnnnnnnnnnnnnnnnnnnnnnnnnnnnnnnnnnnnnnnnnnnnnnnnnnnnnnnnnnnnnnnnnnnnnnnnnnnnnnnnnnnnnnnnnnnnnnnnnnnnnnnnnnnnnnnnnnnnnnnnnnnnnnnnnnnnnnnnnnnnnnnnnnnnnnnnnnnnnnnnnnnnnnnnnnnnnnnnnnnnnnnnnnnnnnnnnnnnnnnnnnnnnnnnnnnnnnnnnnnnnnnnnnnnnnnnnnnnnnnnnnnnnnnnnnnnnnnnnnnnnnnnnnntcccgaaccagtgatgagatcatgcaattgctcatgcagata

SEQ ID NO: 76872 - DNA, 473 bp, Arabidopsis thaliana landsberg
  unsure (1)..(473): unsure at all n locations
gataaaaacatgaattaactggaatgtacactagtcttttgtattttgacactagtacaatttcccaaagcgataaaggtaacaattccatgaggctgtatggaattggatggttgggaaaggtgtttgagttccacactcaaaaggctaatatgaaaagaactccaaaggaaaaaataaataaatttggaccgaccaatcttgttcatacgaaagtacacttttaatgataataatgaactatgaatatgtcaacttgttctttcttactttaccaattctacagaggaatttaaattatgccgacatggagaagtcacagccataagaaaagtattctcatagttacgaaaaatcacattcatatatgtatatcactcacatatgatgtgatagaaattgaataacatattgataagatgtggacgagtttttatatctactccatttaattcagctcgntataaataaac

SEQ ID NO: 76873 - DNA, 180 bp, Arabidopsis thaliana landsberg
attagatccaccaacccaattcaatgcagcggtataaaacattcatatttttttcaaccaatatcggacaaaaatacttgagtaccctagaataatgagcatgctacgcatgcgcaaacaacaatgctcaacagactatcgatggcggactatcactggtgcacatcatattaccgaaac

SEQ ID NO: 76874 - DNA, 582 bp, Arabidopsis thaliana landsberg
aacccaaatagctgatggagcttaccgaagatcctgatggagcttatgcagtatctaggtaagtgagcttgaaccagagtgcagatgtattgctggagtcctctgatgaaaccatctctctgattcaaatgtagttatatatctcttctcgtacatttttagtaaccagaaagagttttgagccaaagcctgaagcctccctggatcgggaccatcttgtatcctttccaagctttccttgaaccacatggaaaagtttctcaatccttttgacgaattttgctactactagactaaaggccagttggttaagtacatgtatctctatctttaaatttatccagtagaaccagttaggaatgtatcattggccaaatgggctaggcccttaacgttttgaatcctaatatcctttttccaatgttaaaacacatcgctgactaattaagctcgaggactgccgactgtggatcatggtttggctggctacacttggcttaagacgggttagctcgaggactacgggttattagcccgtcctagggcaggatctttcagcacatgataatattcctaaacacc

SEQ ID NO: 76875 - DNA, 521 bp, Arabidopsis thaliana landsberg
  unsure (1)..(521): unsure at all n locations
tggtgaaaaacgaataaatacaacaaacctatattatattgttcacacaattttgtagcatattaaatttgaacacacgtacggtaagctaacgtaattttcaagtagttgaatatgttttttcttcaaagcaataataaaaacttgacgcaaaggatcataactatataattttttagttggaaaaatatatatagtatacagcattatttgatagtttaaaactattcatataaataattactattagaccacctactttaatgtaataataaatcagaaagtgacatattagcatgatagaaaagggtcaattaacaaacctaatacgaacacaataaaataattaataaaacaaaacaaaatataatatttaaacatgaaataggttgtttagtagagaaaaggagaatatatgtcatcccacggttgcatattaattaaatgtaaatcaaaagtagcttccacttggaattacngtcacgatttgcaacacaacaaaatagaatgattacgagaga

SEQ ID NO: 76876 - DNA, 280 bp, Arabidopsis thaliana landsberg
  unsure (1)..(280): unsure at all n locations
gccgnggacatggaccatctcggaaagccactgttcgccgttatgtgcgggcggagagcacccacagcaccgggcggatcaaggcccacggcaaggcccggggcaccacaacgggaccgctggaacagccgaagccgaccgacatcgtggagcggaacacacggagaacagcacccacgacaaatgccaaacagcgggggcggacgacctgcaccgccggtgactgggcgaggcaccagataaggggcaaggcggcgagatacagaacgccacaggcacc

SEQ ID NO: 76877 - DNA, 632 bp, Arabidopsis thaliana landsberg
  unsure (1)..(632): unsure at all n locations
cctnnnnnnnnnnnnnnnnnnnnnnnnnnnnnnnnnnnnnnnnnnnnnnnnnnnnnnnnnnnnnnnnnnnnnnnnnnnnnnnnnnnnnnnnnnnnnnnnnnnnnnnnnnnncgccaaggtaggaatcagtgaaccgagctgtggcgaatatgtagtaagaccggtaaattccaaccgggtcggttttggcagtgacaagaatagagtatgattggcctacgtggatgtccaggctcgagtaaacacgtttttgaacatacgtaccctctgtctcaactagaagcatatcgtggtcttgaattctgaagtttaagcatgttttgagacccacgtttgatattcttagcctatatgttttgcctgtgattatatatagacaacataaaaagaacatttgtgtgtaaactacattattaaagatataatgtaatatttttaaaagaagaaaaaaactcacctggttcaaatgcaaagaaggtctctttagggccacgcccgttaaaaagaataccatcaagatttggcaaactgtgaccagcgtcaagtgaagctctcataaccttacaccaaaatttggaaaccaagtgttaattatgcaaatcaagcataacatcttttacaaaatgaactat

SEQ ID NO: 76878 - DNA, 611 bp, Arabidopsis thaliana landsberg
  unsure (1)..(611): unsure at all n locations
acacgactgccgccagggctcccgtccttttcccgaatctctcctagtgcatttttttggacgtcggttcgtccgctgggattgtagctgggaaagccccctcaaaactccacgctaacgacggaacttcgacgtggtaggatcactcactaccgaangacgccaaatggacacagaaacacaactcaaaattctcgcgaagatcgaagcacttgaattgctaacgacattcacgcttgcctcgatttacgacctgaaaggtctttcgttgaagcaagtgaacgaactgcacgaaggacttctggaacatgccaaaaacgcgtccgcgtcttttcttgatcctgttgaatccgaccattattgcgctgaatgcgccgacgctcttgataggcttctaaaagtggcctctgaccttcgcggagcgtggcgtgcgccgacttcatccgccgaagaatgagtgacgcttgataattctggtcatcggcccgaaagctcattctcattgtcctgcttaagccgcgacacgcgattttctcgccttacgctccgtcgtccccagcgatgcgatctccgcaagcgcttctaacgtcacgcccttcatgcgtctcttt

SEQ ID NO: 76879 - DNA, 347 bp, Arabidopsis thaliana landsberg
aaggtgaaaaagataaaactatttttttaaaaataaacaaagaggggactatgtatactctcttctacccagaaacaaattataaaattcattcattaacttcataaataagtcaagtagtaagtaaaaactggacaccaaacaaaattggtgcagccgtatgagagaaacttagtacgtctcaggagaatgaccgcattcgccgggaacaggccatcacaggagattctaaaggcggagctgttcgtaaccgtagattgaaacggctatacctactccggaatatatgaacacaaatggtgacatcacagcgctcaaaaaacttcccttgtcttttttttatcatc

SEQ ID NO: 76880 - DNA, 502 bp, Arabidopsis thaliana landsberg
cggccgacttaaaaacgccaccagcggccagcgcgcccagtcgatgttggtcggcggcacggcggtcggaaacagcgcgaacagggcaaacccgaccagtccaaggcccaccgccgccaccgtgtagcggcgcatctcgccgcgcatgtgcagcagcgccggcgccaggccgatgtaaaaccacaggctggcgtacggcagcacggcccacggcgtgaacgggatcagcgcgtccagcggcgtgcgcggcatcaccgtcaccgtgcgcagcggatggtccagcagccagaagtacaccagcatgaccaccgtggtgacggcgctgatgccgaccagcttcagcgcccagcgctcggccagccggtcgcgcagttggtgtcgccagctcgggtcgggaaacgggggcataagccgatgatggcagcagcgcgcgcagtggccaagcactcgtaagatgcgtctttttccgccatccacgtccgcatgatcatcgagccacgca

SEQ ID NO: 76881 - DNA, 508 bp, Arabidopsis thaliana landsberg
  unsure (1)..(508): unsure at all n locations
tgatgnnaaacagtatgacgcccttcaagaagaaatggcattcggcacgttcttgggcagagcggaaccccatgcangnntaccagagaccgnnagataggnntcttccaaagaacanaggctctcttttagaaantnnnnnnnnnnnnnnnnnnnnnnnnnnnnnnnnnnnnnnnnnnnnnnnnnnnnnnnnnnnnnnnnnnnnnnnnnnnnnnnnnnnnnnnnnnnnnnnnnnnnnnnnnnnnnnnnnnnnnnnnnnnnnnnnnnnnnnnnnnnnnnnnnnnnnnnnnnnnnnnnnnnnnnnnnnnnnnnnnnnnnnnnnnnnnnnnnnnnnnnnnnnnnnnnnnnnnnnnnnnnnnnnnnnnnnnnnnnnnnnnnnnnnnnnnnnnnnnnnnnnnnnnnnnnnnnnnnnnnnnnnnnnnnnnnnnnnnnnnnnnnnnnnnnnnnnnnnnnnnnnnnnnnnnnnnnnnnnnnnnnnnnnnnnnnnnnnnnnnnnnnnnnnnnnnnn

SEQ ID NO: 76882 - DNA, 276 bp, Arabidopsis thaliana landsberg
cgagacagggggggaggtaacggcacgggggacggatcaaaccaaaacagagaccaaccaaacctgggagaacaggccttctcaacttaccctaaagccccacacctcgagacggcgcacactgtcaactacgggaaagggaataacacagaactggcctagcttaaccgaatactgacgggaagccgaccggggtaaaatcaccgaaagaaattcaagccctggacagagataaaagctgtccacaagagaaccctactctccaggtacataaaa

SEQ ID NO: 76883 - DNA, 541 bp, Arabidopsis thaliana landsberg
cagccgctgcgctggagcagaatgcggcgtttcagcgcggacggatgcattttgttgcccgggaaggtgatggtgccgatgcggtagcggcggccctcggaaacggtgatggtgatgaccacgcggccggacttgggataggcgaaggacactttttccggcgcgatctcgacgtcgaggtacccttgctcgcggtaatagtcgcggagcttgtcgagatcgtcgtcgaactcgtcgttcttgagccggccggtgcccagcagccatgagaacatccaccatttcttggtctccatttccttgcggagccgtttgcttttgacgtggacgttgcccttgaaacgcacgtcggcgatcttcaccttggcgccctcgtggatcttgaaggtcacggtgccgaaacccgtcgcgcgatcgcgctcgatggtatagttgaccgagacttggttgaatccgctcttttgataatactcgcgaatcttctcggagtcttccttcacctggcgttcgtcgagcgcggtgttggggcggatcttgatct

SEQ ID NO: 76884 - DNA, 495 bp, Arabidopsis thaliana landsberg
accataccgattaactcacttgaggcttgacgtaacctagaatcagccacttttatttaaaaaagatatagtatctctaaggaatgttacatactgatagggaccagcaaacactaggatgaaaccatgacaatgatggaagagctacttggatagtgaaaacatatatcgatgcaagataggatcattcactcagcgtaagatctaaccgtaaaactgtgccaaaccatcgacaggtgcaaaatctataggaccacatgctcaaaaccatcgtggtggctcataactttagcacaattttacatttaatcagaaatgaatgatgtttgtggacgataacactatatcattgtacagtttcatctcacgcaattaccatgcgactttagagcaaataccacatatctaagataacgtatagagactaactgctggctcatcctaaggcaaaatatcacaatgtgaaaccttcacggtcctactaccatcaacatc

SEQ ID NO: 76885 - DNA, 552 bp, Arabidopsis thaliana landsberg
  unsure (1)..(552): unsure at all n locations
aaaaacccaccttttgctgtctttctattcaaattcaagcatgtgtgatagaataatcntaccacaaaaggaaaaatggcttacactgtggacttaatagacctagtgtttttttatcggaaacaatgtctactaacttttttcttttcttttaaaggcttaaaaaataaatttgactcctaaaaaattatcattcatatatatcttccgaaatccagataaccaataaactcaaaactacatttttgctttctttcttttctttaagagatatctttttggttatactttttataaattatcattatcatgcgttatttatttaataatttttaaataaatccttttaaattctgaagataggacattgattttgacttctgatcaactaaaaaccgagttccatatccaagttcaaggactgaataataaagtgtgtctttgaacggcgaccttttaatttatatgaaagtttaacgcgttaataaaattcatgcattgccaaaggaattggcccttttgcgtaacataagaaaatttatccaccttttt

SEQ ID NO: 76886 - DNA, 512 bp, Arabidopsis thaliana landsberg
aaatacattcacatatatgttaactagcattataatagagtaaaatattcacaaaataattttttgagaagctgaaatgtaacaggatattgtacagtctagcaatttgaggttttctaccgaattttcatagtttgtgttgtaaattcaaattaaattcaagttcatgtagttataagcacataaaaaagttcggtgaatggaaacgataaagcaatttagttcatggtgaaataggccacatgattattagcaggattcatagataagaatgttaacaaaattaaatggtaaattgggtttaattaggtttatgacttccggtcgtccttacgctattatctcacagcgtttttggttcatctaatcaacgaagtgaactttcgaaatcgatatctgaattttgatttaaaaatgggaggtaatcattcaccaatcggcttgtcaacgtaaaaatctctctctgattatatgaattgatgtgatgtgagttcttagaattatgattcatc

SEQ ID NO: 76887 - DNA, 611 bp, Arabidopsis thaliana landsberg
  unsure (1)..(611): unsure at all n locations
gaggacaggacgcgggtcgccgcctgggaccggctgagcgcgatgctgaacgtgctcgatttcaagacctcggcgctgctgcgcttcagacgccggcgtggtcgcggcgcnnnnnnnnnnnnnnnnnnnnnnnnncgccgatccgttcgcccagtccaagccggtcgtcaagacgctgggcttcgcggtcggccatgtcagcctgctgctgagcgtcgtaagctgcggcttcgccttcccggtgatcagcctggcgcgcggcttcttcgattcggcgcccggtctcgacgatgcggtgatcaagcggctgggcgagaccgtgacgcagcggacatggctctatggctgggcgtggcggctcgcggtcgccggcggcctgggcttcgccctgctggtcgcgctggcgacgattcattgacgatcatgacgagaaggtagcgttcaatggccgacctgatcctgcaccactacccgaactcgccgttctccgagaaggtgcgcgtcgccttcggcatcaagcagcttgcctggaagtcggtggtgatccccaacatcatgccgaagcccgacctgatgccgctgaccggcggctatcgcaagacgccggtgct

SEQ ID NO: 76888 - DNA, 167 bp, Arabidopsis thaliana landsberg
cagcaggacagggcaaaaaagagggcactaagagaccagagggggaaccgaccagccgaaaaggggaaccaaggcagaacctaccagagttgagaaagagaaggcataaaacagctgaagggaaattaacaggagcaggaagggaagcctaccctgaagggacacag

SEQ ID NO: 76889 - DNA, 441 bp, Arabidopsis thaliana landsberg
  unsure (1)..(441): unsure at all n locations
atcagtcggccggctacaggaaacattcgtattgagatgtatttttcacaagtgagggagctggtagtggggatctgaacatgtggaacaagtcagatgaaaaatgaagatgagaaagctaacctataagatacagtgaggacagttgtggataactgtaactaaccactgaaagtgagctttaccgtcatggatcaagaggctttgtcagtatgaattcaattttggttggtatttgttttgattcgtgatcngttgatacttagactaatctaaacattgattgtatataaattaagctaatataatgtattatgagttaaagattgaggtttattttagtctgtagcttattatagcttgaaagatgataatattaagggcattctgttgataattagctgcgttacagctttgactacgagtgagcatactgcggct

SEQ ID NO: 76890 - DNA, 418 bp, Arabidopsis thaliana landsberg
  unsure (1)..(418): unsure at all n locations
agaccggaggccaacttgcatgtaaaccttatcgaattttattttctccctccactaaagaataggacaagcgaactttttcattgcccctaggtccacnnnnnnnnnnnnnnnnnnnnnnnnnnnnnnnnnnnnnnnnnnnnnnnnnnnnnnnnnnnnnnnnnnnnnnnnnnnnnnnnnnnnnnnnnnnnnnnnnnnnnnnnnnnnnnnnnnnnnnnnnnnnnnnnnnnnnnnnnnnnnnnnnnnnnnnnnnnnnnnnnnnnnnnnnnnnnnnnnnnnnnnnnnnnnnnnnnnnnnnnnnnnnnnnnnnnnnnnnnnnnnnnnnnnnnnnnnnnnnnnnnnnnnnnnnnnnnnnnnnnnnnnnnnnnnnnnnnnnnnnnnnnnnnnnnnnnnnnnnnnnnnnnnnnnnnnnnaaaaa

SEQ ID NO: 76891 - DNA, 441 bp, Arabidopsis thaliana landsberg
caagcatatatagtccattgcaagtcgaaatttataatttttttattctaataattaagtacgacgcaacgatgggggatatacaacatatttattccttatacgtattattatcaccctaataaaatagaataaataccgattcgctagtgtaacgatttggtgtccacaatcgataacgagatatatcggggcatgcatgattaatgatttgaaccatttattaatttgttgacaactcatatgattatcactctacgttgcccctcttaaagtcgaaattgaaatttagaagataattaatatttgttcatatatgggtagttggcttcccatattaagttgtatagcatcaattaatgtacatgtatgtattccatttttttttggtactcattaactatgaaatcaattgatatatatctattttgttaattattg

SEQ ID NO: 76892 - DNA, 507 bp, Arabidopsis thaliana landsberg
aggtcaatcaaacatgagcggcaggggttatttatctgaggatactttttcgccttaccctcgcattaaaatgttaaagggggatggcacttgggttacagctgtaaatccattgcatggagaattagagcccggtgatgccggagttggaccgggtttgggctttgccacggaaatgctgaaagatgcggaccctaatgtaacgataggtttaattccaactgcaattggcggtcaaagtatcacagcttttgcgccgggcgcttcaaatactagaaacagcaacagcatttacgatgaatcggtaaggtttgtaaatattgcccatactcagggcgtgttaaaaggcatcctgtttcatcagggcgaagcaaataacagcagcacctccacttgggttaatggcgtaaaagccttaatcagcaattttagaaatgcttttaatgaccaaaaactgccattcattattggcgaaatgggtcgttttccggattacccaaacaaata

SEQ ID NO: 76893 - DNA, 594 bp, Arabidopsis thaliana landsberg
  unsure (1)..(594): unsure at all n locations
ctcnnnnnnnnnnnnnnnnnnnnnnnnnnnnnnnnnnnnnnnnnnnnnnnnnnnnnnnnnnnnnnnnnnnnnnnnnnnnnnnnnnnnnnnnnnnnnnnnnnnnnnnnnnnnnnnnnnnnnnnnnnnnnnnnnntaaactgtattcgttacctctttgctaccccatcaggatannaatctgnnaccccttctccctcgctttccacctacccatatataggatcacttttaagacagtgaaccnnttctttattcagnnnnnnnnnnnnnnnnnnnnnnnnnnnnnnnnnnnnnnnnnnnnnnnnnnnnnnnnnnnnnnnnnnnnnnnnnnnnnnnnnnnnnnnnnnnnnnnnnnnnnnnnnnnnnnnnnnnnnnnnnnnnnnnnnnnnnnnnnnnnnnnnnnnnnnnnnnnnnnnnnnnnnnnnnnnnnnnnnnnnnnnnnnnnnnnnnnnnnnnnnnnnnnnnnnnnnnnnnnnnnnnnnnnnnnnnnnnnnnnnnnnnnnnnnnnnnnnnnnnnnnnnnnnnnnnnnnnnnnnnnnnnnnnnnnnnnnnnnnnnnnnnnnnnnnnnnnnnnnnnnnnnnnnnnnnnnnnnn

SEQ ID NO: 76894 - DNA, 309 bp, Arabidopsis thaliana landsberg
aattcttatctctatcttgcccttccccaatgaataaaacatagtataaacaatagtatctcctaatgataaccgcttatgctgcatatccatattaaacattctatgctcctctaatattgcaaaaaaacattattatttatataaaatgataaatctctttctttctttacatcacacgtaaacaaatactttataatatttttttaactaatccccattatctatttaaaaaataatacatcaattactccaaaagattctcttatgaactacactcaaacaatctggtgatttacaaactttccc

SEQ ID NO: 76895 - DNA, 547 bp, Arabidopsis thaliana landsberg
  unsure (1)..(547): unsure at all n locations
cacaaaaaaaccaaggtatacaactatttttcttcgtgtttagacagtttataattttaactagaatatattatttaaaatataatcaaacaatcatttcactatggagggaggcaatgaagaggactaaaatgagtagttccaaaaggagaacaaagcgattacataaatgaagaaaaaagaggaagacccattatataatggaagattacaacgctattccaattattagttgtctatccgttgctcaatcgttcaaagattgattcgatttaggtttagaaagaaagaaaatgaatcaagctttgataggcaaaagtcatataaaagaaatagaagttttgtgtacatttgttagattcgactatttgagaaccataacctttgaaattctttacaatatgcaaacaccgatttcaaactagaatagagatcaagacctagttgtgcaccttctagagactcaatatgaccaaagaagaactcatgtcgtttgagatncatgtacatacacatatcttctgttatcatcaacaaccaaacatag

SEQ ID NO: 76896 - DNA, 567 bp, Arabidopsis thaliana landsberg
  unsure (1)..(567): unsure at all n locations
cggagcgcgnnnnnnnnnnnnnnnnnacccgaggtcgcaaagccactgtcggctctctacctcggcaatcaacgccatatgggttttcggccgccgcgcggggtagaacatcgggcgcgccgccacgaaacggtaaggtatccccaacgcttccagcgccatggcaaaaagcccgttaacctcatagcagtagccgccgcgcccctgcgttagcaccttatcggcaatgtcgtctggcgccagcgagacaactttgcccgcctgtacatccagattttcaaagggaacggaaaagagctgatgacgcataagagcatgcagagtgaccgtatcggcacccgccggtccggtatagtttatgcgtttgaaataggtggaaatgttgaagttttcgctgtgcataatgcctccttgtcctgaacatgtcggacactatagatggcgcacatcattggctgtatagtcagttntatcgaaaattagcctgaacagatacccatgtctgccccgtcccagtcgtccccacactatcgtcgaattgccgagatgctgcgcctcacgctgacg

SEQ ID NO: 76897 - DNA, 233 bp, Arabidopsis thaliana landsberg
tatgacacctggggcgccacccctctctcctgtagtgttggggaatttgagagagcgtgagtatagggcgagtgaaatagcgcgctgtggtattatacacaagacaccttactctcgagaaagcacacttttgaggccaccaccagccctctctctctctagcatacgcaaaaacacaggcgctgggggcacacataacttttacacatgagcgtgagattttctttcccctc

SEQ ID NO: 76898 - DNA, 590 bp, Arabidopsis thaliana landsberg
  unsure (1)..(590): unsure at all n locations
gattgtcgtaatattacttttgtcctcaaattattccattagtcgtttgacacattaccaaaaaaactttaattttggttccaaggacttagtgtcaaacttttgttgaaaatctcatttgaaaactttttcaacgttgtttcttttctatgggttgatttgaaattcatttgataactttttaaatttaaactttgctactttctttagtaaaggtgaccatatatggatattttcacaaattaatttttaaaatttactaaagggagagataaccttgtggggtgtggactgtcgagctaattagatttccaagtgtcatttgcatggctactttctttttctttggctattttgcttaaacacctctcattntcaacttgtcataattaaaggaactttgttccgcaaacttaggcccatttttagtgtccattgttcataattgtcttattattataatcatcaatgaagaattgatgtttaaaaaaaaacccttggtatggttcttgtacgtatgtatattagtagtatatatacaaaaacagttcatgccatcaagtggtggagtttaaatactcgtgttgctt

SEQ ID NO: 76899 - DNA, 249 bp, Arabidopsis thaliana landsberg
  unsure (1)..(249): unsure at all n locations
ttcttctctgctggacgctaagtgatacctaaagcaactaaaactaaacatgttatacatgaagcaatgtgaagtatgtcaactttaagattggcataactacagtctactntcttgtaagtcccatgccaatgctcagttgacaaccttcaactatataaattgaaactgaactgctaacttttaggatagtgctaataactggacataacgatggaatatgacttcttctaccattatctgtgaaca

SEQ ID NO: 76900 - DNA, 155 bp, Arabidopsis thaliana landsberg
  unsure (1)..(155): unsure at all n locations
taaaataatttaataaaaatattaaattatctctttctctatataccattcactcctaatagcccacctntgaacattggtactctctctctctctctctctctctcaccatcactctccctccctcacctaaacaaaaaaaaaacaactatacc

SEQ ID NO: 76901 - DNA, 545 bp, Arabidopsis thaliana landsberg
ttgcccttctaattatcctgatgatcagtgggctggtgaatatgcttttatcagtcaggccaatatctttattacaaatattgagggggtgcctttaaaaggccaattggacaatggtactcctatgaacagggtatggaaggctgtagcccggttcttacgcgctttatgttattttgaattggtagaacggtacgggggcgtgccgatcatggaagattctgcttatcagttaggagataatgttcagcttcccagaaattcctttgccgattgtatccaatatattattagtgaatgcgatgccattaaagatagcttacgccccgaccctatagacccggcagatattgagatgcctaccaaagccgctgccctggcattgaaggccataactttattatatgcagccagccctttatataacggcggtaatatagacccggggaataagctgacaggctatgcagattattctgcacatcgatggaaagaagcggctgatgctgctgaggaaatataaatatgcatgtctttgaactgga

SEQ ID NO: 76902 - DNA, 524 bp, Arabidopsis thaliana landsberg
  unsure (1)..(524): unsure at all n locations
gaaacgcncaacccactgagcaaacactatcctcagctccgagatcttataactttttaacctgttggattttgaaggaggaaatcgaacaccaaaacaaaatttgaaactactgtgatttattagaaatttgcaagtgacaaaaaaaactcaccttgctgctacaagcattccataaatacacacagttccctagtcccactgctagaacattttgtgcagaccaatccacaagattcagataaaaatcatcttgcaaggccggtgcatccaatacctaaacaacacaaagaagcctctgttatcatctgtagcaacattgcctataaacatatatcgaaaatccaataacaacatcaagctctgcacattaacaactacactaaaaactctcgacataacagtaaacaacaaacattcttcatcatccagatcactctacactagtaaagactactcaaaacctctgttatcagatgtagcaacattacccacaaacaaattacccaaacccagtaacgaga

SEQ ID NO: 76903 - DNA, 615 bp, Arabidopsis thaliana landsberg
cttcctgtcacaactttcatcgaaaacattaacaaaaattaggaaaggctcatacttcataccaactatttgcttcaaacagtgcgagtgggtgtgattactttcatggatttatctatcatatatgttgtatactgttacatccttttcagaaatagaacaagccacaagaagataaagaagcataacagattaaagctgtagcttggttggccattacagaaggagtttcttcaactcctttattcttaatgtgtaaacagagaacagctcaacaattttgtcttcaagttcccaagagaagacgggagattcggctaggcttattaacgtaagaagagattcagacgacgttgggacaatcacaatgatcaaattccattctccgtcatctgaatcatcatacttcgcattcctctgttttgcgtacaatttacgttactcaattaattaattggaccggtttaagtcgattgttttattggcctttgttggttttggcccaacagaagaatgttttatgggtttagcttaaagcccatttggttaagtatgttagtttagttgaggcaagctgcaagtaaagtagtttgtaaactctaaagctaggtttta

SEQ ID NO: 76904 - DNA, 108 bp, Arabidopsis thaliana landsberg
ggttatacactgtgaaacagtagtgatatcaactcgcaattttcttttttaactgatgacgactgctacaccacagggctaggcgttctatagattgtctagaacaac

SEQ ID NO: 76905 - DNA, 490 bp, Arabidopsis thaliana landsberg
ggaatacgaccgttttcttttagacgttttctcgctagttctgcttcttaatacttcattaactatctcttgggtttgcacgctgagggggggaacgagcaaagagaaaatggaacattccctggtcctctaccctgaagaaaaatcatattgccatcattcctgctttgctgctaccttcatgagattacactgcagagtttaataagattttacaaaaccagcacttctggatcccatcatcataaaatgtgagaatttaacaaaactttatgaatctcaaatttttctcttatataagcttttgaggatcatctgattgttctgaattgacgatcttcctgattatgctttactatggcaagcttcaaattcttagtaccaggagacattttttgcttctgtttctctaagggtcatatataacattttttcataacactaatattattccaatcaaaaaaaacattggaagataaaaagttcttta

SEQ ID NO: 76906 - DNA, 378 bp, Arabidopsis thaliana landsberg
gggccccaggaaacccccgggaatcgaacccgatgcagggtattcgatggggagacgaaaacgtcttaaacagcagggccaacaaaccttgctaggcgggccccaaggcccacagagcaagagacaaaacaaatggactaggaaacgtaccgggagacggatcacgagatgggccccaaggatgagaaatggtcccgccaaaaaggaccagctaggcccttgcccaggggcgggctgcgacacaacggaggctccaaccaaaacccggaacatgaaaataagctcacacatcaggaggacagcgaagcaggcacccgaggaacgttcgcagaggtcccgacggctgcgaaagcctactgctctgaccccggcggcccg

SEQ ID NO: 76907 - DNA, 403 bp, Arabidopsis thaliana landsberg
accgcgcaggtagcggtggaggtcgcaccggtccggcttcaggtccaggatctggtattccgacgagctggccgggtccgtgggaggtgacgtccccgccccgccccgcagcgtgcagctcgattccccgcgccgcgcgctcctccggccccagcaggatgttctcctcgtgcgccccgctccccatcgtgatcacgtgcgggtgctggaggaggaggagcgtgtcggggatctctccgtcgcgccgctgccgcacgaggccggcctgcagctccagcccctccgtgtaaggcaccagccccagcttcctcagccggagaggacggagaatccgtctacacgctcattcgccctctgggggcgcccgctttcagcagcttgcttacgcgggccaggaactcgt

SEQ ID NO: 76908 - DNA, 512 bp, Arabidopsis thaliana landsberg
acgactactttcgatacagggatctatttggggcttgctcactacgatctcgatcttttgaatattgttgtctccacgagatcggtatgggagaaaaagctcctgacatcagttttacgcacaaccgtgtcccttgacccaggcctggatcaaattattacccaagacatcacatcgccgatatacgttcaaaaccgcgtaaaatcaagcgcaggacggggatggagaattgcgggtctcacgacaattttgaatccgaattcaaacaggatcgctatcgaagaagaagcaggggatatatcggtttacaataccaaatctaacatttccactttggtaaacttcgagggaacaggcatcaacttggagcgtgcggttagctttaattcctggcaaacgttgcaatggttaaagaggtaaatgaaaattcatccgaaattgtcaaatataactttgtctcaatcaaatccccagcctcaatctttgaccgagagctaccactaacactggat

SEQ ID NO: 76909 - DNA, 484 bp, Arabidopsis thaliana landsberg
  unsure (1)..(484): unsure at all n locations
cccgacgcatccggattgccgaaaagccatcagtgagcacaaacagatagcaatacttttcgagcaactcactgatatgggatgtgccgagggcagccagttaacgaaactcagcgacctcgtggaagcacatatccgttatgaagaaagggaattgtttccccatctcgaagctaccctcacacctgcgcaactggctgatgccggcgctcaactggcggcatcccattcggcaaatcatccggatgattatgcagacgagttctgggttacaccaccacaaacgggcagtgtatgacgaatggctccgatcctatccgcttccaggtggatcattttcggtgaaaaaatatccatcactacttttcccgncgagtacaggaacctgatcggtgttgctcaacaatacgatctacttcgaagatttttggtgaatgcggcggcatgggcaggtgcgctacctgctcggttcgttttgaatgca

SEQ ID NO: 76910 - DNA, 134 bp, Arabidopsis thaliana landsberg
  unsure (1)..(134): unsure at all n locations
aacaacgtcggattcaccatcaaagtttaaaaaatcatcaataatctttttttttcttanaaaaccccaaaaagagtggatgtttagtttatcattcactataaaacccataaacacaataataacctttactt

SEQ ID NO: 76911 - DNA, 440 bp, Arabidopsis thaliana landsberg
  unsure (1)..(440): unsure at all n locations
gctatcatacacatatatattatctacaaagataaatcntatcctttctaaataatcaagaagatcgacattttatttacaacatgacatcatgaccaaaattgtactatttcctgatcgatacgaatgacaactatgaaactgaatcacacacgaggaaggagctcccatctcttttcaataaaagaaagaaggaccctctaactaatctcatatcagcacagcttttgcttaaagaagacacagaaactgataacacaacgaattcactacatctctcagaaaaactattactctcttacactatgtaaacattgtgatatcaacctgattatcattaaacacttcttatattctaccaaatgtgcatacttaaaaaaaacagtctggattcatgaacttaaggataatctgttcatgtttacccaaaacgagatatc

SEQ ID NO: 76912 - DNA, 301 bp, Arabidopsis thaliana landsberg
cacaaacaaaaatccaaaagatgctttttaaaacaatccatccccatcccaccccttataataattatttactctttattataaaatccaacataactaaaaacataaacaatatttttaatcattccttaatcatactaaattttacatatcccaatcatacacaacaacgtattttacaatcataaaaaaaattttaaccaacttaaccaaactataccctatttacaaatttcacacatattattatcaaacacaccattcttaacaaattaacaattaccatataaattaatattaa

SEQ ID NO: 76913 - DNA, 380 bp, Arabidopsis thaliana landsberg
agcataactcctgagtaagaatcatcaagaaaacatctttattgttaacttaaactcgacatcattagcggtgaaggcacaataatattcattatgaaagcataattcacggccatccctagcaatttattccgctatcaatgtatctcgctgctgatactaacatatcaaaccctaacattcattacccaacattgaagattgcaacatatactttacatttttaatgcatggcattggaatattatcatcatcaagatatttacatgatgcaaatcatgtaccttaatactcgcttgaaggaacccactatattaccctaacaagatcattccgcttcttgttcttacaaaaacgcaagctctattccttcacattct

SEQ ID NO: 76914 - DNA, 488 bp, Arabidopsis thaliana landsberg
  unsure (1)..(488): unsure at all n locations
gccccgttgcagggaaacgaggagttcgaggcttggacatatatcattcttgactgaaagataatgattcagtaagggtgacgcgggcggtcccagtaaaagcccggaaaaaccggacttattcaggctagttgacgtcatttatgcaagaacggacaagccctttgccagggtacacaaatgaaaaccgcctgtcgtgtcaaggcagnnnnnnnnnnnnnnnnnnnnnnnnnnnnnnnnnnnnnnnnnnnnnnnnnnnnnnnnnnnnnnnnnnnnnnnnnnnnnnnnnnnnnnnnnnnnnnnnnnnnnnnnnnnnnnnnnnnnnnnnnnnnnnnnnnnnnnnnnnnnnnnnnnnnnnnnnnnnnnnnnnnnnnnnnnnnnnnnnnnnnnnnnnnnnnnnnnnnnnnnnnnnnnnnnnnnnnnnnnnnnnnnnnnnnnnnnnnnnnnnnnnnnnnnnnnnnnnnnnnnnnnnnnnnnnnnnnncgctt

SEQ ID NO: 76915 - DNA, 467 bp, Arabidopsis thaliana landsberg
cccaagacccattgaaaatagctccttcatttttgataaagggtctctttgttttttaaatctatatatttttccttatgaatgatgttttgtaaccaacatggattcattatcatcgccatgtttttttttctttgtttgtacactcaatttaaatctgatttttttccttttgatgagagtctccatcgaatgagacctaaatcattacgtttgaaatctgtttatagtaatattttgctgactttattattgctacatccattatttcattctttaaaatttctatatttctacatctaactaattagagacatgcatcctcttctttttttttttatctttttttaactttatgagactaagtaactatgtctacacaaattgtttttaagtacaaaatatttacattctttttttaacttaataataaaccaaccggcttcatttggtcattattaaatctt

SEQ ID NO: 76916 - DNA, 616 bp, Arabidopsis thaliana landsberg
  unsure (1)..(616): unsure at all n locations
agcgccgcggtgtacgccgcacgcgccaatttgcagcctgtcattgtcacctgactggagcaaggcggccagctgaggaccacgacagacgtggacaattggcccggtgacgtcaatggcgtgcagggtccggaactcatgcagcgcatgctcgaacatgccagccgattcaacaccgaaatgatcttcgatcatatccatacggccgatctcaatgagcgtccgttccgcctgaaaggcgacagcggcgagtacacctgcgatgcgctggtgattgccactggcgccacggcgaagtatctcggcctgccgtcggagcagcatttcaagggcaagggtgtgtcggcctgcgccacttgcgacggcttcttcttccgcaatcaggacgtggcggtggtcggcggcggcaacacggccgtcgaggaagcgctgtacctggccaacatctgtcgcaaggtctatctggtgcaccgccgcgacaagctgcgcgccgaanagatcatgcaggacaagctgttcgcgaaggaagccgaagcaagatcgagatggtgtggaaccacaatgtcgacgaagtgctgggcgacgacagcggcgtgaccggcctggcgtgaaaaca

SEQ ID NO: 76917 - DNA, 540 bp, Arabidopsis thaliana landsberg
  unsure (1)..(540): unsure at all n locations
gagggacggcgtgccatcgaagtagggcgtgagggtggtgtccggctgcatttacgaacgcaactccgaaggggtggcgcgcgcacgatcgaccgtggcgatcacgttggcgtcggccttcttgtacacgtacatcaggatcgccggctcatggccgaacgtcgcggcctgataggcgtcctgctggccggcgtagacattggccacgtccgacagtcgcaccggcgtgccgtccttcaccgcaaccaccaggcgggcgaagtcatccgcactgtggagctggtcgttggccgtcacnnnnnnnnnnnnnnnnnnnnnnnnnnnnnnnnncagcggcgaggtgacgttggccgccgtgagtgcgttgcgcagctggtcgggcgacatgcccatcgcgttgagcttgcgcagatccacatcgacccggatggcgggtgtggcggcgcccgcaagatcgaccgacgacaccccttcgagctgggtcagccgcggcatcagcagcgtattcgccacgttgtacagatcggcggcggactgcgt

SEQ ID NO: 76918 - DNA, 578 bp, Arabidopsis thaliana landsberg
  unsure (1)..(578): unsure at all n locations
atttgctataagaaattagatctagtacacacgtgttatttcatagactacaaatactattagacggtttatatttctataattgatataaaaatgaaaatatggcatcggtgtatcattatagttttttttctcaaaaagtaagaattttctaggattcaataaattttgaagagaactataaccaaaattaactttattaaagtagaaatgtaaaagtttaaatacctcatcaaatggcaatgaaacatctatcaaatctgcaccacattgttcctcctatgcaattaatattcaaacatcaattatttgctatatcattgtatatatatcaaaccaatttcgataaattacgtagacttcaataaaaccatattttttatatcaatcgtttgtaagtatatttcaaaactcaaaattacgtagacttcaataaaactagaatacaacttataactaaaattattattgtaaaaatttaaaagattacctgatcaaatgtcaatggaacatcagtcaaatctgtaacaccttgttcaggaacatcagtcaaaatctcaacacatngttctggaata

SEQ ID NO: 76919 - DNA, 159 bp, Arabidopsis thaliana landsberg
  unsure (1)..(159): unsure at all n locations
aaccacaatccaaccaatatgaaataacaaaacacagctgagctgacaataaaacttaattcttgctgtcactgtctaatataaacgatcagcttctctaaatggagaatgcctggcctcccccgaattaaacgtnatatctcttcccccttattcccc

SEQ ID NO: 76920 - DNA, 121 bp, Arabidopsis thaliana landsberg
  unsure (1)..(121): unsure at all n locations
ttgtggatagagaaggtcgcagggaaacacattgaacctggtgctatatgtttatcattactgctccaggcaaaagaaagattccatcttatgtccttgccggcacctcccatncttacag

SEQ ID NO: 76921 - DNA, 112 bp, Arabidopsis thaliana landsberg
agagttgtatatatcgtttcaagttccgatctgctttcattatattcctcaattttcttccacttctgtttgaaggaatcttcggcttctttcctttcttcccataatttat

SEQ ID NO: 76922 - DNA, 299 bp, Arabidopsis thaliana landsberg
acggcgccaacaccagcttcatcaaccatgtggtgtacgagttcctgcccatggaaaagctggtcggcgacccgtgcaaactggtgcgccagctggcttccaagccgcatccgcacattccccttcccgtcaacatctacgcttcgatcaggaaaaattccatgggcgccaatctgtccaatgacaacgagctggccgcactcgccgatgccgccaaccagcatccgggcccgtggcaggccgcaccgctggttcccggcgccaccagcaccggcgccaccgtcactggtgaccaattc

SEQ ID NO: 76923 - DNA, 434 bp, Arabidopsis thaliana landsberg
  unsure (1)..(434): unsure at all n locations
cctaccccttccagcaccagcgctactggctcagccccgctttccccttacctaccgcagcagcgctgggggtgatccgcgccgcccatcccttcctcaccgccgccatccccctcgccggacgcgaggagatcctcctcaccggccagatatccctcaccacccacccctggctcgccgaccacgccatcaacggcaccgtcatcctccccgccaccgcctacctcgacatcgccctgcacgccgccacccacgccgacctcccctgcgtcgacgaactcatcctccacacccccttgcccttgaccgccgacgccgctgtcttcgtccagatcacagtcgccgcccccgtcgaggcaggccgncggtccttcgccatccactccgcccccgcccctgacgcggaatggacccatcacgccaccggcaccctc

SEQ ID NO: 76924 - DNA, 563 bp, Arabidopsis thaliana landsberg
  unsure (1)..(563): unsure at all n locations
ttcgagaggtaacaaacatggtcgccatctggtctgcgtcgaggatatgttcccgttcgttgggaagctcctagtatttaacgccgaagtgattgtcgacattcacgatctttaccagcgaggcgccaagcgccgccatctctgtcggatgcagcggatccttctcgccctgggggccagaaggaatgtcgatcatcaacttatagccggcctggaggatgggggcgagggcggtggcgattttgggcgcatcccacgtgccgtctttgttgagccagcattgcgggctgccctgcgttaccatgccccagccgtgcaggcgaatcaggggcttttcgccgtccgttacagttttcagtgccgtcagcaaaattggattgtgggtccattccggatcgaaacacaccgggcaatccactccataggacagcgggtcgaccgtatgtagagttttnnnnnnnnnnnnnnnnnnnnnnnnnnnnnnnnnnnnnngaacatcaccggagtgacgcgggggcgacccaagggctggcttcggcatgagcgcgaaccccgccagcgcg

SEQ ID NO: 76925 - DNA, 523 bp, Arabidopsis thaliana landsberg
  unsure (1)..(523): unsure at all n locations
cactggcctggtcaccgacccgtacttctccggcaccaagctgaattgtatcctttacaatgtcgagggtgcccgcgagcgcgccgagcgcggcgaactgctgttccgcaccatcgatacctggctgatctggaagttctccgggggcaaggtacatgtcaccgactacaccaacgcctcgcgcacgctgatgttcaacatccacagcctgcaatgggacgacaagcttctggaaatcctcggtatcccacggcagatgctgcccgaggtacgcccttattccgaggtatacggccacacnnnnnnnnnnnnnnnnnnnnnnnnnnnnnnnnnnnnnnnnnnnnnnnnnnnnnnnnnnnnnnnnnnnnnnnnnnnnnnnnnnnnnnnnnnnnnnnnnnnnnnnnnnnnnnnnnnnnnnnnnnnnnnnnnnnnnnnnnnnnnnnnnnnnnnnnnnnnnnnnnnnnnnnnnnnnnnnnnnnnnnnnnnnnnnnnnnnnnnnnnnnnnnnnnnnnnnnnnnnnnna

SEQ ID NO: 76926 - DNA, 566 bp, Arabidopsis thaliana landsberg
  unsure (1)..(566): unsure at all n locations
acacccgagaatgcaaagctcagcgattcgcgtcttccctgcactcgtttggagttacacaacgagatcatccaactgggcgactgcgcgcgtcgctgcagcaatctgtgacggccacagatcgatctcagccttggcgcggctttggagcgttgcgatgaagagctcgcgcaaggatggccaggctggtgcggcgccgcccaccgnnnnnnnnnnnnnnnnnnnnnnnnnnnnnnnnnnncagaggtcnnnnnnnnnnnnnnnnnnnnnnnnnnnnnnnnnnnnnnnnnnnnnnnnnnnnnnnnnnnnnnnnnnnnnnnnnnnnnnnnnnnnnnnnnnnnnnnnnnnnnnnnnnnnnnnnngctcaccacgctccagtgccaaaagaaatgtcgcaagagcgccgaagaatcggtccgttagggctaggtcgaccccatcgaataggaatgaagagtcgtcataggaatgttgccagcgagctcggctgcattccatcgggcttgaaacgccgcggtgatcttttcgtactcgctgacccgctggttcgaaggtgagagccaggc

SEQ ID NO: 76927 - DNA, 429 bp, Arabidopsis thaliana landsberg
agataacagaaaaataaaattctgataatagcatttttttgtttttatatttatatgttaataaacgaaacggggccgagtgcctaaaatttggtttctgatggtttggtctgatctggtcatatattttaaaagaatttgcaattttttctttctgtcgaccttttgatatgtttggtgattatgatatggagatgcatcttcttatcttgcatcttaccacaataatattaaaaacaaaaataaatatcatgagatattttctccaagatgacgtgtccttttctatatctaaaccaaactattcaacacatccttttcttatggcctgcactatttatcgtccacgttctcttcttgggctaaaatatgccaagtcccaccattaagctacacaacaacgcgtgagaaaaagacttaatctccacc

SEQ ID NO: 76928 - DNA, 531 bp, Arabidopsis thaliana landsberg
atttcttgcagtgatgaagtgattcaggtacaaaaatatttattaaattattttgtgacgaagatattgttgccttttggtaattgtttatttaatatcataattattgaaaatttaggatgataataaggtcaccaaactgagagaactcaaggaattgtatgctgagaagatggtaattttgaggtaacaaaaaaaaatactaatgaagattcaataaaatattcttataaattttaaccaatatttgtttactaacacaagtatttactaattttaaaggaactgggaaagcccgaataaagttacagatttgcaaggacttaatatcatggaagaatattcagtcaattctctcaaccatatcaaaaaaaccataaaggtgattgcatattaacatataataaattaaataagatttattctaaaaattcaaatgttattgaaattttacaaaattttaatatcttgtttcagattaagagtcaagaagagcaacacaactcttatttcatttagagatggagagtt

SEQ ID NO: 76929 - DNA, 491 bp, Arabidopsis thaliana landsberg
agggcaggtatttaactcacttgtaatgtttatagacttaacatgtttctgtgttgctcatattatgctatgatccgtaggtatatcatacaccggctgctgctttgtgcacttggccgaaggccagaagatgatagggatcattatggtaacaaaaggctggatcttgctggtcctttacttggagggctatttagaatggtttgttcccggcacacaattatacactcttggggattgttgagtatcagtgttttttttatctcttactgacctaacatcttctctacatgtagcttttccgaaagttaacaagggatgtgagatcttatgttcaaaaggtatcttacatagttactctttctcgagccaaagactttagtattaagttgttattctgtgtttggaagtctgattcatgtttttttgacagtgcgttgacaatggcaaagaagtcaatcttcaatttgccattaaggctaaaacaatta

SEQ ID NO: 76930 - DNA, 532 bp, Arabidopsis thaliana landsberg
ttaggttagtgcagataagctttttgttagaaggacacataattgggctgaaagtatttcccgttcccaaatcaagtgagccttcataggggggtggggagatatacattttccaagtaaaaccagcgcttttggaaatcgactgaatctgcatataaagtttataaacttcgactatgcatctgattttgtttgtacgaactctgactttagtttcaagcgaagactaaaatttattggtattggctcaatcggaagacatattgattttatcaacagaacccgggtagagaacttgtttaaattatatacttaaatcaactacaaggatatcaatgcctagtaatactcaaaaataaatttgagatttaaagcagtatgggacgatatgcaagtgattgacaatattgcccagcctagcagtatatatatagactaggtgattgtgattaaagatccaattattggtatttagatttgtcgaatatcgatcacaaagtaaaataatttttatttttctttaatttaccta

SEQ ID NO: 76931 - DNA, 550 bp, Arabidopsis thaliana landsberg
ttgtcttttccagcatgccgaggcgatctacgcgaccatggcgctggatgcgggcttgcgcttcttcgtctccaagaacgccacgccggaggaattgctggacgccgtggaccgggtcctggcggtcgatacggcggtggagaaggccatcgtccgcgacatggggttgcgcgacgtgctggacgactcctatgtgcgcccgctgagccagcgctgacctgcagatcctgcgcctgctggccgacggcaataccctggcggacatcgccgaaaatctgggggtcgcctacaagaccgttgtcaacacgctgagccggatcaaggaaatgctgggcgtggaccagacctccgacctgatccgcatcgcggtcacccgcgggctggccgacctgggctgatccgccgacggcgaggctttactgggccagcagcatccgcgccagcgccaggcccaggaacaccccgcccagcgagaacaggaaggtgccgcccgcatagagcaaggtgagcagggcatcgccccgctcccacatcagcgcggtgtccatcg

SEQ ID NO: 76932 - DNA, 580 bp, Arabidopsis thaliana landsberg
  unsure (1)..(580): unsure at all n locations
gaactatcgccttcacattcaccttcgccctttaaacagcccttccttatcgccataggtcttgaacacccttgtgagcgccgttctgaaacctgttacatgcgtaccgccttcaatggtgttgatattgtttacataggagaagatatgctccttgaaatcgttgttatacgtcagcgccacttctacggccacattggtggcttcatcatgtccctccacatacagcggggtagcgatgagaggtgttctgtcggcattcctgtcgagcatttccacgaactcgataataccgccttcgctgtaaaattctttgctgtaaggattgccgttctcatctttctcgcgctggtcggtaaggatgatgcggatgcgtttgttgagataagcgagctcgcgcaggcggccctcgagtatctctttcctgtatacggattcctggaagatgctgttatcgggccagaaatgtaccagcgtaccggtcttgtcgctggcgccgannnnnnnnnnnnnnnnnnnnnnnnnnnnnnnnnggtattcctgctcaaatatttatacatcgcgctgcacggttacatgc

SEQ ID NO: 76933 - DNA, 282 bp, Arabidopsis thaliana landsberg
ctatgaacacattcggcatttaggatgcttacgtacccattcggacaaaaccgtgcgttgtgtttttaaagataccatatttttatatctttaccctctacaaagtacggctggagacccattccgacgttcgcgtcgggacggtctcaagtcccctttccggcgacctttattttgcgataacataaatgctttacagctactttatatcgctcttatacacagggagtcttttaacctggtaatctaaccactctgaccggttatcgcttgtcctaacta

SEQ ID NO: 76934 - DNA, 537 bp, Arabidopsis thaliana landsberg
aacaacatttattaattaacatgcactataaaaccttatgaattggttatttttggcactagaacatgttacagaattgttgttcacggaaccttctcagcaacaacaagtgtttgatccaaaactaacttgaaagaagagtcaagtctagcacacaaaaaaagtttttttcttggggtcaaaatcaaacaattctaccacttttaaggaaaataaattgggccacgtaaagagtacgaaaagaacaggggaagtgaagagaagacgaacaagaactcgtttcaaactcgttgagtttctggagaatcatcataaaacccgcttttctcaagccattgactcaccaagtatcccacacattgagagaatcccgacgccgtcgtcgccatcgtcgtgtaccgaaacagagtcttgacataatcgcgtttcttcgacacgtaagcctttgctattgagagcaagacgatgcatagtatagacactgcgtaaacagctaaaaccttgtactcttgtctcttttccatcttttttcgaaac

SEQ ID NO: 76935 - DNA, 117 bp, Arabidopsis thaliana landsberg
tattagttagatcacatgctcctttgacacgtttttgttttatctttctcaaaaaaaattcacaggggtcgagcatcttacactcattcatcccataaacatattctatacacttta

SEQ ID NO: 76936 - DNA, 597 bp, Arabidopsis thaliana landsberg
  unsure (1)..(597): unsure at all n locations
gcgtcaacagccaacacacatttgttgttattttcgcatacttgatatgtaggagaaagttattagttgagaagatgattaaagatgaattgtaaaaatttcgtacattatatataaatatatgttattattttctttcaaaaatctagacgttaaggacgttgtagtattacactatatacatcaatagtctaaatgaaaacaaaactcattttagcataattcagattatgtagtatatgacttgaaatgaaagttactatatttacttgtctcggttagatttccccagtcattccatccgtcgggagagatgactcgaaacatgtannnnnnnnnnnnnnnnnnnnnnnnnnnnnnnnnnnnnnnnnnnnnnnnnnnnnnnnncgtggttccatcaatcttacaatttaagaaagaaaattcatgacttctcatcaagcgagtcccttccatgagcggtaatggagccactaataccagatgtagtctctntggctattgatcttaatatcttattgtgcatttatcatagaaagttctagtctcgaactcccatattatctatatcttttaacatatttcttctccctcatg

SEQ ID NO: 76937 - DNA, 491 bp, Arabidopsis thaliana landsberg
gggggggaaaaaaaaaaattttatgtttaaaaaaaaaggaaaaatctgttgaaatggaagcaaaaaaaggaaacccaaactggggtcattattaaaaatagcataaactggagtaaaaaaaaaaggacaaaagccatggtaaaagtaaaaaccaaaaggcaaattttaaaaactggggaaagaaaaaacaaagggtatttaaaaaaaaaaaaaaggggggatgaatagaaaaaacggggaaactaaaaaatactaatcgggccggtaaaaaatcaaaaacaaaaattataaactttaaaataaaaagggatgggaaaaaaaatattattgaaggaaaaacgaaaacgatgatggaacgtgagaaaagggaaaagaaactagaatgaaaaaaaaaaaaaacccgaaaataaaaaaagattagaaaaccatttaaaaacctgaaagaaaataaaggcagaaaaaaaaaccaaaagaggtagaaaagctaaaaa

SEQ ID NO: 76938 - DNA, 342 bp, Arabidopsis thaliana landsberg
aacaggagaacaagccgcaaagacggccagagggagaaaccaacgacgccccaaagaacgacagcgccaacaaaggaggcaggcgccagacaccggccaacaaacagggaagagccccgaaaaggagaggacgaagaaaacgggcaaaagagaaagcacaagaaacaggggacccgcgcgcaggagagaggagacacccaaggaaggggccaacaagagccagcagcggaagaaggggcccaaaaacgggcaaggacaggaaaagaacactgaaagacaaaaaaggcagggacaaaccagagcaaaggcgacaacagcaagggcgaaacaaaaagaaaggga

SEQ ID NO: 76939 - DNA, 479 bp, Arabidopsis thaliana landsberg
agagaatgtaaagcttcaaactccaaacacaaacaaatttttctttttggaaaaaagagaccgtccaggggatgggtatattcaacaaccgccatactgtgctctctaaatcgtatggcacacatatactacgcgatagaatcgaaagacccaactcacgattgtcaaccataccaacatactcacttaccttactaaaactgcattcttaatataaattacacacaccaaacttatcataactgacccaccaatcatctaaccaccgactacgatatcgccgaagcctgctcttcattccttaaaatctacaagagaggccgaatagaacaacctatgggtgaagccaacataccaacctctttccaaccacaagaccaaatcacatacaaggacattgaatattcttacgaccacaacctatccggccgtatgtaccacccatagaaaaccatcctcgagacctactagaaaatacc

SEQ ID NO: 76940 - DNA, 234 bp, Arabidopsis thaliana landsberg
ggcaaaacccagtggggaagtagagggcacgaaaacagacgggggagcaaatccagccgccgtaagtgctgcactgatcacacgggggaaagaagagacagacgaaagaaacgatgcggaaaaaatagacgaaagcgacgaggaaaagaccaaggcaaggggaagagaaaaaccgagacgttgggagaaaaggaggacggggcaaggaccaagggagaattacaaagcagaaga

SEQ ID NO: 76941 - DNA, 560 bp, Arabidopsis thaliana landsberg
cgactggaccagttcatcggccgtcgagtgtgcgcgatggttgggttggtgctgttcacttgtcgtagtggcgcggggggttcgagaagtgtggagtgactcgacacctcacccaagatcaaaaggagagatggcaatagtagctcgcgtttgcgcatgggcccgtcgggtcagccgctctgcgtgtgcagtttcgtggtgaagattttcggctcgaatgtcgatttgtcgcaggtcaagagctcatcgaaaggtcgtgtcgcagcggtttccggggaaggctggggtgttttggtgtttatccggcagcttagaatgagccacggacgttggagcggcggtgctttcggaggtaagaggaggatcgcgaggagtatgcgagagtcaagaaatgcagctacaaagacatgtcagtcaaagcttgaggcaaaggtcatcatgggaggggatccaagcttttgcgacacgtggaggtgtactcagctcatgcagggaccacacacagaaaagagcgaacgcagaaatgcgaaatattcactgaaaggtcaactgatacttgg

SEQ ID NO: 76942 - DNA, 156 bp, Arabidopsis thaliana landsberg
  unsure (1)..(156): unsure at all n locations
ccataacgcgatctcattttttnccgactttcgtctgccgatcagctttcagttattcagaaaatactttgcagtctcgattgctttgataccgcctttggcactttcggtcttaatctctcggtctttggctagcaattccgatctcttgcattc

SEQ ID NO: 76943 - DNA, 447 bp, Arabidopsis thaliana landsberg
ttaatattctgagacacggccaatatctcctctttctcctttccctgaattgtaattcatctctactttatttaggctctagtctatgctgattctgtatggattgctatcaacaccaattcgttgctgctgattgtaattggaacatattgttacctaattgctttgacagagtcatgctctaatggatagtgctctaatagataatctacagtcttgtcgtctattatgtggatttatctatgcacacgatcttgcttaacattgttatatgttgaggataacttatatagacccgtgcttttgcttgaggtaaagatccggaacggaagctgatctatgtaagcttatctgaagatgagactcatgatcaacttatagagagtgtgcttgaaggacctgtaaatgttatccactaccgctttgtattggaggtatcatatgcac

SEQ ID NO: 76944 - DNA, 524 bp, Arabidopsis thaliana landsberg
gaatccagacccgggaccccgcgcgcacggaacgtcagcgtcacctcttcgagtgacccgtttccgctgcggcggacgtgctcggccagcgcgggcacgtccaccccgtcaggaccggtcacggccagccacggcgtgcccggctcgtcgagtcgcacggtcacggtcgccatcccgtcgcgggcgcgggccaggccgttgaacaccgtcacgccgccggggcccccggacccgccgcccggggagtcactgccgccggccgcggcgaggaatccggtcgcgtccttccgcgccgcgtcgccgcgctgccacgcctcgcgccagcccgccagcaggtccaggtaaacctggtcggactcggtgccggtgatcgcgtcgtggtgggcgccgtatgcgagctgccgccaggccttgtccagtgactcggccgggtagggagcgccgcgcagccaggcgagcgtggcgaagcgctcggcctcgctgacgcggtgtcggccgccgcgttcgttgcttcgtgtcgatgt

SEQ ID NO: 76945 - DNA, 593 bp, Arabidopsis thaliana landsberg
tattctatttaattgacatatactgatagattaaaataaaattactttcatatagaatttatagttcaatgactagctatagctaatatgtattcttttgaactgtattagtatatatacatacatgataaagtccttttgtatgatccacatacatatactttttacatgaatttgaagagtacaatcatatcaatatgagtcgataaatggatttttgtaatcatatacgttttcatccgtttccaaaaattcaaagctggcgactgttgttatcaattatcgtgatttttcttggaggcgttagaacagtattaagacaaagaggaaactaaaatcacatcagtaaatttaaagtaaataaaatggtggtatttcatcgactatacacatcgattataaaaacatagcgattaatctacattttacaagattcgagttggtaggtaagggtacgtatttttatgatataaatactgtataaatataagatagtatatttcatataagaaaacaaaataagagttgtgtggaatattaaatagactatcgtctattgagacatagaggcaagcaagtaattcacgagatac

SEQ ID NO: 76946 - DNA, 388 bp, Arabidopsis thaliana landsberg
cctttacacttttgacaaactatgccaatcttttttatttggcaagcgcttactaaaccggaagtggattcatttttttattttcattattttatatataaaaccacttccaaataatttaccatcaaagtataatatgattggttgtatgaataaaatttacgatctgacattttattattactatgcatagatcatattagcaccaagggattttattatataacatatcattacatatataaaaaatacatatcatacaccacgaatgtcgtgtgtatgcaccatggacgcttgtttcgaatacaatgctacgcttgggattgatacagccaaacagaagagatgtaaattatattgagggacttgtacaaagaacgatgaaaaa

SEQ ID NO: 76947 - DNA, 603 bp, Arabidopsis thaliana landsberg
ctccagtacagctggtgacacagtatcttgggatgcatcttttttattgggcagcataccattgttcatcatagggtagcgtgctatgaatgctgaaggattggcaaaggtgtgtttggcattccagaacagttggtgtgctttgctgtggttaccttgttctgtttcccatttcaaaaagtcgatccaaatgtcttcaagtcgtcagatcgtcagcaactagtaattaccttctgattcttttccttgatcaataacagctttgttgtatattttccgtattctttcggtatccactgatggacacaatttctcaagcttcacacacaacaaatagtatgattctgacactggaggtgcatcaagagtgctaagtgaatgtgagcacgacatttgtctgacagttgtagataccactcgtagacttgacgtgcgcgctctattccataagttaatgatgttcttatcagaaaggcatttctaatgctccaagaatctcttcccaaaacaatgattgctctctacgcatgatacgatcaacaagtataagtccaaaccttatagtgtgacagaatggtatcgaaatctacgttagaaagaacg

SEQ ID NO: 76948 - DNA, 495 bp, Arabidopsis thaliana landsberg
  unsure (1)..(495): unsure at all n locations
atgtctatgtagtccgggctgatgtattggttgagcacttcgctgtcgtccaatgctcgcatttcgtcgcgcaggttgttcggcaggctctgctccaattgctcgtaggaattgccttcgatcggcgcacccggttcgatcttgctggtaagaccgtgatggataccggcgaggatcgaggcgagcatcaggtacgggttggcgtcggcaccggccacgcggtgctcgatgcgcacgttgtcgctgctgtcggtcggcacacgtacggccacggtgcggttgtccaggccccagctcggcgcattggggacatagaactgcgcgccaaaacggcggtacgaattgatgttcgggcagaggaacgccatcgacnnnnnnnnnnnnnnnnnnnnnnnnnnnnnagcgtggcgcagtgcatcgctctgcagcgggtcggcactggcgaagatgttcttgccggttctcttgtcgagcagcgagatgtgcacgtgcagg

SEQ ID NO: 76949 - DNA, 489 bp, Arabidopsis thaliana landsberg
cgcgagctgcggtggccacatctcgcccatgcgcgccgagatcagctggcgcatgcgccgcagcagcggcgcgacggccggcgtgaacgcgatggagtcgatgcccatcgcgtagcccgagggcagcagcagattgtcgtagcccgcggactcggccgtaagggcgatatcgcggcagtgctgccagctggactgtagcgccgggtcgggcacgcccaggaactcgtagtcgtcgtcgcacaacgcggagaaccaggaaacctctgagctcatggggtcgaccctatccccggggcgcctcggaagcccctggaatgtcagaccccccgagtagattcgaatgtgactccaaaagattcgaacgggagtcggagaataactggacattgccgcgaacctgtgttcgaatatggcgtggggcgcaagcttcggtcgacgagacccctggcggccgaagcgggccgtgcgtggtgtggggaagcaccccgt

SEQ ID NO: 76950 - DNA, 583 bp, Arabidopsis thaliana landsberg
  unsure (1)..(583): unsure at all n locations
ggtgcaccccagcggctactacgcctggctggccgagcctcaatctgcccgagcaaaagaagatcaacgtctgcttggcttgatcaagcacgcttggctagaaagcggaggtgtatacggctaccgcaaaattcacgatgacctacgtgagctgggagaggaatgcggacgaaatcgagtcgggcgcttgatgcaggcggaggggctgcgttcgcaaacgggctatcggcggcgtccagggttttacggtggaaaaccaacagtggcctcgcccaaccacctcgcgcggcagttcaaggtcagtgagccgaacaaggtctgggtgacagatatcacttacatccgcacctatgaaggatggctctatctagcggtagtgctggatctgttctcacgccaagtaattggttggtcaatgaagccaaggatgtgcagcgacctggctatcgacgcaatgttgatggctgtgtggcgacgcaagccacagcagcaagtgatgattcactcagatcaaggtagnnnnnnnnnnnnnnnnnnnnnnnnnnnnnnnnnnnnnnnnnacaatgtaatcagcagcatgagt

SEQ ID NO: 76951 - DNA, 517 bp, Arabidopsis thaliana landsberg
accaatgactgccttgaattggaaaaagctttaattttttccttttcaagctatttggtttgactaaaggagccagtgttgatttctttaaactagatttgagattaaagactttcttaatcgtacttacaaagctgctagagctgatattagagtaaatccggcaacgaaatattaaaactcgccggacaaaaagaatccagtcaacggcgattcaacaatgtttggacttataaatcccaaattcgatatacctggaaagcagaagttgtagcaccgaacaagaaaccatcaggaaagcttccacgaccaaacgtggaactcgccggacacacagctccaccgtagacggtgatcggaaaaactatcacgacgagaaataaacccaaaaagagaatcgctttgagtgccattcttcaagtaagtcttttttatgcttaacgtggttgtcgtgttccattatttataagagtcgagatcacaaagaagaagaatttaaagatcgttgttttgagat

SEQ ID NO: 76952 - DNA, 171 bp, Arabidopsis thaliana landsberg
caacaatagacaacaaaaccacgaccgaaagacacaaaaacacccgcggaaccgaaacgccaacggacgcaaacaggcacgagatcgaaacccaaaacacaacccccgggagagaccacaagacatggacacacccaaaacccactacaaaaacgcaaccaccccccccgg

SEQ ID NO: 76953 - DNA, 596 bp, Arabidopsis thaliana landsberg
ccgtattcattggtggttaattcacgctctgctgctttttgataattcacgtcttttaattccacgtgtgctttgctattggtgagcaatcgcgggttttttccatcggtagaggccacccggatccctttgaaataaatggtttggccaggcctgtaaattttacggtcggtaaaaaaataagtctgcacctgctcataaggctggcggtcatacggacggtactggtaatgctggcggtccgatacaaaacggtcgttgttgtacacaatatcggcaaagaaatatcggtaatcgcgagtaggggtttccaccactatttttccatctgcatcggccgtataggtttttccgcggttccgtttgtagctgtacgaacgcgaatcgtagtcataattgatcacggtgaatttggcaccggacaagggtttgcctgtgctgcggctcacgatataaaaagtataatcgtccttggtgctcgatttggtgtcgatataactgatgtcggacacatgcacttcggcataattgatggcattttccttgagcttataatcgcttgaggccgaggagatcacataatatgaaccggccgg

SEQ ID NO: 76954 - DNA, 439 bp, Arabidopsis thaliana landsberg
  unsure (1)..(439): unsure at all n locations
ggaataaaaagaagcttggtaatggactaagaacttttacatctgataatccgagaagcttaattataatgtaagagttacgatttcaagtcacgatttaccattaagggtttggggtttacgctttcatgtatatggtctattgttacatggttaggtgtttaagcactcatgtatgggcatnnnnnnnnnnnnnnnnnnnnnnnnnnnnnnnnnnnnnnnnnnnnnnnnnnnnnnnnnnnnnnnnccgttatatggtttatctttcttgataactggttagagaatataaatgatatctaattacactctatgcatcaagacatatacagcactacttctgggtgtctaatattacttcccttcacacagttgacagcatgacacctcttgaagcacccattcaccatctgaacttcagttatctttccttgttgga

SEQ ID NO: 76955 - DNA, 545 bp, Arabidopsis thaliana landsberg
  unsure (1)..(545): unsure at all n locations
agccatggaggacctataagcaacctcctcgttttttttaaattatcgncaaaactcaacctcaagcacctgttattactcctgaaatttcttaaaatccgctgagattccctggtgttttcacgcttaaatcatcaaaccacgtattttcttgaatcataataaattaaggtttgctaagaaagccatttccgttttttttgggggtccaattttttaaaaagcttctgcttccactgtagaggaaccaaaaaacgaaagcgaaacctggaatcaagatctttaaactcttctcacattgggagtaaaagtgagcgtanaaagttgtaaataaatcgccgaacataacataaaagattctatattcccccataggagatcatcattcataattataccgagaagagatgataaatccattctctctggtgaacgtcgagcaaaactcatgagtatttttcaatntatgaagaagcactgtctctctatagaagaagaaatgtctattactgatctttgttacttcactaatgaggataggaaag

SEQ ID NO: 76956 - DNA, 555 bp, Arabidopsis thaliana landsberg
tacaatataaagcagttagagcagggtctttgaaatcataaggagttgattaaattcataggcgggtgggagagacttaactatgaacaaacctgccttaatggaggaaagttagtgtcgacaacatgtggatttatagggagctatgacagtagttttatgatgctttcagtgtatgatagctctggaaaggaagtacagctgtggagtacatgtctacagtcttttcctgtctcccctcatccagagtgacctttgaatatagcctgtgggagtgtatgctccatcacctgggtgattgtgcttgtatagggtttgacttcttcttaggcctattaagtgaaaatatattgtttaagagaattgcatggtagtttgcaggcatattccagtttaagaattatagttaaaacctgtatttgatttttattttataatatctattacattctggggcaagaaaatcaattacctgtatttacagaatacgtatttctgtgttttcattactgggatggattcagagtctccatctgttaaaagtgactatagctg

SEQ ID NO: 76957 - DNA, 550 bp, Arabidopsis thaliana landsberg
  unsure (1)..(550): unsure at all n locations
aatacatgaaagactttggtggttgtggttcgttttttttaattttatttatgattttcttttcataaatcttaggtacggagcaaatggatgactgtctcttgatttgtttattttattattcaaaatgtatgcaaagatcttgataacttgaaacataagacattaaaatctaggtggaaaaaaacatttgaaagcaagtttgttccatatataaattgcaatgaaaataagaaaatgtgaaacatattgatggttttttccttttcctttcagtaatgttcttatcaccaatgttttgtttggcacgatcatcaaatgtttagacatgtggatcaacattgtaataattttctcttcaaatgactgactcttttttttttttttcaaaataatgtttttcgtaagtgttaggtgtgaagaccatcatgtttttgctagattcttgtagatctcaacattgatatttgtagatatctatcaaatcgntacagaaagtttgctagattctaaataatgctagaaaccagtttcttacaaaatgttttgt

SEQ ID NO: 76958 - DNA, 208 bp, Arabidopsis thaliana landsberg
gaagccattaccgaaactgacgagcaagtcgttcctttgactagcgtataagggcaaatgactaatcgcaccgtctatttacctgtgccaaccgaacgtagactcaagacacctggaggctggacgagcgttctaaccatgaaagtcaactatgcgtggcgttcaacgcacaacaccttcgaccttttcttaaactcataactgttgt

SEQ ID NO: 76959 - DNA, 664 bp, Arabidopsis thaliana landsberg
ccgaaaacaaaaggggctcgaatggttaggtgacaatatacttagcatattgattaaattttagtgtaagtcactcaattatttgtatattataggatttgatagttatacgtagcattagccttttaaaaaaatctattatgtgaacttaaatctaatttttttctttctttttaataacatacaccgcttagattccacttagctgtttgttctattaagcaaaataatcataagtttttcttttttttttatgtttgttgtgtttgattgatttattgtatcacatacttctttccaacactctctacctaccatgtaaatacttttgtaaaggttgctataaccaaatcgggaattcagacactcaacagaaaaaaagagacttggtatatatatataaacacacacggtgagacttgagagatattattttgatttcttactactaaagaaatgaaaatggaaattgaaaaagaagcataaagaagtgacaattttgggaaatgggggatagtgagtgactgagtaattaagtgttatcacactctcatagtgtcatgctttcaccaaccatcagccccacaacttttgctaagctccaattgtatctgatcatcacttgaccaatctatacaataatactttgggctgattacagagc

SEQ ID NO: 76960 - DNA, 335 bp, Arabidopsis thaliana landsberg
ctaccacaacacataagctttgtcattcgacaagattgtgcgcatggagaagattaaagatgattatcatgccatggatgagcactattgacatgtccaatgatgagaaattgatccggaatggccagacatggctgcattataaaccaccgtgccacattgttgacggattgtgtggtctcatatctcggatccggttgaatacatgtgacacggtggatactttgcatattatgacgtcatgaataagtctgtggattggcttttctgtacacgtattggacgaggctctgttgatgcggatcatcactttacatcatggagtcaatgatgca

SEQ ID NO: 76961 - DNA, 441 bp, Arabidopsis thaliana landsberg
  unsure (1)..(441): unsure at all n locations
gcacgggggagcggnnnnnnnnnnnnnnnnnnnnnnnnnnnnnnnnnnnnnnnnnnnnnnnnnnnnnnnnnnnnnnggggctgggggcaaacgccacaaacaactgagccaccgcgaacggtggcccggtcgttgccgcgtccatccggcggatcagccggcggacggggccggcgtggtgtcgttgtcgtcggtgggcgtcaggcttggcacttcgctggccggcaccagcagtgcgttgaccagcttgagatcctgcacggtcagtgcgccggcggcttccttcaggaacagcttgttgaggatgaacgcatggcgcgcctgctaatactgttcgcgggcgctcatcaggttgccctgctcgatcagcacgttgacgatggtctgggtgccgacagacagcccggcctgcgtggccttgagcgcgctttgcgatgagac

SEQ ID NO: 76962 - DNA, 432 bp, Arabidopsis thaliana landsberg
  unsure (1)..(432): unsure at all n locations
nnnnnnnnnnnnnnnnnnnnnnnnnnnnnnnnnnnnnnnnnnnnnnnnnnnnnnnnnnnnnnnnnnnnnnnnnnnnnnnnnnnnnnnnnnnnnnnnnnnnnnnnnnnnnnnnnnnnnnnnnnnnnnnnnnnnnnnnnnnnnnnnnnnnnnnnnnnnnnnnnnnnnnnnnnnnnnnnnaaaccagctttctaaagagttggtgnnnnnnnnnnnnnnnnnnnnnnnnnnacctggacctactcaccatgcatcctgtaaaaccacaacaatgcatagctaggatgataatgcagatcataaccttttgcaaatcaaagaagagtcctttttttgacatcacagcactaccatgcatttcagccgcgttaataccacgagtactcgtctatcggcggccattatcaaataatcacccacgggcctgatcggcta

SEQ ID NO: 76963 - DNA, 570 bp, Arabidopsis thaliana landsberg
acgaggagaaagtgaaggatatgtctacctatgaacttttctgttttcagtattctatcggctttaattatggggtgggggacggaaagatcacggtagatcacggaaaacataccggaatgcggggaggaaaagtattgaagccacaggtgatgtaatggatacaacgaaaactgttaataatgcatatgtataaaccaattgttctggccctgctgctggcggggaagctatacgggcaggatgttaccaggctgcatgagaaagcggcggtcggtggattcgcacaacgacatactcaccgcctgtatcgaaaaacaggtaagcatggatgccgacctgataggaaaaacacagtctgatctcttccgttacaaacagggaggtgtggatgtgcacatgttttcggcatggtgcgatggaaacaaacccgatccgtttggctgggccaacatggaaatggatacgctgtatgcaatggcagcgcgcaatcccgataagatcgcgatcgtaaaatcctggaaagaactgcaacacgccatccggcaataaaaattacccgccatgttc

SEQ ID NO: 76964 - DNA, 216 bp, Arabidopsis thaliana landsberg
tttttttatataaataaaagtgaggagacccgcggggggtttacttccacaccgaatgtacatgacgatactaaatagcaatgagatactctagaacaaaaagattctgtaaataaagcgagttggcacactcacaaatgtgctaactgaaaaaataaattgaacatacagactaccgcggattgaaacctaggataatgacagtggttgcaccaa

SEQ ID NO: 76965 - DNA, 550 bp, Arabidopsis thaliana landsberg
actggtggaatccgaatccggaatccagaaggactcgtcgaaggtggtggttcccggttgtgagtacatccactgacgatctccgtcatggggcacctctctctcctcgctgactacagcaacgtactagtcgatatcctcgccggatctccaccaccggacaggtcgctgttaccggagtcttacttcaacgtctcagaatccgacgactctccttcgtcggagctgacgatccgtttcgcttggatcatcctcgtcctcctttgtaaaatcgatcgtaaatcaattcactacaaagacttctctatacagtatctcttcctcaccaacaatctccagcacgtggtctcacgtgctcgttcctcaaacctgaagaaccttctcggcgaggattggatcacgagacatttcgctaagatgagacaattcgccggcagctataagcggctagcttggggaccggtggttgctactttacctgagaatcgtacggtggagatgacgccggaggaagtgaatgagcggtttgaaaaattcagcgagagcttcg

SEQ ID NO: 76966 - DNA, 624 bp, Arabidopsis thaliana landsberg
  unsure (1)..(624): unsure at all n locations
nnnnnnnnnnnnnnnnnnnnnnnnnnnnnnnnnnnnnnnnnnnnnnnnnnnnnnnnnnnnnnnnnnnnnnnnnnnnnnnnnnnnnnnnnnnnnnnnnnnnnnnnnnnnnnnnnnnnnnnnnnnnnnnnnnnnnnnnnnnnnnnnnnnnnnnnnnnnnnnnnnnnnnnnnnnnnnnnnnnnnnnnnnnnnnnnnnnnnnnnnnnnnnnnnnnnnnnnnnnnnnnnnnnnnnnnnnnnnnnnnnnnnnnnnnnnnnnnnnnnnnnnnnnnnnnnnnnnnnnnnnnnnnnnnnnnnnnnnnnnnnnnnnnnnnnnnnnnnnnnnnnnnnnnnnnnnnnnnnnnnnatatattttattgtcatagctcggtcgttgcgttttctattcttcagctgaatgtgctgaatattactttatattttagcatatgcttgtgttgcttgcttatgtctactccattttatctttaagtattgttcattggttttttttatgattattattttttcccttttttttccatttgtcttttttatattttcttcttctttttattttttttagtttttttatcttctctctgctttgttttctttttgtatatctatttttcttcattttttctct

SEQ ID NO: 76967 - DNA, 459 bp, Arabidopsis thaliana landsberg
  unsure (1)..(459): unsure at all n locations
aggatcgtcatcctctaaggtgccttatacgcttccaaatttaacagctttttttgcactggtttcaggagaaaatagaacaagttaagagatcaaggttgatatacatggctagctnnnnnnnnnnnnnnnnnnnnnnnnnnnnaaaattctactgtatgttcattggtatattatttcctaaaaatctgatgcaagattcgtaccaacataggcatccactatctactccttaaagtgttcaagactataattccaaatcatatgccattaaccagctagccaatagtccaaagaggaaaaactagcattccattcaaatgagtaaagtggtttaacatatttagatttatggggtcaaggacaataacatactttgcgtttaaatgctgagagactgcaaagccaatccagttcattcggtgattaggcttcaatgtcaaaagctgttgcctggtc

SEQ ID NO: 76968 - DNA, 523 bp, Arabidopsis thaliana landsberg
tttgggattatggcgcaaaagacactaaccaagaatctccatatggtcataccctagagaagaaattttacttttgacaggtttctgaatctatattaacatatgctttgttagtgacaagacctggtaaaacaaatcttaatctgacgaaaaatgacttttcttaccacattagtcgcatcgaatctcccacctaagccaacttctagtataacaacatcaacctgcacataccatcaatgacatatatgtctaattaaatcacatgagttaagtttaccttagtagaaaagagatttaagaacctgttctgttgtgaaaatcttgaaagctaataaagcaaggaagcagaaataagtaggcattggaacctcattgctggttttctcctgcgctttaatgtggaaccatataacgaaatgagagagacagaaaaaccggaaaggtatctatatgaatgttctgtttttactcctcaccttgagcttatgaaagcaacaccaaaagtagttcacaaatttct

SEQ ID NO: 76969 - DNA, 578 bp, Arabidopsis thaliana landsberg
aaaactacgcgccctgccgtattatccttgccttcgttttgtatgatcagacaaacgacagggaagcggaagctattttaaaagaaacgatcgaaagcggcactcctttactggcacgacttgcgatacatatggtgcagtaccagcgacaccgcgatgcattagttcccgcggttcacggattactggatgccatcgcgcaaaaaaagagaccggcggatggcaaatagccggctgagatatttatgtatagcgttaaacaggttccgttgcattatgagactatctggtcacatgttttgttggcctgtggtcgatgtaacaagccttgaagtataggtctacttattgcctttcattttaaaactattattatgaagcgaacattactcacaatgcttgctgtggcttctattgccataacccaggcccacgaattcagggaaaccatcggtgatgttacaacaacgcctacggcgaatgccggttacacaaggtttaccaagtacagtactttacgtatatctggaacagtcgacctgcgcaacaccaatacctctacagggtactggaacgca

SEQ ID NO: 76970 - DNA, 434 bp, Arabidopsis thaliana landsberg
cctggtatcagagcctaccgtgacctcggaatcaaaggcttacacttgctcgcagatgttgtatctggaggtgggaccggttcacgaaactatgtatccgtcatcgaaagtggttaggggtcacaaatcggatgtgcgggacggctaagcggccacgactactcagcagtttggcagtcaatactcaccgcgcatacgagaatcattgctggataccagagctaaccacattggatgatactgacagatgatatctacagctacgatcgacactcctgacaccatcaaagagagagtcggtatgtcaaacaactctcttccattgcacgagacatctgacaaagcgagactagagcctatcagatctcacggtgatagaattacagcatggatgctccagattgaacaattacctttaatcgatcgtactccgg

SEQ ID NO: 76971 - DNA, 470 bp, Arabidopsis thaliana landsberg
tctgccaacacccttcggatgtatctatccataaacatagcgactaatgtaaatcttttaaaaaacataaacaatcaatagaagagaaatggtttattatttacgtcaactttatcactcataacacaattaattcatactgaaagaaccataggaagacgatgcaatgattatatatcatactgactgcacacatattaataatgatctaagatgctgttaaaaactacaccagtcgcatggctataaaccttgaactactgtatagctatgaacaaacacatacattaaagaccacaagcatcataatactgtaaaaccacatacattgtttagaagatcttatgacaagaacttatacagactaaggttgaccatacaaagcttaacactactaaaaacagttgaaattcacatagatatggaaaacgaacattgatgacatatggaaatcactttacatagatcta

SEQ ID NO: 76972 - DNA, 535 bp, Arabidopsis thaliana landsberg
aatcaaataagtatatagattatagtatgtctttatcttgaaatatatggaaaacaaccatgtcgtactgcgcaaaagaatatgatggaaacaaagtaagtctgtaaattgagtacgtgtactgtatcttgagattaattagtctgtatactaatatggaagtgctagaatcgaatccaatacttatcatacatacaaagcaatggtcagaatatcccaaacattagctgaccgaccatttaaacacaattatcctggagataatcataattataatccctatcgtggtgctttaaaattctcatgttgatcttgtctataagcagcactttcgctatcatatacacatatttaagcagcacttttcattgcatataacgaaataatgaaccacttgacacatgcggctatatcttattaaccatatgatatttgccatatagctatatagatggacactattactgtttatagtcaaagtcatcgtggtgctcagaatatggcactgacaaaagttgtacgcatgagattgaat

SEQ ID NO: 76973 - DNA, 516 bp, Arabidopsis thaliana landsberg
tctatcagctcacaaccactgtacaagctaaactacacaatctaaaccggagctaacgagttaactttaggcttaaccaatcgttggtaatatagaacaagatacacgtaaaccattatatatgccaatattgtggttacaaaagtgaatgatgtatacagtatatatggttattgatccacgttatatcatatatttatgcaactagtgcataacaacctatacaaagccaggaatagatatagatctttcaagaaatgtcttacaaactaatcaaaatacttaaatccataataggactcgtgaactgatatattgatgtctttgagtattaaacatgtttatactaatggtcggttatataattagttgataaatgatcatattgtttatctggttgaataaacgtttgccaagcgaatacgcataatgctcacgattagcatactaatcataatcggagtacaagagaatggtgcctgagagagagagcagaatcggagttgtaatgtgaat

SEQ ID NO: 76974 - DNA, 512 bp, Arabidopsis thaliana landsberg
tgactgtcgatgcccatgacgcgcagggcaccggccgtcagtgccacctgacgctccagtggtttcgcccattaagcgcggccgcgcgagcgcacggtatgcgtgtggcagaccgtaatggtcgtcgttgtggcgcggcgtggtcggtggccgcagccactgccacaggcgccgcagatagccgaagcccaccgcctcgacataggaaaacgttgtgctgggccagcgggtggtgttctgccactgaccgtgggcagccagtcgccggagacgctgccgacgccccggcgccggttccggggactcgccgggggcaggcaggatctggtcctgcacctgcacttggggaaatgccaggcccggcagctgtggccggctcgtctgtgcgcccagcgggcgatagctcatcgggaagccgaagaagccggcgaaggcacgcgtctggatgcctgtatgcaggggctgcagcgcgcggcgcatgggctcgctgcggatgtcgatgcagaacacca

SEQ ID NO: 76975 - DNA, 591 bp, Arabidopsis thaliana landsberg
aactcataaaatttacacgcttcttcactactcaacttgcgtctgtgtttgtcttcctaatccgtaattgtgtctctggtctgcgtctggacaaaaaaaaaaatggaatggatacaatcactgcccaaaatcgagcttcatgctcatctcagcggttccattacagactccactctactgtaaatcccccaaatttatcttctttcttacgagttttgtttccattaactctatctttcgtatctgcaactttctgtaattgcactgatcaattatgaatttacccaatttgatattttgaactgatgggtttcgattcttttgatgaatcagagagcttgctagggttcttggtgagaaaggcgttatagtgcttgctgatgttgaacatgtcattcaaaaaagtatgagtctataactttttgacattcttgatctgtattatgcttaagctctagtctattctagtgtcgcaagtagtttgtaatgtttggtatgtgtgatgatgttttcttataagacgatcgatctatgatgaagtcttcaagtagttagacttgatccataagctcactactgatcataaaactg

SEQ ID NO: 76976 - DNA, 543 bp, Arabidopsis thaliana landsberg
  unsure (1)..(543): unsure at all n locations
ccnnnnnnnnnnnnnnnnnnnnnnnnnnnnnnnnnnnnnnnnnnnnnnnnnnnnnnnnnnnnnnnngcgctgcaagccgcctgggtcttgcctgattcatttcagccgtaaggtaagtgggccaatcgctccagaagttgcggtctgaacgagctgcgtgcgcatttgcagactccgaagttggttcgtcctctgctgaaagcatccgcgctggattcgtcgccaatcctgccgctgcgatcagattcgcagcgaggaagtctcgtcttgtcgtcataatttacattccaatatgaaatttaagacctgccgcccgtgnnnnnnnnnnnnnnnnnnnnnnnnnnnnnnnnnnnnnnnnnnagatcagccacatctcgcgccctcccccagcgagggggaaagcctcagcaataccagaatgctgaactgattgtctcttgataaccctcaagaagttgacagcgaagcaaaacagtactaaacgtaggtaaaggtaacatagacgaaattaagatagcagggcggctattcgcttcaacgagc

SEQ ID NO: 76977 - DNA, 536 bp, Arabidopsis thaliana landsberg
tgatacttagtataggttaatagcagtaaactccattgtgctcacaaaacatcttcacatcaattctctttagtaaatgaaaaaaatgctcaattaagttcggttcaaaaaaaattcacaaacattttaagtgcaacaaacaatctaaattcaatataagaatgttcaagaatactagaatagtctaacaccaaacccaatctaagaaaattcaacactaaacatcaacatttagacatcaattcgtcctaatctaacactaagattcaatagaaactactcacattaacagtcacagatactgtaattagctaaaaaatattattagaaggaatgaagaggattgggccacgtaggatcacacgcgcccgcgagtgtaaaaacgtacgaaattatgaatcttttaataacaaattcgaaatttgatgccatttcaaaatcgaagctcacacacacacacacacatctttcgcaaaagctatttggggattttcaaatttgaaaacaaaagactcacagagactcagacccaccac

SEQ ID NO: 76978 - DNA, 363 bp, Arabidopsis thaliana landsberg
cttaccattgaccaatatgaattttaagggcaacttttttaagttatttatgggatacacgtagtcttgggggaaaggaaagacctttatataaggatagtctcttatcaaaaatgataacacatttgtgaaaattaaattttacggtcagagacttattcatatcgcatgataacctttagcaatgtatggacattcttacactcgtgcattgaagaaaagaagaatatcaacggtcgacttcaagaagcatacactcaactttgtcacaagctctgctcacaacttaattgaaatgccacagaacatcgggtagctgatttttatgcactgaatgcaccaacttgtgatttccacatacta

SEQ ID NO: 76979 - DNA, 607 bp, Arabidopsis thaliana landsberg
gagctcgtgtgcccggaagctgccgtgatcaacggcggtgacggccgccatgcgcaccttacccattgcatgctcgacatgctcaccatccgccgccacaggggcagcttcgagaacctgtcggtggccatcgtcggcgacatcctgcactcgcgcgtggcgcgttccgacatgctggcgctcaaagcgctgggttgcccggacatccgcgtgatcggcccgaaaaccctgattccgatcggaatcgagcagtacggcgtgaaggtgtacaccgacctcgccgaaggcctcaaggacgtcgacgtggtgatcatgctgcgcctgcagcgcgagcgcatggccggtggcctgctgcccagcgaaggcgagttctaccgcctgttcggcctgaccaccgcgcgcctggccggtgccaagcccgacgccatcgtcatgcacccgggcccgatcaaccgtggcgtggaaatcgagtcggcggtggccgacggcaagcactcggtgattctcaaccaggtcacctacggcatcgccgtgcgcatggccgtgctgtccatggccatgagcgggcagaacgcgccacgttcattcgaccaggagaacgctcagt

SEQ ID NO: 76980 - DNA, 571 bp, Arabidopsis thaliana landsberg
atatactccacaaaccaaataaaaacatatgtaatcattatcaagactgaataattttttaactaaactatcgctctcaatatacatgatgttaatgcagaataaaacatatatccatttacttctattttatgctaagctctttactttttatataaaataaaatcaaattaatgttaaatttaaatctagtaacacggtttgcatggaagcgccttctttcccaacctaaactattgctctcaataaatttagtaattctattttttttttctgaactatatgtgataacgaataaattagtaatcatttcctaaccgaattactcgacaaaatgcgattgacatgtctggttcgaattgggaccttaagggacaaaactaaaacaagttaggtaatgcgcaaagaatgtaaagcaatttggaattaatggtcaaaaatagcaaaaatatggccaagacgtaaatggagagacatatacacacacaaaatattttacatttaattagaaacctatattcatagttttggactttatatatctcaatccaactaatctttcttttctttt

SEQ ID NO: 76981 - DNA, 285 bp, Arabidopsis thaliana landsberg
tcctgtatgatttacatgcaggcgttgtaggtgttatacatacggatacagtatagttaatcagtttggatatggttgcaattatgtcttcattcataagttcgtactatacgtggctagtgacgtcaagtgaatctgtatacgcaatttaattttaaaacatatcttctcttaaaaagttgggcatggtcaaattgggaaagcttagcccattaagataatgttcagaatgatttaaataatataaagtaatcttatgtcatgtgagctaccaacgcaatgtat

SEQ ID NO: 76982 - DNA, 527 bp, Arabidopsis thaliana landsberg
  unsure (1)..(527): unsure at all n locations
ccctgcnnnnnnnnnnnnnnnnnnnnnnnnnnnnnnnnnnnnnnnnntgaccggtgcccgcgtctaccagctatgggtgatgacgtcaggcacggcgcggccagccgggctgctggccgtcgggtcggcgaccccggtcctggtggccggggtgcggtccgcggaccgcatcgggatgacggtggagccggccggcggcacgcgccagccgacgacggccccgatcatggtcatgcccgtacaggcctgacgctgttcccggggccggggaaagccgcccgctggtgagttcggtgaagtcccatgggtctgcgcgtcggattccaggagcatcagcgcgttgccgttgttgatagcctcaccgctcacgtaggcgtacaccgcgttcgggccggcattgatgggcggcggaaagcggcgctgagccgatatgcttcgaagctatcgtgggttgtgaggcctccagtggaagaaccggagccccggtcgtcagtgttccgtcggagcgcagtcggttcgtcgagcgc

SEQ ID NO: 76983 - DNA, 151 bp, Arabidopsis thaliana landsberg
  unsure (1)..(151): unsure at all n locations
aaaccacgtcggagactcagaagacttctcggtgaccaattgaagaaccaaatcaatgacagagtgacataagtaagaggaaagtaccaattaatcggagaccgagaaatcagannnnnnnnnnnnnnnnnnnnnnnaccggcgttgaatt

SEQ ID NO: 76984 - DNA, 343 bp, Arabidopsis thaliana landsberg
  unsure (1)..(343): unsure at all n locations
atggccaataccaagaacaattatatatttaaaacccaacaaacaacccactgcggcgattttatttaaaacacactcctcccnnnnnnnnnnnnnnnnnnnnnnnnnnnnnnnnnnnnnnnnnnnnnnnnnnnnnnnnnnnnnnnnnnnnnnnnnnnnnnnnnnnnnnnnnnnnnnnnnnnnnnnnnnnnnnnnnnnnnnnnnnnnnnnnnnnnnnnnnnnnnnnnnnnnnnnnnnnnnnnnnnnnnnnnnnnnnnnnnnnnnnnnnnnnnnnnnnnnnnnnnnnnnnnnnnnnnnnnnnnnnnnnnnnnnnnnnnnnnnnnnnaaactatattcctataac

SEQ ID NO: 76985 - DNA, 548 bp, Arabidopsis thaliana landsberg
  unsure (1)..(548): unsure at all n locations
ctaccgaggacgaagtgctggtgttattaatactgaatatcgaaaagaatgagaaagatttgtcctcaatacaataaacggtgtgcagtgagctccagtgtgtacacaagagcccattatcgatagagaattccgcccccagcgcgatatgggaagaggcgtaggtctcactcggtagccaataattagaacgctggtggttaagcaccggtggcgccgcccacttgcctccccacagcccactcgcagccgacttggtagctcccctcccctcgggcgggccgcctgctctgtcctgcctgtacccaccgccgccgaacgcggccttggctgacgcggcgccagtgttgccggcagtgcgggacttctccaacgccgcacgcagcagccgtttgccctcgtccaccgcgtctcggggcaccttcgcggtggggcccacgtcgccgccaagcaggctgccgccctccncgagggtgacgcccagggtctggttcatccgcactatcggcgtgtcgaaggaattccggcgatgaggaagggctgaacgt

SEQ ID NO: 76986 - DNA, 399 bp, Arabidopsis thaliana landsberg
aaatcgaggatgtggtttgatccactctgcgagatgtgaaccggtggctgttggttacgcatgtattgacaaaacgtgttccagtctcgtcgtttctgtgactcgtaccggcttaacgctggcgggttaggaggtgattgcggttggtgtggttgtggttgcggttgcgattgcggttgagacgatccttctgctatgcctttgcctttgttgctaggactagccatggtagaacgttgatggttatgttgacatgatcatcacctcaggctcatagctaatagatacgattcatcagaaaagaaaaagtttttttttttcttttggtcttgaaaggagaagaagaggggaatatagagaaactatgtcaatgatggtgggggaaaactttagaaaatt

SEQ ID NO: 76987 - DNA, 577 bp, Arabidopsis thaliana landsberg
  unsure (1)..(577): unsure at all n locations
gcctttgacttgtgccagccnggcgttgtaatccgccggcgtgacttcatcggccggcggcaaggtcagtcggtactggcgcaggaactccagcaaggcgtcgtacttggtcaccggcggcgaggcatgcacgcggaacaacgccggaatgcgcttgcgatcaagaaacttggccgcctgcacgttggccgcgatcatgcattcctcgatcaaccgatgcgcgtcgttgcggggcgcggatcccagcgattgcacttcgccgttggcggacaaggcaaacttggtttcgctcgattcgaactcgatcgccccgcgcgcaccacgcgccgnggccagcaccttgtacagcgcgtgcaggtgctccagttgcggcaacacgtcggccaattccgcgcgcgcatcgtcatcacgctcgccgatggcctgccacacgcgccgataggtcaagcgtgcatgcgagcgcatcacggcctgataaaacctcgaacgcgtgaccttgccctcggcattgaccgacatgtcgcacaccatgcacagccgatccacgttcggattcaacgagcagatgccgttggac

SEQ ID NO: 76988 - DNA, 450 bp, Arabidopsis thaliana landsberg
gacttgtaaggcttgtgtctgttccccatgcttcatctagtccactctgcttacggtcgttttttgtgctattaagaccgcattcgaaatgatcatgatggcacaacagacacctatttgtgggggaatccattacataggaaaaagacaacatatcatttgtaacactgaagactaaatgcctgtgcatctgctcttcatgtgactagacatccaaatacaaaacctggatcgacaatgctctgttcgctatgcatgacatcattgcactatcaggagatgcctattacattcacttatgcggctacggacccaattactaccacatataatgtgacgctcatcctccaccgaccaagctctgtgcatatccgaaacgtccttgtcaactcctatagcttaccaactggtctataaactaataacgcgacatacaaggttgttcttaaa

SEQ ID NO: 76989 - DNA, 691 bp, Arabidopsis thaliana landsberg
  unsure (1)..(691): unsure at all n locations
gnnnnnnnnnnnnnnnnnnnnnnnnnnnnnnnnnnnnnnnnnnnnnnnnnnnnnnnnnnnnnnnnnnnnnnnnnnnnnnnnnnnnnnnnnnnnnnnnnnnnnnnnnnnnnnnnnnnaaaatatataaataannnnnnnnnnnnnnnnnnnnnnnnnnnnnnnnnnnnnnnnnnnnnnnnnnnnnnnnnnnnnnnnnnnnnnnnnnnnnnnnnnnnnnnnnnnnnnnnnnnnnnnnnnnnnnnnnnnnnnnnnnnnnnnnnnnnnnnnnnnnnnnnnnnnnnnnnnnnnnnnnnnnnnnnnnnnnnnnnnnnnnnnnnnnnnnnnnnnnnnnnnnnnnnnnnnnnnnnnnnnnnnnnnnnnnnnnnnnnnnnnnnnnnnnnnnnnnnnnnnnnnnnnnnnnnnnnnnnnnnnnnnnnnnnnnnnnnnnnnnnnnnnnnnnnnnnnnnnnnnnnnnnnnnnnnnnnnnnnnnnnnnnnnnnnnnnnnnnnnnnnnnnnnnnnnnnnnnnnnnnnnnnnnnnnnnnnnnnnnnnnnnnnnnnnnnnnnnnnnnnnnnnnnnnnnnnnnnnnnnnnnntgtatgaattttgctcaatcataaaaatgggctaaatacttgatttttagattttacaaatgatctcgaggtatactatatattgcaattcatctatatttttagtatgtactatta

SEQ ID NO: 76990 - DNA, 605 bp, Arabidopsis thaliana landsberg
  unsure (1)..(605): unsure at all n locations
attaaaattaactagaatgcttttgtttataaatttgaatgttgatggaggactgggtcaaagttctgaaatgagaagaaaagccaggggtatttttaaatgtgttttaaccctgacacatcatggtcttatatactaatagganacagaatattaaatttgacccaatttgatctcaaatagattattgtgaatatgaggatacatttattagattttaaaatccccaagtttactatttctcttcctgatatattagagttgggaagagtcataattatagggaaaaaagtatctaaaattaaaatgcactcttaagtactgggggatggtgcttacaaaaatgtctcctgatagtctgccagaggcaaaaccccgagttaaagctgtgtggttcataatgtgtgatgtgtctcacactgggacttagaaactgctcacgaggctggtggccacaaacagaccacatacagttctggtgccgaaatactgtgctttgtagatagtctgtggttgcattataaatcctgtatggttctgtaaatgtagagtctgacagacctgngaagacanaagtttctagaattatgtgctaaatctaaata

SEQ ID NO: 76991 - DNA, 599 bp, Arabidopsis thaliana landsberg
gacaccaccggcggaaagatcgccgccgcgatcaaggcgcaaggaagcggcacgtttcgataacatcgacgtgcccgaccagcagcccgggccgagcttcggcgacaacagcctggcaggcggccccgccgatgccgatcccgagtccgaagtagctgcgttcgccaaccgcgagcaaggccgcgacggcacaactgcgtaaccaaggagagtccaaccatgaagaagaaactgtttgccctggccgccctcgtggcagccctcggatcgaccgccggcacggccagcgcgcaagacgtgctgaccggcgacacgcgcctggcctgcgaggcgatcctgtgcctgtcgtcgggcacgcgcccgagcgaatgcacgccgtcgctgtcgcggtacttcaacatcacgaagcgcaagctgtcggacacgatccgcgcccgcctgaacttcctccagctttgcccggtggcgagccagacgccggaaatgcagtcgctcgtgtcggcgatctcgcgcggcgctggccgttgcgacgcgcagtcgctgaactcgacgttggtgatgtggacgggcggctacgacgatgggcgcacgtacatcag

SEQ ID NO: 76992 - DNA, 587 bp, Arabidopsis thaliana landsberg
ctggggcgcgcctccttccagatgcgcgaatttgttgatcggttcatctccctggggctgccctatggcgtgatcggcggcccgcgcttctacgagcgccaggaaatccgcgatgccatggcctatttgcgcctgatcgcccagggcgacgacgacctggccttcgagcgtatcgtcaacaagcccaagcgcggcatcggcgatgcctctgtcgccactctgcatgcctatgcccgcgcaagatcgctccctctgctggctgcgtcacgcgaaatcaccgaaaccgacgagctgccgcccaaggcgcgcaaggcgctgggcgaattggcggccaatttcgcgcgctggaccgacaccgccaaggtgctgccccatacggagctggccgaaatggtgctggaggaatccgggtataccgacatgctgaaggccgacaagtcggcggaggcgccgggccggctggataacttgaaggaattcgtccgctcgatggaggcctttgaatccctgtacggcttcctggagcatgtcagcctggtgatggagatcgcccaggatgaatccggcgaccgcatcaacctgatgac

SEQ ID NO: 76993 - DNA, 169 bp, Arabidopsis thaliana landsberg
aactccctcaaacacttgaaacgatcgaaccaattccccggaactcaaaatgtaaatgtcagaatctccgaaccggaacctatttggataaggtataccctaattacatcaaaaactccaacaaaaatttgacaaacaaagatttatcgtgagagcttaccggcgaaaa

SEQ ID NO: 76994 - DNA, 411 bp, Arabidopsis thaliana landsberg
  unsure (1)..(411): unsure at all n locations
gacctcggaccatcatcgccagttcgcacagctgaagtgacaaatgttgttacttgggccgtctacgagactgaatcgggtggggattcacagagcgaacatctatgactaccttccttaagcaagagattccaaccatggatgtcagaatcnnnnnnnnnnnnnnnnnnnnnnnnnnnnnnnnnnnnnnnnnnnnnnnnnnnnnnnnnnnnnnnnnnnnnnataaaggcttcgctcgctaaaatttctaagcttgatgaaggacaagaagcagctatgtcaagtgaaaagaaagactagcaggagtctagtggaaccttaagagcgttatcacaaaatgctcctactgttacacctgctctctgatctatatgccatcacaaagcgcctgtattctggaaaaccaccgag

SEQ ID NO: 76995 - DNA, 557 bp, Arabidopsis thaliana landsberg
aattattctaatataagagcctaaaattgtcatttgacactaaactgttaatataaaacatttatcatgacattgataattttacaactataataattaatataatttatgttatgatgaatttaatgataattttccgttttaattaaaactacttaaacatcaatcatgttgttgattattactagatattaatcgtgattttagaatttaatagatagaaaaaggttttttcttagaaaaaggtttttttcttataatattactatatttagactaaatgtaagggaccgttttaaaaaatactaaaagaagattgtggtagatacaatttaacattatcaaaatatataattaactaatacttattcgatgataaatataatcaatttaacttaaaaaatagattagataaaataatatttatagaatttactaaatttatatagttgtttaaaaaaatattaattactattaagataatcacagaagataaggaacattattataatcgagaactacatataaacacgtgctgagctctattctttcaactc

SEQ ID NO: 76996 - DNA, 146 bp, Arabidopsis thaliana landsberg
acgaactcgcgagaactctttctcgtcctatttgcgaccaccctttttagtgtcctagtgttacgacattaaaggcgcaggcttgggtattaaatactacacgaaaaataaaacattttgtgtggcaatgtgtctctggttgtttg

SEQ ID NO: 76997 - DNA, 197 bp, Arabidopsis thaliana landsberg
  unsure (1)..(197): unsure at all n locations
nnnnnnnnnnnnnnnnnnnnnnnnnnnnnnnnnnnnnnnnnnnnnnnnnnnnnnnnnnnnnnnnnnnnnnnnnnnnagcgtttattttaaatacgaagcccccatccccccacttaagctaccacaaggaattgaacccgaagtataactcgcttatcgtcattcccaactagttgataaccagtccaatgttcaat

SEQ ID NO: 76998 - DNA, 498 bp, Arabidopsis thaliana landsberg
acctacgttttactgtagtcgaatcaaaccaatccatagaaatcgcattttcttattgttttacattgttaactaataactgggtctgaattggaaaaactaaattttaactaaaaataaaaacaaacttctaaaactataactttttcatgatcttatatggctatgaggtatgaaccattatgttaatgatttgtgctagtattgttgttaattatttcaccaacttgattataaaaaagaacaaaaaaaaatctgattatagtatggatagaaatggtaggtcatcactcaggttcaaaccccttgcaagccagtttgttgataaaaatgaaaagtgttaatcggcatccttagaaacaagaggactatgtatgaaacgtcggcgagcaaaccctgtaaggtagagagtctagagacaatgaggcccataatggacaataaagaatacgcatgaaagggggcccaattgaaaaactttataatcccttttaaata

SEQ ID NO: 76999 - DNA, 317 bp, Arabidopsis thaliana landsberg
  unsure (1)..(317): unsure at all n locations
nnnnnnnnnnnnnnnnnnnnnnnnnnnnnnnnnnnnnnnnnnnnnnnnnnnnnnnnnnnnnnnnnnnnnnnnnnnnnnnnnnnnnnnnnnnnnnnnnnnnnnnnnnnnnnnnnnnnnnnnnnnnnnnnnnnnnnnnnnnnnnnnnnnnnnnnnnnnnnnnnnnnnnnnnnnnnnnnnnnnnnnnnnnnnnnnnnnnnnnnnnnnnaaaacttttccactcaccaattaatgtatttaagtttacactaaatttattctgcaccaaacaatttttgaaaaatgtattgactccttgtttataaaaattaaacaatacc

SEQ ID NO: 77000 - DNA, 120 bp, Arabidopsis thaliana landsberg
gcttactaatgcttctgcaaagagtgattagctaaatgtttctttatccatcaccctcacaacaacaaccgcgacagtgttaaattttaaactccctaaccccccccaccccaaccaaaa

SEQ ID NO: 77001 - DNA, 182 bp, Arabidopsis thaliana landsberg
tacggacatacacaattttagatacaactcacaaatcaataatattagtcgtgatcaattaacgattcgaaaacttcaactgatggaggaaaggttagttttaattttaagctgagtacattaaagcattatttgagttgtgtgacaatacatgaatgagattatgagaatatattgatgga

SEQ ID NO: 77002 - DNA, 503 bp, Arabidopsis thaliana landsberg
  unsure (1)..(503): unsure at all n locations
aaggccacgcccggagcggcaaccggtcgatttcctggtgcggcaggcaccggttgagttgcgtgcggcagccggcgacctggcggatttcctgggtgcccagggcgaggatctggcctttgtcgagaatgccaccgccggggtcaatgcggtcctgcgttcctatccctggcaagcgggtgacgagctgctgctgtcgacgcacgcgtatcccgccgtcaagcatctcacccgtttcgtcgcccgccagaccggtatcgtcatccgcgaattcgatttcgccttcccgctgcaagcgggcgatatcctggagcgcttcagcgcggcggtcacccccgcgacgcgtatggccatcctcgatcatgtctcgtcgccgctggccattatctatcccttgcaggagatgctggcggtatgccgtgcgaaagggatcaggacgctggtcgatggtgcccatgtgcnnnnnnnnnnnnnnnnnnnnnnnnnnnngctgcaggtcgact

SEQ ID NO: 77003 - DNA, 278 bp, Arabidopsis thaliana landsberg
ggcacgttaggcaactgggtggcccgtgcacgcgaggcctctcgatggcacgcgggggctgtcgaaggacgacgtggaggagctcaagcggctccgtgctgaggtcgctgaactgaggatggaacgtgatgtcctcaagcgatccgtggtcctgtgggtgaaggaggcgactaagtgagcgtggcacgcttcatcgccgaccagaggacgcgctaccgggtgccacacacggtgacctgtctgctgctcggggtcagcttggcgtggttctacaagtg

SEQ ID NO: 77004 - DNA, 442 bp, Arabidopsis thaliana landsberg
accgccagcggatagtcgggcagggcgatcacggacgcggtctagcctttgatgccgaggaacttctccagggccgtctgggccgccgcacggtcgctgtcggcgatctcctgcccctcattgagcgcccgcaggaacgcggccagggtgttggggtacttcgcggcccaggcctgcgtgaccgcgtatccctcgagcgggaagttcttggtcccgccctcgtcgatgtcagccagttcctgcaggccgtactgctgctcgccctcgctggcgaacggctcggagatgggcgcggcagcggcctggccctcggccagctgctgcgccacgttcagcagcgtgaagccctgctggatgttcacgtcccgggtcctgatgccatcctccgacagcaccgcgcggatgagcagcgtcgacatgttgcccacgttctggacggcga

SEQ ID NO: 77005 - DNA, 332 bp, Arabidopsis thaliana landsberg
  unsure (1)..(332): unsure at all n locations
nnnnnnnnnnnnnnnnnnnnnnnnnnnnnnnnnnnnnnnnnnnnnnnnnnnnnnnnnnnnnnnnnnnnnnnnnnnnnnnnnnnnnnnnnnnnnnnnnnnnnnnnnnnnnnnnnnnnnnnnnnnnnnnnnnnnnnnnntctttctctttatcttttttccaattattccatttttttctctcttttttttttttttctcttattttttttctcttttttcttcttatctatttctcttcctatctttattctctctttttccctccttttattcctcttattctatctttctttcttctttttctcccatttttcatttttttttctttctct

SEQ ID NO: 77006 - DNA, 562 bp, Arabidopsis thaliana landsberg
  unsure (1)..(562): unsure at all n locations
cnnnnnnnnnnnnnnnnnnnnnnnnnnnnnnnnnnnnnnnnnnnnnnnnnnnnnnnnnnnnnnnnnnnnnnnnnnnnnnnnnnnnnnnnnnnnnnnnnnnnnnnnnnnnnnnnnnnnnnnnnnnnnnnnnnnnnnnnnnnnnnnnnnnnnnnnnnnnnnnnnnnnnnnnnnnnnnnnnnnnnnnnnnnnnnnnnnnnnnnnnnnnnnnnnnnnnnnnnnnnnnnnnnnnnnnnnnnnnnnnnnnnnnnnnnnnnnnnnnnnnnnnnnnnnnnnnnnnnnnnnnnnnnnnnnnnnnnnnnnnnnnnnnnnnnnnnnnnnnnnnnnnnnnnnnnnnnnnnnnnnnnnnnnnnnnnnnnnnnnnnnnnnnnnnnnnnnnnnnnnnnnnnnnnnnnnnnnnnnnnnnnnnnnnnnnnnnnnnnnnnnnnnnnnnnnnnnnnnnnnnnnntgttctttcttcacgggtctaactctccctccttctaacctttctcttctccgtcgttcgcccctctctcctctcaattcttctctctttcattttcttacctctccctctctctct

SEQ ID NO: 77007 - DNA, 397 bp, Arabidopsis thaliana landsberg
  unsure (1)..(397): unsure at all n locations
nnnnnnnnnnnnnnnnnnnnnnnnnnnnnnnnnnnnnnnnnnnnnnnnnnnnnnnnnnnnnnnnnnnnnnnnnnnnnnnnnnnnnnnnnnnnnnnnnnnnnnnnnnnnnnnnnnnnnnnnnnnnnnnnnnnnnnnnnnnnnnnnnnnnnnnnnnnnnnnnnnnnnnnnnnnnnnnnnnnnnnnnnnnnnnnnnnnnnnnnnnnnnnnnnnnnnnnnnnnnnnnnnnnnnnnnnnnnnntggacttcgggtgcatccttcaactgtcttgaatcattgataaccttgtttagtggtttatatgttaaatttgagtttatctcatttttattattgaccttcaggtgctggggcggggggtgtgtcccattaccttaatgtttttgtcccttgtttgtc

SEQ ID NO: 77008 - DNA, 265 bp, Arabidopsis thaliana landsberg
  unsure (1)..(265): unsure at all n locations
cnnnnnnnnnnnnnnnnnnnnnnnnnnnnnnnnnnnnnnnnnnnnnnnnnnnnnnnnnnnnnnnnnnnnnnnnnnnnnnnnnnnnnnnnnnnnnnnnnnnnnnnnnnnnnnnnnnnnnnnnnnnnnnnnnnnnnnnnnnnnnnnnnnnnnnnnnnnnnnnnnnnnnnnnnctctcagtttttactatttttccattttattatttttttattgattccatcttaattattctttttttttttacttaacattttatttctttttt

SEQ ID NO: 77009 - DNA, 281 bp, Arabidopsis thaliana landsberg
tagctcaccccccaaaaaaatactttactctctctttcttcatttacttcaatctaatttcttctccttatcatcctcttgttcttgatgtggaacgatgccataaagaaaaactgaacaaccctaaagtactgtataaatcctatatcaaattttttttttggaagaaaaggctatatttaaaagaaaatcaagcaaaagtagatcctcggatgtatgggaagaggccttttggaggtgatgaatctgaagaaagggatgaagatgtgaacttgttcccg

SEQ ID NO: 77010 - DNA, 201 bp, Arabidopsis thaliana landsberg
gaaatctggaatgcaattagtttatgactataaactcaataaccctctcgtttatgggccgtaaactagattagattattttaggcaacgagaaaagaaaaaaaaagaattctggcaaatattaaatagttgaagtttatttttggaaattttcccagctagaattataaaagtttatttgagtaactaatgaaaaagttt

SEQ ID NO: 77011 - DNA, 739 bp, Arabidopsis thaliana landsberg
gctcactgactccataacctgatccccgtaaaaatgggtggttttggggttaggaccatgtgaaataacacttttgttttcctctgagatctccatgtcactttcagtacccccattaagtgatcctgggtcttgcttggtcacctgacaagcattgttgttcacactgaagttctcagcaccggaacagtaagcagcatcgacggagccagattttcgaagctcaagcacatcaatcacatcatgtccaatctcaaaaacagcatttggtataacatccttgggcatcaaagctttggtaaagggttgagagagtagatgaggtttctggccacttctcatcaaagatccaaagattatgtttttactatccggtgatggtaaaacaatccttgctgatgaatcagtgtgatgatcatcaacaagagaatgcacaatgctcaagcctactttaccagaatcccagctcctttgtttccctctccagattgacctcgaagaagaagcagcaaaagggttccctaaagtggagaacaatctgaaatccaaaggagaagttgggctccaagctgattcatagtcagatggacactttccttcaaacccactagagatgagtttgtggcttctaatcgctgacaagaccggttttgtcgaatagtaatcagaagcagtgggcatttgatagttggaatgctgagacatgattgatgaatctggccctcaaaaaacaaaaagc

SEQ ID NO: 77012 - DNA, 136 bp, Arabidopsis thaliana landsberg
  unsure (1)..(136): unsure at all n locations
cctctcctatataaccactgtgttcatccgattatgttcattcnttcnttgttctatcaattcgagtttaaaccgctatcgatcatgagtgatttcctccgaaactctgcccaagaccttgatttgggtgttgatg

SEQ ID NO: 77013 - DNA, 631 bp, Arabidopsis thaliana landsberg
ggtggtatcattatttagacgttgttaaacttttctaaaggtaatgttacgcacatttggaatcttagggttttaatctggtgattggtcgcttaattttatgcttatcccaattaatagcattggacaattaaggcctttgtaaatttgggcctttaattttgggcctcaactatcggtgtatgcacatactatttttcttaaccctcggtcctccactcctcctaagacacttttgctaatcaaaatagtttttgttgagttcactactttaatctacgaaaatctagtgacccaggggctaggttaaattggagactcgtacgatactcgtgagataattagtaatggttagcatctatgaagtatacagtaagagattcggattagtgacttagtgttattggtgattgtcatcctgatcacaatgattggaacaagatttggtgtttgactaatatggattttctatagatacgtctctgctttttatattcaatgcaactgttaagcgataatgacttctgaaaattacaagaatataaattatcaatacgattacgaaattaatccgagtgtaccaatattcttatataaggcttaggttttttttggacctctggtttttctt

SEQ ID NO: 77014 - DNA, 551 bp, Arabidopsis thaliana landsberg
  unsure (1)..(551): unsure at all n locations
acgttaacataattctttaaactattcaaaatgtttataatcttttctattacaatcattattcatttgttagtggggtggagagtgactttatctagaaatgatctatccaacaattttagtccattatttagtcttaatagtccatatgatcttaatcgaaatgttcagattcgttagcattaattacattttcatctcctctacaaaatttttgaataaaagagttcacttccttttctttttttttgttgcaaatgatatattaaaaacatcgttgaccacaaaaagttcatcgaactaaaaatcataaatataaagtagaatctcaatattatatttgtgataggacgttgataggttaatccgtgtattacttagctattcaaataataataaaagtctttaaagttataatttccagcgcaacaacgttggtgtaaacgttcgttgatgcaattatctggctcaaggctcaaacttgtttttctattcgcaaagatgttggatactttggaagatatatatattngacctacatgcatcaaatc

SEQ ID NO: 77015 - DNA, 235 bp, Arabidopsis thaliana landsberg
  unsure (1)..(235): unsure at all n locations
ccaactggtgacaccctaacgacactgatacagatcgtaagnnnnnnnnnnnnnnnnnnnnnnnnnnnnnnggtaaacatatctggacccaagatccagattctatcactatcactgtctactttcttacataaaaggaagacaaaccgtatggttcagtttggaacaactaatggagagtgaaagaacatgttttataactcttgtaacttgaacggcatgattattaatacta

SEQ ID NO: 77016 - DNA, 589 bp, Arabidopsis thaliana landsberg
  unsure (1)..(589): unsure at all n locations
aaaacacatgagcttcttgaatccgtgcaaacgagagcttattattctttttatatcttctaatacaattaacactatctttagaggctctcccgattggaagttggaaaactgctgaaatatatgttttttaatttaacaagatctttttagcaaataaacgtacgtatatagacagaagccttgatcagaaattatgttgtcttaacacaaacgttaatactacatgtcgtatgcatgataatatcttcttgtagtatgtgatgtgccccaatgattgactgaagagagtaagagacgtagcataatcttttcgatgatctcatttttggcctttggattctctgactaccaaaataaaattgtttattctgcagcacctctttgtaatttgtatcactattttaatatatggacacattgaacaaaacagaaatatcaaaaaggccaaaatatattttgttaaatacatactaaaataatggcagcaagaaacctgatgattaagatggaacggtgaacaaaaagaaaaagtggagaagtttgggtgcaagtgatctganaaatgggttacgtgctcactaccctt

SEQ ID NO: 77017 - DNA, 578 bp, Arabidopsis thaliana landsberg
  unsure (1)..(578): unsure at all n locations
acggcgaagcccccggaaagcaggagactagcgttaagggttcggcgaatttttcattcttgtccttggtgcaaagaagaggggttcaccgttgagatcgtcgtcgtcaactccgcgcttcacctattctagtttcttctcccatacccggttgctggcgatgttgatcgcgnnnnnnnnnnnnnnnnnnnnnttttgaacgtttgtatcctaatacataaccggcctgcccttgagctcctcagaatcaaagccctagcagcgcgttaaaatccattaccctcaggatgagttcgtcaaagagggagtctaggcagcttgagatccaggccgcggtgtttatcacatttgcgatggcgacgattatcataggcctacggcttttcagtcggaggctcaagaggattccgctgtcgtgggatgactactttgcactctgctgctatgtatgttttccctttgcctttttttctctattccatcgctgacgtatcctagggcatgtcaattgcctgcgttgttatcattccgtactgcacgttctctcgcttccatgcatggccggtgacgatgcttac

SEQ ID NO: 77018 - DNA, 553 bp, Arabidopsis thaliana landsberg
gctgaatcccagattgtatccagcgaaaaagttaaagatagttggtttacaaatgagtcagaagatgacaagaaaccactggccacatgggtaggctcttggattaaacgaaagaatcggaaacagaaattgctcaacaccgcttgtagtaggtaatcatcggtgactaaagtcttattctgaatatataatcccactggcttcagatttcctagtgaagctctcttgtataatgttacagattagattcttctcgtgaaagaaagtcttgcgagtcctatgacttcaggccccggaaaggacctatgaagaaatacattcacacttcaatggtttgtcttactctctaagactatagagttttcccattttttataatctatgtaaaccaaataccatctgctattgcaggagaaaacattttctgatgatcagcttactttatctgagagtgaagatgacatttctgtaacaaagacatccagaaccaaaagtgacaggagaaagaatcagaggatatggactcttgatgaagtaatgaattcggttgatg

SEQ ID NO: 77019 - DNA, 480 bp, Arabidopsis thaliana landsberg
aagtttgatcgttggaaaaagttcccagagggaacttctatttttggtttgcaaaatagttccttgcgtgggcctgggaagatggtcagcaacgctcactctcctctttgtcaggtcagccctatactccctccagaggtaggcctgtccttactgccaccttccctccttctgcaagagagaagacccctttctcttttgtttttggccaaagttgtccctgacctctgaatccctagcagcccgggagagcagggaatgactcttttccaaaggggtggttaaagtgagagagagagaaaagtagggcagccagctgttgctgggaggggctgttggcagcattcacggccccagcctccatataggcctcacccacatgcctggaactgccaaagtgtctcttctgtttcccaaaccaaactggcagtggggaaatttctttctcctctttaaaagccagcctctgaagctccacct

SEQ ID NO: 77020 - DNA, 511 bp, Arabidopsis thaliana landsberg
  unsure (1)..(511): unsure at all n locations
aatagcagagaatatagcagtaaacgcctttcttccatctttttgtccattccgaataaaaactngggcataggtaaacaccaaagcccatgacatacaagctattccataagtacatcctaaacccaaccctttagccatccccgctttataaccgagcttaagcgtatactgaatcgcatccgaatacgcattaagtgccttactctctccaacataagaataaacagttcgaacttgagcaattgcctgagaaaccaaaacatcaatcattaaccgaccaaagaaaagcaaagattttgaattagtgaaaacactgtttaagtctttggattgcataagaagcaatgaaaaaaaaaaaaaatcatttgagagatcaagtacaaagaagcaagcctaagaacagttaaaaagcattacgtcgaacagttggtgggcattaaataaaacaaataaaggaacaaactttaatctttatttacctgctcggcgataacaccggcgttagcat

SEQ ID NO: 77021 - DNA, 454 bp, Arabidopsis thaliana landsberg
  unsure (1)..(454): unsure at all n locations
gggagaggtgagtcggatcgaatgggaagctgngattangacttttgaagaagaacagctcatttcggggacnggtaaactctttggcgacaggttagatactctctctctctcgatccatcttgttgctttctcttttctttggtctatcatgcatcgtctaatctgcttaaattttagatctcaacgtcggttcctcattaatgcattttcttggcttttctattatattactgggtactaacttaccaagctgtcaatgactgcgttcagcctgacttctgatcttgttatcattctctgtccttagctctagctgatcaaaaagcaaaacctaatgaagatttcccattcagatcctctttttatatatgattctttagcaaaacatattcttaatttatgtcacaactcactttggctagctatgttcaattataaatacaagatgtta

SEQ ID NO: 77022 - DNA, 365 bp, Arabidopsis thaliana landsberg
ggacggctccctgcctgatcgcccatgccagcgaggacgacgtcgccagcacccgcaacgcggaactggtgcagcgttctgtcagcgccccgaccgagttgctgttgctggacgacagctaccacatgatcaccatcgacaagcagcggcgcctgctggtcgatcgctcggccgcgttcttcgaccgcgtggccgaaggcgtccccctccagcgcgtcgcggcctgaacatgccgaccggaggctccatcaccgccctggtcgccgggctgtggctggtcaacgtgatcctcgacaccaccggccagctggcatttaaggtctccgacagcgatccctcggcaggcaacggatatttccgctggc

SEQ ID NO: 77023 - DNA, 138 bp, Arabidopsis thaliana landsberg
ctttcataaaaacatactcctcatctcagtttaattataaaacattcaaaatattgcatttctttaaatgtctttatccatacaacaacaacaataacaaacatctcctccattttaacattaacctaatcattatat

SEQ ID NO: 77024 - DNA, 618 bp, Arabidopsis thaliana landsberg
  unsure (1)..(618): unsure at all n locations
aattcattactgcacatattctaggttccactgtttcatccaataattgtatctgtatttgttcatttcctctaaaggtaatatgtgatcctgaccatttgcattcttggtcttcgttttgggaccaattgacaaagaacgattgaaacaatctctcaacgaattttgcgtttctcttgtgatgatcagatttcttggcactacaatgctcatgtacttgaatgccaaatcttatgcgagatatattggtagtatcttttgttgttttgtacatttaaagctgtacacatgtgacacaaagtggttgaatatatttctgtgtgttttcagaaattctccttggttacatgcaagttctcaaacttatgatgtacatagtattcttaaaaccaaatttatcttattgatcatggtattttccaatacaacataacctatgatgacataaataactctatttcgatgttgtttatctcaatgccatggcaacctttgggctcataaacataattntctttatggttgaggttttcgactntattatacccataatcttcttctttctttgcctgacactaacctttgattataccataatactnnngtaatcaataatac

SEQ ID NO: 77025 - DNA, 552 bp, Arabidopsis thaliana landsberg
cggtttggctaggactgcataaaccaatgtcaaagcagcttgctgttgttaagtttgtcctgtttattgaaatggaatgaaatctgtgggacctgggatggaatttttcaataaacatgagagttattaggctagaaaatggaggtcttgaaatactcttaaaaggccttctcttgattgttagtgttgaatactagctaaaagagataattttttgcttgtttgcttacttgatggccactaatctcatcgtgctatagtcgttatttaatatctcatgtcaaacatctgtctttgttaggttttgttcatgatatccatcgagccagctccaatgctcgaggataaagaaaaatggtatgtcttcaacctctttagaattgtcacgaggattatcattaagaagaagaatattgtccaaatcatccacatgtgctgtagtaattgcatatccacagtatgtgacaaacagtgctttatcgattcatggtctattatttagctccagaaccatttttctcatcggcttaataatttttctagcactggcaa

SEQ ID NO: 77026 - DNA, 590 bp, Arabidopsis thaliana landsberg
ataagttattctcgtttgacactttttttagatattatgttattcattttttttttttttttttttttttcacatgttattcattataatgagggaattaaggttcagaaagataaaaaagaaagaaaaattttttaactaaaaagaaatgaaaatgtccggaagatagaatgcacatcaaaaagcctttctaaaagcgaaccaaattaaaagtgttgacatttttacagtcgagtactcattttcatgcctcaaatctgaaatcgtaataatatggcatgaataacattttttcaataattctgtgtatcatgtatggacggcattgcaaaataccgccatagtttggcattacgtcaataaagaaaatccgatatctactcatatgtttgtgtatatatacatcttctcttataacctttttaaaacataccaagacatgtgtataaatcgatagcatggtgatgttctggaaagtaaaatttaagccatttcttaaatgactcaatcataccactgacattttcactatgcgacaaacccatcgttttattattattctcatagtcaataacaataacataaattta

SEQ ID NO: 77027 - DNA, 364 bp, Arabidopsis thaliana landsberg
  unsure (1)..(364): unsure at all n locations
cttcataacttttttacccctttcccatacccatttatttataccacctccaaaaaaccagggacattggtacgactaatgaggcttaaccacaaaactttatcattaactctttatcaacnnnnnnnnnnnnnnnnnnnnnnnnnnnnnnnnnnnnnnnnnnnnnnnnnnnnnnnnnnnnnnnnnnnnnnnnnnnnnnnnnnnnnnnnnnnnnnnnnnnnnnnnnnnnnnnnnnnnnnnnnnnnnnnnnnnnnnnnnnnnnnnnnnnnnnnnnnnnnnnnnnnnnnnnnnnnnnnnnnnnnnnnnnnnnnnnnnnnnnnnnnnnnnnnnnnnnnnnnnnnnnnnnnnnnnnnnnnnnnnnnnn

SEQ ID NO: 77028 - DNA, 569 bp, Arabidopsis thaliana landsberg
caggaccttgctgactatgctgccagccggggatatgtgtacggttaatcctgcctcagggaaataaaaatgctccgggggcaggtgggcacactgcataccgaacatcgggaattggaaaaagtaattacgaacttagagaaggataagaaattccttcgggacatcttaaagggcattgataacaacgagagattaacgggccggggcgtatcttctttatcccaaaaaggccatcagtgataattcagctatttggcagtctcaataaaaggctccgcagaattcggacaatcaaaatgaaattaacaagtaaggggtatgtcctgcctcctcaaaattattactgcgtaaaatacttaaaccttacgtccgctctccacggccaggtccgctatcatgcactaatcatgatggataaactccatgtggcaattaatttttatttcatcgcccactacagcgccgccgctctccagcagtgcattatatctcagcccgtagtctttgcggctcactttcccgctgacggtaaacccggcacggcgattcccgtaggatctttgatt

SEQ ID NO: 77029 - DNA, 574 bp, Arabidopsis thaliana landsberg
  unsure (1)..(574): unsure at all n locations
cgcgtcaagaaaaagaagagggacagcatgcgagcgttgtaatctgcgcagaacccgatgcgacggatgggccaacggggttccgtgctcggcgtgtaggaagagcaacaatgccgcgccatgcgtgcttattcagtcgaaacgtcggaggtatgatccccatgagttcctgctggtgatactatcttctgacctagttaaccccagaggcccagatggacggtatacctaccgggatggtgatgaatcccaccaaacccctggagttgccaattccgaagcaccagtgcctgtttcaacaagtacccagctacctgaacgaggtgcggcgagttgcgatggcacagctgccaattcacgtcatctcgatggaatcgacggaaacggtccgtttgattcagaattaccgtctgaagttacaactcccgatgaaagacccagagttccccatacacagaacgctacatcaccatctactgtacagccaagttttgtcggcgaaagttggtacgcgtcctacttcatgaggggctntgctcctggctgtaccagctttcatcgtccaattgatgac

SEQ ID NO: 77030 - DNA, 386 bp, Arabidopsis thaliana landsberg
  unsure (1)..(386): unsure at all n locations
aaacaatcatcacatccttatccaggcatggttaaattttaatgtaaatatacatactttaaaaccattacatattgtttaaaagatggaatttttcattttatatacgggaaacgtctctttttgtaagcttcttatttttnatagaagatgtacctttcacctacaactgcaccagttacattgatggttgtgacatttattacttctctctatctctctctcactgtcgatttattgattttaccgttttagaaaatttcatataatattcaactcacattactttctctacctcttgaaaactcaaaatctgacctatttattattaatttgcatccgtataattttctttcgtatcaattctgcatatacttttaaccatt

SEQ ID NO: 77031 - DNA, 539 bp, Arabidopsis thaliana landsberg
  unsure (1)..(539): unsure at all n locations
cgaaagacctgcgcctgcggggccaggccactaacacggccaattcctcgctgtgcttattcgctgaaaggctttaccgtacatggtgaccttaactacaacggctcctatattgtaagcctcggcgaagatgcggaaacagatgtgacccgcgacgcgcgcacgcagattgatgccaacgcctcttaccagctgaataaatggtttaccatatatgtagaagcacagaatcttacgaatgcaccgcaaagagcctatttcggacaaaaaacacgcatatacgaaaaacagttctattcctactggggacgcgcaggtataaaattcaggctataatatcattaagacaaaataatacagcaatgacagagttattagcagagcagttaaaagtgcagatttacaaggataggataaccctcggaagggcagcagccggaatggcggctgcccgcatccgggagctgctgcaggagcaggagatagtgaatattattnttgccgccgccgcctcgcagaatgagttcctggaggcattg

SEQ ID NO: 77032 - DNA, 571 bp, Arabidopsis thaliana landsberg
  unsure (1)..(571): unsure at all n locations
gggtagagaagctgtcatgtttaaggacaggacttaattaattagtttcatatagtctacagctctttccgggtgattgggacctgctccgaagaacgaaaactaactcatacttgtttgaaatgagatttnnnnnnnnnnnnnnnnnnnnnnnnnnnnnnnnnnnggaaaaacctgcttttttggggatcaagctccagtttcctactccatggatagcaacataagcaaggatcttagcgtcttcttcctcggtccagagacctttcttgacattggacttgtcacaacaaggaggtcttcccattttttggtattcaaacacaggatagaagatgaagaagaagaagaagctgagacacgtctgaaaggacaacaacataggctgtatggaaatagagtgatgcaatgcaaaagctctgagagagaaagagagagaaggtgaggatctcatgcttgaaggctcctaattaacggccattgcatgatagttacacttcattagaaatacagagnctccaagtgcatgacgtactttgtgcaactatcatctcatgtacactactactga

SEQ ID NO: 77033 - DNA, 512 bp, Arabidopsis thaliana landsberg
gttggttaagtgtcatacgtataaagagtaaattaaatgaattttatgtataagtgatgaaagttgatgatacttaaaaagcttattatatcactttacgaataaaaatgacttaacatgtacgcttgacctcgaaaacgagaagctttaattccaagatttcgaagtctcaacaaacttttggagccgagggcctacgtaataaaacaaaaagcttgcatggccacgtcatcatctctttgtataagtaaacttcttattctaataaaaatgtaagatttgtggatccactactttaatttctgtcgattttagtatgattgaaacattaacaccgataaagtcaggtcccctggtcgtcttttggttcataaaggtaatcccattttggcgaaatttgtttgaacttggaagtggaagaagtgaaaatacatgtagcacaagactgagattgacgagccttattgattcggcccatttttattcagaccttatgttagttaactggcccg

SEQ ID NO: 77034 - DNA, 564 bp, Arabidopsis thaliana landsberg
  unsure (1)..(564): unsure at all n locations
gacatggctttaaccaatacacgtgacttagccaaaccattctctcatgtgacctttctgattcaaatatagttgcagccgctaagtagtaacactcgagaagctcacttctgcgcacaccccactcacttaacctattttcttcataccacctgcgttcaaatacaaactatattaaatatacgtgtacacacacatgtatatacatataacaatcacaaataagaaagagaaataatattatgtagtttattattttctgactctcttaattcttacttgtgatattaagataaacaaaaggttattaattctcgcatatgaaaaaaaaacaatttaactaacttaatatatatacacaatcatttaaagccatacttaatgaaaagaatgaagagtgaagaggctattacttttggaatatgtcccattcgagctgatgctgagcttggcaattgttgtaatcttgttttgctaattccagatatccattattgttcacgtatggcatcctaaattgtccaccatcattattgattaanttaatgtatatcatgattaata

SEQ ID NO: 77035 - DNA, 262 bp, Arabidopsis thaliana landsberg
aacgtgtttatacacaataactataaacactaaataaagtttcacacatttaacaatttgaaatttgttctataccataacatttcatacatacttagacaaaaaccttattcaattccatttcccgctactaactgctcatatttatatcaataattttaactcactatcaaatttcctatatcccaacacaaacaacaaacttatcaacccttcttacaataaacaaaaactaccccattcctaaaacacatcatatcat

SEQ ID NO: 77036 - DNA, 690 bp, Arabidopsis thaliana landsberg
cattttgaagttttcttgaagaaatcgtctacaatgagactaaacctagttctaaacttctaattgataaaattacaaaagtataattttaatgatactagacaaaggttaataatgtcgtgttaaaattggtaatttgcaatagttgaccactagtactagtagataacctcattttttggtttaccgtatcttgtagcaatgcaaataaaagagtttacatcaaattaagaaaatgacattatataccaaaccaaacaacttacttacctcaaatatataaatcacaatttgaacccaaacaacaacaaaaaaaaatgaaaaagagaagagtcaagaccacgcgccatacttggttcccactaaggttaacgacgaggcagacaagcaacttatcttattatctgtgaatgattatgacatttatattattatgaataagttttcatatactaatattgggtactacaacagaaccttcatccttaaccaaaaccaaaccaaaccaaaatttgaaccgaaattctaaaatcaaaaccaaaaccgattctagagaagtcatcctaggtggctgcccaagctccggtctacgatatttggaaacagaggaacaatgtactccataatctgcagtccatccctcctctgctcatcttcaagtctatcgatcataaggtacgcaataccatt

SEQ ID NO: 77037 - DNA, 602 bp, Arabidopsis thaliana landsberg
  unsure (1)..(602): unsure at all n locations
agaatacatggatcttattatttcacgtcaacgattggaaactagtaattaaacgatatacaatttgttaagaatgcttttatcttttgcagaaaacaagataattaagacggatataactgaagatcttgcgaataattaagatgagatatttcaaaccgaaatgatttcttctaaagctaagttaagaatctgatttaaatttcttctaaatctaaaaagatgtgcatttaagaataaacatgtgatgtgtatacatcactagtttgtggaaagcatagtgctagatacagtatatgtaaaaatacacatgcatatgtatgtacacaactttgaatgtagcatatttatacataccatcatgttcggatgaaagccataaggagctggtggtggtgatgatgatgcatatgaaaaggatggtgatgacgatggtatggatggatatccntcttggatcctcacatcctcctacattattcaacattcacatacacgaaacttattcatattactcatttcgatcaacaagaagaaacanacgcatgctgaatctaaatcattctgcaattcgatttagacattacgtctcaaacacacac

SEQ ID NO: 77038 - DNA, 240 bp, Arabidopsis thaliana landsberg
  unsure (1)..(240): unsure at all n locations
cacaaacaaccttccacacttttccgcccaggaaacaaaaacaagggccactagaagaccaaaaacacaanaaccccaacacacacacccacacccaagacacaaaaccaacacgcaacaacaaaccccgacacccaccacaaaacccagaccaacagcaaccccacacacaccaacaacaaaacccaaacccgaaacaccgcacacacaccaaacaaacaaaccacacaaaccaaccca

SEQ ID NO: 77039 - DNA, 568 bp, Arabidopsis thaliana landsberg
gaggcctcggtggaggtgcccggggaggatttggcggtggtgcaggaggtggaggtgctgggggattttttggcggcggtgccggtggggggtttggcgggggtgcatgaggaggtgctggtggaggatttggcggtggtgcaggaggtggaggaggccatggtggtggtgccggtggtggtgccggtggtggagctggagggggctttggcggtggtgcaggaggtggaggaggccatggtggtggagctggtggaggttttggcggcggtgcaggaggaggaggaggccatggtggtcgctcttaaagatagctttatagggtaacttacttgtgtctcaagccagattaaaaaggaagatatctgctggagaatttcattatgaatggaataaatgatatttaagaagtagtattagctattatatgttcatgacttcatttcagggaggaagatctcactccacatatgaattgtaaaaaattgccggcgaagattttttggggaaaatgcttagataatattaactttaaccattttttcacattacatttttaataaaactt

SEQ ID NO: 77040 - DNA, 291 bp, Arabidopsis thaliana landsberg
cgagaatccaaatagaaacttaaaaaatttagaatctggacagtgcaaaagctttccctaaaaccaaaattgaagaatggaaaactgggatctaatcaaacagaaacttctagtaacaatctcaaatcacaagcaatcatcagtttcgcattagcctttctctccaacataaaccctatgactggaaaatgaacagtaaaaccaaaaaaaaaacaaattttttaatagcgaaatcaacttacgaacaagacagagacggaaaataaaagagaacgctgaataacgaacccc

SEQ ID NO: 77041 - DNA, 521 bp, Arabidopsis thaliana landsberg
gttatgtgttgctgatgttattcgcacatttggatcagaaaggtgaaaacactaaaccaagatatgcactaacaactgagagtgtgctaaatataacggacgaagactcaccgtcaccgaaaccttttgtaccaaccagaaggcgattcatcagaagcaaatgtatatatctcattatcttcttgattcttctataactatctatggttgattttctaatttccttgatggttttatctacagccttaggagcatctactacaaacaagaatgaggcagaaaaagtgaaatcggaaaccaaaaggttttcactttaacccctaaaattcaatttttgctacgctccatcgatgatttcttgtttgttacgttacaggaggcacttaataaggagatcgccgagagtgagatcagcagcgcaagaagtgacagagaatctgtttgagattgaaaatctccagcttacaatgcctaatgacatgtctcaacaagataacttgaccatggaatcacatacccga

SEQ ID NO: 77042 - DNA, 488 bp, Arabidopsis thaliana landsberg
tagtgtcttatgtcctttgtctagtgtttgatttgagttttttgttacatttttgttcgtttttaatgtttggggtggggggttttgtacaagttttaccaagttatactggaattggagactttttaagtgaaaaacagacgttaggagatgaaacggaaaaatggtgattcaagacaactccgatgaatgccatcagacaactttttgatgcttaattttaaattttctatcaaattccactggaaaatggcatgggacaactgcctgattgagcaccaatgtaattgaaccctaccgtaagaagtattgtctcctataaaaacaagttgagaacatgtttagtgcgagtcgactgtaaatttttcggatgcaaatgaaatataaatattattattttggatgcttaattacattgttcctactactgatagagcatacatatgtgtggttactacttttacttaattttttagttattgtgaaac

SEQ ID NO: 77043 - DNA, 453 bp, Arabidopsis thaliana landsberg
  unsure (1)..(453): unsure at all n locations
gagctcacccttccgggcttatggggcgacctttcttatccagaactcttgctccgataactaccggggctattgctcactacatcctggaattatgtggttcatacattatggcaatcccttggagaacccggaattgtctgggctcatataccannnnnnnnnnnnnnnnnnnnnnnnnnnnnnnnnnnnnnnnnnnnnnnnnnnnnnnnnnnnnnnnnnnnnnntcaggtcgtgagaactgttcacttctctgacccattctctggatcctacacattactgatgcccgatcctagacagtatagtcgtgcaacaaggtgaagacctgctcacagcggtgcggcctattgatgttttcacgaccaacaacgtctgtcttctctttaagcaagagcctgataggggatacggggctggaatgccgactggcgtttattattggattcaccc

SEQ ID NO: 77044 - DNA, 646 bp, Arabidopsis thaliana landsberg
tccacataatcaggctatttattattttattaaatactgtattgttttataatttgacttcaccaaataacatgttgtcgggaaactcatgatatgatggatgatacgaataagaaaactgttataacttataaacaaaatagggtgtttagtggttttgtactagtgaatcattgccgagttactacttgagttcaaacatgcataatacatgtcgtttaatggatataggattgtttgtgatattattgcatacttaaaatgtttgttgcatcacgtatgtagtccacaatccacaggcgcgccttgcaaggtacaaaactcattttctacaacatacgtgctacaacagaacgcattgtcaccatgacgggcattggccacaacgattaactcagagtaaatttgaagaccagttggataagtttgaagaccagttggataagtttgaagactagtttgataaatttgaacaactcgtagcaactcatcacacaacgaaaacatcaaatcataatttcaccacaagaagaaacaacagaagatgatcagattctagttttcacaaagatgatgtttttttttgttcgttaaaacaagacccacttcattggtcctgtcttagaaagtaaaggacacaaagaga

SEQ ID NO: 77045 - DNA, 486 bp, Arabidopsis thaliana landsberg
atgtttcggggaaggtgaaaggattgcccatgagcatctttacaatgtttgccacatccttgctgtgtgtaagcgatggggaatacccgtagtaaaacatcatattgatgcccgggtaggtaagcgccacaatgcccagcatccaccagaaagcgggatatttttttattttaagccattcaatttttatcagggagagcatcttgtaacggtttaggttagttattggtaagttcaaagaatttggcttccaggcttttctttttcatgctgagcatattcagcgtaaggcctttttcaaaacagaagcggttcacttcttccggccttgccgtacctatgggaaagaacaactgtatcctgttgccttcttttttgaaatgtgtataaccgctgatccctgttaccagctcttccagcctgctgatatcggaagcggatatttcgatgatatcttcattggcccatactttattcacatttgct

SEQ ID NO: 77046 - DNA, 364 bp, Arabidopsis thaliana landsberg
aagcgtgaccaaaaagccggatatgtcattactagacaaatgtttctctcttcctctaatactgccactgaagccggatactattagattaccttcgataacttataatcacaacgacttatcgttgttgactaccaacagctacaacaatatgctcagaccatcatagcgggaccgctcttatcactcagatactggggagcaacgaggagaccaggtgatacatcaaggcaataggtatacgattcaggtcatggataagacataaacacgtttcgaccaatttcagaaaataaccaaaccagcgagggagcactctgagccatcatacccaccaacacgggctctgatggctattgaccca

SEQ ID NO: 77047 - DNA, 461 bp, Arabidopsis thaliana landsberg
  unsure (1)..(461): unsure at all n locations
gatcctgacttgataagtgaggttcagtgagctcttttctcattttgtacaatgncgtttgatataagaggtatgcgtgagttttctctctgttttatcaacaagccgcgtctttaaaagtcttccaagaacatattattgatttaacaaaatcgatcaaatactgaaaatgagaagagtgttttgaggcacaactagtcataccttaagaagaagcaattgactttagtaatctttacgtctcagaaacacatcacattaaagaatctggaaagagtaagaagcaacttaactagtttgacaggtgaacattgcaaattgtaaacttaaacgttgtatgaaagttttcaaacattgcataatctttcataaatgaaacaaaacaaaaagctttgctaaacccttgaattggttctgaagaaaagagttaaccttcttgtaaactttgcgtaaggagctag

SEQ ID NO: 77048 - DNA, 424 bp, Arabidopsis thaliana landsberg
aagacctgaggattgatctggcatgacgacctcgctgggaccacaaacccatagcagggccgagtctctcaagcaaggattatgttctaacagaggctataaatccctctgcggaccgcataaccgttagcggcagtcgcgacgccgcaccgtgtgttcgcgggacctgaaactacttggaacgccgccggcgctgctggccgagacccatgtccttggccagttgcgagcgggccgccgtataattgggggcgaccatcggatagtccgggccgggattccacttttcgcagagctgggccggtgtcatgttgtactgtgtacgcaggtgacgcttgagggaatcgactggattgtcgtcttgaacactgacaatgtacaccaggcgttgtctatttctttaccgcgacggccggtctgaacc

SEQ ID NO: 77049 - DNA, 750 bp, Arabidopsis thaliana landsberg
aagccgatagttattaaaatcttcttagatattcgccgacttcaactgttcaacattgaataaagattatgtcaaactcattgagacgggaagaaaatggtttttgctatatacagaaagtacagctaaggcatgaggctataacaatgaacaagcaaatacacaaataaagagaatttaaaagaaaaaaccaattctttcacgtttatttacatttctaaattataaaccacttgtatgtttgtgaccgacccgccatgtgatttttcctttattattcacatgtgaagtcgacaattcccacatgataaaaacgttggcctaatcaattaaataaacatgtggcccaattccacatccatttcgaatttaaatttgtagttgagaatctaaaatacgcataatgcgagttttctacttttctacaccaagatgtaaaagaaatatatatagtgtagcatgcaatgtgaatataataaagatactatatacataacatggttgccaatttaaaaaaagttaataataattggaatatatatgaattattcctattctagccaatgcatagagaagaggaagtggagcttggatttatcctttacacatgcttcattgggacaaaatgtgtcgttgcttaaagactaaagttaaaaagttcggtaaagcttttaatgcttttgccgtctcgctatagtgcttacactttcaaacctaacatcatgttccaattttcaaaatattctaccc

SEQ ID NO: 77050 - DNA, 536 bp, Arabidopsis thaliana landsberg
  unsure (1)..(536): unsure at all n locations
tgattaaaaacggacaaatgcagatgacggatgatgaacggatcagtgagattgacaaaatctattactttgtacaggataaatacagcttttcaaaaaaatttagcgataaaatcaagatgcttattgagcaaaggaagcagattgaaaccgaggcgcagcaattgaaaagactatatgatggccagtaagataatatgaatttgaagatagtggtcattatcagtacgacagaaattttaagtgcaaagggaattgaacagcctgtttacctgcactaatcctgcaagccgttggctgatgttgattttgacattaatcaggatgaaaattggggtgaatgtaccggcaattgccgtatataaaaataagatcggacgatgaaaaagttattgctgctagtactctttttaactgcttcggcaaaaatacaactggcttccgcccagacggcggagttgcagcagcttgcacttgatatcgagaagcttattcaggtgaacaagatattgaccgacatgaaaacggngtttgat

SEQ ID NO: 77051 - DNA, 571 bp, Arabidopsis thaliana landsberg
  unsure (1)..(571): unsure at all n locations
tgacggcgatggcggtcgaggcgccggcggggctacgggcgatgatctgaggtttcgttttaggagtccgccgcgagctggtcgctgggtctgtgctcggcgaccagccatcaggtgcctccaatcgcgacggtgatccctcaagcagctgtgctgaaccgagtcgcacggccgcccagttgccggagatgtgctcagtcacaggggtcaccgcaccggtgggtgtggagccttccgaatcggatagcgccgggcgatagcagcggccgaattcacgtgccgtgatatcgcatacgacatccgatttgaactcatatcacccttcccctggcgttaccgatgtgctgcatgtgacggacgggaccacggcatcgggcataaggtgcggccgccctcagacgaccagatatccgagccgttgcgccgcgccagcgcgacccgcagtgccagcccggggtgcgtcaatggctgcgatagcaccgatcgaggcggcatgtcatcagaagcgggtgagaagagtgctacgcacggaccgncggcgaaacggngcgcgctgcgtcgggcaggattc

SEQ ID NO: 77052 - DNA, 496 bp, Arabidopsis thaliana landsberg
taaagtcgacggacttgtagccagtctgtacaggctggtctaccgacttacgccagatcacgcctggagcgaccttttcgaccgcgtcggtttcgggggtggtcagaggacctttgccatcgatcgggttacccagagcgtcgacgactcggcccatcaggcctttgccgaccggaactttcaggatgcgaccggtgcacttggcgctcatgccttctgcgagggtgtcatatgcacccaggatcactgcacctaccgagtcttgctccaggttcagggccatgccgaatacgctgccacggaactcgatcatttcgccgtacatgacgtgggccagaccgtggatccgtacgataccgacggataccgaaacaacggtaccttcgttacgggcttgggagctcacatcgaggctgtcgatgctgcccttgatgatttcactaatttcagaaggattgagttggtgcattgctctgctgccctttaaactcaagat

SEQ ID NO: 77053 - DNA, 535 bp, Arabidopsis thaliana landsberg
cgcctgctggccgggctgctggcggggcagcgcttcgacatcgtgttcgtcggcgacgcttccctgtcgaagcggccggtgcggcgcgtgatcgagccgctgcaggcgatgggcgcggtgatcggatccaacgacggccgcgcgccgttgcatatccgcggcgggcagccgctgcgcggcatcgactgcaccctgccggtggccagcgcgcagctgaagtcggcgctgctgctggcgggcctgtacgcgcagggcgagacccacgtgcgcgaaccgcaccccacccgcgactacaccgagcgcatgctggccgcgttcgacgcgccgtgcgcgttcgtgccgggccaggccgcggtgctcggcgggttcccgctgcaggcgcgcgacgtccacgtgcccgccgatttctcctcggcggcgttcttcatcgtcgccgccagcgtcgtgcccgggtccgggctgctgctgcggcgcgtgggcatgaacccgcgccgcaccggcctgctgcacgtgctgcgcgcgatgggggcggaca

SEQ ID NO: 77054 - DNA, 643 bp, Arabidopsis thaliana landsberg
aaaaccatatattgagatttgggaaattctctatttttaattcacttttttttttttacaggaatttcataatctaaattggttagtgcgtaaaatacacatcttgctagtatacttttttttttttgttaaagtcttgctagtatactaacaagaatacaaaacgaaaatacaaaaactaaattcaaatatctaatccaaacaaattcaaatctagaaaataaggttaaagcagaaacaaactgcaatttattatatcggtgcaacatttttttttgtaaaataatattgctacaacattactgaagaactagttgaactacaagctactacacacaatcaaaccaactaagtgacagttttcttttcttcagaaccaaatcatgaatttaacttagacttggaccttattatgtagctagatgaacgattcagaagttcacatagacagaaaacgcacaaaagaaaaaactaatcgttgacgtcctctaaaaaaacaaaatggaaaagcggcgatctcagaccggaacacccggaaaaagagatatagaaaccgacaactgttggagatctgctacgatactctttgacacaaaagctacgagacccgtagacccgactcaaaactacgaatgtcgaagtg

SEQ ID NO: 77055 - DNA, 544 bp, Arabidopsis thaliana landsberg
agtactcccaactagttcaaagacaaaaaaaaacagatttatctttgttcaagtaaaatcagagttatgaatgttaagacttgagaagtagcctttaaacaccaagttacaattaaattatcttcttcttttgaacgctaaaccgagttttggtttcaattttcaccgcctttagaacagcgtttgcgttgttaagttgatcagttagtaactttctaccaagatttagaagaaagctttactcaaattttgtaatgggaagatactgattatactctttagtgtgaagaaatcattttaattcgctaatttaagtatttgcctattgggtatttgccgggacgaagtttactccacgtggcataaataataatattataaaaaaaacaaaggagagtagagagaaaacgagagaaaagaaggaaatggaaagcgaagcagcagcgactgttcaagccaccaagccgagaagagcacctaggactccggtgacagccattttgacggataagagaagttcggcacctaagagcaacaacgagtc

SEQ ID NO: 77056 - DNA, 655 bp, Arabidopsis thaliana landsberg
  unsure (1)..(655): unsure at all n locations
ttgaatatatattcggttctattgttttagagctttctttcttgagtacttagtttaaattttctctcaggtcatatggccatgtattaggaatgtgaacgttggtgatggataaatgcatctatattcatatttgaacgtacgtttgaattaatgtatggtgatcgacaacgagcgaaactgcatacttctcttgtttactttgcagaaaaatgtatctatattcatatgtattaactttttaaaagttgggtaaaagaaaaaatctaaaagtttgaattaatgtatactagacgtggccttgtcaaatcctgttaaagttgatcaataagcgtacatagacgagcacatataaaatcatacaatttcatatttcgtgggatgaaattgaattgagtagtacttattttccttaattttttcttcttcttaattttctttgttgccagaaaaatgcttaatgtatacattatgctgagatgggatttccaattacacattactaataaaagaaaattttccttttaaaatatgtcattacaaaagtttttctttttggtttaaaaantataaagtaaagggtgatggacaaaattaanagtaatgagataagcacattattcttttcgttttctaagcaataaaaaatggacca

SEQ ID NO: 77057 - DNA, 279 bp, Arabidopsis thaliana landsberg
gaccgggacgtggcggcgcaatccggaattgcgactgagggctttcgattttgttgaactggcgcggcagcaacgggagatactggggagtgcagcgcggctggtgcggccaggaagccgcctgatttatgcaacttgcagtttgatggaggccgagaacgaatcggttgtttctgatttcgtcgataaaaattccggcttcgtcctgcaaatttcaacgaatgtctctgattctgtcttagagaggaccgtttcttcgtctgctgactagtcaccaca

SEQ ID NO: 77058 - DNA, 438 bp, Arabidopsis thaliana landsberg
tgcgacatccggaggccgtggaatccccttggcaccgccactctttttacaatgctcttttcatgagccagctgaccgggcagccttgggttcactagtcccgtatctccagatacatggaccgtttcatctactcgatcaaatggatcgccttgctcttcatcagcttcctaatcatcatcgtcaccacgacgtatatgatgcgttacttcttcaattacactccggccgacgcctacaacttcagcatactgatgctgtgcatcgagatcttgtggcgcatcgcgacgaccagctatcccatcacccacatgacggtcaatctcatctggaccaactccattccgtgctggtagcgcatcatagacctgttcgccacgctggtgctgctgatcgtgatctttttgcacacctacacgcccgtcgacaagaccttca

SEQ ID NO: 77059 - DNA, 454 bp, Arabidopsis thaliana landsberg
ttttgtctgtgaagagaaacagttattttttcaagtcttggggtggcttagtctacttttgtcgtttggctgaaacgatgagtgacttaaacctttctaacgactaatgtcggagtcgttgaatacgtcaaaacaagacacaacttaattcactcggcgaaaaatctaatgtgggttatgacacctaatttagtttcttccaatgttttccaaacctagttttctagggttttggagaagaacaaacaaataaaaaccgaaccaaatcgaaaatacttaaacagaaagctaattttgtcaccgtgtttagttctaacaaaaattaaatcatccaacacaaattgcatcaaatcggatggagatcgaactaaattatcaaagtatagaaatccggcatagtgagtaaaccgggttcaaacactttttgtaaaagttcgattaaacacaaagactc

SEQ ID NO: 77060 - DNA, 582 bp, Arabidopsis thaliana landsberg
tatttcggcgactgaatattaaattaagaaaaatacataaagtaacaaatatatttaatttaataaataggataaatatgtatgaataaaacagatatgaatacatttggatttaaagagataaaagaaatactatttatattcttgcggtaactatattaataatgacttaatctcttactgattaggttttctgttcttaattagtccaagttttataagaaaataaactgtttcgaaaaaaatatatttaaaggttttattatttattgatgatgaaatgtaaacttttttttaaaaatagttacatattatttattcagaattatatataattattgaacacaaaaattgatatattataatcaattttaatatggtgcattaatgaaaggagtagacgttaatttttgttttgctcattttgaagttttggataagaataaaaccaaagtcgataactttggttacttttaacagttagattccgaacacccgaaactactcgtattaaattttgtattattgctaatttcggattagtataaaattcagtattggaaatctcacctcagttaatta

SEQ ID NO: 77061 - DNA, 128 bp, Arabidopsis thaliana landsberg
tattatcccgtgttcagatcttctctgtttaacacctatttttgtttatttattgttgtggtataggttttcaaggaaggagttttttaaaagttttgtcgtctgtctttgttgattgtaggtcgttg

SEQ ID NO: 77062 - DNA, 529 bp, Arabidopsis thaliana landsberg
gcaaatgcaaaagttgaagtattataatcaattcataatgatttaaaccaattttatgatggtctctaattttttttttttttttttttatgttatggtgtcaaagaaccatgatacgagttctttcttctacgatagcaatcatatctcaaaaattagttttgattaatttcgggaatactctagttatcaaaatgtaaaagtgggaaaattatatggattgcacgaaaaatagtcttcatattaatagttattgacgtctatagtcccactacaaaattttgttgttgtatccactaagaagttaggccatcatctcctttttgtgtatatgtccatattaagcctaattttttttttattgttaaaggttttcgtccgtcaaaatccaagattgccaatatttttaaagaaatctatgagagtgtgatctatcaaaaactgttttactatacatccatgaataaataataaacttatgaaaacttattggtaatggagagtcttattcaacaacaaaatgaagact

SEQ ID NO: 77063 - DNA, 557 bp, Arabidopsis thaliana landsberg
  unsure (1)..(557): unsure at all n locations
gaccgcagaagagaattcgtgaaaagagtgaatggagaaggtgaatatagcttaagtggccattcgtaatattcgcagagatgctgttgaggccatcaaaaaactgcaaaaagacggattaagtgaagatagtgctaaagatgcggaagccgatatccagcaattaacagataggaatattgtgttagtggacaaacattgtgaagctaaagaaaaggaaataatggctgtataggcccggtttctttataaatataatttaaaatggctgtttcataccttgagacagccattttaaattatatgattactagttgtcctaaactccgggcctaggttgctcaatgcccctttttgctggctgcattaaccagataaactcctcccaatataaccagcatgctgagaatctgaacccagctgatactttctttggctaacactccccagcccaccgtaactaacggtaaggcatatgctaccatcgatgccagaaccgaaccagcacgttttatcaacaggaaaaataannnnnnnnnnnnnnnnnnnnnnnnnnn

SEQ ID NO: 77064 - DNA, 494 bp, Arabidopsis thaliana landsberg
  unsure (1)..(494): unsure at all n locations
gggttttctggcttctcccgatatcctgggcatccaacatagttacttcattccggtctgttgtttcgcttatctggccgtctacgcctggagagttaaaaaaatattagcaagtcagggcatcgattatgacgtaaaagtcagcggcgggcattaactttgcaggcaatctggttttacgctaatttaacccgtttaatctaaaagcaatcatcgtaaaaacaactatgttatctattcctatttcannnnnnnnnnnnnnnnnnnnnnnnnnnnnngggaccaacacggtatttggtatagtagaccacagaggcgaaatcgcttaccgtggggcaatctcaacaaaaaagcacgacaatgtcgacgattatatagaggaactgtataatgcgattatgccggctctcaatcagtttggcagtgacaaactggtcagaggtattggtaattggtgctcctaatggcaactactataacggcaatatcgaata

SEQ ID NO: 77065 - DNA, 601 bp, Arabidopsis thaliana landsberg
  unsure (1)..(601): unsure at all n locations
ggccaaatgcttatagttgctgctagaactctgatctaccaacataagtttcccattattttgattgtaactttgacccatcttggttggtggagtcatattggttaagatagattcttgattatcaaactcctcgattggttccttgtagaaaaggtgtgtcatatcttctccttcattgaagactatagacctcttgaatgggtccatgatttcagattgtgtaatatcagaggcagtctctggattatcataggccatcatctcttttgttcgctcctttgcttttcctctagctttggctcctagcccctttgatgagatgtttctcaactcactcttcttctttcttatccctgccttcgtggcctcacataccacttcttcttcaccgtacccgggactcaaaccatacacgaagctcttatcgccattgtcatcctcctccttctcctcttcttggtctacatcgcctccaatgtttccaaaatcttcatcatcattngtgaggttttttgcttgtacgaacctcttgatggcttttcttgacttcttgagcagccagtctaacgttntactagctttatcaaaccccaacata

SEQ ID NO: 77066 - DNA, 388 bp, Arabidopsis thaliana landsberg
tttgcgggctgacttcgggaagtctgttcgttgactaagatcgaagattgcgctatactagcaacattttaactttactgcttaacttagggagttatgcgctagctaccttaattcccctgggaccctggtcaaaagataaatggcagaacactcccttcccgttccaaacttagtccttcggcctaacgagacttacggaggactggtggctcagctacagcaatgtacctcgaaaatattgtgtctggtaggaagtccacccttgctacaagtatacaatcaccagaaccctgctccgtatggcttacaatacgagtacaagcgctacttttctgagttccactcttgagtactacttacgagacaactacgatactctctacac

SEQ ID NO: 77067 - DNA, 152 bp, Arabidopsis thaliana landsberg
tccaaactaaaaattaaattcaaaaacatttaatatacatgacaccatgccaagacattacgaggatccagtttattaataatgtccaaaccgccacacgcttgagcttctcattcattggctaaactgctccataccaaaccaaaaaaaaa

SEQ ID NO: 77068 - DNA, 656 bp, Arabidopsis thaliana landsberg
agaacgtgaagacaagaagtttcttacacttgagatcaacttattcgacactaattcatgttctttggcaaagattacttttgcatatttgtagagctccacatcgaggttgttaagcgatttgatctgctgaatgacctctttaggaactcttgtacgcgtctgttagatgcattgtcaaaagatttcgttattccagcattctctcattaactttactaagtttagatcatgtacgaaaatactttacccctcttgtaaaatttgctggagttattctcttcagagagttgacccgtctggttccttgggactttcgtaaatgagtgatgcagccttcatagacttccataagggtttttaccgtcatctgaagtgtatatataaaagtcacacaaggtctcaagcgttgataataaattggaaaaggaattctacttacatttccactcttagcttctgccttattcaatgtaacttcagatgtaccattctgtaatgtcacagccattttcagcaagataattacaaatatgacagttgaacaaacaaattattaccttctgcagcaggactttacctgaatattactcttatctgacccggtttctgaaattgtgacacttgcttctgaagcatcaaagaaataaagttga

SEQ ID NO: 77069 - DNA, 605 bp, Arabidopsis thaliana landsberg
gaagctcgaccagccgacctgctccatgccgtagaacagctcgttggtgtggccgtccggttcatataagtaggtgtgccagttcgagccgggcgtgtctcggcctgcccgctggatgtgctcgccggtctcgcgcagccagctttccccgtcgaccacctcgcgcagcgagccaacctgccaggagatctggttcacggtcacgcctgggcggaagtcccgcttcttgtcgtagacctcgcggacccgcttgttgaacaggacgaaactgaggtgctcggtaccgtggcgcatgaagtagccgcccgggtcgccgagccctttgaggctatccgggtcatcggaacgctccatgaagtcgagccggtccgatacgcgaaaccccaggaggtcgcggtagacgtgcaagcattcgtcgatctgcgtgcaggtgagaccgatgtggccaagcctgcgcacgcggaacggccggtccagccggtagccgtcaacgtcgaaggtcatgtctctcactcccctcttcccggctggcccggagcgttttcgcgctggctcgaacctgagtttccaggcgccctacgcactcgatttcggccaccatgacg

SEQ ID NO: 77070 - DNA, 381 bp, Arabidopsis thaliana landsberg
acggacttgattgatttggtacgataaactttctcacactcttatcgtaaaaaacaataaaatgtctaatcttgaaatttgaaaaaattataaatttaactttgataagttcaatcggttaattattttttctttgggttttatcgtcatttgagagacatatgccatcaatcaaaacatatgctttagaaactgtaaaataaaattctaatcaaaagctaagtttctaagatatgaaaagaatgaaaagtaagcgtaatggctaagtttatttttatcaagtttgcttgaactttaaattcgggtcatttttggtctttaatttgggttggtttgtcaaacaagaatagatgctttgattccgggacctattattctttt

SEQ ID NO: 77071 - DNA, 633 bp, Arabidopsis thaliana landsberg
tgaacggtggtgagatggttggaaacggaaagaggaggagataggtgtgggtttagaggagaaggtgggaagaaaagaagtggtggtgattgttgttgatgagtagagattagggtttctcagaagcgaagacgccattgaaggagaggtctcagagagatagagagatgaaggtttcaacgtgacggtggcggcggctaagtttgattcagtagtgctaatcttctcgtcactactctcttctctttatgtaaaaaattgttctttgtttgacccacgtggaaaaataccaaattgggattaaaaatgatttgacgacgaccattgggtaatttggttcctaattttaacggtatatcgtcgttacccacgaggaagaagaagcagagtcaaactgaaaaaactggaatttaattttcaaatttcgagaagaagacagtcttattgattcagctgcattactgttacactcttgcggaagaatttatagcgggcacattagaattcgtttttttattccgctggataatcgaacgatcttttctttactttttttcgataagttgtgaacaaaagacattttaacaaagtggaagctgtatagtgtgtagcacgattcaaatgaaattacat

SEQ ID NO: 77072 - DNA, 750 bp, Arabidopsis thaliana landsberg
ttgtacaggcgcgtagcttgcagttgaccagtgaagctgtccaatcccgagctggtctatctgaagccggtctaaagaagctctaacacaacaacagaacatcatccaatttatcatcaatctccaataaaccagaagtgaaaaagagagacaaagatcaaaacttagagagacctgcaggcattcacaaactgtcctgaagttaacctccatggataagctgcaaactttgtagctaccactacttcattttgtttccctttaagtcctgacatttgcaaccattaatcacaacacacaaacccaccacagtaacttatcaagacagctccaggataatactttagaaccaactaaaggcaattttttccccaaatttctgaaactatctattgaatcagaatctttagaccagtaacaaaattgggaaaggttaaagagaaacacaccttgagattctttaatgaatttccccaaaagtctctcactttggccattaagcctaccagtgccataagaatcagcagtatcaaacaaattgattccattttccaaagccaattcaaaagcttgttgaagctgatcatccatggaagtctgataaccccaaagaagctgattaccccaagcccatgtcccaaaacccataggagaaacacttaaaggacccattttgacctaaaaccatcgattgttcattcaattgcattaaaaaggagaacactttgttacgtttgctttatatgcgta

SEQ ID NO: 77073 - DNA, 575 bp, Arabidopsis thaliana landsberg
attttttcacactattcagttagtgtttttagacgatctttttttattgtatgatacgattatacgaagaggcgcattggaatctggaccggttggcacaatgtttccatcgctcggttaaattaaatcagttaccttcgtgtgtcatatattaacaaaaatgcaagtgtactttcatgaattattattgaaatctaaaacatgcatggtagtcaaataaataaaatatatttcggcgccgaactctttgtaatttctactcttcttttctttttatctttttagtactctttcggcttttgttacttgttttattactcctcgtttctttttaaaacatatcttttatttctctacctaaaactatcacaagctgaaacgcaacttcacaaatttttaaaaatacaaaatacaaaaaaaaaacacatgagaagagatataaccatatgataaaaatgcacatactaatagtgccgtcatttgacattttgagtatatgtattatgaagtagtattactcttatacaacttggttcttcttaccccaaatctcaatttaaatacctgttaatttt

SEQ ID NO: 77074 - DNA, 568 bp, Arabidopsis thaliana landsberg
acttcccagtttttgtgtcaaagtgacataataacgttttactattttaataaaactctgttggagaccaaaggactagggtattcattaaacgagttggaaaacctagctttgaagaaatagttaagaaacaaaaagatagatgcacgagcaatgcataccttctttcaaaagaatcgaccaaataaggtaactttggctggatacccgtggcttttcgaaaccatctactacctaaaagtactctgtcaacggcatataggagctgaatctctgcagcctttgccacaacactcaaaggaattccggaagtgccaatctcctccatggcttcttgaacctgcagtttgattaacacaagaagaaaaaccgtaaagtttttagaaactctataaccaccaccaataaacaaagcaaagacattatcaatatctttttctgctaccctggttaaaatttattatctctacgtggaggcacccagcaagatgataggaatagcaactgacaaactctatccccgtagctcttgttgttgactataacaattacatgctcatgtttgttt

SEQ ID NO: 77075 - DNA, 446 bp, Arabidopsis thaliana landsberg
  unsure (1)..(446): unsure at all n locations
gtgcaacgggatttctaagctttgcctgagaagaaggggtctttatcataaccctccttgatnnnnnnnnnnnnnnnnnnnnnnnnnnnnnnnnnnnnnnnnnnnnnnnnnnnnnnnnnnnnnnnnggcggtggaggcaaagaggccggtggtggttgagcagcttcagccgtgctgtgagcttgcaacacctgcgcggcagcctctgcagccgctgagatgggtttatcagctgagtccaaaaaaccaacttcgtcatcggagtccgaagcaggtgaggtgacaggcaacgaacgttccctccccccccactagatctgcaacggcaccgcaacgtgcacgtgtggtcatggcagcgagtatgccatcggccttcacgtngtacgggttgcaaatgtaaaacgcacactcatcgtgtgcttgagagaaggacatgctcatgacat

SEQ ID NO: 77076 - DNA, 352 bp, Arabidopsis thaliana landsberg
gcgtgagtcaggtatacgttatgcaatttgtatcgctatgtgttgcatgcagcgcataaatatatatgtattttagttaggttatattttgcctttgcaaagaaatcttccacgagcaaaatactgaacaaaaatgacaaacttcagtgttgttttggggactgagatgggaactagctatatatctccgatgagttttctctatgggtggatacatgcttttttacttggaaattgcaaacaaaactgttcagagagattgaagaggttatttggatgtacatgattgggcaacatgcttcatggctactttctataagcttcggtttgtgaatgggcattattctgatag

SEQ ID NO: 77077 - DNA, 603 bp, Arabidopsis thaliana landsberg
gcccgggataccgttaaagtacaagtttaacgcccgatgcgggacttgtatgggtggattttggctatcgtattgtgcagaaaagggttaaaataggactggatgataatacaaagacgcaggtgctggacggcctgtcgtccgatgacagggtgataacgggagaggtgcaggtaagttcaaaagaagcgaaagcacaggcttccagtccttttatgcctcacagaccttcccggggtaaaaagaagaaataaattttgagaaaatggctaaaaagatcctggaaatagagaatctcaaacgtgaatttatcatgggtggggaaaccgttcacgcattgagggggatatccttttctgtagatgcgggtgaatttcttaccattatgggaagcagcggatcaggtaaaaccactttgctgaatatactgggatgcctggatgcccctactgatggcgattattttttagatgaagtgaacataaagaaactgaccagaaatgagttagccggcttacgaaataccaaaatctgctttgtatttcagtcctattacctgctggcacggacctttggattggaaaatgtggatttacctttgtt

SEQ ID NO: 77078 - DNA, 576 bp, Arabidopsis thaliana landsberg
cgccctttgtatgcaaaatcttatcatatattgtgttatccacgtttatatttatatatagtattttcatctgcataaatgtattaggactacaaaaaaaaaaagattcccaaaagtcttgagtttataagttgcaattcggagttaaggcatcgtagtatagttaggatccaaatacgttgtccattgtaagcgttttcgaaagttgatactcctttggtttcagtgattttgacctcagatttgcctaaatcgaattgtagtatttttatttctttttgccaaaatgacattattttcgatagtgcttttttgtaatacctctactcttcattttcttactgatattaacgttcatagcaaaaaaaaaatatatatttttaatcgttctgttttttagttatcagttatatcattgttggattgactaaatatagaaatttatagtttcagcgggtaatatacgttgtatcaaatactgtacgtctataacattcgttttcggaaagaaaaaaagttatctacctaaagttcaatcatatatagtcaacaaatgaaagaaaacgaataatcaat

SEQ ID NO: 77079 - DNA, 701 bp, Arabidopsis thaliana landsberg
caccgaatcaaaaaaaagccaaaagacatttagcattgttgttaagcatttgcggcagctttggccttttgaatatcaaatgatctatcgtttcaattcaaccaaatacaaacaaacgaaacaagttattgtataagttctgtcggattatggacttttatttaagccacatgtgtggggacaagcttttctcgatttgtcattataatttcggataagattatctatcaatttcgtgatatgatgatgtataataccatttaattaagatatatggtctattcaagaaaatgaagtttcttatggcttcatataatcatatctacgtaccatattaaccatttagttgaacttacacaaaattttgattaatctattttcttacatatgagaatctaatttttgtttttcttctaaacttttaaaaaaaaaaatttgtattcattattgtatgcatgcaaattcagttgttgtattaattaatcacttgggaccatcaatatgtgaataattttcgcggtttaaattaattcgggcgatgtgacattatatccttgatgtccacgtttgaactatcttctgcatcaacaagtaaccatttgtaaatttggacacaagcattattctctatgactacaagtacttacattacttgtaaactatcgtattttgttctatgaagtaaaaaatctaacaccttt

SEQ ID NO: 77080 - DNA, 444 bp, Arabidopsis thaliana landsberg
  unsure (1)..(444): unsure at all n locations
acagggacactctaaacccattaggaataacatgaatggggtaactttaaaaaatattttataggactgtcactgttgggcctgacgcttgggctcttacccatgaagggacaatcacaggtcagtagcaatagttttcagcaatcccaacgggattcaagatacccttaattccttatcctcagtcannnnnnnnnnnnnnnnnccgttttacttttaataaggctacagtattaagcgttcagaagtaagagctccggacagaaattcaggatttaaaagatctgataaagctccctttaaaagaggtcgcatcagccccaatttccaatttcatttcactggaactggatgctcatctgaataaatccgaaggctataaactgcagattacttccagttacatcaaaataacagctaatgataaagcaggcatttttagag

SEQ ID NO: 77081 - DNA, 314 bp, Arabidopsis thaliana landsberg
gaagcaatacataaaccatacatgacctgagacaaatgtatagaatctgacacatctgcctaggtatatggcaaatcccatataaaaacctcataaataaagaaagaggctactatacgtgcaacatatgaaatgagcaaaaaaacctttttacagatgaagaaagacactactacatcctcaaaaagaaataaagaaaaccatcactctgacataaataatgaaaagactaacatgaatgtcaaaattatacaataacacaatactacgaaacaaaaacaacatgcaattgcactattgtacattgacagatt

SEQ ID NO: 77082 - DNA, 131 bp, Arabidopsis thaliana landsberg
  unsure (1)..(131): unsure at all n locations
aaaaaccggaacaccaaaacaaaagagnngcgcgacgagccgnaagacgnaggaaacacacaagaacggcncacagggagggaacagaaccgcccaaaccgaccgaggagaacaggccangcaacaaggag

SEQ ID NO: 77083 - DNA, 463 bp, Arabidopsis thaliana landsberg
cgcgccattcaatcggctgatatccttatgtaacggcgaaatctcacaagacggcgcatagttgactttacacttttccataggcccccgccatctctacatactgatgcgtactccgtcaacagtgctgtagcctttcacacctaccatgcctttttttttacagcgttccaggaacggggcttccagcgaggggtctgtcataaagaacactgcattcatctggctcctgtcttcgggccttaccttacaggtaaagacgggcaggctatctattgtattgtataaaagcccggattatttccggatccttctgcccatttattccagtccgccctcggtcattattcacctaacggtaagcatactcacatacactgcgaaaacgtggggagtattcatcagtgagccgccttctatatgctttcgattattcatgatcgtgggttttcgtcttttacat

SEQ ID NO: 77084 - DNA, 373 bp, Arabidopsis thaliana landsberg
  unsure (1)..(373): unsure at all n locations
acccatcgggaggaccggacctatatgattttgggacggaaaaccgtccggcgggaccgtgatgcatcgccgggacggactcgacccgagcggtcccgtccgactgcggtttcaggccctaggtgcaagcacggttccaaatgacatggcgggagcgggactggggctccgatcggtaccgaagcgacggccgacttatgccggtcgacggcatcgatcagttgtctgatggtgatggcatatttctgggtgcggtcggaacgcccgacattcccgatcacgtcaccctttggggcttactgatcccaatcaggcgagaannnnnnnnnnnnnnnnnnnnnnnncccatcaggctcttgaagggtctgaaatt

SEQ ID NO: 77085 - DNA, 560 bp, Arabidopsis thaliana landsberg
gattcatcgacacacaccttaattttcaaaacctatatatagtacttgccgtaaaaaataatgtagtgattaaagataaaatgtctctataatcgattcctaagcaaaagaatcatgcacaatattagcatgacttaattcgaattttccatagatgcattaaaatgtttaagctaatttgattgacttttaaatgtatcaactaactgactagaaaaagtatgaaactatccaaagatcatttagggaaacttttatatgcttgtgagtgggaaaggcaatatttttggctcgacggaaaagacaaacttagccatgcatgcatcaatgctctcaaatcacgtttttcatcaaatgattattagaatgagaatttaatatgtcacctatatatatctctatgtctatcatgcatcagtgtagttaaagtatcaatataaaatgttttatactaacaatacatttattagtcggaccaaatatcaatatattcttgtgacgaacatactcacgaaaataaacaaaaacatgagaactttagcattgaacgaaaaattaaa

SEQ ID NO: 77086 - DNA, 480 bp, Arabidopsis thaliana landsberg
ccttaacatctgcctttatatgttcatttctacactctcttgcgttacacaacttacactccggaaatagtctacatcaactttctctatcacctttatacccccacagcagtgtctatatcaaattttaaattcgaatatcttggagtttttcgggacttccaagatgtgagggttatgacatgttgaaatcgagtggaaaataacctaaaagaaatatagtctaatagtgagctagaggttttgagtcttgaccatctaattggacaatattcgtgtgtaaacgataaacagaaaaaaaaaaatcatttaaccaaaaactcaaaggaacaccgaccaaaccttttgattttgtcaaagacgatccgtgaaatttggcatttataaagataatcttctataattccggtaagcaccgtctggtgtccctttggggtaaatctacttgacactttgcaacgaaattaagtaaaaaaaaaa

SEQ ID NO: 77087 - DNA, 525 bp, Arabidopsis thaliana landsberg
  unsure (1)..(525): unsure at all n locations
atggtgggntgaatttttggtgaacgattgagagagtataatatcttttggctctctcaccagtacttggtcgggtacacgataaacaaacctacaaaagaagccctttcggatatgggctttgggccttggaatttgggctttgggtgtatgtttacttgtgaaatagtagtaatcttctttacggtaagttacaagtctcgtcactttttacttgtgtcttgggttatcttttttgcttttttatggttgatttgatgattaagatttaagagctcaaacttccacacaaagctctctcatgcctttgttgaatgaagacacttttctctcttttggaccaagctctcaatgtcttaaaagctgaccatgcaaataaatgtacaatgttttgattagcaaagacatttactaggttaccctctctctactagacctttaagcggatcagttagatttctttgtagaaaaagttatctacaatgaaaacgaactgtctgcaaatagtgttattaattgatataa

SEQ ID NO: 77088 - DNA, 213 bp, Arabidopsis thaliana landsberg
  unsure (1)..(213): unsure at all n locations
aggagttngtcagaggacgcgcaaaggccggtaacgtcgagttagctgaacatgctgcttatatgtttattttgtctcgatcccaaggacagtggatgggttactatgctttctaatatttacgcgtccaagggtatgtggactgaagctaagaaggtgagagaaagaatgaaggttgaaggtgtggtgaaagaacctggtacgatcttggat

SEQ ID NO: 77089 - DNA, 121 bp, Arabidopsis thaliana landsberg
cgagcagcgaagccaattaaatgaacatctaaggtacacattgaacgttttagagttcgagaaatgaaatcatataccaagcataggtttttatcgccctagaaataccatattatataac

SEQ ID NO: 77090 - DNA, 329 bp, Arabidopsis thaliana landsberg
  unsure (1)..(329): unsure at all n locations
nnnnnnnnnnnnnnnnnnnnnnnnnnnnnnnnnnnnnnnnnnnnnnnnnnnnnnnnnnnnnnnnnnnnnnnnnnnnnnnnnnnnnnnnnnnnnnnnnnnnnnnnnnnnnnnnnnnnnnnnnnnnnnnnnnnnnnnnnnnnnnnnnnnnnnnnnnnnnnnnnnnnnnnnnnnnnnnnnnnnnnnnnacatattacagactttacctacaccatcaaaccttttataaacaatttaaaattttttttatactttctatactccaaatataaatacatttttttaatatcattaattattacaacttccttctcttactcttaatcttcaat

SEQ ID NO: 77091 - DNA, 137 bp, Arabidopsis thaliana landsberg
ttccggcgaaatccgattattgagctacctttctgaactgtttatttttctctattgtctgtcaataatgcatttgacctgtggaaggtggagaagttagacagaagaatggatgacaacgaccccgaacgagggca

SEQ ID NO: 77092 - DNA, 460 bp, Arabidopsis thaliana landsberg
ctaaccgattatccggttcacgggcgttacatctgccgaatttaaatcttttggatcactgtacacgctgtgggagttaggagtctttgagggcatccgtccggtagactatgattcttccacgaggccttgaacttaagagaggtctgaagttccaccaacattagctagccattggatggctatcgtggctagcaaatacgtaggtatattcggtgtctacataatctagaattccttctatcaaaaacaatgaaaatcctactcttaaataaacaacaatgaatggtcgggatacgttatggatgtacattatacaaacttgcgaatctaaaacaggagagagggattgacataggccctatattattatttggagatgagagagagactttgcggcctgggaagagttaacgagtaatgagcttaaaacacaaaaagggatggtggcatgtgtata

SEQ ID NO: 77093 - DNA, 562 bp, Arabidopsis thaliana landsberg
tcctgatgccgttgatgcattgccattctaacatagcattattccttatgatcacaaaaacacatccacagaccatggggacgtgtttcttccctctccgatagagtttcctttcactaaattgttttcttttctttctttttaaccacatattaaatcgaaatttattctttgattgcgctaccaatcaggaaaaataaccttttaaatcaaaaattttataacttaaaaacctaaaaattttggccaactaattggcatatagattacaagagccaaaaatatttgaaagcttaactcggaaaaaaatcaaattcatcgagaaagttggaaaaaacatgttttcaattctctgcagatttcatcatggagactaactctatacaatccacttcgaaaattttacagtttatctttctgagaaaatattctccatactccgaatttaaacttccgtctccgcactaagaagtgataaacctcttctatcactttttctttcttaaaaaaacacatggtcatttttcttgatgaacataaagcccttttttcttttcttttt

SEQ ID NO: 77094 - DNA, 357 bp, Arabidopsis thaliana landsberg
ggactactgtatccggtcctccttagtcatgaaccattagcctctttttttagtattataatatttggctctttgcggggggctcggatatttgctattagcaacacgtattgtgtgattgtcattgacacaaaatcaatagagtcaatcgttgccttatggccctgatacattatctctgacacttcatttctttcatatcttgtacatgaattaaaacaacaggttctttcgatttcattatctggcttgcctcaattcatggacctagatcacaaaacgagatctgacctgtcaataagttgtgtcatcgtctccggtgtacataaacacccattggtctaacacaagggaggg

SEQ ID NO: 77095 - DNA, 588 bp, Arabidopsis thaliana landsberg
gttgaaattgtactcaacagcttgagttgatatagattttatattttcagtaaatccagtaatgttgggtggggcaaaggctaatgggagttgattgatgaatccaatgaatatgagaagaagggtaagccaatagcacaacacaaagcagaacaagatacaaacttctcatatcaattgtctcccaactctcaagtaaggtaataccagactgaagcagaaaaagggcttgcgactaatctctctaatgaacacaaaaatgaacaaaggaacaacctttacgagagacagagcacacattgcaactagaaatgaacaaacataagtgataccaaaacattctctcttgttgtgaagatctcgaatttctaaaacccaattggagacaataggaaggagaggagtgaaagaacaaaccttgcttagacctcttgaatccgccattggtagttgtgagaggcaacatctttagggcgtcctctcttacgagcattcatgtctcgataagatcgattgaattggagtatgtagaatcgaaaaaagatgaaatgagaactcaaagttttgtgatatgaagcttgcgattct

SEQ ID NO: 77096 - DNA, 265 bp, Arabidopsis thaliana landsberg
acgaaagctattctcttaaaaactcactgtcaaatttctttctactttaatatgaccctctaattaatacgtagcagggacacatgtctatcatgaactccaattcttaaataaattaaaattcatccttaatccaatcgactttttgatgtgacacataccaatctatctactgctgacttggccgtaagatgaagacagtttaatcaacttgcatatatcgattatcaaaccaaatttcttctttttacttaaatagaaatca

SEQ ID NO: 77097 - DNA, 486 bp, Arabidopsis thaliana landsberg
tcagacagattggcactttagcatcttatattcacgtcttttcaaatttggtaaataaagatattaatgacgtttgggagtattccgaagcttcaatatccttaattcatcgatataaaaaaatcaaaacagcatttgcgaatatatcaatagttagctacacgagtaaacaacatattacatctcagctataaaatttgacccaaaaaaaagaaagatctcagtataaaatttgacccaaaaaaagaaagatctcagtatatattgaagtagttttggggattcacacttgcttttgggttactaaaattcaatatatacttattagggatctaatgtatattagcgtaatggaccattacctgaaagtttaaaaagtttgtcaactagtaatacacattaccacgcgagtttattttgcgtttagttttacatatacacgatactaaaatcatcttccaaaagatcacttatttgctattaaat

SEQ ID NO: 77098 - DNA, 381 bp, Arabidopsis thaliana landsberg
ataataaatatattaatgagaatgtcatggacgacacttttattttttctaccacagctaatacatagtgtggagggaaatcttctaaatatgcgctataccacaatcaaatcaaatttcctttcatcttcatttacaaactatctctacactcactatttaatcttcatagatgtaattaaactattccacatatacattatcatatatccagtacctatatcttgaattcatgtacaattaatttccattaatgatctctaatattaccatacatatagcatagcttatttgaataatacacataaatgataacaattaacaccaacttgcattactgaaaatcaacttaaaaagctcacatatgatttcatggtaaac

SEQ ID NO: 77099 - DNA, 564 bp, Arabidopsis thaliana landsberg
aatcattaaaaattataatttatggtaacattaaacaatagtgtaggttaaaaaattttaaattaattattttggacataaatttttttgatctattaattgattaaaagttcattaataattttataccaaaaaaattaaaattcgaatttcaaatattataatttattacaaatttacagattaataaaaataaatgtataaaaaatttacaacaaaatataattataatcgttcaccaaaattttattaaaaacaaattttattaaaaatatttataacataaaaaaaaatacattgtatatcataaatctaataaaattaaaaaaattatctataaaaaaattatatataacaatttttataatttataataaaaaataaatattcgaaaaaccaaaaaaaatcactccggatatttggactaatctaatgctaattgtatttgttaaatataaaattatgcacctcttatttaaggagtgtagtgggtcctagaaaccgagattccacgtaaacaaaggctggaaaaagacaaaagctgactgtccatacttatctatt

SEQ ID NO: 77100 - DNA, 528 bp, Arabidopsis thaliana landsberg
  unsure (1)..(528): unsure at all n locations
cgacgatggncaggctgaaagtatgctgaccgaagtataaatttttgatttaggcaaggactgagcttgttacgaggatgggaaagcggtgctcctttacaaagtaccatgctctcttcatttatttgctcatttacggtgtttgccctgccagcaaaaacaggacagccatgcggatggccacaccgctctcaacctggtcgaggatgatcgactgcttactgtcggctacatcgctggttatttccacgccccggttgatcgggccgggatgcatcacaacgatctctttttcaagcgaatcgagtatttgcttgcttaaaccgtataccatggtgtactcccgcagagaaagaaaatatttgatatcctgccgttccagctgtatgcggagcatgttggcaacgtctcaccacctgagcgccttgagcaaattgtgtttgaccttaacgccaagcgaaccgacatatttgggaatcacggtggtcggaccgcataccatgacttcagctcccagttgcttgagac

SEQ ID NO: 77101 - DNA, 570 bp, Arabidopsis thaliana landsberg
acacgtgaaatcttttaccatttaacttacgttttaatagtttttttatatttaaaaaagtgaacgtagaaatttcgaaagtgtttaggcggcaaccacgtatttaaagggttagatatgattttaatttcataaaatcaccagtcgacctatgcgggacccaagacggctatacatttgcaaattctgattgttattatatttgtttcggttcgtgaatgaagactgctataagagttgcagtgtgttttggtgaccccaatctcaagatatcactcatactcactcacacacacacacacacactcatcaaaagagattctgattcttattcactctcatccacataatggttttatttttcatttccatacaaatgaatgttttaatatgacttttattattttcttttggttttgtagattcatctccccttatgatgcatgagaaacggcattctgtcatttcattatatgatcaaaataattctaaagtacgactactagtattacctttatgttagttcaataaatattattacatcctctgacattgtaatatgtttacact

SEQ ID NO: 77102 - DNA, 190 bp, Arabidopsis thaliana landsberg
agcgtcgcatgcagcaccaggtcgttataattggctttgcttactgtctcggttactgcgtagctgcctgcaccggtgggtccgttgccactgtaggctacggtggcgccatccggcaggccgcttaccgacaggctcttcgccgagccgtcatagctgtagcttgcgtctgcaaaagttacttcccgtg

SEQ ID NO: 77103 - DNA, 339 bp, Arabidopsis thaliana landsberg
ccattaatttttttctgtggcccatcaacctctaagtggggaaggagacgaccttacatagctattatgcggtagaatgggatacacattggcattgaaagttttgggtacgtctgagtcgaagcaacacctcacctacaagatggttcatgtacaaagctggctatgagaaactccagctcggattacggatgcgtcgctatgagactatggtgtactatcttatatcgaaaagaacataacttaggaccgtgcatgttgttttagaggggagatcaaagatcatgtgtgtgcaaagacattgggcggggggttaacttacaagaatgtgaaactgtg

SEQ ID NO: 77104 - DNA, 585 bp, Arabidopsis thaliana landsberg
  unsure (1)..(585): unsure at all n locations
ataaccaaaccacattaaacattttaaatagaaaaacgtaccttccaaaagtttattattaacaatatgttattggatcataagggatatgattccctcttttatctgctttctacttgccactttctatttattttctaatttccagttctatatattatttcaaagccaaaatatttaaaacttcaaggaaatatcaaataaatattatttatgatataagaagtaatatgatttacccttaggataattagtaaaaaccttttaaaaaaaaaatcaaataaaaatgtaaatagaatgaaatgagaaaaaaaannnnnnnnnnnnnnnnnnnnnnnnnnnnnnnnnnnnnnnnnnnnnnnnnnnnnnnnnnnnnnnnnnnnnnnnnnnnnnnnnnnnatgcttataactgttctcgtggtggataaataacggcctgccacactaatgggtgatccttacatttgcctttgctacttcaaagctggagaaggaaggaaagatagtcattagtcaggtctgggccagatcttttgccactcctggctcccaaaaatctatcggtgaatcattaaaagccatatc

SEQ ID NO: 77105 - DNA, 581 bp, Arabidopsis thaliana landsberg
aactgtatctttattgatgttttaaaaaatatcacattctctttataatatttgcctctttataaaatttgtctggggatggatgttttaatgcatgcatggttattttttaatattaaaaaataatgtacgtcgaccgtcatagtgtgtaaatggttagtctatgtttcgtgacgacttctatttcggcccgacataatatatttccagtttttaatttgataaattaataggcattgtatcgtaacgtaaagatcagggacaatgctaacattcctatctaaaactcaacttgttggacagcatccaagtgacctaccacattgaattctttctcttggttgataagaaactaataatgatgatgtgatattcatacgaatatattagttaacgttcatatttagaaattggtcataaactcataatagttacaaataagtcaatctgaaggtgactcacctctctctggatattataatgttttcaattttcatatggacttgtcattgtgtttcattttcaatttcctgtaccgacttaagacttaagggccttgtggaaacataccgtacgaatgt

SEQ ID NO: 77106 - DNA, 557 bp, Arabidopsis thaliana landsberg
ataacacgaaaccgaaagaaaatggggagtataaagatgcactccactactttatctttataaagacagatggattaaagaaagacaaagggggttgtgattttcgtttggttagaggacttatagacttgcatagaaaatgggcaatgggtggccttgtagctcccaaaggaggacacatatttctaattttaaataaatacatttacatcctaatttatggaaagaaaatggggtacctggcatgatggatgtatccatattttaataaaaggagaaatccaacaaaaatggttttcggaaaagaaagaggaaaaagcaaaccttttcagggggctgatattgggaaaggagaccaaacccaccgttcttccattcaaccaggtcggcaatcgctatcaccactttttattagttattgaattagtggggtttctaaataatattttatatgtattttgcattatataacactaacatattacatcaaagtttatagtgatatcactgattaaaattaaatgattatagatatgtgtatgaacaatatgaatcat

SEQ ID NO: 77107 - DNA, 583 bp, Arabidopsis thaliana landsberg
  unsure (1)..(583): unsure at all n locations
gcccctttcatcgtccggccctatcatttcggcccatggtcatttccttttttaaaaacctcacttatatcaaacgggggcagcaaaaaggaaaagatgcgaaaaccttattcgattcaacaaagtcattgtcgatggcagataactcaaccatgctcttagttgagtactctgaagaagtgccgatgatgatgtccaatttcggcatggcgaatcggtttgtaaactactatcgccgaaagaacgcggaagattctacccgcccgaaagctgagattggcgaaacgcatgttttgctgccgcaggacaagagtccgttctccatttttggacatattgacccgggcgaaactacgcctgctattacgaataccatgtatcgtgcccctattttcaatcaccagccgaagtctacggatttcttagtcatacggaactcaactcagtccgacggatccgattatttcattaaaaacatagagaatctctacgttgccgggcagcaacttccactgacggatgtccncggaccacattctcgcaaagtcacaactgtagccaaaaatcggctcaagatgctcac

SEQ ID NO: 77108 - DNA, 539 bp, Arabidopsis thaliana landsberg
ccctgggccgcgagaacgaccggcttctcgatcgcctcgaacttttcgtttaggaggtggtgacttcggtagttccggcgggggttccagccgggatgcaggtgcccggtctccgggttgcccggccggtttccggccccggcgcgcatgtcgatgccggccgtgaagtacggtcccacgccggtgatcacgagcacgcgcaggtcgtcccggtccgcgagagcgttcgccgcctcccacagggcggcggtcatttccgggctgatcgcgttgcgcttgtcctgccggtcgaacgtgaccgtgatgatcccgtcggcctcggcgacggagcagtctcccatcgcggcctcagcagacgaaggtgacgctggctctggacccctcaagttcacgcatgcccgtcccccgttccttccgccggcccccggcccgcgattcgactgtataggttgtatatcagatagtttatatatcagcggatccagtcgacgagatgaccggctcgggaaaatcgccggacgccgatcatcgggcaggcg

SEQ ID NO: 77109 - DNA, 456 bp, Arabidopsis thaliana landsberg
ccaggttaatatatattttgcatcaattactgttgcaagaatttttatgtttttgaaacttttgcttttatttatgcaggggttgaaattgattaagaatgtttgagactaatcctccctttttttcttctttttttttaagccgtggtaatgtggtattcgttcggtaaacctacctattcaaaaagatagtatcatcgacttttctgttgtattaacttaccatttacaaatattacattaattaatttgaaacaagtcaaaattatcgtcaccaagaatgaagttcacgtatacagataataataaagaagaaaaaaacagagacactttttccggagattttactttataaagcatataaaactaaatcaaaccaagccttcaaaaattaagtagctcttataaaccggatcataaaaccaatcatcaaaacatatgtttgctctttcaaaa

SEQ ID NO: 77110 - DNA, 171 bp, Arabidopsis thaliana landsberg
  unsure (1)..(171): unsure at all n locations
caaaaggtacanagctttgcantctattctttctttatatcgccatgcctttctcatttctgttgggccaagcgtgcactctcattcttgtatcattccaatatctggctgtgcttcatgtgcattgcgtatcaggactgatatacgggcattgactttacctnntggcag

SEQ ID NO: 77111 - DNA, 368 bp, Arabidopsis thaliana landsberg
gaaccgtgtacaaagatattgccgatcctttcctggccgaggtaaaaacacagttctttgaagaagctgaaaacttctataccgggaaaaattacaaaaaatgtgcggccctcaccaaaaaaatcctcaagatacagcccaccaatattggctgcctgatcttacagggactttgcgactacggtgtgaagaataaaaccgaaggaaagaaaaatatcgaggcgggtgtaaaaggcatcaagaacatccagagctttgacgaccttaccaaagaagaccagggcatcatgaaacttgctttaatggaatacaccaatttcctgatcgaatcaaaagatttctcgggagctaaaagtgccatcaccctc

SEQ ID NO: 77112 - DNA, 489 bp, Arabidopsis thaliana landsberg
ccctggcgcaagcccatcgccagcccggacgcgctgcggcaacgcattttgctcgcgctttccgagctgctcgtggtctccgggaccggcatggatgcggagtggcgccagttcgccgtcgccaactacctcgacatcctggagcgcaatgccttccgcaactaccggcagctgctgcaggaggtgacgctctccacggcgatgggctacttcctcacctaccgcggcaacgccaaggcgaacaatcgcggcagccagcccgacgagaactacgcgcgcgagctgatgcagctgttcaccatctgcctgctgcagctgcgcccggacggcagcgtcgcgcccggcaacgtggagacctacgaccccgaggacgtgagcgggctcgcccgcgtgttcaccggctgggaccgcgacacgatcgggcttgcgtctccctataccgccgatgtgcaacgccgcccgatgacgcaggtcggcagccgctacgag

SEQ ID NO: 77113 - DNA, 545 bp, Arabidopsis thaliana landsberg
  unsure (1)..(545): unsure at all n locations
ataagacaacagtaaaagaaaaaacatattttattaaataatttaatattgatctattccagcaatgcagaaatgggaaaataggggaaaataaccaatagataaataaaaaaataaaaacgcaaaaagcataactaaaacaactaattgaatgcttagttgttgacaccattagaggatagatgagggaacattagctcgagcattttctccaacccttcaagcttggtgagcctctctttgattttaagattttcttgataaatctcttccaattgttgtttcaaagtctgctcattttccacgtgattttccaagatagctgaaactccacatttgagtgagaattcactaagaagagctcctagaccgaacacacgaccgtttgttgcctccacaatctgtngtntntgtaaaaatgtttgtaagccaacttataatatttgaaaatcagtctaaggtttaaggaaattattatgttacctttaaatacatttcattttttttacaagagttagctcctcatttagtgggttttcatcttc

SEQ ID NO: 77114 - DNA, 553 bp, Arabidopsis thaliana landsberg
cggctgactaccgaaatcgctagccgtctgcgtggcaagcacaaactttaatacacctttcacgttgacaccggcgactaggtcgtcgtgggcaacgccgagcaggttcgtgtgactggtgccaagtcttccgacaagatgtactactcccactcccgatttcccgggcggtatcaaggaaatcaacttcgagaagttgatcgccaaggcccctgagcgtgttatcgaaaccgcggtcaaaggcatgctgcctaagaacccgctgggtcgcgacatgtaccgcaagctgaaagtgtacgcgggtgctgctcacccacacactgctcagcagcctcaagaactgaagatctaacgggatagttcattatgtcggcgactcaaaattactgcactggccgtcgcaagaccgcaaccgctcgcgttttcctgcgttcgggtactggtaacatctccatcaacaaccgtcctctggacaccttctttggccgcgaaaccgctcgcatggatgttcgccagccgctggagctgaccgagaccgttgagaagttcgaca

SEQ ID NO: 77115 - DNA, 469 bp, Arabidopsis thaliana landsberg
aaaaagaccgcctgaagttcaaaacacaagaccctaaacgcattttcactcattttaaaagaggaccagattgagaagaggccagcgggccattttaaaacaacatactgactccaagcccatctcgcatccctcaacactgaagaagcggctatattacccgaaccctcagtcatgaagggacataccctacttgccataggagagactacaccactcactttagatataaaacgaccagtcctaggcataatcctaatatgaatacctatacgctgggctgaactctaaagagccatactaggaatccattttccggacccaagaccaaaaagaaccccagccatcatcatctctatcccgtcaataatacgataaccatactccattgcattcacactataaaaaggagggcaccccgtactacaagaaacacctgccacgatagaaccttctgttgtgccgcgga

SEQ ID NO: 77116 - DNA, 515 bp, Arabidopsis thaliana landsberg
ctgctcttgcagaggacatgggttcagttccaagacttcaatttctttaagcttctccttctacagcacacacatggtaggctatgggatctattcttgtttttaatattagtgtcaaactttcttgggaacattagagaattggaggggccaaagaatatcagaagccaaactccacagattcagtcctgtgttagaggtgctcccaggtcacctcagataagacaggcacacgcagtagggcttactacacagtctttatcctgtgcactagataacaacatgcagagtgtacaaagcccatttaaactagggcacatggggatgagcaagagtttgccaggtggaaaggacaggtacaggtaagaggagttcaggtcaccaaaggatagagctcgtgtgacacaggtgctgtgtagggctgtgtgcaaggaggtagaagtattggtgggagagagttctaaggaccatcagctgccatttttattaatactctgtgtcactgtgccaggcgc

SEQ ID NO: 77117 - DNA, 598 bp, Arabidopsis thaliana landsberg
caaagccagtttcgatatagttgagtaaataaatttgttttgtgtttcaaaattatttttttaatcgtaacctcataacgggttacggcttttactagttttattcaccgtgaacaccgcccaggtaagtaacaaaccaagttgagtcagatttgttccggtgatgagttaaagcatttgtttttcggcgttggtaacagtttcccctaaaacgactcacttttttctctttctcgaataattcattcgccgaaggctgatggccacgttggactcagcgttgaccaagttttggatgatttttttccggcctccatatttatggtatagtttgaattccccgatttaggtttagtttggttaagtaagtagaaagtcaaaagttagtttactaaaccggccaaagccaagatatacagtagctgattttccctaaacgagttactaaaccgtattaactaggattggtttagatcaaatttttttgttagtcaaaactcaatctaatgaattttccaaatttattgggccttaaacataataatgggccgattttcgaggaatgattaaatccaacacccacaacattcacggatct

SEQ ID NO: 77118 - DNA, 125 bp, Arabidopsis thaliana landsberg
attaaaaaaggctaatattcaaatctatcccaacccatttatccgtttataacacacaaaacacacaattcggggcacatgggctacattttaaaccaaacgccctattctccaattaaaagact

SEQ ID NO: 77119 - DNA, 570 bp, Arabidopsis thaliana landsberg
  unsure (1)..(570): unsure at all n locations
aactaaaaaacgcctattaatataatactagctgtttagtattttcgtgattatttctcataaaacttattgagttatatatgtttatttcgtttatctaaaattcgacaattttgttactatactattcagctgatattgtaaagggattcgtgacattcgtgtccttctctgcgtatggcaatatcagggtcttgtaaagatatttaagtggtacatttgcataagatgagcataataactgtaacaatagaaaatatagattcttcttcttaattatatccaatggttaacgatataattaagatctaaatgtcattttttttttgttaaaggctttagatctaaatgtctttacctacttgtaacttttgtctcttagttttgaattgctaattaatatgctttcgattgatatagttttgagttaaattgattaacaatattcatgaggtcgtttattgttgtgattgtcaatttcttgtcaagagtgtatctgttgaaacattgattatggacaacataatcacttgctccanaaagtaaaacgtgataatcgagttatactag

SEQ ID NO: 77120 - DNA, 536 bp, Arabidopsis thaliana landsberg
gcggcgccgccggcaggcgcagcatccggccggtgaccgcgatcgccagcccggcggtgttcaccgcgaccatcaccccgcgggtgagaagcagcagtgggtcgccgggcagggtagtgcgatcggcgcaaggctgcaccgtgaccgggtcgacggtgtcgagcagacggcacagctcacgcagcgacggcgccgcattggcggcggggttcaactcgatcaccacccgttccagcgggtggttcaggccggccgatatcaccccgtgccgaccggcgagcgcggtgagcacgcgctcgccgcgctcggggccgtcggggccggccaggccgggaacctcgatccatgcgcgctgctcgccgtgccaggcccgtctgaccagcagtgtggcgacaccggtgagcgctttggcgccctcgcgcaccggcagggctggcaactgcagtcccgcggcggcgaccgcacctaccgtgtccgctgttccggcggtactgcagatggcggtgtctactgcggacaccgaggcactcagcgcg

SEQ ID NO: 77121 - DNA, 520 bp, Arabidopsis thaliana landsberg
aaccgctaggctacaagtccaatatgtcatcaatttttttcctttttaattgtaatttttgtgtgcatatcgagctggcaagatgcatgcatggctacatattaagtagctttatcttccactcctagaactgtttccttttcttttgcattgcattttaattagtcagtcgttttggagatattgggtctcatgggccaaaaagaggtaccgaccctctctatatcaattttgttcaattcatgttacttgctcttttccctctataatgtagaaatggggatgtccttgtcactaactcaatatatataaacgttcttaccattgccttcatagaaactgtactgatacttgatcatgcaagcagaaatgttaatttggcaactaccatgcacaaattatagatattactaatagaacttttttttatttgggtcaagatttaaaatacgtaacattcagttgtagctagttttccttggttgctcctttcatttgatactttaatttagtggcaata

SEQ ID NO: 77122 - DNA, 568 bp, Arabidopsis thaliana landsberg
aaaaggcacaagcgggatcattttgaaggtctttttctctccgttacgttgattttatctatatatagaattctcatggattgatgcgcaaggaaataaataacgccaaaggtgtttgacttttttttctaagaaactttgttaggcttgcccacttctaaatctacaaactatatataacacacaaaaaatggtaagacgaagatcgaaaactccaacacttttccactattaactttttgagaaataatatttacatatatataacaaaacttctcgagagattacattttttatttccaacctctagagattacattgacggccggtcaaatatttgaactatatatatacactatcttattcaacatccgtatataggatctagatacacatgcgcccgtatttatatagttaaacagcaccagtatcaatgaaaatcttagtacacgagtagacccggcattaagcttttttcaaccaaatatgggaacgttaaagtatgaacataacgacatttcaatagtactgataattagggaatctggcacacaaatgaatgcattaa

SEQ ID NO: 77123 - DNA, 487 bp, Arabidopsis thaliana landsberg
tcatgtccactgcaagctgctcgacggtgacacctgcgcttgcaccgattacgttatatcggcaactaaaggttccggactgcatcaaggtgacgccgggaaacctgcttaccatctcgtggataccgcggacctgcgcctatcgccggctggcggagggcaaaagccttgcctggtggcacccgctgatcgccggtgacatgcaggcaatcgaggacgtcggcgtttcggtgcgcggccgcaccgtcagcgagaccgaggtgaagcccggcgactgggaaaaccacgccgtcgactggccggagtatgaaccgccggaagagatttaggcgcgggcgaaggcgagcagcggcgcgatgtcgtgggcgtcggctgcgtgcagggcttgcaggtagatggttcgcacggcacccgacgagcccaggttggcactaccccaactgaaaggcggtctgccgctttgctgggccacgaggtcggcgagcag

SEQ ID NO: 77124 - DNA, 503 bp, Arabidopsis thaliana landsberg
gagaatggcggtggttggaaggtaagaggttttagcagaaatttttaaagatgctttttgtttgctgccttccttgaagtgaccaagcggggcttctatcaatgcctttgcaccaaaagtatttgctgaaagttttcccgcaacacgtcttttattaccatcacgcgttgttatgtccataatagatgatatacgccccccgtattcggctccaaacccaccgctgtatacatctgcattacgtataatatccgcatcaaatacggagaacaaccctattgagtgaaacggattgtatacaatcataccatcaagcagcaccttattctgtactgctgaaccaccccggatgtataactgcccgccctggtcacctgtaaaaataacaccgggcaatacctgtaaatattgcgccaaattcggctctccgcaactgttggcaatttttgattacaatcggatcaattttattaacagaaacacctgtttccggtttccttcgc

SEQ ID NO: 77125 - DNA, 341 bp, Arabidopsis thaliana landsberg
tctaacacacaaaataaaaaaaggggggaaggttgactttattatctacaactgccccacaccctaaaataaaccatcgacctgtaggaatggtagtacaacaaaggactaaacatatcttaaacatgccacattacaatccagcatcagatcaaatcctgttcgggccatacactagaacagtaaaatactacaatctactaacggtaaacaacacaaaacaatcctaattatacaggttgtcccttatactattactataatctatccatgaaaatcacttgctgttggagcggaattctaacaacaccggaaacaaataatatattgtccactgcaac

SEQ ID NO: 77126 - DNA, 508 bp, Arabidopsis thaliana landsberg
cttagattaaatttgaaattgggcgttgaaccggtcattttaggcgtaatatcccatgcccagttggaaggataattagaagaaggatccttgagctcgatcacctggcctgcaggtattagggtcatatccgaaataaaatctgtcacgggagctttatggggtgcataaacgctgaatgacttataaatggagtccttaccgccgcagttataagtcaccagggataccgttgaggagggagatctcagcttcaccgtatagaggtctatcgaatcggaaacaaattttccgtccacataccatctgtatgctttaggctccaatgggccggcggtatttttaaacacagcagggtaaccatcaaagatagaatccgcagggccgataaacgccgaagcaggcttgctccagctaggatacccttcgtctgcacccggcgtggggaagctggagcatcttttatttccgtcaatatcggtattaacacccgcatttacactccatg

SEQ ID NO: 77127 - DNA, 556 bp, Arabidopsis thaliana landsberg
atgggaaaacctcgagtaagcatcaaataccatatatggctcgttcacatggtctttgcccttttaccgttcatggggttgttcggatttactgggcctcaatgcatgaaatctcccaggtattatttttgttttttgttttatcgaagattttaaagcggtacgtatattatatgtggcctaaaatagtccactagtgggccctatgaaaaagtcaacgactttaaagtagtcactctgaatggagcagcttccataccaaggaatgcggtcaaatttatcattttgggtcttcgtatggcatacaagtgtagtgtagatatcgctattaattttgttgcaccgaaaagaaaattatcgaatcacgcattttaaggtggtaattatttggataaatgttccttttctcttttaaaaaatcgtgtactccaaaattgacgactcgtactccaataaattatttaatgtgatagcttcatactatgggtacaagaatcgtaatttaaacggtatagtatattataatctgacgtgcataaattatggcagatgatca

SEQ ID NO: 77128 - DNA, 257 bp, Arabidopsis thaliana landsberg
ttagcctgggggtgaaacatttgccgaggctctggactttattatctgttttgaacgatcggtccaacacaaccgaatacagacaagcaaaacatgtcatggcctaagaactgtcggcctatgcactgaaatttaagccgcatgcgtggagacaagcttcactcgcataggctattataatcggggacgaggatatctatacacatttcccgatactgacgtatgcctggatacccatgttatatgaagtatatatt

SEQ ID NO: 77129 - DNA, 568 bp, Arabidopsis thaliana landsberg
agaattggctatatcttgtaagtacactgtctttccataatttcatttatgtcagccacttgttatcttgttatcttgattcttactgcttctgcactttggttatatgaaatagattggccgatatataactcgactggacttttcttaacatttttgaattttctgagtattattcgcacagatatcttatccattccctggtgtaaagagtggatttgttcttaacatttttgttgttgtaatgaatgcggaatcagaaaaagaggcgacacaactgcatccctgatgaacactacgtgcaaactctactaacagtaagcacaaacagttatcaaaatctcccattcagttcatctatttctaaccccctgatttttcggattcactttttgcatcccaatcttgatggtctcttcagatgcgtggcttggaaaatgaaatggaacggagaacagtgacatacaccacatggaacctatcagcaaagaaagctgaagctaaatcttggcatcctctcactttcacatctgacaattccggaccagaggaaatagaaggaataaag

SEQ ID NO: 77130 - DNA, 528 bp, Arabidopsis thaliana landsberg
ttattataaaaacaaataaccgttgagaaagtggcctttacattatatatgtcacatgattctttttacattatgtcacatgattcatcttaaaaaatcggcttctttattttcacaggtttgctgaggccaaagaagagtctttctttggacttgaagtagcactggatagatgagatgagaaagcctttaaggagaaagacaccatgatggtcattcatgaacatcattcgatgagtatatatagtaaaagtttgaaatacttcttacatcgtagttattatataatgtgcacacgatattttttattttcagcatacaataattggataaaacaatcaaactcacccaaaatacataaataattgttgtttctcaaaaaaaagtaggaaaaatctcatgtgaggctgggtacactgtgtagggtagggcttggcttttgagcatagttaggaagtagtaagatgcgatgcggtagtaagtaggagtttcaaaatgtcacattcacacaagtcacgaccatgaaac

SEQ ID NO: 77131 - DNA, 416 bp, Arabidopsis thaliana landsberg
  unsure (1)..(416): unsure at all n locations
nnnnnnnnnnnnnnnnnnnnnnnnnnnnnnnnnnnnnnnnnnnnnnnnnnnnnnnnnnnnaattttctttatggtacatacattgaatcctgaaatacatgagatacgatgcatgacatctcatatacgcacacaaatggagtctggatcaagagtgccctctttctggccttaaggtttatcagagagagaaataaaggacatgcgctcttagttgagttgggttgatcggggggctccaataccccacggggtgggttcgaagcgtaccaagcgcgaacacatagactgcatcaaagggccactgctcagaaatcactgagcctnnnnnnnnnnnnnnnnnnnnnnnnnnnnnnnnnnnnnnnnnnnnnnnnnnnnnnnnnnnnnnnnnnnnnnnnnnnnnnnnnnnnnnnnnn

SEQ ID NO: 77132 - DNA, 558 bp, Arabidopsis thaliana landsberg
  unsure (1)..(558): unsure at all n locations
ctcnnnnnnnnnnnnnnnnnnnnnnnnnnnnnnnnnnnnnnnnnnnnnnnnnnnnnnnnnnnnnnnnnnnnnnnnnnnnnnnnnnnnnnnnnnnnnnnnnnnnnnnnnnnnnnnnnnnnnnnnnnnnnnnnnnnnnnnnnnnnnnnnnnnnnnnnnnnnnnnnnnnnnnnnnnnnnnnnnnnnnnnnnnnnnnnnnnnnnnnnnnnnnnnnnnnnnnnnnnnnnnnnnnnnnnnnnnnnnnnnnnnnnnnnnnnnnnnnnnnnnnnnnnnnnnnnnnnnnnngaatgctgactaggtccgatcgcgcaagatagccgacgtgaaagctccactccatggcaaaaaacaaaccttggatcacggactcgccatgaggttttttaagatagccttcaaaaacgtgccccatggtgtggcctaaattcaataattggcgcaatcctcttgtctcgcggggatcaagttccacaatttggtacttggcttcaatggccaagcgaagattgttccacaccaccacgtcaggagcggcggaagctgattctaaaagctgcggaa

SEQ ID NO: 77133 - DNA, 572 bp, Arabidopsis thaliana landsberg
  unsure (1)..(572): unsure at all n locations
ataatctgcctaatgcataagtgattctcgttatataatggaccaaccacagctattttcatagagtagagagatgtgaatatatagatcaataatcagaaacagctaaatatagctaaacaacttattttcgatctctcacctacttcctacgtactggtcaaagatgcttaccacatccattcttttacacattcatgacacatggaatccatgacaatacacattacatttatttatatgtcattgatagtaaatcaaatatataaaggctggagttgttatgtatcgtaaaagatgatcagcgaaacatttcataaataggcaaaagataattattgatttggtattttgtgaataataatagatgatgttcggtgctatgtaaggaaacccatttttttaagaatattacatcaattacgatatttttattttatagttagatattggtaatgatatcaaacatgttagtttaaattttattggtaggcatatagtagatatttgaaattntaaataacattatattatgtaccatttagtttttacatattatactagatttaacc

SEQ ID NO: 77134 - DNA, 710 bp, Arabidopsis thaliana landsberg
ttattatatataataaaaaaaaaataacagtcacagcttatataactttgttttaccaatcaaatttttatagccaaagtttatacggccaaagtctttacagccaaattttctacaactcagatttttaaaatcaaaatttctaaagccaaaacttacggtcgttaccaatcggttccttaatatttagctatatttatagatcagagataacacttttagctatgtaaagaaaactattagaaaaatgacatctatatactagttcagaagtttttcttgggatatttgttttccttttttaacatctctaattttgttttttctagtggcgaggctataaatttcactcttatcttagagtgcggtgtagaatcttttttttaacaaaaatcaaacacaagtaaaattcctaaaattaggaaagttaagtattctattagaatctgaataggagacgatgaagacaattcaacattaagtgaaaaattaattggtttataagagtaattcattcgagtttcgagattcttttttagagggtttggaaaagtcttttggcgaacattttttcttaatctcttcttagttcttagaaagctacttttagtaaaacgtcaatcaattgaaatgtgatttagatatatatatataaaagaacagaaaaagaaaaggacctgtttaatgaggagctcagcccaagatgaagt

SEQ ID NO: 77135 - DNA, 520 bp, Arabidopsis thaliana landsberg
  unsure (1)..(520): unsure at all n locations
gaaaacctacaatttatttttccatgactgtacgccattttatagttggacatggataaaatttacattcacctataacttaactttattattatatttattatcatggnnnnnnnnnnnnnnnnnnnnnnnnnnnnnnnnnnnnnnnnnnnnnnnnnnnnnnnnnnnnnnnnnnnnnnnnnnnnnnnnnnnnnnnnnnnnnnnnnnnnnnnnnnnnnnnnnnnnnnnnnnnnnnnnnnnnnnnnnnnnnnnnnnnnnnnnnnnnnnnnnnnnnnnnnnnnnnnnnnnnnnnnnnnnnnnnnnnnnnnnnnnnnnnnnnnnnnnnnnnnnnnnnnnnnnnnnnnnnnnnnnnnnnnnnnnnnnnnnnnnnnnnnnnnnnnnnnnnnnnnnnnnnnnnnnnnnnnnnnnnnnnnnnnnnnnnnnnnnnnnnnnnnnnnnnnnnnnnnnnnnnnnnnnnnnnnnnnnnnnnnnnnnnnnnnnnnnnnnnnnnnnnnnnnnnnnnnnnnnnnnnnnnnnnnnn

SEQ ID NO: 77136 - DNA, 149 bp, Arabidopsis thaliana landsberg
  unsure (1)..(149): unsure at all n locations
aaaaaaaaaaaagaaanccganacccaccagaccaatcatgttttatacngaaaaacaaccaacacaccggggccccggtggaatttcaatacccacaataccacatccccattctcacccatccttttatcttttttacacttcatac

SEQ ID NO: 77137 - DNA, 162 bp, Arabidopsis thaliana landsberg
ccggttgcgtttgcttcgtgcaacttctactcaacatgatcttgttttattgaagcaccactcattgtaggataagtgggggataggagtggacaatcaatggagaccgaaagccggtgcctttgtctagactgtgcagcaaagatatgactactactagtg

SEQ ID NO: 77138 - DNA, 584 bp, Arabidopsis thaliana landsberg
gtacgtttccgctcgcgagcggactcgtccacgaatgtggtcagtcgtgcacggcgtccatgaacacggcattttagtgcttccatgccggcacgatcctcgtcgtcgaaacgatcggtgaccgggctgtcgacatcccacacgccgagcagtgagccgtcggtcttcaccagtggcaccacgatctccgattgcgaggcggcatcgcaggcgatgtggttggcgtgtgcgttgacgtcgcgcaccatttgcgtctgtcgcgtctgcgcggcggtgccgcacacgcccttgcccagtgcgatgcggatgcatgcgggtttgccctggaacgggccgaccaccagctcggtaccgtcgtaaagataaaagccggcccagttgagctggggcaggctgttgaatatcagtgcgctgaagttggcggcgttggcgatcaggttgcgttcgccggcaagcaggccgcgcgcctgttgcacgaattcctcgtaatgcccgcgctagctggcgtgggcatgcggtttcagttcgaacatgggttatgacctggtggcaaaaggcgcattatgggccctgtcatcacggga

SEQ ID NO: 77139 - DNA, 472 bp, Arabidopsis thaliana landsberg
  unsure (1)..(472): unsure at all n locations
gggtagaagcatgaagcttaatgatgggtcccctcgatggattgtagcatagcatgcacgcatacttgtagctatccacatgaagcagctatcactgatgtctatggacccgccactagtatcacggattgcgtgatgatgcctcactaatcactagcgtgatcaaatactatttagtataatttgcattaagcaatgattttagtaataaggntgaacaatggatgaccagtgatcagctcctatcaatctccactgtgtattggagtagagaatggtgagatgcacatcgatgtcacttgaactgtgaacctatgagggtggtatatttactctctaaagacgctgcgcatcactgcactcagttggccatataataagcagggtgatttatgtatggcgtgcatatctgtaactttaattagtattatatgcttatgcgtatcacttttgagtatgtattgagtgcgta

SEQ ID NO: 77140 - DNA, 539 bp, Arabidopsis thaliana landsberg
taaacgattagtgagtggcagtggctcatgagatgaaagtcatgaattaatcactttgagaccaaatgaaaatattgattggacatattgggtccacttgctgctatagggccaaaaatttagaggcccaataaccaaaaaagtcgaaacatgtgaaatgttcctcgtgacttgaagaaaaactaaaaaaagtaaacgccattattgaaagaaaaacactcacatgtgtctctctatctctagagctgttcatctccccaaccacaacaaaccaacttgcttagctttgctctgggcagggcaaagagcatcatccctcaataaagcaattcccattttcttcttttactttagtcctaaaactgttaattgattctgtctgaatattatttgtattaacggaccaaacaaataaaaacttgctgaagaatgaaagaaaaagcaataaccctccaaaccaaattctaaagcctcaaatttggaatattacctttattcttccttacccttgttttttataatttgacatttactcatta

SEQ ID NO: 77141 - DNA, 556 bp, Arabidopsis thaliana landsberg
  unsure (1)..(556): unsure at all n locations
tgatgaacatgacaatgaaatcactccccgtctcctcttcatcttcttctgaatttttactgtttggttaccaatgtcgttctccgattcagagtcatcctctcacggaggaggaggaggagattacaagttctttcgtcagatcagccgcgatcgtaatctccatcttaatttctgtattttgatattcggttgttgcttgtgaaaaaaaggctaaagggggatttgggtggtttcaggattgctccacgagatgcttggatctaccaaaaccggggattctaaagcttggaaggtctctctttctctctgtttcatatctattcgaatacattgattccttttggattttggaatttggatttggatttgaggggatatataaatacaaactctgcagatactaataatggatagagttacggtcaaagtaatgtctcagtcttgcaagatggctgatatcactgatcaaggcatttcctgtatgtcatttatttgcctacatcccttattcattcattcctttattatattcagnttctaattaatgtttggc

SEQ ID NO: 77142 - DNA, 356 bp, Arabidopsis thaliana landsberg
ggttcaggtaacggacgggcgattgtcccagagcgcgcttgaacatggccacttaggtttctgacgctggcgtagcccaacgcgtgggtcacgtgcgccacggggtgaccgtgaccgagctggtccagggcgtggctgaggcgggcctgctgactccattgttctaatgtgaggccggtttctttgcgaaagcggcgggtcatggctgtgtgcggacaggcccacggcggcggcccacgcgtcgtgcgtgcgggtgttgtcaagatgggccaacattgtttgtgccacgtcgagcaggcggtggtcgctgcggcataggcagcgtgaacggtaggtcgggcaagcgcgcgtggtgc

SEQ ID NO: 77143 - DNA, 612 bp, Arabidopsis thaliana landsberg
  unsure (1)..(612): unsure at all n locations
ccttcctttcctttaagaaccattattattgcggagatcacactcgggtttttttcttgaatacacattattagtagtttacttaagactagagcatcatggttcttctataaggccacagagaacggtatgattttactctgttttgcttaacttgtttaagaaagagagaatctcttgagatacttgttcagacttctcctgctggataaaatgatgaccaccttcaataacaactatctcaagattaggcacaacaatcttgaacacctctcctttcacatactccattgttccattaggtccttcatatccgatatctttgtctcccgctataaacttagtaggaacgacgattttggagtcttgccacggcgccaatatctcccaattcctgtcacattgcacattttcaatacttgtttttgtaacaacaaagactggagataaagtgagagagggaagtgaacaacttacatatccatggatctgtagtaattcaaagggccagtgaatccagatctttgaaactnttccgcatacacttgaatctcttcttctgttatccaatctggaatcgtcgacgtatctcaagatgatctatgatctctg

SEQ ID NO: 77144 - DNA, 483 bp, Arabidopsis thaliana landsberg
ccttaacagtcactcctaagttcttcattgataaagaagccctgcaggcaaacaactcttctttcttgcgcttgacctcgacaaacatctgctggaactgtgcaatcttattctcaaattgcctgtgagagcttgcacaattctccacagcctttttgaggttatcttccttgacaaagtccaacaagcatttccttgactcagtttgaagataagggtgaatcttggctgacctcaatttctcaatatcccttccaaaattcatcaccaaatcacagtggaggcggtgttgatgcttataacgcttcataaattcaagaaagttctgatagatcaccctgtaatactgttccagattcctagtagcaacttcaacagcccgctgctgtaccttttgctctctcgttaacctttcgcagttctcatgctttacaaccgtacaattgtagatggtgcggcctttatggaaaaggtaacgaaatt

SEQ ID NO: 77145 - DNA, 489 bp, Arabidopsis thaliana landsberg
  unsure (1)..(489): unsure at all n locations
atataaactctggtaatgaaggtgggcttcaatgtcgctctgattgaatcatcttaaagcgcggagtgaaagggtggccnnnnnnnnnnnnnnnnnnnnnnnnnnnnnnnnnnnnnnnnnnnnnnnnnnnnnnnnnnnnnnnnnnnnnnnnnnnnnnnnnnnnnnnnnnnnnnnnnnnnnnnnnnnnnnnnnnnnnnnnnnnnnnnnnnnnnnnnnnnnnnnnnnnnnnnnnnnnnnnnnnnnnnnnnnnnnnnnnnnnnnnnnnnnnnnnnnnnnnnnnnnnnnnnnnnnnnnnnnnnnnnnnnnnnnnnnnnnnnnnnnnnnnnnnnnnnnnnnnnnnnnnnnnnnnnnnnnnnnnnnnnnnnnnnnnnnnnnnnnnnnnnnnnnnnnnnnnnnnnnnnnnnnnnnnnnnnnnnnnnnaaaagaatgccggtgatgctacccnnnnnnnnnnnnnnnnnnnnnnnnnnnnnnnnntaatgtaaaacc

SEQ ID NO: 77146 - DNA, 578 bp, Arabidopsis thaliana landsberg
taacagatcaacaataacaaaaaatagaatatattcttgtcaaactttatccagtttagtaaatcactattctacataatctaaagggtattcaaagtgactacaaaatggatttaaaaatgagataatctggtcaagaaaaaaataaaatggaacagtatgagcaaggaagagagtagttggtgatgaggtcagagaactaacagggggcccgatcatgcatagctgtgtacatggaagtcttaaggtaaggactttgacttttgctcttgcttgagccatggcttgggagccacgggagggtttcagataggaaaaataaaatgaaactagaggtgagtttaatataaaatgcaatctgtaaaatcctgttcacttgccgggggtggggaataccaaatatttggctccaagctttctagcagccaatgcaaaaaaagaaataaagggcatgattcctacggagagcaaagcctcttcctagagccatgttccctgctctaccagtagatggcgcacattccatgtgatgaggattaaggagcaaactcttcaaggcagggcttttaaactgagcc

SEQ ID NO: 77147 - DNA, 552 bp, Arabidopsis thaliana landsberg
gcgttaacggtaaacacagatatgatcctcgatgaaagaagcattttttctgtatggagaaggacaaaggttttttgagggatgcggctgaataaaacggtcaccttcaatgatgaggtcatcggcatatcggtagccacccggccgaagagtattgacagaaccttctttaaaaccctcttacctatttcgcagacagagatcaatgcgaatccggggttgcaggggcagcagaatccggggtatcaataaaaattcaaataaaaagccgccgtgtatagggcggctttttattttttattgccattcaaggataataataaagttccttcataaaattttgaataataaacccatctttgaagacaatacataatgtatacctgttatgaccggtaaggaagccattctccaaagtctcgaagaaataaaagggctaaccaattatatggctgtttacaatcatattgtaagcaggcactactatgattttggtactgccaaaacgcctgcatccaccgtttctgcacttgtgagtactttcatcagcaa

SEQ ID NO: 77148 - DNA, 587 bp, Arabidopsis thaliana landsberg
  unsure (1)..(587): unsure at all n locations
gaagattcatcgttgttatttgttaagtaaataattatatacaatttaaacgatttatctaatattaagtaactaaaatggggaagaagaagagaaagagataaagagagaaagcatgccaaagagagtgaaagagagagatgaaattgagaggggcaaattcttgttaataaatatattaccgtaaaacaaatgaaaatcgaaagaagtgtctctttttgcaaacaatgttggccaaagtttgttaaggtgtactagttgggtcaaagagttgttatttgttcctttgggtcgacatagagtcgggtttagttttgttaattgaataattctaagcctcaaaaaaatcttaagaattaaactgtcttcttcttcggtcccagccaaaaatccagaagattcttaaatctcatttctgcggcgtaggtgaagtcttagcgataagctttgtttcttcttcttcttcttctttacccatggatttttaacgaacaagagaagagaaggaccaagttttcttcgaaaggattganacttgtttctttctcttcatctgcaacaaaaaatgatcaagctttgctcatgac

SEQ ID NO: 77149 - DNA, 505 bp, Arabidopsis thaliana landsberg
agcccaggcttggcaagtgcgcttgccggcgaccaggccgccggcacccaagcggtttggactagaagaaattgcggatgggtcataggctccgcggcaccgcggcgagagttgattgctttaatttccaatatatgctataaagacggatgcgagaagccgcatcactcgactctttccgccgctcctccgcgcttcctggcctcgcccgcgacgcgctgggccgcgtggcgcgtgcggcttcggcgggcgacctggccctcgcgcgcgtggcaaatgcgacttttgtgaacttggcctcgctgcggcccgccgcgctcgagccccgccgcggtcgccgcagtgcaaagcgcgcgttgacgctgaggcgcgcgccgggcacgaaccgcgccgggaagaggggaacgggccaatgaacgaagcgggcggagcgacggtgcggcgggtgctgctggcgagcctggtcggcaccgccgtcgaattctacgatttctacatctatgcg

SEQ ID NO: 77150 - DNA, 462 bp, Arabidopsis thaliana landsberg
caaaaatttaggtctcaaggagaaccatcctttgttgttttgtaagaacatgatagctggatatatcaggatgggagctatgttcctaagtgcatggtgcatagacatgaagttttcgagtttgctggatacactacaagaccagaagagagagatttcgtgacgtcttatatagaagcatgcttgtcattggaagtcatcatcaatatcgcgcttatcatcgttatgtactagaatagaaactgctaaagcgattcgctgtaccgatctctggattttaggcttttttactgtcgatcaagaacgaagaacgtgtttttctttatactaactgaaggaggaacttgctttccaatgatcatctctctatgatgactccatatctacttgatcaaccttgaaggtgtttgtggaactctctttagcttatcaagtaaagacagacgtgcgatatgaagtgta

SEQ ID NO: 77151 - DNA, 541 bp, Arabidopsis thaliana landsberg
  unsure (1)..(541): unsure at all n locations
tgtgctggacggcccgatggtggcgctggggcttgcgcaaaccccgtgggagttttgttctggcgctggtcgccgtgctgctggcggcgggcaatgtggccggcggctacgtggtcaccgagcgcatgctggaaatgttcaagaccagcataaaggacgtcaagccggaggacaagccgagagcgccgccatctgggtggtgcgcggcgtgtatttactggcggcggtgctgttcatcgtnnnnnnnnnnnnnnnnnnnnngccgcgcaccgcgcgtggcggcatccattgggccggcgtgggcatgctgctggccgtgctggcgacgtttttcctgcccggcatgcggtatctggggctgatggtggcggcgatcgtggtcggcgtggccatcgcgtggatcaccggccggcgcgtggcgatgacggcgatgccgcaaatggtggccatctacaacggacttggtggcggtgcggcggctggcatcggcgccaatgaactgctcggatttgtggcatggccggctggtgtcggccgggct

SEQ ID NO: 77152 - DNA, 575 bp, Arabidopsis thaliana landsberg
  unsure (1)..(575): unsure at all n locations
caaggtgatcgcgtcctcgcagtagcccacgcggtggccgagcttgaggatggcccaggtcagcacgatgtcctcgcccacgcattcgggccagccgtcgacttcgcgcagcacgtcggtgcgatacagcgagaaggcaccctgggccaccagcgtgccctggaacaggctctgcaggcgcttgatcgcggcgatgccgtggaagtagtcccactcctggatcttggtgaccaggttggtgcgcgagttgcgcagcagcacgctgccggccaccgccgccgtgttcggcggatcgctcaggaagcgtcccaccaggtgccgcaaggcacccttgtagaggtaggaatcgccgtccagcgtgatggtgagcgggtgctgcgcctgcttcagtccctggttcagcgcgttggccttgccggcgttctgtttcaggtcgatcaccgtgagccacggatacgagacggtgccgagacgggccatggtggcgtcgcgcgagccgtcgntgatcaccagcacctgcatcggtcctgggtaatcctgccgggcgatgctgtccagcgtgcccagaatcgacg

SEQ ID NO: 77153 - DNA, 616 bp, Arabidopsis thaliana landsberg
  unsure (1)..(616): unsure at all n locations
taacacctgcactgtcagagcatgtggtggagcaccggcagaaacaaccgatttttcattttcagcagaaatcatcgatgttaataaaatcatatatatcgatgaaattatccatcttgatgacgaatgatggaactcaagtaaaaatcatttagtaagtatgttgatctaaccattgtaaatatctaatgatatccattaatatacagcggattataaaaaagtgcaatcctttgttgtaaacaagtaaaaagcatattctctgtttctcacataatgataatgttaatacatatataatcgtaattgactttttgatagcattggtcaatctcatctctcaatattttgaggatcatcacccttcttcatatatgtaaatggtttattaagccaatgtatacccaatctatattattttttatttttattttgcataacaagtattgatacatttacaatttacatgaaaataacttaccataacccacaagaaaataaaaaaacttacctttgttagatttatgtgatttgtaatctccaaaataggcaatcgttaggagtgacanaacactagtcttcatcaataattgagcatcccatatggaatatggat

SEQ ID NO: 77154 - DNA, 509 bp, Arabidopsis thaliana landsberg
  unsure (1)..(509): unsure at all n locations
aaccgcggaaaacaaagggctgggggcgggttatataactggatgaacatgtagggttttctctatatcaccctccgggtgggggggatctttctgaatggcacccccggcattactgaggagcatgacaacggaatccatcttgtggagcgatatcgcgccggccggnnnnnnnnnnnnnnnnnnnnnnnnnnnnnnnnnnnnnnnnnnnnnnnnnnnnnnnnnnnnnnnnnncttgccgatcagtcagtggacaaaagcaatttggaatccatcgcgcaggaaggagtcgatgccggacgcgctgccgttgccgctgattcgaagtccgcacccgcccattattaccttgccctgaacatcggagctctaccccagaccaagatgctgggtgcgctcaagctggtgcgccatatggaagccgagttgcttcgctcaatttcgattggagcaggctacgaccatgccggggcggaacgctcactcggaatgctttatcgggacacgcc

SEQ ID NO: 77155 - DNA, 339 bp, Arabidopsis thaliana landsberg
  unsure (1)..(339): unsure at all n locations
cgagagcggcggcgagatagcgcacggaggcctcgatttcttccttggcgacgcccatgacgttgtacttggggatgagtcggctttctccagcatatgtgaccgtcaccagcgagccgccgttcttcatcatgggcgaggcgcggctctccacgttggtgaaggaatatcatgagatattcagcgtgctgaggaagttcttcctggaggtctcgacgnnnnnnnnnnnnnnnnnnnnnnnnnnnnnnnnnnnnnnnnnnnnnnnnnnnnnnnnnnnnnnnnnnnnnnnnnnnnnnnnnnnnnnnnnnnnnnnnnnnacatcggcgtctttctccgctt

SEQ ID NO: 77156 - DNA, 519 bp, Arabidopsis thaliana landsberg
gcctgccgatgctcctctggaacacctcgaaggtcgcttcctatagcttttacaggagcagaatggttgcaggtacttgcagcggcgcattgcgagagaaggccccagtggagcggcgttggtgttgagggaagtgttcccgcaccttgtccagttgatgatggacccgttcgccaactacatgtatcaaaagctcttggaacacgccgcacctgaccaacgtttacggatgcttgaagcggtgagaggctcgttgctggtcgcgtctctcaacttgcatggaacgcgctcggtgcagaagcacattgagatgggcggcaaggaccctcgccagcgcgatattattgctgccgaactggctccttacgtcaccaagctgtcgatggacacgaacggcaaccatgttgttcaacgaatgctccagcacttggacaggtgcgagtttgtgtgtgaagcgatcatccaggatctgctgattgtgacgagacaccgccacggttgctgtgtggtccagcgatc

SEQ ID NO: 77157 - DNA, 432 bp, Arabidopsis thaliana landsberg
  unsure (1)..(432): unsure at all n locations
aaaaaaagagagcaacaccanaacaacccttaatatttaacaaaaaaacaacaaaaaaacaaaaaaagccgatttttaaaaacataccccacaacacaaacaganaaaaaaaaaaccatcttaaacaacaaaacgtccgaacaactaacaaaagtacaagaaaccactaattagctaaaaaaaaaattttcaaacaaacatatctaaatcaactcaaacacatccaatgataaaaacatcaactatgtgaagcaatcgaatcgtaatatacaataacataacagaaaatgaaataacatacattttctaatctatacaaaaatccacaacatccagaaggacccttcaattctttaccaacccaatcacttacttataaaaaatcacaatagaacatagtctcccctcacacataattaatacataccataa

SEQ ID NO: 77158 - DNA, 456 bp, Arabidopsis thaliana landsberg
cagcagagctggttatttactaatggttaagttatgattggatcttaataacaaccctgataatctggggaatctgcaattccaaattatctaaaacccccctaactctaactctttttccaactgaatttagctcgattttaattactagcttattttaatttacaatctttctgtttaactttttttcacatattgatagttattgtgtaaacttgagaactttgtagaattcgagcctaagtattacattttgatctcttaatttgagagagtggctcaaagggtaaattgggcatatcagctatattatgcatcacaacgtctacatgagacatgacacacattgaatcattggactagattcaatttgtgcattcgagaggtctggatcctatcattgatcctatatgaatacaaaagatggtttagctaaactctaaaaaattagctatc

SEQ ID NO: 77159 - DNA, 506 bp, Arabidopsis thaliana landsberg
  unsure (1)..(506): unsure at all n locations
taagagatttggggatgttaacgagaggtttctatgatcggttaggcgagcaagatcctatcagaaaaaagtaaagtgtttaattgtctactttggaatcccaacgcgacctttacaatttcattcttctccctttatactaacaaagtgaatcccgcgacataaatgaacgttattcttacgccactaatctcgcttattttaatgctgctcggaccgaatctttattcgagatatccccacttcccttcacttcgagattcagtcgtatacgaagtgcaaagcgaacgcaatctttctagattcttagggccttgatgggcttatctaacgggctctaacggaatgggcaannnnnnnnnnnnnnnnnnnnnnnnnnnnnnnnnnnnnnnnnnnnnnnnnnnnnnnnnnnnnnnnnnnnnnnnnnnnnnnnnnnnnttttatactgatcagagtcggagaaaatggagttttctccaaccgaatagctggcgtgttcagcttac

SEQ ID NO: 77160 - DNA, 132 bp, Arabidopsis thaliana landsberg
atgcttgtcaacttctgcagcttcttctgaaatcaccctcacgagggttgtaattttcaacttctaccgcacctgatatcaccctggctgggctctctctccattaaaatggatctgctaagatttctggag

SEQ ID NO: 77161 - DNA, 500 bp, Arabidopsis thaliana landsberg
ttcctggtgacaaatcgattcatattcttttcattcagattcctgaggtttaagagattttaaacaaaaaacgaggaaagaagggtcaaaagaaatacgatgaaaggaaaaagaatgccaaaatcagcagcctcctgtaggaacagttccagcagggcaagcttctaggtgaggtggctgtggggctggggtgggtggacccttcctggttcagtggggtacatgtgagtgtaggtggctaataacgtgctgtgtgggtggaaagcaggttgtgtagctgggggcaggggatgatgcggcactgtctcggtgatgagaactttgtccagttctgctgctgatctcttaagtgaggatgaagttatctgaggagacggttggccttcaacgcctgccccctgggtgtcaggccagcgtggacttctacaggtggcgtggagtgtcttggcctttactgaagactgcctgttctctttcagcctgtattgccttacgaccag

SEQ ID NO: 77162 - DNA, 551 bp, Arabidopsis thaliana landsberg
  unsure (1)..(551): unsure at all n locations
aaaaacccgatggattaataaatgacaagtctgatgaaatccaatttagattttgaagatagtgtaaaacaaagatccggctgtcgggtgaagaattcaaacaaaaactccgaagacggagacagcgagaagatatcggaacgccattatcgagagagacgaagttgcttgcacagagataagagtaaaaaaaaaagagagagagagagagaccaaacaggagagtagactgtagaaagaaagaaaaaaagaaaacgcttttctattttatatttcccttttttattaaataaaaatcccatctgtagtaaatatgtaaaagacaatatttgcagtaaaatggtaaattacgtaaccttggatttaaatttaaccgttggcccaaccaaaatcaaagcgaaccaagagaaagaaatcgaattaaaccatannnnnnnnnnnnnnnnnaagttgttgattggtgcgttacgagacaagacgcaggcagggtatgggcatggcctgctcgctctatggaactttctgggaataccattttctacgtaatattc

SEQ ID NO: 77163 - DNA, 578 bp, Arabidopsis thaliana landsberg
  unsure (1)..(578): unsure at all n locations
aaagattgaatnnnnnnnnnnnnnnnnnnnnnnnnntagattagagaaatcttgaaacattagacgtttgcattatcaacactagctcgttacgatcagttgtgaacgcctgatcacaatcaatccttttaagatgatacttttcattgcccataaaagagtctccatttccgtgtgaagaagagagagactcgtccaatgacattttgctccaagtagtacagtttggttgtctctccgaaggcaccaccatctaaaacttatggttgaatccgattgtttccacgagccgtcaatccaacatcttactcactgttttgctaatttcttgtttcttctagatttgatagagcttctcccaacactaattgttcacttaagcgtaatttattatatctaaagattcggaatgtaaacatttaaagactttttcttcctattttttccataagaaccataaaatctatggaaaacaatgagatttttctttctcattcattaactggtaatctccaaaataagaagtctaaattcgaatataccacaattaaaggaaaatatcttgctatgggattttt

SEQ ID NO: 77164 - DNA, 621 bp, Arabidopsis thaliana landsberg
  unsure (1)..(621): unsure at all n locations
aattgccatatgtgttcacatttgtcttacgtttgatatgacgtttattcttttgattaacgcttttacatagtcaaagtttttataataattggatgggctattcgcggtaattgttatgaatatgatgaagttatgaactaatgaccgaaaatattggagcttttcgaatttttaaannnnnnnnnnnnnnnnnnnnnntttgctatcaagggcaccatttcggggcgtaaattgacaaatctgaaagtaaaggggtgaaatttgaaagtatatttatagaagcaaatctagctactttgactgctaatattatttatacgaaacaaaaatccttggaaaatcacgcatatgcctagaatgtagcttttcaatttttttatgtgtaatattttatgtttgcatgtgaacttcttgctccatcttcagtgccattctcatataaaaaaccgtataaaaacaaaatgtgaaaaaagtaaataaaaataagattaataataaaaagatcgagagcacatggtaaagagaagctccatgttcacgaaaacaaacaaactgtcttaggcctctctcgtcctttcagttcactcactttcaatctataattcaacattcacattc

SEQ ID NO: 77165 - DNA, 421 bp, Arabidopsis thaliana landsberg
aatacaaggccatgcactagctgacttggtgccttctccaaatatctaaataccatgttgaatttggggcaaacttggaacatatatgaggagacgtgtggtaggagataattcatgtgtaggttttgcaccatgatgatccaattctatgaatttatcattttccacaatgtgtatgatgtccttggagtgccggttgggtctatgacaagaaactacaacaatcttctccttaacttggtatgcgaagaaactcacccctttcctaaaatgacaacgatagcgtagaccaactccgccccgcagtattgggaacttgctccatgacattgctctggtgttctcactagtcttcgttgctatccataagttaacgtttgttccggttacttatgtgtatttagtagataacatacaaagt

SEQ ID NO: 77166 - DNA, 523 bp, Arabidopsis thaliana landsberg
taagacagtcattgacaggagagcgttaaaggtaacgtagtgtttgtatattacatttttaggatatgtaacgcggttcttcttgttaatattctttcttttttaatccacagttggtattgtcaaatccaaaaggagaggtcgtgaagaaattaaccacatccaaattcatcggtgatcatttgggcaaagagtggatgttcttaacggtaggagaagcagtggaggcttgtagctacatgcttcacacgtttaaaaccgaaccggcctccaaaaacgagccttggaacaacgtatagttcctttattttttgctgtcgttctgtgactactcgttattaactaatccgatgtaaacttaaattaaaaactgaaactcattttgtaatattgatgatgagccatatgcaatatatatgcactcttattgtagcggtatggaagaacatgggcggttcggaattagaccaaataccggttaatgaacaatgaagcaattttgctttccttcggtttaaaaatt

SEQ ID NO: 77167 - DNA, 564 bp, Arabidopsis thaliana landsberg
  unsure (1)..(564): unsure at all n locations
ggctgagtggcgcggtcagcacgtccgacaggtagatcccggccatcacgatgccgaatctcgatggcttaaaggtcgaaccagggcctgcggcggcggccggggacgaatgtccggatcgcactgacgctggccggtttctcgccgcgctcggcctcgccgacggtagtcagcggcccggcggtcaccgcggccgccgcgtcgcgggcggctcgtcggcccgcctgtccccgccgtcgtcctcgacctcgccgccctcgtactcgtcgccgtcgtcgctgtcctcgacgagctgcacctcacgcgctccggccgccagggcgaacacggggtcgtgggtggccatgacgacggttccgccgttatcggcgtacccgtcgcggagcagggnnnnnnnnnnnnnnnnnnnnnnnnnnnnnnnnnnnnnnnnnnnnnnnnnnnnnnnnnnnnnnnnnnnnnnnnnnnnnnnnnnnnnnnnnnnnnnnnnnnnnnnnnnnnnnnnggatgacatgtcgagcgggctcgcgtcggcccgcgcggacagggccgagtactcgatgagat

SEQ ID NO: 77168 - DNA, 444 bp, Arabidopsis thaliana landsberg
gaagcagtactgtgtggaagataccatatttcttaaaatcatttgaaaatccaattatttgaggagggtatgggatttatggttgattttttttgtatttttcgaataaaggaagctatcattttattaatatacagatttatggttggactagtacatatataccttgagtggaatatgatgaatgaaacctattaatgcatatatatgtgtggtgggccaattatctcatgtatatacttgtgacatttgacaatccctaagcaagagaaagcttttcacattggccccttgtcctctataatgcttgagactgacacgttgtcggtaagcatcattattttctcactgacctttcttttacatagcccatatgtcttttagtatatactggcatttcatgtgtaagatccattgtgtaacgccaatgatcaaacacttttt

SEQ ID NO: 77169 - DNA, 601 bp, Arabidopsis thaliana landsberg
  unsure (1)..(601): unsure at all n locations
aatttgtcagcaccacgacttggtacttgtcgaactgtgaaaagttgtcctcaattttgtgatgtataatagttagctaagataactactactatgcggatcgagatataattgatcatacccaggagattggtggaccttgacaggggtataagcgttgagttctgcgatgcgcggagctgtgacttcgtccctgggcttgccaacatcctctggggtcaaaaagaactgggcagagagatccgcaatcttgaccggagcagggtcgtagacagtcaagctcttgacaccagccaaggcaatattcttcgcaatctctacaccgaggcccttgagaccaacaacgaggatgttggaggcgcccatgcggcgcatggcttcgtgtcccaggacatagagctgtcggctgtagagagactcatcgatgtctgtggtcccgataacggaatcgtcgacttgcattctggtcgcaagatcgacctcagggagcttggaggcctttggaaacgaatcatggtcagctngggtcttatgccatatcacgtcatgccatgccacttctcgtaggggataaagaggcatgcagcgcgatatagaggag

SEQ ID NO: 77170 - DNA, 583 bp, Arabidopsis thaliana landsberg
cttccgatactgcgaatttacaccacctctaacctcagaaagaacctcgtttatatcggtactgtcagatgtatcatcgacgggttccatagcaccgtttagccaatcggtgtattctacgtctccccgtgtatcgacatcctcttcgcctgagctcacatcgactatatcaacatgattacccgaacccattgacaaaattttcgtaactgatcgcagaaattcgcggcgattttgaagtagaatcagttggcatgtgagaacactataattcagtaaattgaccgaattctaatacccgggaaaaatcgaggtaagaagaagcaatgaaatggaaacttcgagctgagaaattagggtttggtttggaatcaaaaagcggatgttgtactggtggtggtgacgatgaaatgacgagttttgaacgggtatatgatgaatatgggcctaatgggcctcaactcaaaagaatctgggctgattatagaaattgatggatttatatgtttttcattgattgttcatttgcttggtttgatgatcaaattcttcccaaccttttatgtaaaaacaatattaaaac

SEQ ID NO: 77171 - DNA, 495 bp, Arabidopsis thaliana landsberg
  unsure (1)..(495): unsure at all n locations
tagatnttttggctcgtcgggacatagagacaaaggaatgatcgaatctgcgcttggatcatccgagatcacatggttctacggaaagggagacttgtttgatgtcgccgccagctatgcgtttcacattgcggaggcgcaggcatttatagatggaaacaaaagagcgggagtagccgccgcgctcgtttttttagaaggcaatggcctgaaaattaacggcggagatttagagatttacgaaaccatgattaacattgccaacaagcagttgagtaaagccagtttgtccgcagtatggcgcagcctggcgatgaagtcggaataatttgattttaaacgcaacctagaatgacggctacttcgactctctccactctgccagtaacggaaaatgtcatcgctgtgcgcggcttgaccaagatctttaaggatttttggggcccgacccaagcgcgtgccgtcgacaacgtcgatttcgaagtgcgtcgcggt

SEQ ID NO: 77172 - DNA, 510 bp, Arabidopsis thaliana landsberg
  unsure (1)..(510): unsure at all n locations
ataatttcacatatgtctgaaattttttgtataaacatgaccaaaagaacgtgtaatattggacattgcctccatttctgaggtatgggaagtactgtggactactttacagtggatgtcctggtgagagaccttgtgatggtcttgattcttgttgcatgaaacatgatgcttgtgtccaatccaagaatagtaattattcacatacactctatatctagtcccacttttaccttatatttcatataaaagtgttacaattttgattaatttttgtttttatgcgtagatgattatctaagccaagagtgtagtcagaagttcattaactgcatgaacaatttcagccagaagaagcaaccgacgttcaaaggtaacaaatgcgacgctgatgaagtgattgatgtcatctccattgtcatggaagctgctcttatcgccggcaaagtcctcaagnaccctaactatttatatatatttttctatatttctagatacaattggtttcct

SEQ ID NO: 77173 - DNA, 560 bp, Arabidopsis thaliana landsberg
cactgctgaatttatcatttatcttgtatgtctgataatatgttgaactagttttgtgaaacttaagtaaaaagtgtattttagaattgaatgtagcggtttattataatggtgtttttcattagttacatttcactagtttagtcttgtctatgaacaattcgtaaaccacattttgtgaattaatgaaactgaaacaaatttttaatttgctctaaaatgttattggagctcaactaaaaaaaaattggttcgataaaacacctcatttctatttaatataatccagtaataattttcttatcaaatttatttaattaatcttagaattaaatagaatatatgtgctacataataaaaattattagtaatatttattatgattaaaatacgtctgatatttataattttatagctttttaaaggaaacaataatttctgactttttattgtgcgttccttaataaatgaaaatatgggtatgatacacaaaacaatataaaaacgagaatatgggtacaaatggttagaggaatataagaagctgagttaaagattca

SEQ ID NO: 77174 - DNA, 554 bp, Arabidopsis thaliana landsberg
gatctatcggagaagatgaacctgagagttgcgtcagagtacgatgttatgggttacgtggcagctgggctcagagtttgggcagaacagatgaaatcaaaaagtggtggcttggatgaatttgtaggacaaatggatgctatcgagaaacaagtgtcggagtttgaagctgtgatctctgttctagatcgatatgtctctgtcctagaatctaaaatccgagctgagtatcgtcatcctcatcatcagcgtcgctctaatgattctgttgttacagactgatgcattgtagcaataattaatttttatcattactgagattgttggaatcgagatctggaatgctattttggttttagttgatattgaagctagatacgaatacgacgaatgattttgtctacattcggtttaagtttaaccaaaactgaaatttgcataaatcaatctggaaccaaaccaaacgaaaagcacctaagttttttttttaccgctactccatatataaccatttaccgtacttactaatgcatttgttaagtgttttgtaaaca

SEQ ID NO: 77175 - DNA, 620 bp, Arabidopsis thaliana landsberg
agcagcgtacattaatttgttgaagaatgaggaaacaattgcatgtgattttgaggtaaaacatatctgcaattaatataagtgataaatgcatgataaattaaataggaggtgtgaatacacgaggaggagatacacgtttttttccttgcacgttttaattagtttggttcttcattcaagggtatcaaattggtcattaatactttgaattctgtctgaaaattgatctgtctacgcactacctacttcccgaccaatctcattcaccgttgataattagttttgtcacttagctttatgagctagctaatcgtccgactatatatatatatcacactatccgttgtcaacgctaatacgattagctactagtcattttccatataacctcttttctttttttatttggtaaaaataacaaattaaatcaacagttataaatcaaaaagtgacgcgatgaaacttagctcatattttcatattgtcaaaaaaacgtcttctttctcaattttatttagattgtgatatctctcattgatgataatttaattgttgaaaaggaattaatatgttctcaaatttaaactagtaaaatttgctatggttgattttttttt

SEQ ID NO: 77176 - DNA, 301 bp, Arabidopsis thaliana landsberg
aataattgaactgtgatcaactaaatatggctcagtgccggtgtctattacccgacgttattggattataatggggatcttgacaataccggcgccatcataggagattggggaggctggccggacttagcgagtggtaagagagcaagaatctgcgctcgggagagcaggacacattaggtttctctaggaggattatcatgagctatggggtggtgtctacgagaaattctggtgaatggacgctaccctgaaatgtacttatctttcttgaccgataaggggacataacaaattggat

SEQ ID NO: 77177 - DNA, 222 bp, Arabidopsis thaliana landsberg
ttacccagttatatccccaattgacagaatctttagataatcaactgatccaatctggacaaagaaatcgaaatccgcaactgggccggagatgtccaatactaaatcactgatgtgtgattatactcgatgaataaaaactaaatggaggttgtctctgtgtatttgatataacagcgaaagaatgggatttaatgttttggttagcactggatcattgag

SEQ ID NO: 77178 - DNA, 524 bp, Arabidopsis thaliana landsberg
catatagaaatcaccgctctatcgactgcgacccatgttttttttcttatctgctaatgtgcacacatacgaacgagttacatttatgtgatgacaactaatatatgatcatggaaagatatttcattgatttataatctgtgggcacgcgcattacctatgccgacctgcggtaagccattcttccttgggggaccttcccattcgttagggaagacgtggtttatttcattgacattagattctctagtttgtagtgtggatacaataagtctacctttactgaaaacagagcttagctgatctgcgaccactactcataagagaagagctattacgtgttaacgtatcaagccgaatttaactacgccctcaactaatcttaggcggtcatgtacagactaagcccacctgtgattattaatattgtaaagccccttacaccttatgaccaactaagagggaatccaattcacctggagaccgacgatcacttaccgtaccagtacttgttgccctaatgt

SEQ ID NO: 77179 - DNA, 193 bp, Arabidopsis thaliana landsberg
ccagactcctactgcaggcaccaaaggggaattttgcttattgggcgaaagcctgacgcagcaatggcgcggggttgtagaaggactacgggtcccatactcatgtacccagataagaagcactgacaggctctgcagactaagcataacattactccttagccagcggccagccaaatacagatgatgcaag

SEQ ID NO: 77180 - DNA, 417 bp, Arabidopsis thaliana landsberg
  unsure (1)..(417): unsure at all n locations
ggacctctccgacgccgatgacctccccggccgcggcgatgccggcatcgacgactagtcggacctgcaggagctggtcgcggccttcgaggcgggaccgttcgccagccgggtgccgcaccgggtcgaggcgccgttctcgctcgtcctgggaggccaggtggtccgggggcgcatcgacgcggtctaccgcgagccggacggcagctacctgctcgtggactggaagaccggtcggcgcgccgaccccgacccgctccagctggcgctctaccgcctggcctgggccgagctccacgacctcgacccggccgaggtccgcaccgccttctacctcgtacgcaccggccaggtcgtcgagcccggnggactgcccgggcgcagcgagctgtaggccctactcacgggtgacggcac

SEQ ID NO: 77181 - DNA, 228 bp, Arabidopsis thaliana landsberg
tacttttggacgtaaaactttttttttttcacaattttgttagaaaaactaaagaaataaaatcagaaagggctgctattttgattctataacagtatcaaccaaactcaaaacagtaatgatggacactaatgatagaaactactcgagaacaccggcgaagcaggaaacgggaatgaagcggttccgcgactaaattgcaactatgaaagatcaaaaaatactata

SEQ ID NO: 77182 - DNA, 492 bp, Arabidopsis thaliana landsberg
aaatggcgagccgcatgaattccaaacaacccgtttttgtggatttcagtggcaccaaatgcacaccggtgattgttagctatattaaaggcactccctcattgcttcgagatggaaaaccggtcgacagacttggaaatggcggtaacggtggaaatggcagtatcattactgaacggtgcaaaatggaatatgacgattttttcaagcgtggagatcattttcctgcatgttacggatgactcactgaaaaccgaggctgttctccgttgtacgaaacctgaagcaggtatgcgtattatcgcaagtggaggactattggggagaatgtgatcagggtggaactgaagtcatattctgaattatactcattacatcaaggcatatttacatccaaaacatcttccaaccggtttttgcttttaaaactttctttggtgaaaaattccaaataatctttgttttcctttaaaaaaggatccttttttccct

SEQ ID NO: 77183 - DNA, 519 bp, Arabidopsis thaliana landsberg
  unsure (1)..(519): unsure at all n locations
ccgcgccacagtgctgacgtcgaagcaacgatcaagcggcttggtttctaccggttcggggcccggcttgggaccatgggtaaggcgcagcttgaaagtgttgggagggtcgaccgtctgctgatcctctcggatcgcgaccagcatagttggtccgggttcaattgggagtatttacaaaatgagatggatgttctgcatgtcgacctatcagagtcagatcgacgatcgaacatttttgtaagcgacgcccggtacctcgctgcacctggttcatcgaccatggagtgggaggttgatgtggcccgcggagcgcctgcctctgtcaacggcacgcgtggggctccagcctctgagacgccagaggctattgaaaataaccccgagattcgagggnnnnnnnnnnnnnnnnnnggcggtgaggagctggctcaagtcgaatggactttgcccgctggagtaaacaaggcgaccgttcgtgcgacatggtcagatcgaaagtgcagacgtcaaaagacg

SEQ ID NO: 77184 - DNA, 289 bp, Arabidopsis thaliana landsberg
  unsure (1)..(289): unsure at all n locations
aacaatggctgcagcaccacccatcacaaaatcagcannnnnnnnnnnnnnnnnnnnnnnnnnnnnnnnnntcttttgcctcggctaattctataccaataaatatagagatgttatgggcaagagtttcttctgggttctagaaatatcaaatcctaaagctaaaaaggaacaaaatttgataataaaaggaaaggttttgaagtgaaaaacctggagattgctaattgattctccgccgcagagagaagaactcggcggcgaaagattgatttccaggtcgaggagg

SEQ ID NO: 77185 - DNA, 612 bp, Arabidopsis thaliana landsberg
  unsure (1)..(612): unsure at all n locations
gacacgccggcgaaccattattaaagccggcatagaggttaaccacgttttcatttatcttaccagcgattgaatgatcaacaatatcgattgcctgaacgcgaaatgggaaaacaatctgagcaaccgaagacttagggatagaaaccgtgtctccattttgtatgagattgcgcatccccaagcagtcgtgcgaattattagattttgagtcacacccggcccaacagggtagaaaaaatactatgataaaaaagaagtgacaaaatttcatatttagtatttttttacaaaaagttaagttaaaggactgcctcatcatccagtgacaaatgaaaataaggttagatacaatcaaatttactgatttaaaggtgaattggttccataatttatcgcggggcttttaactgtctttcaaaacgtggtttattgttacttctttcttattgaaatgcccgctcatcgtgacatgatgaatctggtattccggtgtacgcccaaatgcccgcgtttccatttcttttaggattgcgtaggttcggccatggtacaagacaataggatattcaattccatcaatcacaacttgcttangaatgtcttcatgac

SEQ ID NO: 77186 - DNA, 611 bp, Arabidopsis thaliana landsberg
  unsure (1)..(611): unsure at all n locations
catgcgcccgaagtgacatccaagctcgccagcctgggagtcggcgtttagactttcacgcccgaagaattcggcgccttcatcggcgccgaaatcaagaagtggccgcgcgtcatcaaggaagcgggcctcaagatgggaggaagctgagcagcatgtcgattcccgcgaggggggggcggacgcgctccaggcatacggacgggtagaattgcatattgtcatcgctggcatgcgattttttcatcccccatccggagagtttgaatgcagaacctcgaaaacaaagtcgcgctggtcaccggcgcgggccgcggcatcggccgtggcatcgcccttgaacttgccgcgcaaggcgcggcggtagtggtcaacgacatcggcgccagcgtcaagggcgagggggtcgatgaaagcgtcgcgcaggcggtagtcgacgaaatcaagaaggccggcggcaaggccgcggccagtggcgaatcgatcacttcttgggaaggcgcanatcgaatcgtccgtaccgccctcgacaatttcggtcgcctcgacttcgtggtcaacaacgccggcattctgcgcgatcgcatgttctacaacatggacccggacga

SEQ ID NO: 77187 - DNA, 501 bp, Arabidopsis thaliana landsberg
  unsure (1)..(501): unsure at all n locations
cgatgctgctatgcaacaggacccaagacatgtatatgccgatgcaggagcatgcatttttacggctcataaccaactatcctaatgggtgtaactagcagcaggatacatcttactatgagctgcatagatatggaaaaccccacgcggattttacaggactctgtcgtgtggttgggagctaccatgacattaactgatatgggaacgcatatttcggtgagtgnnnnnnnnnnnnnnnnnnnnnnnntgggcgatggaaacaccgcttatgaccagaaatgcagctcagacctacgctacctgcgacacattcagcgtgaagctggctgagactactgatcatggtggaacggacaggactcctaaaaacgtaatagttcactgcttggcgacagacaacttgggagcacaggatggttgcatgaacaatgcaacctaactcactgattctagctgaactgatattgctgcatggagcttgaattttggagacaacag

SEQ ID NO: 77188 - DNA, 602 bp, Arabidopsis thaliana landsberg
ctggagctaacggcttcttgcaggtggaaggcgagaaaatgtccaagtcggcgggcttttttttcaccatccgcgatcttctggccgactggccgggggaggttttgcgtttcaacatgctgcggacccattatcgccagcccatcgatttcaccgtggcgggcctcaacgagagctggaagacgctggagcgctggtacgagcgaaccgagccgctggccgatcccgcgcccgatgcggcgttccttgacgcgctggccgacgatctcaacacgccggccgcgattgcctccttgcatcaggcgggtgatatggcgctggccggcggtctgggtttcctcggtttctccaatgtgcaaatgaagatcgccgcccagcccgcgctggatgaagccgaaatcgcccgggccattgaagcgcgcaatgccgcccgcaaagcccgggacttcgccgaaagcgaccgcatccgcgatgagcttctggccaaaggcattctgttgaaagatcggccctccggcaccagctgggaggtccggcgatgagcgacatgaaaaaagagcggctttatatcttcgacaccaccctgcgcgacggggcgcaaa

SEQ ID NO: 77189 - DNA, 351 bp, Arabidopsis thaliana landsberg
  unsure (1)..(351): unsure at all n locations
gatacccaagaangcctatataacattcacactctacatattttatttataatataacaagataatcagcagttaatctgataacatttatgaagctataaacatacttatcatcatatacagggacttcccattgctggtcatgaaacaattacttagacttcgaatactaaaaattaatacaacagttttattgtttgatctatacttaacttataacgatcataatagatagtatatatgaaatgcatatgataaaatattttcataaccgactctaatttgttgcagtcactgctattgaacatctaattaatacaccttgctcaatttcatttacttatatataat

SEQ ID NO: 77190 - DNA, 176 bp, Arabidopsis thaliana landsberg
  unsure (1)..(176): unsure at all n locations
atatataaacatacattacatacgtgacgtataaaatataattatctgccataacaagaagtaccattttaattgttttttttttcnaccggtaccatttagacgtttatgacatttaaatagaacaagtaggcgtaagacagaataatttttttgttgatgccaaagtattgggg

SEQ ID NO: 77191 - DNA, 486 bp, Arabidopsis thaliana landsberg
  unsure (1)..(486): unsure at all n locations
aggccnnnnnnnnnnnnnnnnnnnnnnnnnnnnnnnnnnnnnnnnnnnnnnnnnnnnnnnnnnnnnnnnnnnnnnnnnnnnnnnnnnnnnnnnnnnnnnnnnnnnnnnnnnnnnnnnnnnnnnnnnnnnnnnnnnnnnnnnnnnnnnnnnnnnnnnnnnnnnnnnnnnnnnnnnnnnnnnnnnnnnnnnnnnnnnnnnnnnnnnnnnnnnnnnnnnnnnnnnnnnnnnnnnnnnnnnnnnnnnnnnnnnnnnnnnnnnnnnnnnnnnnnnnnnnnnnnnnnnnnnnnnnnnnnnnnnnnnnnnnnnnnnnnnnnnnnnnnnnnnnnnnnnnnnnnnnnnnnnnnnnnnnnnnnnnnnnnnnnnnnnnnnnnnnnnnnnnnnnnnnnnnnnnnnntaagaaataacgggtttgctttgtgcgcgttttcttttttatatatacccacaatcgaacccccccccccttcggggggggtgttttttttt

SEQ ID NO: 77192 - DNA, 105 bp, Arabidopsis thaliana landsberg
  unsure (1)..(105): unsure at all n locations
aggattctattggcccnttccacgtggaatccactctaatagacttttaaactcgggcaccatctcttacaacagaagggttgagattgttttattctactctct

SEQ ID NO: 77193 - DNA, 579 bp, Arabidopsis thaliana landsberg
  unsure (1)..(579): unsure at all n locations
aggcgcgctggatgcgcagctttccgatcagctggatgagatttttgaatttctggcagaggcagacgtactggtgattgcgctcggggctgcgtatgcctatcgccaccggaaaacgaatctgatcgtgggtaattgccataaagtgccggccgatcgttttatcaaggagcttcttcattttgatcagatcgcgatcgcatttgaacagttaatccaaaaactgattccctataaccgcaagctgcgcatattgctcacagtaagccccgtgcgtcacacgcgcgacacgctggcgcttaaccaggtgagcaagtcgacgttgcgtttggtaacccaccgtcttttggaaaaatacaagcatgtggagtacttcctcgtcgtcgagatcatgatcgatgagctgcgcgattaccgcttttataaggaagatattgatccaccccagcaccgtggcagaagaatacattttcaatgccttnnnnnnnnnnnnnnnnnnnnnnnnnnnnnnnnnnnnnnnnnnnnnnnnnnnnnnnnnnncgattcattggcacaccagccgaggacgggcttacccca

SEQ ID NO: 77194 - DNA, 572 bp, Arabidopsis thaliana landsberg
cccaagaaaaaaaacatgctcacgataaaataaggcagctctctcagtgtgtgccacaccgcggcgttttctctggagcgcttatgtgtaacataaacttgatattgacacctgccaaacatgtccttaactctgctcccctttttctcgtgcttgtctctccttcaagtaggtcatggtcaaacttccaatgtcgtcatactcatacccacacatattggctccaattatttatattcacatatataaacatatggaaaaaaaatcttaaggcatatatagctagttttcgatctattttgattaagaacttccaaaacaaaaaatatgcgacacccattgtgaccaaatttatatagatatagttagagttgtctacataacacttgttcatataaaaaatgaatgaaagttctgtgaattatcaatcattatagagaaagactgacgcttaaaaattgtgatcgatgcatacaatttttttggtgacgtataacgctctggatcgttagaaataataattctacattttttattatattgaagcttataccttcagttttacattattt

SEQ ID NO: 77195 - DNA, 483 bp, Arabidopsis thaliana landsberg
tgttggctagtaatataataaggaaaagagtgaattatatgtagtttaacgtatttctagtttttttctgtgtattaatgaatcactaattaagtagtatgtattaattgaattatcagaagctggtcacaaaagtctaccaaaaaaaacaaaaaaattggtcagaagaaaatgaaaataatgagaataaaaaagggaaaaaaaataagaagctagcaaacaaagcaattaacatttcaaggcagttaattcatcatgcaaggtgcttatgtgtgacaacgtcatgcgttactttttgcgtctacactcatctctctaacgcaatccactaattctggtaatggattctgctatttagaccagccagtttcttcgtctctcaatcatcatccaaaaacattcttctcacaagaatcagattcaagatagaagttcttcaaacaatgtctagtcctctgggtcacttttagattctggtttttc

SEQ ID NO: 77196 - DNA, 391 bp, Arabidopsis thaliana landsberg
agattactccccgaccaacgaataagtagaatcctaatttgcgtattagtactatacaggtcggcatcgcgaaggagaaagtactggtaggagtttacgatgttactcctgccacattagcggtgcttgaggcactataaacgaaatccccctttccggttttttatcacttcgtgaattgctaaagccaaattaaccctagttaattttgggggggattatcttatggtagtgtcaaccctagcgaagagttttaaagccaggattcggatagacatcaattacctagatagctatatgcgcccgcctaccgcactttcttcttctgacttggtccgccatccatcttatgtaccctcgcttccaaccggtccaagtaagtataggcgat

SEQ ID NO: 77197 - DNA, 387 bp, Arabidopsis thaliana landsberg
  unsure (1)..(387): unsure at all n locations
gggttccctggcaaggaataagagcctttttagatttttnnnnnnnnnnnnnnnnnnnnnnnnnnnnnnnnnnnnnnnnnnnnnnnnnnnnnnnnnnnnnnnnnnnnnnnnnnnnnnnnnnnnnnnnnnnnnnnnnnnnnnnnnnnnnnnnnnnnnnnnnnnnnnnnnnnnnnnnnnnnnnnnnnnnnnnnnnnnnnnnnnnnnnnnnnnnnnnnnnnnnnnnnnnnnnnnnnnnnnnnnnnnnnnnnnnnnnnnnnnnnnnnnnnnnnnnnnnnnnnnnnnnnnnnnnnnnnnnnnaaaccaccattcaaaatagatgctgcggaaaacggggggaaagctctccatacctggttctcctgatgctggatcctgtagaaccacaag

SEQ ID NO: 77198 - DNA, 487 bp, Arabidopsis thaliana landsberg
tgaaaagcaaattaccctgttgcggatgtactgcctgccatgcatgattagccttttctgccataggcttgcccgcttctatggcgaaattgaaacaggcgctcaatatgcccgaaaccgtggcaacgatcagtcctttcacaagactgaattcctgtaccggagcccttcttctgctcttccggcaattctttttccttacgtataccggcgcggccgcagatgaatatgcctgtgaggcataccagcacgccgagcaataccatacgcccgccgtcactgccgagcatctgcgcaatggtaaccttaccttccgcaccggaaaaataataatagacgggagggatcagcgagccgaatgcagaacagaaacccagtatcaccgagttgccgagcgacatacccaggaaccggacaccgaggccataagtgagcccgccgataccccagagtatgcccatacaatatgtccataccagaacggatg

SEQ ID NO: 77199 - DNA, 472 bp, Arabidopsis thaliana landsberg
cgaccaatatacaaaaccgtgtgttcttctctgtctcttattaaatcaaaaccaattttgttcttcttctttgattctttggtccttcattttttaacgtatcttgagagatcgacgatgtcgtcgaagaaatccctagttctaagtctcttcaacatttccaaaacctactccaggatttctggtcttacccgaatgcgtccgaccaaatccggcggcattcctcccgacgccggagattctggaatccgccgcagatttctccacaagagggcatttttctcgccggagatagttcctaaaggtggtaacttgatggagaaactcagggaattgactttgtccaataataatcgtattagactcgacgagatgttaccgccaccttcgccgaagaaatcatcaccggagtttttccctgctgtcacggtggaagacgtgaagaggctcatgagagcagcgggaatggagc

SEQ ID NO: 77200 - DNA, 403 bp, Arabidopsis thaliana landsberg
ctttttaaagggccatatgcgggcagaaaaatatttgggtttacttatagaggtgaagtcttttattaacctccttacactctaaccaatcaggatcttgggccaaataaaaaatatataacctcacttaactgtaaaattaacaataatcatttgatcatattttggtatgtttgatctgtcaaacacaattttgcctgcatcacacggagcttaactacttctttaattaaatgcatcattatatgaaggatatatattgaacatgtacgatacccatgacgatcaaattgaggtgctattggctcatttgcgtggctacagtataactaaagaactataactgacctttctcttcgtggcaaggagattgatctttgctgttggaagatcccctatatgg

SEQ ID NO: 77201 - DNA, 529 bp, Arabidopsis thaliana landsberg
aataaataattgaaactcgggcctaggcccataatgtgtaggcggacaaatttaaacagcattatacacagacaaatttcagatgtttatattttatatgaccaaaaaactacgaagctacaaatctacagtttcactatccgcatccggatctgttagactcggatatccgggttccgggtaccagaattcgacagttttaaggatttgggtatcgaacccagaaattaaaagatccagagttctagggtttgtgagatatcgagaagagatcgaaatgattttgtgaccttcaaagaatgattttgtgtttgtgtcgacaagtgataattaattgggcttgggtatcaaaaatatttggtttgttaaatatatgggcttttagctaaatgggtttccaagcctttttatttcatgtagttaatggtaccggatccggatatccgggttcattattttcattatccggatccgcccgtcccggatatccttatttacgattcaatgatttttttttgatttttttttt

SEQ ID NO: 77202 - DNA, 559 bp, Arabidopsis thaliana landsberg
acgaagatgttcggggggggggggaaataagaagataaaattaaagcaaaaagcgatcgattcgaaggagaaatcaagaaggaattataatgcagagagccagaagatgttcgataatgacctgatttagctgagccttggacggtgttagtttaatgttcggtggctgatgtcattatcaacatgggacgtcttccctcttccccacttgggcttgcctgttacatggggctagtaataaaaggataccaccagagtcatacaaaccgggacgtcacagtctcaatatagttaatatgattgtttagtttgatagtttcgcaaccagctgcgcaagctctactactagcagtgtgttggccaataaaaggccaaatatgcattgcttttgtttttctctcttagggaggtttacaaggtatcgacatagatcgggttcataaaaagaaaggatatcactatataaatacgccgtatctatagccatcacagaccgtatatagtacatatacctataacgcattacaagcagggagggacagtccctaaccgaagaaca

SEQ ID NO: 77203 - DNA, 462 bp, Arabidopsis thaliana landsberg
tttttttacttcttctctcagagttctgaactacccaagcctcagtctggtccgcgtaccctgagtcaattggaacaagagaataatgagttaagagagaggtttgttaccaccttacatgctatgtcaatttgcctatataagattcatgtttgtgtttgtgtgaattttggaagctgtgttttttgtttcacaggctcgataaaaaagaagaagttttcctgttactgcaaaaggacctgcgacgtgagagagagcttcgcaagacacttgaagctgaggtaacttctactttctgacatttactgtgtctgcctgcaacctataacagtactcaccagatggattccacctgtcattgcaggttgaaacattaaagaacaagttaaaagaaatggacaaagagcaagcgagtttaatcgatgttttcgcagaggatagagacagacgcgacaaggagga

SEQ ID NO: 77204 - DNA, 117 bp, Arabidopsis thaliana landsberg
aaatgaacagaatgctaagaaaataatctatacccaacacttcctactttagttagcaccaatacagggctaccaaatagagcagggtctaacatatagtgccaactcattaaaaca

SEQ ID NO: 77205 - DNA, 651 bp, Arabidopsis thaliana landsberg
  unsure (1)..(651): unsure at all n locations
gaaagaccttatgtcttcttgcttcctaatgaccgagagtttgtttctcatttgtttatctatccatttggcaagatgtgtttcaggagtcggaatctcgccgtgtttccttccattgcgctcccgccaaatcgaatgatccgttacatgaaagctgtatcggaggaagaaggtatggatttcattccctagcttccttgcccatgatctctcacatgttgtggagtttataacaacaaaagatgtaaaagtatataattgacaacatgtacactattttgataacacaccatacttgatgatgcttcttatcgtagagttttaacgccatttgattattaccaccttcttctactcatgatttttatcttacacttacgtgatgatgtacacagaaaagtttgaaacgtatagaaatagataagctgaataaaaggcaaagagcaatatgcataatgaaaatcatcgaatctaagaaacgttaattcatattttgataacacaccatacttgatgatgcttcataagtagagttttaacaccattgattattaccaccttcttctaactcatgatttttgtcttacgtacacttacnggatgatgtacacagataaagttgaaacgtataanaatatataagctgaataa

SEQ ID NO: 77206 - DNA, 593 bp, Arabidopsis thaliana landsberg
acccggctactagtgcttcgtttcgtcatcagtaaggctgcctacttttgttgttttgtttttatattcatattaaattaaagatggggagagggtttttaagattggtttcttctatgttcctagaaatattataaacaaacatatacttatgcaaacaaaaaaaaaaacgttagtaatctatataattcagacatcagttttttcctacatgggagatagaaaaaaaaaactcaacttataaccgtcaatctgataatctttgagcaattttatccaacaagtcatcagtaattatctaaaatctttaagtcaggtatcaattctgctcacttatcaaccaaaatgcgtatgagtgcttggttaagtttgagattagttcacatatacatatatatgacaaattagtgtatatatatatatatagaagaagaaaaaatgaagaaagaaacacaacgtataaaggtactacattatatgttctcttgcttagcctaattaagcatggcatcaatcttccacggtactggatgctgctgcttattatgttccttctcaatcgacgaaattttattcgaacatatcttacctat

SEQ ID NO: 77207 - DNA, 582 bp, Arabidopsis thaliana landsberg
cttgtgccgttgcgaatgcctggctgcattgtcctacttttcctgcggcgcgggcgcccgtcgcgccacggcgacgtgatgcgcgccgtgcggcatgggcaggcggcccacgtggcgcagggccggcccgccttcgcgcactacgcggaagacttccaggccgcccccggccggcccgtccgcgtggtactggaacaccgccaccagcaggaaattgcccgacgcatcgaagctggcgccttcgggcagcacgccctcgaacgcgtagtccgccactttcaacagcgcgccgctcgcacggtccagggtcagcagcgacaccgtggccgtgcgcgcgaagcgcgggctgtccggcggaaacggcgtgccgcgcatgttcacggtggccaccaggccgccgtccggactgacggccagcccttcggacgattcatcggtgtacgcccggctcacgcacgcgtggcgcgcgcccgcgccgtcggccagccggatcacgctgatggacgaagggcgggcgggcacgcggccgtccagcgtggtggcgctgaaatcgcggccccagtcggcggtcaggtaataccg

SEQ ID NO: 77208 - DNA, 648 bp, Arabidopsis thaliana landsberg
  unsure (1)..(648): unsure at all n locations
tgtccggtgaagttgaataaacgactttttacaaatccgagatgaagctgcttccttgtagttgaagattcatttgaggatgatcatggttttacggaagtttcagatttaggacagatttggggttggggatatggaggcgaaggtcaactaggattgggttcccggattaaaatggtgtcatctcctcatctaataccttgccttgaatcaattggatctggaaaagaaagatctttcatattacatcaaggaggaacaacaaccacgtctgctcaagcttctagagaacctggtctgtacatcaaggccatttcatgtggaggtcgtcatagcgcagcaattacaggtctatcttctcttctgagttattcctctnnnnnnnnnnnnnnnnnnnnnnnnntgaataaataaaaaggttgcgttgcagtagatgtatttgtaaaatataaaaaactttgtaatggcttgatcttgattgcacgtcctttctaattacagatgctggcgggttaataacttttggctggngactctatggacaggtgaatattntacaactttagcatctttgactggttatccaactgacttaagtgcatttctgttagccttcttatgtgctcatgctaactcgacaattacttg

SEQ ID NO: 77209 - DNA, 562 bp, Arabidopsis thaliana landsberg
  unsure (1)..(562): unsure at all n locations
ctagctgttcgaaactttatagtttaaacatcctttaaaaactgttaaagcaaactcaaagctctaaagggttcagggaaatattatagtactctttcttatggtccaaaagcttaatcatctggaaagttttaatgcatagaataatttgattggtagcatgagagaccacgacgaggacctttacgtcagcgtataacttttggttcatgggtatcatctgactcatcatcgcataaatttcattaactaaaccaaataatcgattcctattttgtagctattgctgttatatattaaccttattaatattatcttacatacggctgtatatattcgttttatatttaatctgattgcgtcaacgtgttcgagtatacagttgcggacgaaattccattgtcagacgactgatgagatttcaaatcgaatcttttacaaaggctgcaactagtaaagtgcttagacattctcttcccatggattctatgtngatacatataattaaattagagatgcttctcgtggncgcatgtgtaacttttcgctaaactttatttat

SEQ ID NO: 77210 - DNA, 543 bp, Arabidopsis thaliana landsberg
ccgtgataaacctgggactgccggatggcttttttgaaaataagcccgaacatcaaatgcccctgttccgtgccatccgcaaataccaacctgaaattgtgctggccaatgctcccgaggaccgccatcctgaccatggccgggcctcgcggcttatctatgacagctgtttcctggcggggttgataaaaattgaaacggagctggacggtgaaaagcaggcagcctggcggcctaagcaggtgttttattatatccaggatcgttacctggaccccgattttatcgtggatatcagcgaggtaatcgaacagaaaaaagaagccatacgctgtttcaggacccagttcctcgcatcggaaagtgacaagttgcagacctatatttccacccctatgtttttcgacagcattatccagcgaagtgccatgtggggcaaaatgatcggtgtagcccatggcgaggggtttatttctgctaagaaaatagggatcaggaattttgaaggattgattttgtgaaaaagcttttacaagaaatatg

SEQ ID NO: 77211 - DNA, 521 bp, Arabidopsis thaliana landsberg
caggctaaaccaaaaccaacggattgtgtagcttgaacgagctcttgatgtggagagaatatcaaatattgaacggcgggggaaagtttcagctctcagagaccagaggcaggtggcatgaagcatatacatcatctaactatatgcaactcttatggcttgtagaaaaatatcttgacactattttctaacatcttgatgcattgaatacgctaagcttttatgatgtaatgattttccagttaatttgaactaagcgtatgtaatgattagttaattagtcatatagttattgtaaatcttctgggaatagttagaaaaaaaatatatatatgttttttttttatatataaaatagatatcttccgtaatctttttgcttaaaaatatttaatttatcaattaaataaataaaaatcgttgggataataaaggaaaaattaaaatatttatgtaaatcgtaggatgagtaagattaaaaaaaggaaaccttaaaccgaattatcgaaatttacgggaat

SEQ ID NO: 77212 - DNA, 550 bp, Arabidopsis thaliana landsberg
atcgctcattccaccttttttttaatgactttactgacaaaataaacatattattctttagtcttaaataaatagaatcttgttttataattttttattacgttattttaccaatcaaaactatggttttatattccaaattttattaatatagtggcaacttcccaaataaaaatcttgacaatttgaataatcttaaatttttgcctagccgatttggcgaattttatttatttatttatttgttctatttaagaaatatcagactcaccgaaatatttatttcttaacaaattaagctaaccgctctcaaatttttgttttgtcttatttcatacatattaaatccattgcaccaaaatttgaggactctatgtgttataaaaataatcaccgttttagactaaaaataaattaaaatctgcgcttccccaaaaagctataatggcgagacactccataataaaaccaatgcaatgtaatggacacatgtctttaaaaggaagaagtgaaagatgagaaagtttcaactctaagcattacacattac

SEQ ID NO: 77213 - DNA, 515 bp, Arabidopsis thaliana landsberg
  unsure (1)..(515): unsure at all n locations
ttctgatacacaaagccattcttacattatagataaaagagttttcgtttagaagtctacggtcgtaggtaaggtggtgttccaagtttctcatacagtaagaatatattttttctgtgagcaggtagatagcacttacagtcaaagatcctaataatcaatcgtcttggaaatttacatttgtagcatataatctcctgattacacgagtgttaagttgtcataaattaaatgtgtatttcacttaatacaatctatccaagaactacaccagggaaaatacttaattaatgagaggactctctaaactctcaaccggtgcccaaacccacatctaataccaatccagaatggatcccatagcgttgtccttactcccttttaagagctactaattgtaaggtcgctcagttggcaactacacttttctcaacttcctaagcttggtacactagttctgcactagacttaacaagaaaaccttatcaagattttcatatggncatgtaatctct

SEQ ID NO: 77214 - DNA, 600 bp, Arabidopsis thaliana landsberg
accgcgcctgggaacagcgggacgtcaacatccaccgctttctgttcgacccgctgatcctgcgcttccggggggacgggcggctcgccgcgttctgcaggaagatcggcctgcccccgcccgcttcaagcgaagcactcagcatcgaccagatccgcgcggcgctggtcgccacgcactgatcgccgcacgcgtcagctgcgcatcccggtcccccgcttcagcagccacaggcccagcccgcccagcaccggcacgaagaagaccatcaagccaaacgcgacccacatgggcacgtcgctcacgcccagcaggccgtagcggaacgcgttgaccatgtagaagatcgggttgaggtgcgtcagtgtttccgcccacggcggcagcagcttcaccgaatagaacacgccgcccaggtaggtcagcggcgtgaggatgaaggtcggaacgatggccacgtcgtcgaacttcttggcgaacaccgcgttgacgaatccggccagcgagaagatcgtcgtgcccagcagtaccgacgtgatcgtcaccagccggtgcggcatctgcacgcgggtgaagaacatcgcgatcaccaacacgatc

SEQ ID NO: 77215 - DNA, 667 bp, Arabidopsis thaliana landsberg
tacacccttaatttcggcgtgccgacttacgcgtgcaccacgccctagctttacccccagcagggatgcgcgcacccatccgactttgacactgatcgcgcggcgaatgctctgaagtagatttattattaagacattcatgagcacctcatcaaagaaaaaatacgcacgaatccggccccatggaccgcatgggtaatttgcataatgtcggggccacaatcatatgcccaacttgatggcgtgggtcatgtcgtccgcgccaatcccctcattcgcgcataactgattgcaacacatgcatcgcaatcaagacatccacttaaaccaccttgtagacactacctgcgcgcaatatatagagcacacctgtacgtgaacacgtagcctcgccctcccctacaagtggcaatttcagctgttctccaaattcgctcatccatccgatctgacgcgctggcacccccaccatcagcgcataagccggcacgtccttgttgaccaccgcgccagcacccacgaaggcgaactcaccgatggtgatgccacagacaatggtgcagttggcacccaatgtggccccttttttgaccagcgtattgcggtattcgtctttgcgctcgatcagcgaacgcggattgtagacgttagtgaataccatgctggg

SEQ ID NO: 77216 - DNA, 475 bp, Arabidopsis thaliana landsberg
  unsure (1)..(475): unsure at all n locations
tatattttagacattaattagcactcgctatttctttgtaattggattatttagttagtatcttttttttcttgtttttctcaacttttctttattttttatattatcatttaaatagtaatgtgaattaagttttcatttatcttattttattattattnctttctacaaataataattacatatacaccagtacaatattgccatatgttgcatttccgagtctactttactcgcctttttatagtgaggtttgagcaaccttaatagttcatccatacttgagatgatgaaaaaaaactctttgcaaagattattagtatggcttctgctcaatctttctacaaccatagctctgtcttgaaaatctatgtcatggggtgaggacgatgatcatgttttccttgatatcatgtcacgcatgcttcaacactccaaatacagaggtaattaaatcttattatcatatattata

SEQ ID NO: 77217 - DNA, 99 bp, Arabidopsis thaliana landsberg
aaaccccgaatctactagcaaagagtcagccaaacacatatttttgcatttttagcaattgacaaaattcaaaagggaaactggggacaaactcacatc

SEQ ID NO: 77218 - DNA, 538 bp, Arabidopsis thaliana landsberg
  unsure (1)..(538): unsure at all n locations
accaccgctgagtttcgtgatagcccacggggcatcctcgtccttttcctcgtttccgtcgctcgacaggtacccgggaggttgttggtcgtcctccgcgtcccatcgcacagtcactggtttcatgtccgatacctcctccggcggcgagaagttgatgaacctgtagtccggcgcgattgtggcgtccaggtcgaggaggcgctgtgcaaatttcgtgtgctcccagtagcagacccggtcaaccttctcgnnnnnnnnnnnnnnnnnnnnnnnnnnnnnnnnnnnnnnnnnnnnnnnnnnnnnncccctagccgccatctcctccacatcattgggcagacaccgcttgaggatctccttggtcgtgagggttacggccgaatcgtcaacagggtcattgtcggcgggtagaagagcgggatcaccgtcgaggtcgatcccagtgtcgtcgcctaggtgggtgttgggcggcaagaatcggatgcccggagaaggcgcagggctaccgccttgatcttctccggtcttctgtctc

SEQ ID NO: 77219 - DNA, 591 bp, Arabidopsis thaliana landsberg
tacgttgaatccttatatttattatactcatgcagaacaaaaaaaatcacgtgtgatatttttggtatagttatgatccaattggaaacttgtttgtttcagaaagaaattcacatcaatcttaaaagagaactcccacttaataacaaaagagaagattcatgaaattgggtagaagctttaggaaatgttcctttgtttggacacttattatatgttatgtcaatattatatgttattgacacttcattagagtaaaatacaaactagaaactgagaagagaattaaacttgggcctaaaactatatagtctagaaaataaattaaaagcaaatataattacacaaaaggatgtagacaaaagacaattaagtaacagtaaaataatactacaattttcttacatccactgctcataaaatgtgatatgtcagaagtgcttcgctgtctaaatttcaaatccaaggcaccacgcgctaatgtaccgcttgtatctcatgttccaattaaaattcgacaattcataattcatcaactattcattctcggttttggtgtcaaaactgaatttctccaaataaaatcaaact

SEQ ID NO: 77220 - DNA, 629 bp, Arabidopsis thaliana landsberg
  unsure (1)..(629): unsure at all n locations
aacacgtcttcaaattagccaaaaaaaacaaacacgtctttgagttgagttctgttctcatctctaaatttaaactcaaaatttaggttcagtataaatcttggagtccactcccaaataaatacattcatataatactcttaatactattcccacgtacgaccgtggtggaaagataaccacttgaaataataaatataactttttgtatgattttctttaaaactatatattaaactattaaatgtgtccatatcaccgtgttagtttttcttgttcttcatttcgtttgaagaatccaaatgttatatattctcttaattgacttttgtttttctttttgtcttcnnnnnnnnnnnnnnnnnnnnnnnnnnnncggtgcaaatattagctctatctttttttgcttttctttttgtcctagcattgctaaaaagatgagatttttctttcgggacaaaaatattactattgactttaagaaacattaaatctgcattttccgggaaatcaaatgattntgcgttactctatattntgagtatgttcacatcgtacatgtttttaattggattatgctcatgacatattttctcaaagttagaattacattttgatagaacagtata

SEQ ID NO: 77221 - DNA, 473 bp, Arabidopsis thaliana landsberg
  unsure (1)..(473): unsure at all n locations
gaaaaagatgattgggacagggatatcatgtaatgacatcatatctttctcttcccaatnttaagtcttgcagctagagttttttatatttaataccacttgccccctctataatatatgaataaatcatccgacacaagaacaagaagaatcacctgaaccaacaaaaaaaataggatctaggagaataagtgaattatgatttgaattctaacgaatgtgttgaattaaagaccacgttaataacattttaaaattaattgctcaaaaacttcagaaatcaaagattgcatattttccaggaataatagtactagaaaccgttcctccatcttttagcaggatagtagtactatctcaaattggaacaacataatcaattatgataaggaaaattagttatcattaaactccaagtctaagttacgcgcggaatactatgctatttgcttttgaatgttctaaactatgca

SEQ ID NO: 77222 - DNA, 595 bp, Arabidopsis thaliana landsberg
  unsure (1)..(595): unsure at all n locations
agatcatatatgtgtgtgtgcgtgttgtgtatgtgttgggatcgaagattgatgttagataaggatagagaaaagacgagacaggggctggcattagaacagagtttggacagaacacaacttgacatctctgtttctttctcttcacgcacgtgtaaaatgctttttgtgattttttttttatttttcattgtaatacaaaaaaagaaaataacatttttaaagaattcatcctataattcttttggggttattaaataaaatactggactcgtgcctcatcaaataacatagatttatcataaacgataaacctgtttgtgaaattttcaaaaattggattccatttgttttggtattattgtcatcttaatacgtttcaagcgaactaaaaaaatgttaactatgggtagagtataaattttatgattaaaagttacattcaaatttcaaaaccatacttaaatctaaaataacaacacttatagtttataagcagctcttatgataaaatctttctgagttatagctctgttanacttgtattcaccccaaaacggatgtttcatttcttatttttacttggagtatttta

SEQ ID NO: 77223 - DNA, 440 bp, Arabidopsis thaliana landsberg
gccttgtctgtcttgtctttgcaaatgcaacaccttatgcagcttttccagagttgggggggacactggggcacatgaagctacttgtctattagcttactcgagaactaggactcggctattcttcttttctttctcgaggtaacgctcgcctacgttcagagaacccgggaagagttcgggtctttaatcgatctggtcatccaccgtacaacagggacagaccgaacctgatcgagacccgttagaaacgtcaagagatgttaagaagaaagagaagcaagagagagaggttggactcgagaacaagacagtacagtaccaaccacgagtcgcttgaggttctctgaacagattactatggctgtgatgctgcagagattagggagctcggataactgaaaccggggagagagaagcggaaaaaacttcctgactcg

SEQ ID NO: 77224 - DNA, 573 bp, Arabidopsis thaliana landsberg
  unsure (1)..(573): unsure at all n locations
attcattccatcattttttgtgtggttggaatgcagtgagcattgttcatggtctgcgatgattgcctatgaaggctgtgtacggttatgtcttcattcatggtcaacggatagtgtcagcgaggcttcttacttcctcaacaatgaatgcaccataatgcggaatgcatttagtttgcagaggtttttccttcattctgaagaagagttactgggaaagggaccttctgagttggttactgagacgtctgttccaaaatcgaagaagactattggaaaaattaaactccaaggtatacacatttgtatcttttttcccttccactgtattttaccacttgtagaaatcgcagtagtgcttacaagagtaagattttgtacagttcgtagaattaaaatgggattagatccaccacctggctgtaacattgcaacactgacggtctccaaggaaaagctcgaagttgttcgtcaccatattgtggaactgaattcgactntatcttctggatggaaagcagcgaggaaagttcatgtcactccccaagttcctctaaatggttcactttcgcg

SEQ ID NO: 77225 - DNA, 637 bp, Arabidopsis thaliana landsberg
  unsure (1)..(637): unsure at all n locations
gtccctgaattgtcaacctcttcgttttctccatgtttggtcgatgtatcctggatgttcatattaagaaacgaatagatgaggtgtttgacaggtcaaccatggtcacagggttatagagcaggcaaattttaccttttcctgtttttgtgatctcttaagatctctccgagctcttctgtttccttttatctgcttctcctacatttaggatatttgcaagactttggttaggactcattggactaacacaagcatttgatggcattgtcttaaatctcacctgagatggcgtctctggatcttcaacttcttcgttttctccatttttggtcaatgaatcctagacnnnnnnnnnnnnnnnnnnnnnnaattaggtttccaacaaaccaaccatggtcacaatgcttcagtattgagcaagctacatttaccttttcctgtttttgagatctctttccctgtctttgcgatcttctgattccttttttctccttctcctacatttaagatttgtgcaagaatttggttaggactcattgacanaacaaaaagcactcgttggcaaattctctaatgtaacctgagatgctgtctttaatcgtaacttctttgcatcagtctaatctttcttctt

SEQ ID NO: 77226 - DNA, 578 bp, Arabidopsis thaliana landsberg
actggaccaacttgttaaaagcagtttaatatatgttttatttaattttattgaactcaaaacctttgagaacagggaagggccatatttttaaaaactactacaaaatatcagaaaatgccaagtgagtttgattcctataaatggattacacccaagaaaaaacaaaactgctatactgtatttttttttaaatacagggcaagcagtcaatttgattaacaacctctatatattctagtttttttcaaaatatatatattttgaatctttcaagaaaaaacaaaagaatttaaatatgagtaaccaataaaaacttttgaaaaagataaggtacaaaaataattcgttttttcataaagtaaaaaacatctttttataggtactgcctgattgcttcattctccctccttggctcaaaagtttttgctttttcaaaaaattaaagaagaagaaacatctcgtttccatggctttgcgaggagatgagcatgagtttatgaacttaagagaatggcatcgaagagctcgattaatccgcgaaaacccgagttcaagaagattcttaacttcataca

SEQ ID NO: 77227 - DNA, 537 bp, Arabidopsis thaliana landsberg
tgcacctggccccggccaaaggattaccgcgtaacgtttctgcctttgtgctggacatgttgtaccccgcaggggaaaggtgccgtattcccattattgccattaccggcaccaatggtaaaacaaccaccaccaggttaattgcgcacattgtaaaaaacagcggttacagggtgggttataccacatcggacggaatttatgtgcataattccatgctcacgaaaggcgatacaacgggtccggccagtgccgaattcgtgctcaaggacccaaccgtggaatttgccgtgctggaaacagcacggggcgggatcctgcgttcgggtttgggttttggccgctgtgatgtggcggtcattaccaatatccaggaagaccacatgggactttcagacattcatacgctcaaagacatggtcaatgtaaaagcagtggtggcccgcactgttaaacgcgatggatacacggtgctcaatgccgacaataaatactgcgtgtatgttgcggaaaaactcacattgaatattgcgtatt

SEQ ID NO: 77228 - DNA, 657 bp, Arabidopsis thaliana landsberg
acagaccaggaaagatgagaaaagatggaaacttttggtgaggaattttttgttcaccaagagaattggaggatctccaggctttgtgcaagcaattgatgttactttatgagttatgacattattatttgattgcttttagatgtagaaattacatatttatacatgtacataggttgcagattctttgtaaagatagattcaaaattttcaaacctaagatccaatctttggcccattcaatcccggcccaaaaccggcccggtctatcatagaaagttgagttcttcaatgttcttcatcattagtagttacagttgaaggagatgaagcttcaattgtttctcttccctccaacacattttgagtttcctccattttctgcaaaaccaatacataagcacaatgataagaatgtgagaataaatcaaatcaagacgtaatggcactcaaccacacggtctttaaggtcctcgaaaatcctatcgttattctctgtcgaaaagtatgttcaagaagagagcattacctttttatttaaactatgagtgttcataagctcatagagtttacgcatcatcgtctcatgttcaacctgaaacaaaagataaatcacaagtttacgatctctgtctttactacacatacaagctcatt

SEQ ID NO: 77229 - DNA, 565 bp, Arabidopsis thaliana landsberg
ctgcggaagtcacctgagacaacggacactccagctttcgctgtgtagagtttgatgaggggagtcagagtgcgcaaacgctcctcctcctctgctgtcgcctttgcacattcgactaccacgcataagcagatgtgaaagcttcgattcgcgaggcgaatacctttgccaaggaggaccacagcgtccagagtgaagaagagattaccacggtaggtcacctccaacgcggagagagtggacaagtgaagcggttgatcttgcacaaaagcaggtcagcgagtggtgaagtgggttcgcacagtctgtgaagaagcgaaccagcgagcagctttccaaagacccttctgcggtgtgcatagtcgcgcgccattgcaatgcccgacctgtgctcgttactcggcgtggagttgctcgacaacaagtcacgcaccgcatggcggccacactgccgatcgaattgtaaatgcgcgtcacattgaacagcgacgagatcgtggcaacgcccttgccaataggacccaccaacctcgcgggagtgccgtccaactcgagctgccgagtt

SEQ ID NO: 77230 - DNA, 670 bp, Arabidopsis thaliana landsberg
caaaaccagaaagggtagtcgtgcccagctatttactcgctgaaacttcaagtttcagaaaagtcaatactacataagggagatatgggtgtttcggtcataaaataaagtcatacctgcctctgtttctgttgctgatttttttgaaattttccgatcctgaattcccatgtgacgcgtttattctcgataagcttttcatcttctgcttctttttatcataccctaaacttactctatctatatatatttctttgaagtctacacactaacgacaaagttacattattcgccactatgtgatagtgatacgtttattctcggtaagctttttcttaatcttcttcgttctacgtttccaactttctttttcatttccgataaaatcaactttgcaaaaaaaacctctaaacttaatttttcgatattgttcctcagaagtccgaaagactttactgcatgatctcttttaatataccaaccaattaatactagaccctaccttcatttttactactatggttatgattgtttgcgagtaaatgatttgattaataggtaatatatgtatgtccgatgtatctgtacgtacaagataaagttggagcttgactcgagatttttatctgtttttatgacaaaataaattgtgtgtcttattaaagtgaaa

SEQ ID NO: 77231 - DNA, 339 bp, Arabidopsis thaliana landsberg
tcttattttcattgaaaaaatttatcctttatcaattctggcagcttgttatgttatttttgctgtagattcataacaggatgaggcttggtttccctcaagcttacgccacaagatcttgagccaagacttctgcctgcgaaaggccatgagagttctgtacatgagcgcttttgaagctagttcacgctgttcacttgaactctctgtcaccttgatagaccatgagaatgagatcgggttgactatgcacataagatgccatggacttaatcttcgacaacattaagagtttgtttgtatgcaagttaatcctttgtatttagttgaaacttgatc

SEQ ID NO: 77232 - DNA, 549 bp, Arabidopsis thaliana landsberg
gatcctcagattgtcaatattttactataacctatttttctattttcgatcaatagatcatttttgtcagggtttaaggggcattaatcaaaatgtgtaatcaatcaatgatgattctacattagcaacattctgtaatacagtacttaaaggttgaaccgggtcgaaccaagattttctcacttccatcttctggttaaataatgaaaccgtggtgaactgataaaacccaaaaccctcgccgctaaggctgatctccgtcaaacatgccaaagtgcaagaatctgttgctaacctcgaagcgacgtaaatccaaatccaaaagacaaaagctccatcagcatgaacctgagtctctgcttccagagaaggatgtagaagaggaagatgaagatgaaggaggcttcaagctgaaaattgcagctccttctcaagagcatggagttcaacccttgggaaacctatatttcaatcctggagcggtcaatgtgcgaaacactggattaggtaatctgcacatactctcagatgagctcgctttggatattc

SEQ ID NO: 77233 - DNA, 590 bp, Arabidopsis thaliana landsberg
tattagcctcaatcggtcacaaaagtttcgtgaaattgccgaattctctggaatgtttaaatattggtgaaataatgggcttaaccttggagttttggcttttaaataaaggagggagttcaatctaattttttgagtaaaatccgtagcctctgaagtagttcaagccgccatctataacacggtaaaaaagggccgaatgctaataatacctcaaaacgagtttacaatccaagccgcgcaggaaaatgtctggtatcaatttagctatgaacaataaacccttttgaaaaatgattcacgcttcagatgttgtattgttgaagttgccatcaagagtacgattgcttgttcatgatcccgcttaaacaataacaccttgtcgaagattggttttagctcgtaaaggcaagttgtagacgctgacaaagcacttaaaagaatttactcaagagatactggaagatccttgagatcctaaaccactagtcattattagggacgacaaatagaatggcaataggtaaaatcatgcaactggagtacgtgacttgctatcaaccttgcacaaaatttgaattttattacat

SEQ ID NO: 77234 - DNA, 548 bp, Arabidopsis thaliana landsberg
  unsure (1)..(548): unsure at all n locations
attccagcacaaatagtctacagtaagttaataacnnnnnnnnnnnnnnnnnnnnnnnnnnnnnnnnnnnnnnnnnnnnnnncagtccttgacgactttttcgaagccaaaactttccctctctttctcaaatccttctgagcagcctctgtgtcaaatccaaaaaaacccacttcaaaacacaacaaaacatacacaaccttcaccaaaacaaaaaacctaaaccaaattcttaccaagatcccaattgcattcaactaaagaagccttaacatctttaataggagcactagttctttccctaagttgcttaataagactcatttggtcagatacagcaggaggagcttccgaactaaaactccgtatgaaattcccaaaaccacgaacaaggcttgtgtaaccagacggtacagagcttttgtactgagacaaagtttcgaatttgcttgccacagtagaatactcatttccagaactaaatctactactaacactataataaaagactccaattggtcttctcactgttctagcaaacgccattt

SEQ ID NO: 77235 - DNA, 331 bp, Arabidopsis thaliana landsberg
gcggcggcgatcgctttcgccaccgcaggcatggtgttatggcgcgttctcatagatgcggattgccgcccgctgggggcgttggggagttgcgccgcgctgatgacggttcgtgccggccgcggtgccgccgccatcagcttgtccatgcatggatcgcagtcggcgccgatgacgatcacgagcgccgcgtcggcgatctggcgcacgacgcccggcgtggtctcgaacagatgcgggtcctgatcgggattgctcaggatactgacgaccgaaacacggtcgccgccgatctgggccgcgatgtcagcgtagaaattctccgccggac

SEQ ID NO: 77236 - DNA, 547 bp, Arabidopsis thaliana landsberg
agcccgggttttctcatcaaaccgcaaagacaagttctccggttttgagcgggcccgtgaaccataataaaggggcatcggagaacaaacccagaaaaaccatggcgggaatcgcgccgatccaataaaaatgcgaagtcatgattccatacttggcgcccgaggccgccatgccgagaacttcctgggctcccaagttcgccgaaataaaagcgatgctggtgatccacaaaggcatattgttgttatgaagaaagtctttggtgtccttcacccggcgttttaataaaaagccaatggtcagaacaaagccaaaataaatgatgaggattgcgtaatcgagtatccctaagttcatttgccacccggtattgtgtgttggggtcttttacaaggtcccgggcggttcgtctatctattttgccggttatttcgacaggccgacatacataaaactgccctctttgatcttctcgagaacaagcgctttatatgccccatccatggtgatgcaaccacgcgacagtccctgaatgtaattaccttc

SEQ ID NO: 77237 - DNA, 266 bp, Arabidopsis thaliana landsberg
aagcaagaccatatacaaatttaacttccactaagaaatgatatgatctattatagttcaagttgttgttagtgtggtatttttttacaatttcttagcatatgttacataccccaaatttgagttttgaaacacaccaaatttgaaagaaagaatcaaatctctcttcattacactaagaaaagagaccagactatggtaggtccaaatatgtaaaaggatttggatatataatcggaagatcattacatttggacatctatgag

SEQ ID NO: 77238 - DNA, 300 bp, Arabidopsis thaliana landsberg
tcataaatccgagcaaaacccccaaaaacacactataaaaaaggatacacgcaacacacgaattcctggttagaaaagaaaacattgcattgaacgaaaacaaacgcaagattccgaagaaaaaccgaccgaaaacataaaaaacaggtacatcataatgctactataccaggaccgaagcacaaaaaaaatataactttaaaattggtaagtagacacatgacaatgccagtaaaaacactgaaacaaaaacaaaatcgtacaatgaacacattaaagttaccaaaacgatctaacgat

SEQ ID NO: 77239 - DNA, 488 bp, Arabidopsis thaliana landsberg
aacaaagaacagaaatttttttacaaaacactcccagtttgctggaaaaagaaacctaaagtaaataaacggtaatcctgctgtccaaatgagcaaatcattgagaatagcgaaaaagaacaagaaaatcgaaaatagagtttaatcattaacataaaaattaattataaacattacaacaactatatataaacatagatgatgggatttcttctcaaactcactatactctataaacaaattaaaaatatatatagaatcacttacttataaaatggcagacaatatcgatttggagttgagattacaaacaaatcactctatgatcataaacaaaagactaacccaatctgatgtcgattataataataggctccatctaccaaaaagagagtttgaacaatttatacttccggaaatggaatgggaatcagtcatgaatccgagaaacagtgtcgaagtgatagctaaagatgtgaatgggaatg

SEQ ID NO: 77240 - DNA, 541 bp, Arabidopsis thaliana landsberg
cagaaagctattgacttctgctcttgaacctgcacccctgtgctcctatctcctcctccacccccggttaatatatcttcttttccacccccggttaatctatctcctcctccaccaccggttaatctttctcctcctccacccccggttaatctatctcctcctccacccccggttaatctttctcctcctccgcccccggttcttctttctcctcctccgcccccggttaatctttctcctcctccacccccggttaatctttctcctcctccaccaccggttcttctttctcctcctccgcccccggttcttctttctcctcctccgcccccggctaatctatctcctcctccacccacggatcttccatcttctactccacctccggatcttttttctccttctccacccacagtttcttgttcctcctcctgcacccacaattactcgttctcctactaatgctcctgctccttcttatccctaagccgctgcttaccacaagaaatctcccacgccaccaccctttaaatttgga

SEQ ID NO: 77241 - DNA, 552 bp, Arabidopsis thaliana landsberg
  unsure (1)..(552): unsure at all n locations
atcggtcgctggtccggtcgcgtgctggctgacgacgaaatcgaacgacggtacggcggttagccggtgaaaagggaaaggagcgagggatgagcagggaagacgagattcggcggacgatgaacaatgaggcgggccttaaaatgaacgctcggcaactcaatctggcgatttcctacgtgccggacgttcgctacctcctggagaaggtcgagcggctggaggcgcgatcggtcgccgagcaattcgccgcgctgaccgacgacgagcgcgcggaagtggtcgcgggctattgcagagcctgctggtgcaacgatccctnnnnnnnnnnnnnnnnnnnngaatgagcaaatccgaacttcagttcgtctccgccgaagaagcggcgaagtggccggagggctgcaacgtcctctgcgccctttccatcgacgggcgatcgctctttgacgcgagcatgaattggcacggacccaagggctacgaagaacgcggctacacgcatttcgcccgtctccccgacgccctgccggagttgagcaagtgatcgtc

SEQ ID NO: 77242 - DNA, 378 bp, Arabidopsis thaliana landsberg
  unsure (1)..(378): unsure at all n locations
tattccaacaaaatatgcggagcatttttataagtatctcgattttatgcaatatattaaaaaataagtcttttttatacggggtcaataaaatataatagatctgtatctataatgcaaaataagtagatagttagctaacaaaagcgaaataactatcggtaaaagtaaaaagcaaacgacgacgattggatttccttttggtaatagctactaaactaggataattttgtttatgggtcttttatttcaaacgccatctcaatgatgacacgtcctttagtcctagttttataggtcaaatgctacaacaaaaacatataactatggctttntgatttttggattcttagagcatgaccatcggntaactaccga

SEQ ID NO: 77243 - DNA, 234 bp, Arabidopsis thaliana landsberg
aagataatggagtttggttattcttttctttttcctattagatgtccagtgccctccgagggagggggtaatcaaagagaacgaggatcgccaccgaatccactccatcagcggccaccgcctcaacgaccgcgtcaagtttggatgtctgaccggaaaccggctcattggatcgaaggaatcagtctgtacggcagaaggccgctggtcggggccagtgcctccgtgccgacc

SEQ ID NO: 77244 - DNA, 458 bp, Arabidopsis thaliana landsberg
  unsure (1)..(458): unsure at all n locations
ctttatcgatcctctcatgcactcgaactcagattgcaataccaactcctttttgtcttttccttctttttttcgtatcactaaagttttgtcaagttctatcttgatagatagcgttcaatcttatcaatggaaatagtaatgtcccttcttttaggggtttttttaccacccacatgttaatattaagggtcaatttgcaagttgattattaagtgtcattatctgcaatgtatacgccatataatattagtcattgagtggcaatttctcattcgtgtctgatttttaagacaaatagaccgcaactttgtattttctggtaacctttactgaaaatgatattcggaatatatatgacttggcgagatagtattcacaacctttttttttgtccttcactcacactcttattgcgattnctattttaaatccgaggcggatcttacgataatata

SEQ ID NO: 77245 - DNA, 124 bp, Arabidopsis thaliana landsberg
ggataaaaatcgattagataaaaaacggttttcacgatttttgtttatataaacccagagacgttgcaatggggaggagggtaggaatatgtttctgatagctaacttacatgctgataactga

SEQ ID NO: 77246 - DNA, 444 bp, Arabidopsis thaliana landsberg
  unsure (1)..(444): unsure at all n locations
acgccggtgtccctgacattagggaagaaggggagaaatatgctttagccaatgtcgagaccacgcggacgggggtgaataacccatgctatactccacgaaaagcttaacgaccttaacaaaagggtnnnnnnnnnnnnnnnnnnnnnnnnnnnnnnnnnnnnnnnnnnnnnnnnnnnnnnnnnnnnnnnnnnnnnnnnnnnnnnnnnnnnnnnnnnnnnnnnnnnnnnnnnnnnnnnnnnnnnnnnnnnnnnnnnnnnnnnnnnnnnnnnnnnnnnnnnnnnnnnnnnnnnnnnnnnnnnnnnnnnnnnnnnnnnnnnnnnnnnnnnnnnnnnnnnnnnnnnnnnnnnnnnnnnnnnnnnnnnnnnnnnnnnnnnnnnnnnnnnnnnnnnnnnnnnnnnnnnnnnnnnnnnnnnnnnnnnnnnnnnnnnnnnnnnnnnnnnn

SEQ ID NO: 77247 - DNA, 240 bp, Arabidopsis thaliana landsberg
aggcatagcaactgctagcgtatatgcttttgccctgcaatatccagcgccccagatatcagaagggctaggttatcattcccccaatctacccacaccaagcacacaaactgcaaaagctccacccacgatacataaaccctgctttaaccttcaataaaaatgaaaaaggaggacgctgaaataaaaacaccgtcctttttcttttattgcaattaatgccttcacacctcaaaccag

SEQ ID NO: 77248 - DNA, 416 bp, Arabidopsis thaliana landsberg
  unsure (1)..(416): unsure at all n locations
cgccagcgccagcccgatgatgatatgggcgaaccctatgatctatatcatggcgcgcacggcgaaacgggggattgcctggatttcaccgggaannnnnnnnnnnnnnnnnnnnnnnnccttgtcttgtgcagtcttgttaccgcagcttggtcaaacgcgttgattttggcattacatcatcaactgatccagtgtctagagagaaaaggcctccagcagccattgctgggccttgccgccgacgctgcaccatgccagataagccgtgacctcaggttctggctcaaacacgcgtttgatgaccagttggccctgcgcgctgtagcgctctgtcagcgcctgcggcacgtaaccgacgcccaacccctgcaggtgcgcctgcaacttgctctgcatgtcagggacggtgagca

SEQ ID NO: 77249 - DNA, 560 bp, Arabidopsis thaliana landsberg
gcatacacgcgcaagtggatgtggactcatatgattctgggcgcggcgatggtggccttgtttttgtttcaggagctgttcgcctggtttggttggacggcggcatggtatgccgtcagcctggccgcaatgtacgggttcatgatcgagcatcagagctgccgcgtggtgctggccctgctactgctgggcggggtcggggcaggggtgttcttcatcaaccgcgtatttcccgctctcccaccgccgcgcgtccccctggttcctcaggtcctggttcccatcatcgtcggcctgaccagcatcacctatgccgtgactgccctgtgcctgctgttcagtgcacgcgtccgcaaggcgggccaggtcgggttttcgctgtggtgaggaaagatattttagatcttggggggcagatttggtggtgggagcggaggaagagtcgcatcactcttcgctcctcggcgcagcatgagcagccccatcagaaggcccccgcccatcgtgaacacacttgcccgcaaactaggacgcgctccatcattcagaatgacgaaatc

SEQ ID NO: 77250 - DNA, 463 bp, Arabidopsis thaliana landsberg
  unsure (1)..(463): unsure at all n locations
ctgaacacnaatccaaccttgccccaacaacttttttcaatatagtggcattcaagaatcaaaaggggtaaagttcaatttattttaggactgaaacaaacactatttatatacaaatatacaatgcacaaagtaattaaccgaaagaatagtaatatgcgaaccggtgatgaacttcaaggagatcaatctttttcaccattctatcaatttccatcttcagctcctacacaataatacaacctcaaaaatagtcgattaccatctgaattaatacatactgtacattttttttttaaataaatgaagaaacttacataaagaatatatatgaatatatagaatgaacctgcaagtatcgttctacttgaggcctctttgccacatagaaagcattactaaacttgccatatctatctataatcttctccatcctgaaaagttaattcacaagaagatattt

SEQ ID NO: 77251 - DNA, 509 bp, Arabidopsis thaliana landsberg
  unsure (1)..(509): unsure at all n locations
attatggatttgggcgatgacatgctgctgaattatgtgaaaacttctgccttgagcgagaaaggcaaagccgccatcgggaagctggtccggatgcgcgccgaattggctgatactcgcaacaaacgcactctgatggagcagcagatcaatgaaatcacccaggagcaggnnnnnnnnnnnnnnnnnnnnnnnnnnnnnnnnnnnnnnnnnnnnnnnnnnnnnnnnnnnnnnnnnnnnnnnnnnnnnnnggaaacagaagttgaatcgctccgcggccagatcaaacaactcaaaggccgcgaatccgagcaggacaacgacatccaaaaatacattctatcgctgaatatcgagtaaaccagctggaaatattcttccccgaaaagccccgcggaatttcattccccggggttttgattttattcctggctgaaggagctgccttgccggttactttggcgccgggctgctcgcggtgggaatatcggaaaggggcggactcgatc

SEQ ID NO: 77252 - DNA, 540 bp, Arabidopsis thaliana landsberg
aatgtacaatctcgctgatgatgcttttggtgtgtaatttttttaaaatattaactaacaacatttaacattttcagcatatattttgtgtttcttattttatgaataaacttttgcagcaaataaaacatttttcccattaggcgtttgagatttaagaacatattttatgaaaaactaaaaatataaatactttaaaaatatggctttttctttgcagttttttttttgacatcttttttttttacatcaatttttgcagttttttagatgtaaaacatacacaaaaactaaccaagatctaaaaagaaattgaaaagaaacgtcctctatgaaaaatcaacaagtgacaagacaagacaccagcaaggcagaacaatagaaaattacatgttcgcataaatcattgacactaaaacatccccacacaggataatagaatgtaagaagcagattacacgttgattctttcgaaaaaaattaccagttaacaaatgatcaaaaatgttatttctttttttggtgggaattttagtattg

SEQ ID NO: 77253 - DNA, 577 bp, Arabidopsis thaliana landsberg
acgtgtcagatacatgatggaattacttatctttgttcaatctggttaggatcagatattaacccaattgggaaggagtgccggtctaattcccgaacataataaaccaatataaatatccgaatagaatctcgattcctatactagaataaccagtaccaagtctgaaccaaaccgaatggtaacccgttggccggtctaaaaatttggaagccaaagtaacaaaatactttttctaaggttattataaacggttttgaaattgaaagtttttttcgtagaactaaatatttttgggaaccatatataattgaaccaaatcgaaaccgaaaattaaaatctcttaacaaaaccaaaatcccaagacccaaaatccgaatctgaatggatacgatccaaaaatgatccaagtaaccaaatgatcagaggcctagtaacaacacttttaaagaggaaccaaatgatcaggcctggttacaaaacacttttaaaaaggaagaggactgctctcacaacaaaataacataatttggagtcgaccagattaagataaatccactaaaaacaatacttattg

SEQ ID NO: 77254 - DNA, 552 bp, Arabidopsis thaliana landsberg
agacagaaaaaaccagcctcgcaaaaatgtaactaattcgcacacaaagtttatattgatgcccacagcgccacccgagcgacatcttcagctaaaccaacggagagtcaggcaccaacgctagaaagaccaatgacagaagactggagggagattggtgcatcgatgtctatgaaacataatgcctcatcatattagaaatcggtctcgagtcgtaatttagttgagcctcaactaaagacttgtggaactattttcaattacctggatcatccatgtgagaaagtaaccagttcattgcctcttcaaccccagcattggaagtatttatggcagcttttctggcagtgaagctggctaaatcccattgagactagctgtgcaactatctcctcatttgccacgggctgcgctgattccatcacttcttctggaactgtatacagaaaaatccaatagccaacacaatttttaggagactgagtgccataaagaaaccgttaaagggatgctgatactttttaatgattaggaaactgagtgctaattcca

SEQ ID NO: 77255 - DNA, 521 bp, Arabidopsis thaliana landsberg
gttaaagtaacgtcatttggatttggtttcttttgatatacttgtgtctttagttttttgtcttcatgcttctaatgctgaaagtttcatactttcagggatctgatgatgaggatgatgatgaagagtcttctcagcctcactctagtagccagactgatagttcaaaacctggttctcttccccaatcttcagatccctccaaaataggtactgtttcattttgtgcgtgtagtacttattgtgttcgggtttagtgccattgcaaagtagttaagtgatttaccctcttggtaactctatatgtgggatatgaattatgagatgcaatgtagatatcctaacattttgttggttggttatgtatgacagataaccgacgagagaaatctttaggattgcttactcagaactttatcaaactctttatttgctctgaagtaagtgagaagttcaaagattcgttttttggactaaagagttattcactaagttactaaagatttgtttttatgtgttca

SEQ ID NO: 77256 - DNA, 127 bp, Arabidopsis thaliana landsberg
attagcaaaagcatctgattaagcttctaaattcaaaataaactaccgtgacataaaccacccccagtgctccaagcattacaggttttttgaaagaatatttcaggatgaccttaaaacgctgtga

SEQ ID NO: 77257 - DNA, 541 bp, Arabidopsis thaliana landsberg
gacgccgggttgcatctggctggccccagtctgacgaaggtgtgaggccttagactgggaagggtgttggggctggggctgcggggtatagctgctgtagctattttgtgctgccggggggctctgggaccacatggcttggcttggttgttgatagctgtagccagcggctgaagggttgatggcaccagtagagcctgcagcaggtgttggttcacggatactcagcttggttgttaaaggcaaaggggtcatacctctaataggagcttgaccgagcgcactctgtgcattgatggactgggagtagggggctgccgtcatcatcatctgcggactctgcgatgatacaacaccaggctgggatatgccagcggcagtggtatgaggcgaattcgacggccgactggtgggaatggacgcgtcggcaggcgcagcaacaggctgctgagcgagagtgggctgagcgggctgctcgtggggctgacgccatatccgctggaggtaggtgtcacgcatgtcgcgttgctggttaacggat

SEQ ID NO: 77258 - DNA, 576 bp, Arabidopsis thaliana landsberg
  unsure (1)..(576): unsure at all n locations
ctgggtcaanactcttttaaacactttgttaggggtaataaatcataaaggggtcagcattgtctgactcttctgttgttacaatctacgttgcgaggggtggggcgtggaaccactcgactcttctggttatgagtccggacgagctatccgctgctctacctcgcagtgtaaatataagttaactattttatagtacgaaaaaaaaccatcctaatggatggtttatcccaactggcagaggatgaacagtcgcaggaaaactatttgttccatgctttatacacaagaaagccaactccgattaagagcagggtattgtggacattgttgcctccaaaccagttaggggatttgatgtcaaaaaaaccatttcccataattgtaatatttgggttaataaaaattgattaattcaaagataatgccttaatttaaaaaaaaatattttgaaaagcggtaatatatagctgctattcaggcctgcacctgtaaaatgggcgggtttaattgttttatatgngcaaatcagtcaatacagataaccaggatgcgattacagtacccgtagatgca

SEQ ID NO: 77259 - DNA, 276 bp, Arabidopsis thaliana landsberg
aatcaataaagcacattatttcataacggagaagaatgtcaacttgtaattctatataattaatgccaacttttaactcttatatgtccattcctcatttatattttctacaaaaaagttattgattttcatcttattgattttcttgttggtttttatatgttttgcaccatatatattaattaatgagagctaatttgaatatcacccaactgaagttctatagagagtcaaattttagtaataagcgttttctccgtattaaagcattaagtc

SEQ ID NO: 77260 - DNA, 313 bp, Arabidopsis thaliana landsberg
  unsure (1)..(313): unsure at all n locations
aaaaacaaaagcgcgggccgacaaagaacaacccggaccaaaaggaacaattttgtgttagtggaccaacaacagagcgaagaggcacgggagaaggaagaaaacccagcgacaaaccccgaacccgaaggaagagaggaaaaacgacgcccagacacaggaagaccacggagacccacagcaaggacaggacaaaaaacccgcagcgaaaaaagcagggcgcagccaacncagagcagacgaacaaaaagaaaaacgcacaacccccaaggagaaaggggccagaccaagccgcaggaacagaaggcacaag

SEQ ID NO: 77261 - DNA, 563 bp, Arabidopsis thaliana landsberg
ttgtggaaactgtggtgataaaaggcaatgggaaaaggcggtgtttgtcacgctattgtaagcgggaaagcaaaaagtaaaaagcagagggtagaaagtaaaaagcaggaagccaaaggatacagcctaatgccggtacacaaagcataaagcataaggctgaaagcgcaaagtcaggaaaaccaaaatagaagatctaaggcagaaagttcaatgccggtacataaagcaaaaagcgtagggttgaaagcggaaagcccgaaatcaaagctaaaagtctaatgccggtgcacaatgccaataccgaaagatcaaaaacaaagcaggaaatgcaaagcccaaggctgtccgcaacacatttatcgcggcaatctatccgcgtcaatcagctttttgctttatgctttttaccttttgctttttgctttccgcttcccctatctttgcacccaaatgaaccatttactagagaactgggagctgaaggcaaaagaaaagcagaaggctaataaacaattcctgcaaaagctgcaaaccaaaaggggcaaaggggttgaaaagct

SEQ ID NO: 77262 - DNA, 616 bp, Arabidopsis thaliana landsberg
ttcaagacaaacatatcaaaagtcatagcaatggattcatttgaataggtagccattgagaagacatggttcggggagtgccatgactgcttgtaaaatagatcaggaggatattgtgtaagcagtataatatattcaagaatcaaataccatggcattatcagtagagaggacctaaaagacattatatttggtataactatgttgagaaattaacattatagatgtggttctcaagaatgtgacttggaaaggtaaccgagaaaacaaaatagaagaagagatcgtgaaataagctggctcagctagaggagtggaatagattctcatttatctgtgcatgacttcattttacctcttctttctgagttcgagagagatgagcttcttcgatacgccgggttagcatagaaattccataatgtgaagcacttgaagatgcataatacgaggtaactgtcagctgagcaaactttggaagtgcataacctagcaagcattgtacacaaacaaaagttcaggtgctttcttcaagtaaacatacagatgtatctacatatataccaggtacatcatacaaagactacgtgcacaaagctactaacatacccactac

SEQ ID NO: 77263 - DNA, 582 bp, Arabidopsis thaliana landsberg
aggcgttggttggcatcgactttcggcagcacgccgatatcggtgctgcggattttcgccagcccttccggcgtcagcgcctggccgccgatatggccgacgatgccgctcagatcacggatcgagccgtcctcggccaggatggcgggcttctcggcgccaagcgcgccaatgcggagcagtttcatgaaagggtcttcctgttggcttcgcccatggtcgtagcggctaacatgttagtctgtcgagggcgaccttggtccaatccgttcgcccggcgcattatgccggccggatgatgcctttcttgagcaggatattgccatagagccgccgctcgccggtctggacgatggcatagccctgcctcacccgctcgtaaaaggcgaagcgctccagcgaggcgaggcccattttgggttcgtgcttcttcacgatggcttcgaaggcatccatcaccggttcgcgcttgttggcatcgcccactacctgcatgcagaaggcggcgtcatcgacgaaatcgtcgagcggcatcagcgtcaggatggcgtcgagcacgtcggtagcgctgaccccgtcgag

SEQ ID NO: 77264 - DNA, 597 bp, Arabidopsis thaliana landsberg
gagatgagaacattggttaatgcccgtgatagacttagtaggaaatatcaggtttctgatggtgatgaaaatagtggtgatgaaaatggagagggcaggttgttggtttcttgcaatgctctgtcgaaaaagaggaagactagagagtctttgatggacatggagaggagggaggataatggtgatctgcagctatatcccgacattcaactaccggttggtgatgtaactgtctcgaagagaaagggaaagaagaaaatggaggttgatgttggttttcttgatctggaaacctctgacataccgaaagcaagtgaagcagaggtggaaaccaaaccgcagaagaagccatttgtgttgatcacaccaacagttcacactggcttctctttctctattgtacatcttctatcagcagtgcgtatggcaatgacaagtttgcgtcctgaagattcattagatgttagcaaatctgtggcagtagagaatgcagaacatgaaactggagaaaatggtgcctccgtgcccgaggaggcagaggataacaagtcgccacagcagggaaatgggaactgccatcccttactatccaggaaa

SEQ ID NO: 77265 - DNA, 459 bp, Arabidopsis thaliana landsberg
tcaaagacttggcacaacgcctccttacgactagcttaccgcactactttacaacacaagctttgcttggatcatactctttgggtttgggtatgtattccaaaatggtccagcaaatacttttaagaaatttctttacgaaaatttatttttcgtaacaaaatagtgaggatatagaaacaattttaatttgttctcaaaatatttcccttaaataacaatttttgtaacaatattatattattatttaaaaatagttctcaaaaacattcacatccctccatttactttagagatatttagttttttttttttttttttgtaaccatgaactgcaaattaaagggctaaaaaataaaggctaaactgaatttacttaaaatagaagaaaagaagaaagtttaggaaacatttaaacatgctacaaatccctctcctttattctcatcaccaatttct

SEQ ID NO: 77266 - DNA, 506 bp, Arabidopsis thaliana landsberg
catgacggggtcgtgcgcgtttctgatgccggtgggcggctggcgtttcgtgaccagcggccgctacagcctgccggcggggctgggcctagcgctgggcggcatcccggcggtgctggtcgcggcctatgtggtcaagtcgctgccactggacgggctgcggctgctggtggtggtcgtggcgacctatgcggcggtcagcatgctgtggtcggcgcggcgggcgacaacggagggcgcttgacactgaccggtggtcagtagttgatgacctgaggtcattagcgggttttccgatgggcagaccagtgcggcggcgtctccagcccgaggcgcggaagctggagatcgtcgaggcggcggagcggctgctgcaggcccacgggacgcgggtgcgcgtctaggacgtggtgcgcgaggcgggcgtcgcgaagggcacgttctttctctacttccccacctgggacgacctgctggagaaccgtcgcgcgcggctggtggcggca

SEQ ID NO: 77267 - DNA, 536 bp, Arabidopsis thaliana landsberg
agattaacaacaaaagcactgtgaagcgatttttaagatgagtgttattttaaaaattttttttttttaccgggtaattgaagataaaacagcggggcagggaaaaattgataataagaaacaactttaatttttgaatagcgattcgtccatcgcataggaacatatgtagagacctacgatgacataggatcctcaatcaattaaaatagaaacatatactattgtctctgttcaaaatttataagatgtttaagaaggttctttattctttcttataagatgttttacaattctttaattatgcactttttttaatgattagttgaatattgtatacaactaactattaagttatggctagtttttaaaaccattatataaatctttgcacttttatctaaaacatcttgttttcgggacaaacaaatagtactaaatatcaatgctttgttatatcaatccaaatcacactcttgatattcattactctaattagcgattaacgacatactttttataaaattaaaggcata

SEQ ID NO: 77268 - DNA, 609 bp, Arabidopsis thaliana landsberg
tatgcttcattcaacaaaaagcgtgtaaggaaatttagattatagttcaaagataatatctttgaaatatatacaatattttgtgtacaattgtgatacacaatcacttggtgaaaaattgattatttgttccagtcgagtaaatcgatgaccaataaactactagatgatataatatataaataacaaaggttagtttttattttttatattagctttttgttattgaataatgattagatatttcgattattatatttttcgtgaaaactaaggaatatgttgtaatgcgtttgcacatatgaatatctcccttctcaactactcaaacgtcgatatcatggatcactttctttgcttagtttttttgtctttccagtttccacacctaacttttgtttttttagcattacacttacttatttacaggatctttaattgcataatctaccttgaaaaagtacactaataagtatgtcttgttttccctccatcaaagtgccatatatataaacaaataccacatgcatgtggttcttaacatgatagaaacatcttataaccattaaccacactcttgcatagacaaattacttgaagtaacatttt

SEQ ID NO: 77269 - DNA, 432 bp, Arabidopsis thaliana landsberg
  unsure (1)..(432): unsure at all n locations
ggggtggttgttttttggatgttaaaccaaacactttttgcttatattccgaactagacgattttgggattggttttttatttattttttaacttcaatatccccnnnnnnnnnnnnnnnnnnnnnnnnnnnnnnnnnnnnnnnnnnnnnnnnnnnnnnnnnnnnnnnnnnnnnnnnnnnnnnnnnnnnnnnnnnnnnnnnnnnnnnnnnnnnnnnnnnnnnnnnnnnnnnnnnnnnnnnnnnnnnnnnnnnnnnnnnnnnnnnnnnnnnnnnnnnnnnnnnnnnnnnnnnnnnnnnnnnnnnnnnnnnnnnnnnnnnnnnnnnnnnnnnnnnnnnnnnnnnnnnnnnnnnnnnnnnnnnnnnnnnnnnnnnnnnnnnnnnnnnnnnnnnnnnnnnnnnnnnnnnnnnnnnnnnnnnnnnnnnnnnnnnnnn

SEQ ID NO: 77270 - DNA, 294 bp, Arabidopsis thaliana landsberg
  unsure (1)..(294): unsure at all n locations
atcggagccagagcgaaagcgagncancacagggcaacagttaaccgcccccccacttgaacccgggcgagcgaactaagaccagggggaagctagggagaaacacacaggaggcccgaaccggctgatgtcgaaaaagcaccggaggagaagggggaaggggcgaaacgccacacgaacccaaagccagcaggcgccccccgaaacgcggagaggcgcagcacaagacgggacatccaggggaaaagcaccgcgccggcgcgggccgcgagagcggggccaaagcgaggcaaa

SEQ ID NO: 77271 - DNA, 521 bp, Arabidopsis thaliana landsberg
gccgtcggcgtcatcaccgacaccgagctgatgaccggctaccggcgattcgggtcgcgcctgcagggccacccgacaccggtgctgccgtgggtcgacgtcgcgagcggctcgctcggccagggcatctgcaacggcgtcggcgtcgccctcgctggaaagtttcttgacaagtccccgtttcatgtatgggtgttatgcggtgacagcgaaaccgccgaaggatccgtctgggaggcactagacaaggccggctactacgggttgacgaacttcacggtgattgtcgacgtgaacaggctcgggcaacgcggaccgaccgaactgggatgggatctggcgacttacgcgcgtcgcgttgaatccttcggcgcgcgcgccatcaccatcgacggccacaatctcgaggaaatcgaccgcgctctcaccgcggcgcgtgacgcgctgacgcccaagtgatcctggccaaaccatcaaggacgcggtttagcgagtcgaaatcgcgaagctgcacggaaggc

SEQ ID NO: 77272 - DNA, 99 bp, Arabidopsis thaliana landsberg
agcagtctataaacctcctaatctacctttaactcaatttattttttgaaggaattcgaacattactcattagggcggttacaaaaataacaaagatta

SEQ ID NO: 77273 - DNA, 639 bp, Arabidopsis thaliana landsberg
taccaggaaaggctagtgagacgattataatcattttctcaaatttttatttaagcctatcatttcttaacagtacatggagaagttgtcgtaatagatcgttagaatttaactacaatcttcaactccatgtaaattagtagtcccggtttgatttgttcaaagacaagtttttctagtcaacagtgttctgctttagaattctttggttatcttcatgaatgttttgggtcataaacggtttaagcccaaacccaagaccaacacttaacaatagatgatgaaagtttaaataggcttatatgtttatctatctcggcccacgtttaagccccaaggccaatgagatagcaacccaatcaacttattttatctaattaagttcatatcaagaaaattttcattattaaaaatgcaagcccataattgttacaataacacagatattatatataaaaatgtggaaataaatattcatttgagggttgagtaagcaaaatatacattcagaaatgttccgatttctgagtgtatatttatatggatttatagaataccaacttatacaacttagaaagtatattcattacataacgctttaacacttactcccgattataagggctgatgatcgtcatg

SEQ ID NO: 77274 - DNA, 630 bp, Arabidopsis thaliana landsberg
  unsure (1)..(630): unsure at all n locations
ggaacaagctgcttgctaaaaaatatctaagaaacacccaaaaacaaaaaggttacttctttttcattagttggttcagaagctagagtagtggatctatgatattttatttttccttcaatactacattagtatgtaaatattttgaaatataaagtatttgtaagcgttgagaaaatacattttaggttggtccaaaaaaagcatttgagtggagtacaagatatctctggttttacctctttttcattttattttcaaattccgatattacatatgacttaccaaaaataacgactttcacaatgcagaaatatatacacataattttttcttagcgaacccttgaaaatcaccaccgcactcatgtttacatattccgaaaataagtagtaagtaccctaaaaaaaaaattcccatcattgcataaaagagaatagatcacatcaaaactaaaccaaatcaaatcaaaccaaaaagccaaacctcatcatacctattggttcgatcttaacttcttaaatctaatcatacactatatataatnnnnnnnnnnnnnnnnnnnnnnnnnnnnnnnaaaaatagttttaaagatatcatgatgttgaatactagcgacatggacatggt

SEQ ID NO: 77275 - DNA, 118 bp, Arabidopsis thaliana landsberg
caagttacttctttttacgcccaaagtacttttctttttggcgaactcactgccttaaatgggaggaaggagagggaatatccctatctataggcttgacatacacatccctcaatag

SEQ ID NO: 77276 - DNA, 241 bp, Arabidopsis thaliana landsberg
ccactactcactaattggctcaatgactctttaaaaaatatatttttatttaatcttagtattcagaaattaaaccgtatcctttataggataacaaatgtagatgatgttaaatatgaaaaatggcatccacaactgtccatgaggcataaataactcgaaaacttaattaggctgatcttacagataactaattattgtcacatttattataccccaaagtatcttaataatgctcagc

SEQ ID NO: 77277 - DNA, 538 bp, Arabidopsis thaliana landsberg
gcctgtttcgggatctttggacaggatccgttccttgatcagtggatcgtcgcccgggcagacggtgtagtcgacgtcggtgacggggaagaactcgagttctggtttggccatggcgttatctccttgtcagtgctggatgtccgcgacatcgactgaatagctgtccaggaactgctggaccgactggaccgcgccgtcgtagtcgtagttgcgataggcatagacgcccttcaccacgaagggcgcgccggcatagaacatttcgtactgctgatgccgcccaccgaattccgatccgaggatgtcccaggcgagcttgaagagcttgacgcgctcgaccgacggcacacccggggactgcacatagcgctcgatgtcggcccggctggtttcgctggtgaggtccttgacgctggagggcaactgcagcacacccccgccgaccaggtcgcgcagaatcccgagcacccgtgggtaggtctcagattgcaggcccatcgatgcgtagaggagtgagcgccctggcagccactgt

SEQ ID NO: 77278 - DNA, 261 bp, Arabidopsis thaliana landsberg
  unsure (1)..(261): unsure at all n locations
nnnnnnnnnnnnnnnnnnnnnnnnnnnnnnnnnnnnnnnnnnnnnnnnnnnnnnnnnnnnnnnnnnnnnnnnnnnnnnnnnnnnnnnnnnnnnnnnnnnnnnnnnnnnnnnnnnnnnnnnnnnnnnnnnnnnnnnnnnnnnnnnnnncgacgccatcaactcctggacagagaaatactcgaccactcctcgccctgatcgacaaatgatcaaacccggtctacgagttcaacatgaggtcgaccataactctaacccgat

SEQ ID NO: 77279 - DNA, 293 bp, Arabidopsis thaliana landsberg
gagcattgcccatatagtggatctgcctcaaagccaagtcattttactgttcttattcgtgctattcctcagtctcctgaccagtcctacagcgagacagtgagcaaatactttacaaattactatgcaccaagctatgtgtcgcacctaatggtctaccgtgatggcttcattcacagactgatggtatgtgttttgatttaatcttgcaacatgctgacttgattatcagtcacttgtctttctgttatgattttgtcggattaggaataaatttttcagctaacacctct

SEQ ID NO: 77280 - DNA, 303 bp, Arabidopsis thaliana landsberg
aaaaacttaaattcttacaacttaaaatattctaaaattttaatttttaattaataaaagataacgattgtacatatttgcaaaatatctcgctgcttcaaatggacaatatgtatgtgtcttttttttatttttataatatgtttaatctctagcgacgagtctttcatccttacttttacttttcgcacggttattccaattaaacgaagttttataagaaacgaaactcaacctgtcaaaaagatgcagaatatgacccaaacccaacaatatatatataccccagctaataaatatttt

SEQ ID NO: 77281 - DNA, 476 bp, Arabidopsis thaliana landsberg
ggctgtgccacttctgatcctgtcatgtccccagccgctgccctttatcatgtgcttggagtgacaagatgcctgtcgtaacggtgccctatctgagcctggaggattcacgggactgacctgaaggactgacaacgccccatgccgtgccccgcgcgcatgcgaacatgtgaaaggccggtcagtttttgtgtgttcctgtccctcaagatcatttgtgacagcctcagaccgggcgccggctcaaccacccgatctggaacccgatacaaaagcaacaagcgacaaggtaccggcatccgcatgcagagatgccgccgcgtccagagatgtcacccaagggatccttccaggaggtgagcatctcgcctcgatcgaattgcttgctttttcgtcgagggagccttaccactacgacatgctactacaacgtagcacggtgaggggcccggacatgcattgtatcgatgctggag

SEQ ID NO: 77282 - DNA, 589 bp, Arabidopsis thaliana landsberg
  unsure (1)..(589): unsure at all n locations
aaccattactacatcgataccgcgaataaaacaaatttggaaaagtttgcatataatcactaaaatgcatctactatttggggcaaacagttacgagttttaactgtttaaggagtatgtctttttgaagggtcgtgactcgtgatattcacgtggaaaggttcgatatgattatttagccttacctataattgaatgaagaggaaagctactagtatttaattaggttgacttcaaaattgtcgactctagtgctaattatcgaagtgtcgtcttcatttttaagtccttccttaatcatttaaaaatattactagtataattcgtaataaatagattctccgagagtgtttgccaaatggcgagcctacgtagttaaaacggtgagagtaaaggacaaagaacatgatgagtcggtttgcatgcttcacgcttccacttcactcgccgttgttcttgttgcttgtcgncattttttatttttatttttatcttttgtaatgaaaactgtttatgtattaacagaaatccaaataatattcgcactttcaaatccaaatccanatcataattctcatagctaaaattt

SEQ ID NO: 77283 - DNA, 260 bp, Arabidopsis thaliana landsberg
  unsure (1)..(260): unsure at all n locations
tcggtaatctccccaaagcaaatgaacactgacgcacttctcacgggctgtgcatattttgggcagcccaggataaccaacggggatgtgaggggatcgatcnnnnnnnnnnnnnnnnnntcccgtgggaatatcggaacggtccaatataatgaagcttatcttgacctggtgactgtctctgggatagagcagagcgagatagtgatactccgggttcttagtactaatggaatatagcggatgtatgacatgctcag

SEQ ID NO: 77284 - DNA, 556 bp, Arabidopsis thaliana landsberg
attagatagtttgtataggttaactattaaaatttattatctttcagataagggtgttatgggaattgtgtgggggcgctataaagaagctattcaattctatttagaaatagaaaaaatgcagcctaataggtactctaccgcttctaatatcggaactgcctatgaactgaacggacaagcagaggaggctttaaaatggataaaaaaagcttatgaaatcaatccttcatctcattatggctcagagtggttacacgttaaaatattagaagcaaaaacaaaaggcgagccttatattactgataaatttttaattaatacttctttcgggttgggtgatgaaccagttactgaatttgaagaattaaaattattggccttggaagatgccttgatttttcaattgagtgaacgtatttcttttgtaaaaccaaaagacaaaatcgtcggcagacttttttttgaactggcgaatatatattatatagaaggaagatttgatagaagccgtatatacttataagcaagcagaagactatggttctaccgaccc

SEQ ID NO: 77285 - DNA, 601 bp, Arabidopsis thaliana landsberg
  unsure (1)..(601): unsure at all n locations
caacagaccttaaggatgagggatgcactatagctttttatatgttctctcatgtgaccaaggaggacttctgccaagcggggacaacttacttgcggttgtaagacgaacagaacatttcagctcttgtggaagagttgaagagctcggaaaatcaaagtaaagaaaggtgtaaaaagagaagacaaagcttataaagaaagtgcctatgagacttgctcctgagttctttatagatgccaatagatttacactctgctgacttttatcaacctaaggaaaaggagtatcgtcctatcaatatcaaacataagagcaaagttgaagaaaaagttgaaaaagaagttgaagaagaagttgaaaagtatgttcaagaatctcagtctgcgacgagtgaaggtataaaaccctctttttataatactttagaggaatctatatggaaataagaaaagctctatactaaactaggtttcttgatgatatgtctctagacgtcttatattggtagattgccatggtctacttgtatcgattgattgctgcatttgtttgctttctgagtngaaggtgggaaaggatagctgaacaaactatctga

SEQ ID NO: 77286 - DNA, 555 bp, Arabidopsis thaliana landsberg
aggggttaagccgcaaagcgcgtgccggccaggtcggccaggcgcgcgaccggctatatggtgtttatgccttgcgggggccacggcgaggggtagatcagcaccacgccctgtttgtccaggcgctgggccaagagcggccgggtggctttccacagcttctcggattcgtcgaacgacgaggccaggaacggcacgctgtcgatttcgaacatggggtcttcgttgcccatggccgataccagtacttcgccgatctgcaccacgccttgctgcacgccgcgcttgacttcaggccgcttgagcagcgtgctgttggacgtgacgttgatctgcagcgcgccctgggtggcggccttgacgtcgtcggcgaactggcgcacgttctgcgtcaggtagttggcatcgggctgttcggccgtcatggtccaagtggtggcggcgtgggcgccgccgacggccagcgtcgcggccaggcacagcaaggtcttttttatggcgtttcctcttgttgtcttcttggggggatagggtcagcgcgcggggcgcaggtca

SEQ ID NO: 77287 - DNA, 602 bp, Arabidopsis thaliana landsberg
  unsure (1)..(602): unsure at all n locations
cattgacacataattccagttttaactttaattataactgtacttttctgtcttcatcaccttaaattgtgtaagattaagataattgagttttcttgtagtttacttctttttaaaaaacaatttataatatacacacaaaactacatcgagattccctccttaaataaccgactcaaaaaatatccgaaatcaaaacgatttaataaaaaaccaaaatagtaagcaaaataacgaatcacaatatcacattcacactacctcagcttccgaccacctccactgttaataaactcaaacctctgcaattgtcttcttctcttcaactccatcatctccaccaccggcattctcgccggaatccaatggagcttaccagcttccatcgctcttctctcttattcctcatctcactaacattgatcattctcccgacgacaacaacttcaatcggagtaaactacggtcaaatcggagacaacctcccctccnnnnnnnnnnnnnnnnnnnnnnnnnnnnnnnnnnnnncaacaaaagtaaaactctacgacgcanatccacaaatcctcaaagctttctccacaccggaatcgaattcatca

SEQ ID NO: 77288 - DNA, 538 bp, Arabidopsis thaliana landsberg
gataacgcagtccacacgagatggctacttttttcagacctatttctttttactttattttttacgttgctctaatggcgcttttaattagtaatttaagctttaattagctttataactcaatcttaacgttttaatgatgatctttgatcagttatgatggttttgacaaagtaaagaatacacttgtcattctctgattccaacatggctttagattaattcatgctaacccaactttttcaataccctagtggaatgtccaagtcattcccttaatatcccatcagtattttgtttcacttaccttatgatataatcaacagaatatgttttcaatgttatcgtgtccaaagttgagttttagtgctatattttgtggaccaaccacaaatatcatcaaagaaactttggttttgaaatttattctaaaggtcataagctttcagagaaaacaaaagcataaaattattctctagatcaaaattttaaatatattcaaaactcatttttattacctagctaaaaattcacttgg

SEQ ID NO: 77289 - DNA, 126 bp, Arabidopsis thaliana landsberg
gattgttctttctattccattatgttgacaacgaatttttgccttttgataaagtccaccctacgtgaaacgggaccggggcgttactagcagcgcttgtgatcgacctgtttacttgcatacaca

SEQ ID NO: 77290 - DNA, 584 bp, Arabidopsis thaliana landsberg
  unsure (1)..(584): unsure at all n locations
tgcactcgacgtattagtaattagtgggcttactttttgaaaactagcttaactatgtctgattaatagtgtctttttcaacaacaaaaagagagttaatagggaaacccactttaccaaaaaaaaaaaaaagagaagagagattaaatctctatagtaacaatttacaaataaagtttattaatatacctaagaaagaaaaatgaaatgaataatttaacgccgaaaaatgattaatggaaatctttttatttatttatcaaatgaatgaaatcttttaaaatatgatttttatttagaaaaagactagtaaaacaagaaaaagacgaaaatatagaaaaagcaaacacagagcccacaaagcataaaaaatattccagaagaagaaacagcaaagaaagcttcaaacttctttctctatttgcctgcctctttttgctctgagctcacctatggaaaccctacaaagatctttctctcaagatttctgaaaatggatatataatctcactgatttttttttttttttttgttcctggtttcgttttctatatgtttatggatgagttgtantttccatctcc

SEQ ID NO: 77291 - DNA, 569 bp, Arabidopsis thaliana landsberg
  unsure (1)..(569): unsure at all n locations
tacctgttgcaggtgctggaagacgcaggccggtcagacgtggtattttatatgaacagccgggacgatgtaccgggctatggctaccaactggcacatggggctacctcgcttaccgaatcgtggggggcgctgccgtcggtatccaataatcatttaatgctggggcatttgatggaatggttttacagcggtttggcgggtatccgtccggcggcgggtgccatcgctttcaataagatcgagatcaggccggaacctgtgggcgatgtgacctatgttaaagctaattatcaatcgccctacggtaatatcgccagcaactggaaaaagagtaaggacagcttcgagttaaacgtagttatcccgcccaatactacgggtatggtatatcttcccgttagtaaaaccgccgnnnnnnnnnnnnnnnnnnnnnnngtcagcgcccggaaggacattaaatcatcaggctatcaaaatggtaagatgaagctggctatccggttcggcacctacagttcgtgggctaantatcaatataaagatgagaaagcngaagataaagattt

SEQ ID NO: 77292 - DNA, 623 bp, Arabidopsis thaliana landsberg
ctgatccgtgatccataaaatctatgtttggaaaattgtccaaagaatatcaaagaagactatgtttttgcaaatatataagatacacatctaaaaaataatctttaatgaaattgaacttcaaagaagacaatgttaagttttaaaatatatgtctaacaatgaaaaagttggtatacaaggttttttttactggttactcatactttcttttgagtatatgtaggattgatcaaacttaagacatggtcatatccacagtcgctagggcaaccaacactggactctcgacctgcttctgtccaaagttttagtcttcatgatttaaaatattatctctttattttatattataatgatctaatatatcaataaattttaaaaagaaattaatttgggaaaaactttaaaataagtcaatttgtttgtcctttaatattcattttttttttttttttaatcctttgctttttatttgataaggcaaattagttttgttgagttatatctctcatatttgttttttaacttaacaattgagtaaaacacgaatcaatttgaatgttttgaaggatatctaagattttcggcatatatatatatatatatggtatatatatata

SEQ ID NO: 77293 - DNA, 512 bp, Arabidopsis thaliana landsberg
tatcgaaaagctaatatttattcggatgctcaagaaacgttatgagaatatgtcctttgtcttggtcaaaggactaaagtcgtggggggtacatcaaataacactgacagctacgccgtcgttgaaaatcggataacgccaacatctaccgagccctactacagaaatcatacacttataatcagacaaaccatataagattgcctatgccaaaagaatgaagttacgtccacactcctcatagacagttttgagatcatccacttgaatgtaacggatttattctattgtttcgaactgaaacacgaaatgatgatgacatgatgtatggatcatttcattgtattcttcctatatgagattttaatatgtgacttcttcacacttggtgtattcactacgactagtaccgcccatttgtaatctcttgttcaatttagacatccagagatctataagtccccaaacatacatatctttgacgtactcataccaccgctcatcttaattga

SEQ ID NO: 77294 - DNA, 181 bp, Arabidopsis thaliana landsberg
aaaaaaaaaaaaaatatgaaaaaagaaaaatgaaagaaacaattaaataaacacaaaaaaaaaaaacaaaaaaaacgaacaaccaagcctacgccaacccacaaacacacaccacaggaccaagcctcaacacaacaaagcgacaccaacacaccgcgttcaaaacaaacccaacaaacaa

SEQ ID NO: 77295 - DNA, 408 bp, Arabidopsis thaliana landsberg
cattatttaacagcctccgaagaaaaatccatgttcatcgattcctcactatacacaaaaaaatctaagacattccatagaaatgttagttactgattcaaaattttaatatctgtaacaaattttacaaacctcctattcaaatcatcgtaaatacacgacgcttctgcttcacgatcgtatccgttattttcctgtaaaaacgaatgctaatatgtcaaaatctgcaaatcaatatccatgttcaataaacaatgctttcgttgccacgctcagatctacaaattcgattctcctcttcgatgtctattccgatgtagaacaacacgaatccgactaatcttgttcttcgatttgacactgcgcttcaaccagaagagaatctcgccgacgtactatatcaacact

SEQ ID NO: 77296 - DNA, 444 bp, Arabidopsis thaliana landsberg
  unsure (1)..(444): unsure at all n locations
caaaagtctaccaaaaatgtatatgtagatactacatgttcattttatatgagaaatngcgcatttcaataggcgtggacatatttttttttaaaatcttttctgacacaaggacatttatttgatcacttataagttgccacatatatatttgatgaaaaaaattgctaaataacgatacagtgaagattcattaatttgcaaaatgacacgatgatacaatcgtaaataagcgtggtttcaaaagtggtttaaacaaactagattagtgtgattttcatgtataacagtggcctttcatgctatttaatagactttttacgatattactactgcattatttttgctaataaaccttcaacatacatatagtcatttagtgcatatattcttttatatttgcttctacattacgcttttgatgtgataacaagaacatttgag

SEQ ID NO: 77297 - DNA, 470 bp, Arabidopsis thaliana landsberg
ccagaccccggggccgccacgtgaatgccggggcggtggtccagcaactttcttttccccttggccaggccaccgaccagcgcgccgggcaccaccagcgcggccagggccgtgcctgcgttccaagggattccgagtgcaccgaacgggacgatggccaggccgaccaccccgtacgtcagcaccggtccgaccgtcagcgccagcggccaggtcagccgtgcgccggcggcgacgagggtccccggcaggaccatcagcaaaagcgcggtgatcattccgaagcccagaagcactgcactagtatggctggctaaggtgacacggctcagcgtggcgggggagcgatccggttatccgagacattcaccccgatcatcagattgagaagttcagaggtgcctgacatggcctacgacgtcgcccggttgcgtggactgcacccgacgctcggtgacggctgggtgcac

SEQ ID NO: 77298 - DNA, 479 bp, Arabidopsis thaliana landsberg
caaccaaatcgttacaacagagaggagcatgagtaacttgtgccagattaaagattgtttgggaaatgtgacatagaaaacgagattgggcattttcagtctcaatggtttaggagacgcaacatttccattggactttttgacttgcaaaattcttcatatggaagagtcagtgaggcgtgaattaagggtttcatgaaagagacaaatgatcaaaaaaaaagaaaaataaccctcaaagacgtttgttacaaaaacgagttattggagattggtgaacactgatgggaaatctttacaaacttatcagtcttcttatcctctctaagtctttgtgatttgtgccccatagaccattgactcattccttccaccttatctgccacatactgtctcgacttgactcattcctggaagaaacgttcgttagctaatttcataggttaattcccaacaaaatttatcaattggagacaaaa

SEQ ID NO: 77299 - DNA, 506 bp, Arabidopsis thaliana landsberg
  unsure (1)..(506): unsure at all n locations
cgccctgatgaactcggagccaatgaaatgatgggcgatggtgttaatgttcaccatcttcctgggcaccaaaggcagaatgatgtgcggcacttatggaaaacttcccaatctgctgcctacttcgcgtaccattgaaacaaaggttcccgaaaccatagcgcgtgttccnnnnnnnnnnnnnnnnnnnnnnnnnncatgggtaagggctgctatcgcaggatatggttccgatgcagccaaaaacctcagctccaattttgatattgcaggcccgcttacagaaagcgtactcatgggcaatcttgccatacgcagctatcatgtagcccgtatcggcgccaacaacaaaaagacctatcccggcaggaacatcaaactgctgtgggatggaccgaatatgcgcatcaccaatttcgatgaagccaaccagtttgtgaagaggacgtaccgtgatgggtatagccttggtgtataactaatatcaatatacaagtcttacaatt

SEQ ID NO: 77300 - DNA, 500 bp, Arabidopsis thaliana landsberg
cagggacacccccggacgctttccgcacctgcgcggcgaactccttgaacgttttcatagatgtccagtcggggaaccgcgcgggcgagatggcagccgtccccggtggcaaccctcgcacttcggcgatccttcccacgactttggaacccggcaggtggccgccggtgccggtcttggccccctggccgcctttgaagtgcagagtctgaaccttgctgagattttccagactccagccgaatctgcccgaagccagttcatagaagtatcgcgaattctgttgctgttcttcgggaagcatgccaccttcaccggagcagatcccggtacccgcgagctgcgccccggccgcgagcgcggtcttggcctcctgcgacagcgcgccgaaactcatgtcgctgatgaacagcgggatatcaagaaccagtggccgcttcgcgctcgggccgatcaccgtcttcgtaccgacgtgctcgtcgtcaagcagcgggaacccg

SEQ ID NO: 77301 - DNA, 435 bp, Arabidopsis thaliana landsberg
aacacagccggtcactatttctaaatttaatgaggtgtgttttatattataatatttttgacacaaacgaaaaaggatgggctataaccatgtgattatattgatcaatgttgatagtactgcatcatgtgaatatattgctttgtatttagctaacatgttcctgatcatatataccatatctttaaatagttgttagtgtaggaaaatgatgattggtgttctcaagcggttttatcactcgagcttcaaagtttgaacatggacattcatttgtttaatttcttcggtctgttatatataacgttccagtccacaaaattatattttgtatagtatgcaagtggatggatttaaaatcattagattccgccgaaccaatggcaatgaggccaaacgttatgtagtgtggtggggtgcaactttatcaataac

SEQ ID NO: 77302 - DNA, 537 bp, Arabidopsis thaliana landsberg
  unsure (1)..(537): unsure at all n locations
gcgcggcttccaaaattatctgaattacgaatcatggctgcccgacgagtcgggacgctctccgnnnnnnnnnnnnnnnnnnnnnnnnnnnnngcccgagctggaaagactggctgcggaagacaagccgttcttcctcttcatgcggcatatggacccgcattcgccgtacttgcctcccgctccgtacgagcggattttctacgggcagaacgagaaaaatccggataatgaatcgatggagccggtgttcggcttcaagccgttcggcgatttcatcaagtcgtgggttcccgatggcgtcaccgaccaggaatatgtcagcgcccaatatgacggcgcgatcgcctacatggacgccgcgatccaaagcctgttcgccaagctggaatcgatcggcatcgaggaggagacgcttgtcgnnnnnnnnnnnnnnnnnnnnnnnnnnnnnnnnnnnnnnnnttgttatttcatcatcacggtctgtacgaatgcacgctggtcgtgccgctaatctgaaattccccgggcgtatcc

SEQ ID NO: 77303 - DNA, 651 bp, Arabidopsis thaliana landsberg
gaagaaatttccataagcaaatatgcatgatctcacataaattcatattcagtttttttcatgctcatttattcatttcattcaaacccagttgggcccagcttgcatgcattctcacaattacatacttacacacacatccatacttacatatgcatatggagcaaaacaccaagcaccggtgtagaaagaactcattcattctggatgaaaaatgtgctccaatctttattatatagagaaagagaaggcttctatctttttaatgccaaatgcattaaacctatgtttgtaagaaaaagctttgtttcttttaataagactaaacctgcctcgtccttaccatgggacctgttctgtcctgtggtaaggagaagcctgtctgctccttctcccctctgcgacatcttccttttttctctttccttctgcattctgcacattgctctctcagtatttgatgttacctataatttctaagttactccactctgtattctccttctgatctaaaaagtcttctgtctaaaaacttctcctcagctcagatcctctctcagctcagttcttctcacctccattcctctcaccccagtccctcagttctgactcttctctttgcctagccttaaacatcatccagaatacatg

SEQ ID NO: 77304 - DNA, 425 bp, Arabidopsis thaliana landsberg
  unsure (1)..(425): unsure at all n locations
acagcaaactcctgatattcgtggcttaagatctgaatgatttatacccagagcggtgcatactagatgacactgtggggtgatctatggggtatgcgagaacgaaactcatcctcacggccacctatcactctatttagggcttgacttatatataacggagaacccattccctcctgtgacagatacattctggcatgtacctattgatatcgatgacaacacaaaatcttatttttagttgcctttacgcttccacccgtggactatttagagggtatagcagnnnnnnnnnnnnnnnnnnnnctatagcctataactgacgagcttccactacactcgacatacacaaacctagctgtgtactctttatctgaatacagagtcatgcgtctattcagtgattgagactcacgcacttatac

SEQ ID NO: 77305 - DNA, 113 bp, Arabidopsis thaliana landsberg
  unsure (1)..(113): unsure at all n locations
cctgaaaaanatggggggaggatggatttaaaattagttttgggaccctcccatatcacatatatagaaaatgcgcgaaaaactacttaaaggtcagagattggagtcttaac

SEQ ID NO: 77306 - DNA, 341 bp, Arabidopsis thaliana landsberg
tagaataacactacgagctgtgttgtatgaacctaaacgttaggatcacaaaggggggagagttatttcatagaatggctcaagctgtctccgccataacattgtatgctttgtattgcatcaggtgtgctgtactgtggaagatccaaccactgtcctaccgttaacatcacctttgataggagttcagactcgagtcgctcacccgctttgctatccacaaaggagaattgctgaccttgttgatgatgcatgaggacggggactcatgactgcaggactccactgaagaagtactattgggtagaggattatcacctagtcctatacgactgagaatg

SEQ ID NO: 77307 - DNA, 440 bp, Arabidopsis thaliana landsberg
  unsure (1)..(440): unsure at all n locations
tttgcttttcttaataaagaatttgttcgtaaataatattgatacagttagatatatttatatgaagttaaacatttgttgtttttgttgtattttttaatttctaatgaaattggttgaccaaaaaaaatatctaagaaattaagatatgtagttggntctctcctcttttttttataattggggtttgaaattgcgaagaggtacaannnnnnnnnnnnnnnnnnnnnnnnnnnnnnnnnnnnnnnnnnnnnnnnnnnnnntcaaattcgggtgagccgaaaaattgaccgtgaaatgtttgccttgacggagaacttgttatatctaatttatgagttatttctaacaaagaaagagaggagacccaccttggccgttatgtattacctacaatctttaattacgtgtttcgcactcgcttacggaaattctgatgt

SEQ ID NO: 77308 - DNA, 478 bp, Arabidopsis thaliana landsberg
  unsure (1)..(478): unsure at all n locations
tgaatcgacacgcgatcttttttacaatacaaatcttcggggaaagtttacttatgccattgaaatggcggttcacattaccgaatattgcgtggaagagattttacaaatgcattattatgacctggtgcggccggactatcaacaggaggtgatcgcattttacaaaaaccaattgaggagttctacccgggnnnnnnnnnnnnnnnnnnnnnnnnnnnnnnnnnnnnnnnnnnnnnnnnnnnnggggcaaaatgtgcaattcctgtatgagggagagcgcttaaaaagcacccaggctattgcccgggatatcaccgaccttaaaatgacccagcagcacctgcaggattatacgcttacgctggaacggactaacaaagaactggatgagttttcttatgtggtgtcgcacgacctgaaagccccgcttagcagcatcacttaccttgccgattggatccgggaagaacaaatg

SEQ ID NO: 77309 - DNA, 346 bp, Arabidopsis thaliana landsberg
catgaatgtataaatggtccccaatcattctgttgtaagagatggtccaacagaaacctttcattcagattttatcatgcacattattatttctcattaaaaagtaaacgaaacaaaagttactgtgattgattaaggaaaatcgatataataaatctaatgacaaatttttccagggacgaacaacaaacgtataagctttaaggttgaattatttgaaattaaggaaatatactttttgtcaagttttaaggctcatgatttgtaatataagacatgtctaaacaatgtgcgttatcttttaattcgatcttgtactaatacctaacgtttttataaaatgatt

SEQ ID NO: 77310 - DNA, 497 bp, Arabidopsis thaliana landsberg
accccaatttttaaatctaatctcttgcattatttgacattgtctttatttttgaaaagtcattaaacgaatgacagaactggtaggccgaggatatattccagccgcacatgaatatatctgaccgtgttgagaggggcttgctgaaaaccggaggtaccgcaacacggacgccgggcgagttatgctccaacacaatataatttttttaatacaggattcttaacaccgtggacaaacacaacttgtcgacgtctggcttttctatggcctttctgaaactgttcacactgtttgtcctcgattaaagagggtattgctttacggaaaagcagtgttgcaagcttatggctgtgttgatctgtccacacgaaagtgtgcgcggcgcacggtagtgtggacgccacacagccataacttttttctcctcctactactacacctaacaattttaacccctgattcccatgcgtaaagttctactcttatttatatgg

SEQ ID NO: 77311 - DNA, 601 bp, Arabidopsis thaliana landsberg
gatggcctaggcgacgaagagcacttggaggataaggacggccgcgagaaaaagatcgcgtgcggcccgtgtgcgcagggccttgagcgcccacttggcgacgaccgccacatcgatcccgtacccgggagcgagcgctttcagcggttcgccgaagactctatccgccacattcgccgcgtacttcgtgtctacctgtgtggccgccgcgagataccgggtggtctcccggttggcggtcgccctgttttggggtggtgaagtcccctggccggtgctggcctcgggaaattccccggtcatccgatggccgttgacgcgctcgctcgatatctcaggaccccctcgggctgccttcacggaaatccggccccctcgtaatacgtcaccccgcccgcaccctcgattccgtttaacacgccttagatgaactggcaatagcgtgatgggtcaggtcttggtggcgtagacgacacaaccgcgtttggtgagcgtcagcggcagtttcagggatgccgtggcccgtgccgctgcctgcgggctgagcccgtagacacgcagttgcgcgatcgcgtcggattcggtggacaagcgtacgagt

SEQ ID NO: 77312 - DNA, 456 bp, Arabidopsis thaliana landsberg
  unsure (1)..(456): unsure at all n locations
ccaaaaccggcgttgtacgtgggggacaatatctctcctaatgccctctttttttacacacaactgcccacgctcaacaggatgggggcctactaattcacggactggaagccgatcgacgaatcggcattgttcgaccctaaagcccctttcacaaaccgtgacccgctgctgacagcgnnnnnnnnnnnnnnnnnnnnccaatggcttgactataattacatgccgcatcctgattccctaacagtgttcatttcaaaagagaaccgcatgttgaccaacaaagataccctctccgtgtccgcatttgcgagcttaaccgacctgctttagaaaaaaggcatcgaccaaacctgtctctaccttcttgtataatacaactatgccatcgtgatccgttattcctaaatgctcctcacgttcgcagatgccaaaatcgagcttgtggagatcgat

SEQ ID NO: 77313 - DNA, 505 bp, Arabidopsis thaliana landsberg
cacctgacaagggctcgctggtcgagcaggccacggcctgaggaggcggcgatgaatttcctgcatctgatctgggcggcgctgttccggggcaagaggcgcaccgtgctcacgctggtgtcgatcatcacggcgttcctgttgttcggcatgctcgatgccgtgcgcaccacgttcgaaagcggcagcaagagcatcgtcggcgtggaccggctggtgacctcgtcgcgctattcgatcatccagtcgctgccgcagtcgttgcagtcgcgcatcgccgccgtaccgggcgtacgtgacgtggcctatgccaactggttcggcggcatctaccaggacccgaagaacttcgtcttcagctatgcgatcagcccgaactacctggacgtctatccagagatcaagctgtcgccggagcagcgcaaggcgttcgacagcacccgcaccggcgtggtgatcggcccgctgctggcgaagaagtacggctggaaggtcggcgacaaga

SEQ ID NO: 77314 - DNA, 621 bp, Arabidopsis thaliana landsberg
  unsure (1)..(621): unsure at all n locations
aaacattcggaccaaaagaagttacaaaataagtttctatgttctgcttatttacgttttagttttagagatttatgtattagggactggagtgttttgttttttgactttacgtctatgtgctaaacatcggctgagataattaacttttaggatcttctgtcaatctttaaaattctattgatttttgaatgattgcaaagaaaacaaaacttgaagtgattctattaattttaggtttcatttaaaatcattagaattgaggatttagaaaaggtaaaaaggcatttggaactgtttagtgtttaccatgacagatgaaggagcacacacacgtactgttgcagtaaagtgaataaaagaagttattctaaacatgagagattcgtgagctttattttatcgtgccatacaaatatacaatcatactttaaccattgttctctgctatgagataagagatgcttctttctttctttctgcaagcattntatttaatttggactccaaaaataaaattaaacaccttgattagactgtttaagaagaattcagattaattatcaagacttgttttaagaaaagtataaaatgaatgttttcaggaaaaaatataaatga

SEQ ID NO: 77315 - DNA, 506 bp, Arabidopsis thaliana landsberg
atgtccgaaaggtgaattttacccttcccttggtttgtcacattcttaacataggaggtgatattaaaataagcttgtggttggggtaataattaatcaaatcatttggttcgtcacattcgattatatcagagtgaagataatcattcttactttggttctttattttgtgttacatgctgtgtaattcgtttgaaggttaaaagtttaaacactaaaaaaaaaactaatatgaaagggccaaagggcttgcctcatgcgtacggcacagacaagattaacgaactttctccacaattctctcgaatcctcgtgtagcttcaatcgtctttgatcataaagtcttctttcgatttatctaaataagtttttttttttaattttttttttcctatgtactatttatatatacagtatccgtaatagttcatcgacaaaaataaatttctaaaagacatcaaaatatatgtatatttgatgcagagcacctacactgggacttacct

SEQ ID NO: 77316 - DNA, 406 bp, Arabidopsis thaliana landsberg
actaatcatacaaccagaaccaatactagataaataaacaacattttagattttattgttgataaaattctataacagaagaacattgttcatatgcatgcgctttaaggacaaggagcttctatacatatacatagaaaccataaattacgtatttggataaagaatagaaaagaaaacttacgaagacatttttgttgacaaaaggcttcaagatttggctgagaagttgaggcatatttctaaaatctctaaactatgttgagttaatgatttttatcgaggatcttctcgtcttctctagacagatttatcttgaacaccaagttgacattaaagacgagaataatcttttttttgggtgaatacaagaataatctttttaaggaaatgaataattagacat

SEQ ID NO: 77317 - DNA, 578 bp, Arabidopsis thaliana landsberg
  unsure (1)..(578): unsure at all n locations
nnnnnnnnnnnnnnnnnnnnnnnnnnnnnnnnnnnnnnnnnnnnnnnnnctcgcgttcctgcacggctgacgatccggccttgcgtatgcgacactggtgcggatcatttggagcggacgcgtgcgcatcaacctgccgacctggctgaccctgtttcgcgtgttgttgctgccggtgatggtgctggtgttctactcgcacgacgcggtcagcgcgatcccgctgcggttcgccaacatcaccgcggtcgccgtgttcgcgctggcctcgatcacggattggctggatggctggatcgcgcggcgctggcacatggaatcggcgttcggcgcgttcctcgacccggtcgccgacaagttgatgatggcggtcgcgctgttcctgctggtgcagagccaccccacctggttgctggcggtgaccagtgccgtgatcgtcggccgcgagatcacggtatcggcgctgcgcgagtggatggcgttcgtgggcgagcgtggtcacgtaaggtgcagtggatcggcaagttcaagactgtgatgcagatcgtcgcgatcctgatcctgctgtgggacgcgac

SEQ ID NO: 77318 - DNA, 444 bp, Arabidopsis thaliana landsberg
tgcacccgactacctggaaagcttccggccatgtatataatttttgcgaccccatgattgataacagggacagcaacagacgttatcgcgtagaccacctgattgaaggaaaagcagaccagctggaaaaagaggggaaaaaagcggaggcagatgcattgctgcagcaaatggatgagctgctaaagacagatgattttcctggtttaaaaaaactgattgaggatcaaaatatatcctgtagtatctccggtacggccaactggacggatatacgccagtttaacctgatgtttgccacccaattaggcagtattacagaagaagccaacgagatttacctgcggccggaaacagcccagggcatttttgtgaacttcctcaatgtacagaaaaccggcaggatgaaaatacccttcggtattgcacagacgggtaaagcct

SEQ ID NO: 77319 - DNA, 560 bp, Arabidopsis thaliana landsberg
  unsure (1)..(560): unsure at all n locations
agaggggaagcagcggccaaggggaagccggaccacggttggactgtcgtacaaaagttggaaatagctgaaagaaacgaaaaattggcagcaaacatcaagagttacccgttcgcgacacaatgccaaccaacatgaacgtttttcctcacaagccagcatgcgacgaaacgtcgcacaaatgtagttttactactactcgtgtcgtgtaaaagcatgaaatgcgaaagcaaatgtagtaaaactacacggcgccggaggacaccccggtaatccaagaattcacgacgtctgcccataaggccagtcgcaatctcaggcaatcgattctggttgcctttccgccctggagcaagccatgcaagacctcgatccaatcgaaacccaggaatggctggatgccctggagtcggtcnnnnnnnnnnnnnnnnnnnnnnnnnnnnnnnnnnnnnnnnnnnnnnnnnnnnngctggccacccgtagtggctcccagctgccgtatgcgatcaccacgccataccgcaacaccatccctgtcacccacgaagcacgcatgcctg

SEQ ID NO: 77320 - DNA, 628 bp, Arabidopsis thaliana landsberg
cctgagattcaccaatgtcaacaagagacgaattcctgttttttgaaatgaactcttgctagaacctgtcgtggtcatcacgaaccgacaaagggtttctggggtgatacaaaatcactaacctgtttaaccaagttagctcattttcgaaaaagctacctgataactcttccaaaagaaattttaagagcgggtatcgctcatgcgcatgaagtaccattcccacatatctttaaaatccacactacacgaacgccggaacctctaggcgtcatttcaaaaatacacatctaccgattttcgcaaattatattttgtacaaacaaacaaaaaacttgactagcggtctgatgatgcgctaagcagtcttgtccagtggccgacgccggtgtgcttgcactttctcatcaatctgaaattacagtgaaatgctttaattttaaacagcctgtcgtttcgggaaacttacaagtatattctaatttatggtacttctattttgtaattattcttaataatacatctcggtaacctccttagagcaatctcttgctcatcgagacttcgcaggagcgacagcgaccttagcaatcgtttggtcccgacttcaacatcaaatcataacttt

SEQ ID NO: 77321 - DNA, 621 bp, Arabidopsis thaliana landsberg
  unsure (1)..(621): unsure at all n locations
tgtagttaggacgttaatgggtgtcattattgaagaataattaactttaataatcatctctactcatattacatttttacaggtatttaagccacggtccagagagcatatgtcaagcgacaaaggtgggtcctttgctaacgtggcagacaaaataaaattttgatcaaacgtgggtcctactaaggtaataggccttcgtattggcccattaaacatggagtacgaattagttttgacttttgaccatttttttttttttgtgaataccataataatgattatgtactagtatgttccaacgaaacataaaaccgctttgttgtaaagaaaaaatataactcactcatgtcaattacaaagttaagaagtttttattggtaaatagatattatgcatatttgacttgataattatatttttattaggggccaacgggccggggaccaagtataatcttaaggtaaaagtcggctagacttttgttttgggcggtggcttaattcttctttctttggttttcatccattgcagccaaaaatatnttggttttaaaaatccattaatatggcattcgttagctcattatcaaaaaattaanaatttgccaattcatagctg

SEQ ID NO: 77322 - DNA, 685 bp, Arabidopsis thaliana landsberg
accaactgttccgatcagttttttacctgcccacacgaaaacccatttcttagaatacacactcccactctttggattggatgactgataacgagccacgcctattgatcttaccaggctttatataggttgccagtccacaatcagccaatttgataggagacgaagaagacattgtggccataagaatgttgtccggcttccaatctttgtgaacaataccggtatcatgacaaatcttgaccacttgcatcaagtgcttgaagagcaccctatcacgaacctcagaataccttccatatttctcgagcttgtgaaaaagctcaccgactgcgcatagttccatcacaagatgcacagaatctttctcctcgtaaactgctttgagattcaccacatttgggtgcccagctaacttggccattatcgcaatctcgagtttgatactcttcatgtcatcttgtgttaccagtctgtctttagatatagacttacaagcaagcctctctccagttaacttatcagaacatactcttatcacaccaaactgaccccagcctaactgttctccaagtacatatctatcttttaaggtggaaacatttacagggtttagaatggttttcagaaggcttgcaactttatagcaatcgcagaattcaaataaaagcgggctcgtattctc

SEQ ID NO: 77323 - DNA, 534 bp, Arabidopsis thaliana landsberg
  unsure (1)..(534): unsure at all n locations
tcgcgttcgtcgagcaggtcgcgggcaggatttcggtgttcgacttttacgcgcgtcgagccggtcgcctataccggcgggtcccccagacgcgacggtcgctggcgccgacggctggctgtacgcctgccagaacggcggcgtcgtcggggcgtggcgatcagggcagccgcggacgccggnnnnnnnnnnnnnnnnnnccggcggcgacgtggaaaccctgaccaccaccgtggacgggcagccgctcggcgccccgaacgacctggtattcggcccggacggcggcctgtacttcaccgaccccgcgcagccgttcgacccggaccagccgaagcccgccggccggatcgccgtgctgcgccccggccgcgacgcggcgcagaccgtgctcgacgtcggcggggtctactgcaacggcatcgcgttcggcactgacgatcgcctgttgtgggtggagtcgtatacgcgcgcggtgtgcgcgctcgtcgacggagcgcgcagcgtgctgtgcgtcctgcccgagggcatact

SEQ ID NO: 77324 - DNA, 585 bp, Arabidopsis thaliana landsberg
caccatcctgtgttgacgttgagtttgtgatctttttcaatgaaaacaaatatctagtgtaatttttttttttttgacgtaattacttagaatatttaaaagggtctaattgcacaagttttatgccgccattatgaataatagcataggttggatattttagataatttgttgcaatatagtgatgtattgcaataaatataaacgtttaatcgtttaaacgcatcatttagtgtcataatttacgtaaatatcgtttttaaggttccaactgcacaagttttttatgccgtcaccataaatggtataagcatgatattttctagtataatttggtgcaatgcatcactatttcctaagtttttcaaaaacattatatacagaataaattcaaatagcattttacattatactaatttgttattaagcctttaaaacgcattatttagtatgaagctatcaatgtataatgtatcatatcatgcaaatggcatatccaaagggagatgaagaacgtcagaagcatgacgagagatgcttgagccgtgagggtagcctcgtgggaatgaatacacaaagctcaca

SEQ ID NO: 77325 - DNA, 606 bp, Arabidopsis thaliana landsberg
  unsure (1)..(606): unsure at all n locations
gggggtctctggcgtatacgctgggtgatacgatacgatttaccagcctttatcccttccggatcgaggtgacaggccgtacgaagttttacattaatgcctttggcgaagaagtcattgtggataatgcggaccgcgctattgctgaggcttgccgggaaaccggtgcgatcgtgaatgattataccgtcgccccggtatattttaatgaacaaaccaacggagcccacgaatggctggtggagtttgagcagccaccaccggatctgggacatttcagtgcggtacttgacaaggctctgcaggaggtgaattccgattacgaagccaaacgctataaagatatnnnnnnnnnnnnnnnnnnnnnnnnnnnnnnnnnnnnnnnnnnnnnnnnnnnnnnnnnnnnnnnnnnnnnnaagctgggagggcagcataaagttccgcgcctgagtaatgatcgcaagtatctggaagagatccttgccctttgccctctgccttcctgatcttttacccctatcttcctgcttttgaggaatgcttttcaaggacaaccgctgggtcccgtagcggagaatgattagtttggttcatggaccgtatact

SEQ ID NO: 77326 - DNA, 637 bp, Arabidopsis thaliana landsberg
  unsure (1)..(637): unsure at all n locations
acaaaaatcataccctaaccgtataactgtatttcacactgttgaaaatatatgttcaattcgatcttgtgacatctgaaatctcctaaaaattatgcatatattgcatgaagctgatgtatgcatgattgcatatcttggtattatatattgtattgatggcgtgtggtgatggaatttcatggcgtttggtgatggaatgcggttgtgtatcggagctgacttcagcaaagttcaaacttcaaactgcagttttccttcatagctcagtcacaaaatacagtttgaaactactcctttttcatctgttaagttaagacaactaatggttcttgattttgtaattttgtttcttggatttcatcagatgggaagaaactagtggaggaaatatacttcgaactcctggattgcaatttccaaatggctatcatgttaaactcaagaagaaagagatctagagaaagaagaatttgaagcaaaggaagaataataatctacaagacctaagatggatactataaagtgtgtactatanaccaaataaagggaattatntccaattacagcttatgttttacattaatacttaaagacagtttgagaaatatggtgttcaaatgtaaaaataatacac

SEQ ID NO: 77327 - DNA, 336 bp, Arabidopsis thaliana landsberg
tttactatagatataacatctcaaattttgactttattcaaaaccaaacaaaaaacctggggtctagtgctataatcaaatatgggttaagagatctaccacaaaaactcctgaatgcccgctaccccttaaattagattatctgtcttgacccacagggccaactaaaatagagggtcagcagaacatgctcttttcgagttttatcatcacttttcttgaataaagggtgatcctatataatctcaaaccttacgtaaggaattacataaaacattctttcaccaactgtgtgaattacgatggattggtcacccccatattaagtgatgactg

SEQ ID NO: 77328 - DNA, 604 bp, Arabidopsis thaliana landsberg
  unsure (1)..(604): unsure at all n locations
tggcatgaagaaccgactaaagccatgaagaaggcaaatccttctgccgttcaacctttgccgcggattcgaatccgacaaatgggcacgaccacgtcggttttcgatgggcaaacggtcgtcatgggcggattggtgtccgaggacactgtggtcctgaaggataaggtgccagtgttaggggacattccattggcaggacgacttttccgtagcgaatcgaaaagccaggtccgaaaaaacctgattatttttgtcacgccccgtgtcatcacttcggcggggcaaccggtgcattcggatgatgagctttcagctttgcaaaagattaaggataaataaccagtgcctggacttcggccataatgtttaagcgtccggccaagcaaatataaataacccactccgtattccagcctgtcgactgcaggttggtagcaccctcatctctgtctggctccgccaagtgcttgattttcctggcgcctctcgagttgcattcagggtgaaagacgaaaaagaattttntggttaaccaaagtatgctggcgagcgtcgataaacataatacatgggtcgaatgctcggccatgagaagcatgaa

SEQ ID NO: 77329 - DNA, 608 bp, Arabidopsis thaliana landsberg
atcttaattcatagaggttttactgtattatgcattgatatatcattctttaagatgaattgtgtaatatactaattttatcggatttaacctaattaatctggactaacatattcagcataatcaatcttgtatacatattattctagcagaattaatcttctcgatatgttgttatttttgtgagttttgagcaatctattaagaaaaagtgctgtctatatgatgctcaatcatagaggttatggtcaaaactaacatttttaacatttaagtgtagaggagaaaagtttatagttaagtctcagaaaaaatcatgtcaacttattccattgatagataccatccatcgtaccaccactgcccgcgacatgcaaaccttctccaaaagtaaagcgttaagtctcttaggagtttaaccaccttttgtgaattttggtgtactccattttgcgtcttccatagatttctttcaataagaaagattatgataaaaaaaattaggatttgctttggacttatcgcttgcaatttaacatgttcaaatacgcataacctatatatagttaacatataaagccacatgagtattgatactaatttcttgg

SEQ ID NO: 77330 - DNA, 631 bp, Arabidopsis thaliana landsberg
  unsure (1)..(631): unsure at all n locations
attgttatgcacgagatatctttattatataaatagatttcatttactctgatagcagttataaatgctttggtttggttttaacagacagagattcagaagcttattgatgatcagaaagaggtattaggttccaaaatgctggaatttgaactggaatgtgaagaaataagaaaatctctggacaaggaactccaaagaaagatagaagagctcgaacgacagaaagttgaaattgatcatagcgaggagaagttggagaaaaggaatcaagcaatgaataagaagtttgaccgagtgaatgaaaaggagatggaccttgaagcaaagttaaaaactattaaagaaagagaaaagatcatacaagctgaggagaaaaggttgagtttggaaaaacaacagttgctttctgataaggagagtctggaagacctacaacaagagattgaaaaaatccgagctgagatgaccaaaaaggaagaaatgattgaagaagaatgcaaaagtcttgaaannnnnnnnnnnnnnnnnnnnnnnnnnnnnnnnnnnnnnnnnnnnnnnnnnnnnnnnnnnnnnnnnnnnnnnnnnnnnnnnnnnnnnnnnnnnnnnnnnnnngaaaatctgaagcaag

SEQ ID NO: 77331 - DNA, 160 bp, Arabidopsis thaliana landsberg
tttttccctcactttcccggctatggccgctggtgatgaccagtcttatacgatcttctgcgtagatcaacattttgtgctttgcctgtaggacattcatggcgttggcattgtctcaaacccgtgtcgtgcgtgagactggactcaagtgcgccatctg

SEQ ID NO: 77332 - DNA, 566 bp, Arabidopsis thaliana landsberg
agaaagtggtgttccggtcaccggcggtttttgtgtttcatcctgtaatttttctttctttcggggtcgggtttctctctttcttctcagttaatccgagaggtaggatgcagttttgttttctttttattttactcctttttagtgatcaaccttttgtatacaacttttaattaaagcatttagttggtgggctcattagttggttatccttctgtcttttgttctttgaattgtaacgcaagaataatatgaagaagataatttacaaagcctcacattcacaagataaggagagtggaggactcaaagcagcttctcctcacaattgggtttacaaatatgagctacattgcatttacagatgtgatcaagatcttcgtagctttatgttcttgtcctcgtcttctctatgtagctcttcaggtaatggtggggtcattcacaatgcttatggttttgaattgcaagccttcgccagagtttggtggagttaatcaggaaggttatcatgcccagtcccattccgctgcactggtggatcagcaccgttaggcatttcatga

SEQ ID NO: 77333 - DNA, 612 bp, Arabidopsis thaliana landsberg
  unsure (1)..(612): unsure at all n locations
atgtagctttatacattttcactctgtagttgattactgatagcatgttggtgaacagcatatttgcttatgcattataatatactttatgtagatgacatctaatcgttataacaagtattcctcttatatacaaaaaattgaaactcacaaagataaactaccacattagtaagttgtaaagtcagccttcaacaatagaaatacctgaactatatttttctactctatcacgtagactatactaacttcacttgtaattcatgttgattaaggaaaaatatgagacaagagaattttagtatcctctaaaagtaagaaataatgtataatttggaaaagcatctaattgcagttattaattttgagagatcatatatatcgtggaccatacttggggctgagaaggcaaaaattgatccggtcatggcctttccttaagagttcatagtattgagagagggaaggagtatggcatagttactgaagcatctgtgataggctaggctaactgctatgaaataactctntaacctcaatcatttaaaaaaaaaagtacatcacaccaaatagtttaaggtggatgctagatgagacatggagttttaatct

SEQ ID NO: 77334 - DNA, 404 bp, Arabidopsis thaliana landsberg
  unsure (1)..(404): unsure at all n locations
nnnnnnnnnnnnnnnnnnnnnnnnnnnnnnnnnnnnnnnnnnnnncatgttaaatggctcgaacggccgatcccttcggggccgacaatgaatggggtgaactcgatctctgatctgtgcccatgctttgttaggcgctcattatattttccatgagcaacctaacctggctgaagaagctgccatcactgtagggtgatggttctcaaaagaggacctatggccctcggccgccgatcacagtgatgtagtgatctcattgatctccctgatcgnnnnnnnnnnnnnnnnnnnnnnnnnnnnnnnnnnnnnnnnnnnnnnnnnnnnnnnnnnnnnnnnnnnnnnnnnnnnnnnnnnnnnnnnnnnnnnnnnnnnnnnnnnnnnnnnnnnnnnnnnnnnnnnnn

SEQ ID NO: 77335 - DNA, 463 bp, Arabidopsis thaliana landsberg
attgggtttgataaggcaaacacaggaaaaccattaaataagaatactatattgttgttgttattgttagattctctcaaccatcaatccatcctctactgctgtgtaaattcttgtaaccttttatgagggggaccaaggaccaaccatattttagggtatggccaaaataatttaaatccaacaagctttaacaacaaattatgggttaatcaaacaagaaacgtcaaagtaattataacccctcaagtagctgaattggggatcgcctagagaaaaagttcttcaatatcgtacgtgagtttgaatctcaacggtgggaagagggctgatttaacttgttatggacatctcgagaaaattagggaccaaaagtttggttttttttttcctaatctaaaaaaacatcagaatgcaatcatttatttagacgaaaaattagaagatgtcggattaacatcga

SEQ ID NO: 77336 - DNA, 645 bp, Arabidopsis thaliana landsberg
cttaagtcaagcgttggaccaaattagggttgtagtccaattcagcattgaaaattaatccggctaaaaaacacaaacatccaatataacgaatagacacgtagttaagacttgtaaatatcttaagagattagacaaaaaccatacagttccattccattgagattttcttcattcagaagtcgacaccaagtgtataaatgtttaaaatgctaatatataaagtaaagttctcttcatcccactgatttgttcaggcttgccggtccaactcataaaatataaaaataggcatataaaaaaaaactaagaaaaacgtggcctacgcttttaaatgattgacaaggattggaatatcgtttagcttgtgggttcggttcagatttcaattttggttagtgcatccactaaccatcgtccactatccacagtccacactatccaatgattgaccgcgtgaattagactaaaaggttcatacccgtgacgcggataattagcgtgagaaggttgacttgtgtagataagggtgttgctttctacaacttgatcaaatcactaatttccaaataaaccgcgtcaaaccccaaaaagtaggaggtatgtggttatatgcacatacatcatgatcatcataaccacctc

SEQ ID NO: 77337 - DNA, 652 bp, Arabidopsis thaliana landsberg
  unsure (1)..(652): unsure at all n locations
aagctattgttcactctttcactcttgtgttgaagaacacattgcttcttctctgccttttnnnnnnnnnnnnnnnnnnnnnnnttcaagattagataagacaggtttttggttttgtttgccttatgagaagctcaaaatgttgattgtatgaaattacagttactggtgacattggcaagtacattcagatatgacaaagataggactgatgcagaagtagctactattgaggcggctatgctacgtgaagccatagagaagaaacaattagatcatgaccatgtcctgtacatattaggaacgcgtagtatctatcagctcagagaaacttttgttgcttacaagaagaattatggggtcacaattgataaggttcagattctcatggtttggtttggtgactttggtctcatgtgtttggttttcttttcttggattataacatgttgtgttgtatggacaggatgttgatggatgtccaggagatgctgatctgagaagtctattgaaggtggcaatcttttgtattgatactcctgagaaacactttgcaaaggtactacactaaacatttgagcaagactagagtcaaaaagtatttttgaaggtgttttggttgttccttaaggttttgtgtttaatttggcag

SEQ ID NO: 77338 - DNA, 615 bp, Arabidopsis thaliana landsberg
aacacctccctgaaagtttgttatttaattcaaatcatataaacaattgaagaggaaagtaaagaaggatgtaatgtgtttaaacatattatttaattttatatcaaataaatagttagattttttacctatgtagatattagatttgaattgttacggcggttcgggtgcacaaatacataagcgttctagtttgtattatttttaggataaacaacaaaatatcgcagagaaacattatttgtaaatcggtttatgattggtccgcgatagttttcttatttttgaatatgcaccattatatgaacataattcgtgaatggtaaataaaaagtgatttggtttacaaagagaattatctgccttaatcgctgcaactatttggacccattaattcatgtgtttgttaaagcttttgcttattatttacttgctctactaattagtttgatttcctgagttaaacaaatgcggctaacaggttagtaagcgtttcagattacaagtgacagattcataattggttgggaatcgtaagcaatataactttgccaaacccatttattattacccgactaattaagcccaacaaatgtacatcataaaatgaacgct

SEQ ID NO: 77339 - DNA, 545 bp, Arabidopsis thaliana landsberg
gccaccggctttccgctggccaccattgccgaggtgtttgacgaggtggtctaggggcgttcggatttcggcgtggtgccggtggggaactccggacagggcacgatccagtccacgctggatctgtttcttggctcgccgctgaaaatctgcggcgaggtggaactgcacgtgcaccagtacctgttgtcgcgcggcggccatgccgaagacatcgaacgcgtgtattcgcacgcgcagtcgctggcgcagtgccgcggctggctgcgccagaacctgccgggcgtcgagctggaagcggtggccagcaacgccgaggccgcgcggcgcgcgcgcaaggctgacgatgcggccgcgattgcgggcgaagccgcagccaacgtgtacggtctcaagatcgtcgccggcccaatcgaggatcgtaccgacaacaccacgcgtttgctggtgattggccgcgcgctgtttccgccgtcgggcaacgatcgcacctcgttgctggtgttcgtgcgccaccagcccagcgcgctgtaccgggtgctgga

SEQ ID NO: 77340 - DNA, 455 bp, Arabidopsis thaliana landsberg
cacactgctctgtccggatggtaccgggcccataaggcttccatttctcaatctttgatcacacaggcatgggcgcccgggcatctggagggatatgatctggcattgaaaaacgcggaccacatcatatagagaacaagcttccatcgagacggaaccgcaacctgctcttgtgaggcagaagatcgtggagcggaaggtgttatcaaaccttccctggtctcggctattactgcgtgacgtctttgctgtgtggactctctaattatcaaacgcatgagaactgaacactatagcatgagatctatttgcttgaactaatcataacaggcccaggacatggcatcaaagcgcatatgagtctaaacaccattgagaaacctgagcgtactattttatccatcatctgaagtgattccatatcatctaggatgattttgatgccatgcctactg

SEQ ID NO: 77341 - DNA, 597 bp, Arabidopsis thaliana landsberg
ctatattagacagtcattaacacctatcagactatcactcattagtcatttgtttattgggggttgtttttctgtatatatatgaaaaagttgggtgaatgtgaaagttccgattattctatttcaacaaaacttagggatccttatatataatttttagttactcaaagcttaaacttaattcacccaagtattatttcgaatacactagttgcactcaaaacagtaatcgacatagtgtgtctagaaggtgaacgatactttaattttcttaattagcagacacttagttaaatattgttttccagttagtctaaggttaagtagtttagcaaaatattttcaaatctgttctcaaataaatgactgtgttaataaaaactaattaatggaatagcctgaaaatagatggttaagtagtgtgaatttgaggtataatcataattaaattttatacttggccaatccttcataattgatgcaatgttaccatagagtatacattggtatctaaaagtaaaaaataattcttttttcacaatcatagaaattcacatgtaggacatcttttacatatcaatcatacgtgagagatat

SEQ ID NO: 77342 - DNA, 596 bp, Arabidopsis thaliana landsberg
  unsure (1)..(596): unsure at all n locations
tgcgcttatggcangattagaggcgcaaaatgcgatttgttatgtttcagagaaagaacttcacaagaagttgggggaggggagaggagctggagaatctagtgaagcctgagttagagaaagcaaggaaaagatcaagacttttgctgaatgatgaagatgacttgttgctatacgatagagacaggaacttatctctgtatcttccaggaacaagtgaagagacgtcgtcacacaaggagttaagggtacattttgaagaagagcataaagcagcagcttctgaggctgaaattaagaagcattgtgaaatagaggaggaggaagaggaacagaagactccagaggtatctgagaagtctcttgttgcgttggaagatgataaaccggttgaagaaaagccagatgtagaagaggggaagagaagcaacagaagctttagagcattccatgttttcaaggcacctgagaatgaggaagatgaggaaagcatgagagagcgagggaaaggaaaccgttgagaaatggttccttattttactggagaacaacagcaaaagcgatccacacgatcttcaacagagaaagcatgagat

SEQ ID NO: 77343 - DNA, 575 bp, Arabidopsis thaliana landsberg
  unsure (1)..(575): unsure at all n locations
taaaatattctcattgaagcacgcctggctgcaatatccgaggcacgttccagtatagtccggtgcgatttggggttcggaccgccatatgctccggggaaacacctcataatgatgatctttgttgcaggcagcttttttcgtaccaatnnnnnnnnnnnnnnnnnnnnnnnnncaagctgcgccgcggtatggcgggtcggatagttcttttcatcaatgttatttgtgccgatctccagtaccagtacttttggcgactggccgtccagttcaccgttttcaatattccacagcaggttttctgttcgataaccactgaagccaaggttgatggcattgcggggttcaaaaaattgtttccatacagattggtattcgggcttttcaaagttattggtgatggaattgccgagcatgatcagatcgaactttttctgtgctaagcgccttaatttttcatcatgacgttgtctgctgtatccttcggctggaattgccgcaggattggggtttaactggcctttactgtatccagtccacgtttttttgtattctgcggagcttttaatact

SEQ ID NO: 77344 - DNA, 644 bp, Arabidopsis thaliana landsberg
tttcttttttatcatttaaatttaaaaaatctatattttataattgtaagatattcaacattataataattgtgtttatattggggtaccacatatggcatattgtgctataatttacttctattttctctttattttgataaacatagtttatatgacattatttataatgttattctaattaaactagatttcttactttgtgcttttcaaatagtgttcctttacatgttaaactagatttatttattttctcttcttttttttccttgatttgctttttcatttaaataaaaaactaacaaatttatgataaatcttatctaaaaatttaagaattctcctaaacgtggcatcccttctatacaccttatattttttttcatttaattatattattatatttaaacaatatccgagatacacattattctacattttctatcatttaaaatcaaaattaaatatcagtttactttatgctaaaataatttcaagatattagatatcataataccttctgcttctttttaccacatattgcatattatatctacaatctgtttctgtttttctcttaaaatatcaaattactctattgtaaaaaaatgaacatattaaacaatttaatctatctttaattc

SEQ ID NO: 77345 - DNA, 543 bp, Arabidopsis thaliana landsberg
ttggtaaatcgatcgctaaaaatttaatgggattattatttatgttttatagcagtcccgtgttataaactatggtatggtccatatatgaaattaggaacgctaacgctttctcaaattctctatatattaattgagatatattttcaaaaaagacttatcttcatgtatgattaacaaaaatgttatgttcagttgttcacataactcctcaaaccatttaagcaactaatgttctcctactatttttagtagtccatcaatatatattgtgaaaaacaagagtcaggactcaagagacatataaaagattgtatgcctgtacgggcctctcatgagctccgaaccaatacacatgctgcaaagtgttcgacaaaaaaaatttagttttttttttccgtctatgtctatataactgctttttgaaaatgtaacgagattttatgaaaagaaaatactaaaataaactaatggagaaattgaaaaggtacattctatggaatatgctttagattaggaaaggttttgggtcccgagctgagc

SEQ ID NO: 77346 - DNA, 564 bp, Arabidopsis thaliana landsberg
  unsure (1)..(564): unsure at all n locations
gacattggcacgctgttttctcctcacactcattcacatttgcatttatgtacatcaaaaaaatttgattttgaggctgcatatatatgttttatagtttattccaactaatacctttgcactctttgagtccatccccaatgaatccaggaggacatttgcagcctttcgaatgatcatcctaagaacaacataaagataggaataacttttacttctagtactataaacgtcaaaatagatgaaattttgtttgttagtcgagaaatctttgtaaaaattacacggcaagcggaatatgtttttcccatttgagtttgtttccaacatcctccattgtttatgccacaacgtagtgcccccgaagctacaatatccaaatgtaaacatgtgaaacttatatatcggatttaggaatcttagagaatatatatgtagttgaactttttttaccttcacaatgtgtataaccgtcaccgagaaacttgacaccttgaacaatgggacattgacatactcttcctctgaagtgtcctanaaattacaagaaataatactcatttt

SEQ ID NO: 77347 - DNA, 529 bp, Arabidopsis thaliana landsberg
  unsure (1)..(529): unsure at all n locations
aaaaaaccaaagaaaaattactcaatttcataaagaacaattttggactgattcaattttagttcaataaatcaaaccgaagtaggtatggggatatacttatcaaccaagattgttgtatctatgactacttctgagacatgtgaactttcatatctgttgtatcgatgaagaaattttggcctacagtttggattggttcaggtcacatcactcacatgatcatgattcttgatcaaagattcatagagtaacaagctcttcttcaccagtcctcttccctctccagagtagtgatctgctcatctttgaacaatatgggaacacatggaaccatctcctgnnnnnnnnnnnnnnnnnnnnnnnnnnatcaattctagagaatctgacagacaatatatgacaagtgaaccatttacagtttattataccattagttttacaccaatttgtttggagtcactcatcccaacatgagtgcaatctagtctcacaattttttctgttgaaaactatttccttaattttt

SEQ ID NO: 77348 - DNA, 329 bp, Arabidopsis thaliana landsberg
tttggatcaatgaaactatccgaccgtttagttagtggactgaaatcgctacatgtattgagagcgggtcaaccaagtttgtagtctagatcagtgctagctattaaaccgcctttactaacttcattcttggagcagaagcccagacgatagggctagttgaccctatgcgatagggcacaagccagggccatctccattgacgtatacttcctgttgttatcaaaactactcactctatacggggctgggttgtggaaggtactattatcaccgatattgaccctcttgggtctcatgaccactagctgacctagaatgataaaggg

SEQ ID NO: 77349 - DNA, 685 bp, Arabidopsis thaliana landsberg
cgcaatggtgcattcggggcactgccagcaggaggggagggggcctacgcgctgggcctcgtggacgagttgcatcgcggcacgcgggtgctgcaccacgccggcgcggtgcttggcgccaactcgcaaatgctggtagcgccggagcacaagctgggcctggcgatcctggtcaaccgttcggacctcagcgccaccgagctgggctggaaagtgctggatgccttgcttggcaaaaagctgaagccggccgccgcgatggccaccggggcgagcggcggggccggattttatgtccacgccgggagcggccgcacgatggccctggaggtcgtcaacgagcgcctgtgcttcgatcaccagagccagtacgcgccgctcaccaccgacggcgatgccttcgtgctgaaccagatcggcttcaaggcgacccgcctgaaggtggtgggcgaggggcgtgatgccgccgtgctgcttgagcaagccgacggcgccatgcggttcgaccgaatgagccccgtggacagcctgccttgcctgccacgcatgagcgggcgctacttcagcgccgagacggacaccgaagtccgcatgcatgccgacggtccggcgcacgtcgagatacgtggtccttacgggcgcagccttgtgcggctggaggcgctggacgccggttcgcacaagc

SEQ ID NO: 77350 - DNA, 470 bp, Arabidopsis thaliana landsberg
tatccaacccttgttagtgttcgcctcattgtgatgactttttaaattaagcaaatcttacaagtttgtgattactgtcaacagcactcattacccaaaggtgatgctgattgatttactagggcttgtgagtgttcttagtccctgaaggtttccatccctgtccctgcagttaaattaaagctggaaatcttcagcatcacccacgagtttttgatctgcacgcctgttaaaggtgtggatctttaccagaaatgggacaaacgtggtatttactacatagcaacctcgaagaccaggtatcagtttgaggatggtataaaatgcagcgtcccagctttgggcttgggagcccgagttctcatactcccttttgacacttgttggaaattttataaaagatcagattttgattaaaaaaaaaaaaacccactggcccacatctcatcaaaagcacatagtccacccat

SEQ ID NO: 77351 - DNA, 106 bp, Arabidopsis thaliana landsberg
tttatcattttatttaggaacatattacctgcatacccactagaattatctatctattttatcctaaacgacctcatatttttgttacgcaacggtcataaacctt

SEQ ID NO: 77352 - DNA, 619 bp, Arabidopsis thaliana landsberg
  unsure (1)..(619): unsure at all n locations
cagaaaacaaatccataaaaacacagaacgatcatagaaaccctttagattcttttgggtgcaacaccttgaaataaagagagtgtcaaggacaacaagatactcacacgctaattcaactctaaatccaattttttgtgaaactttttaaccttcgattactatccagctcatatcaacaacaaagacaaaacagaacaaaaacaaaattcaagtaaagctcgtcaaaatttaggatcgtgacataatttttataaaaaacaatccaatactcttcttctcagattatattctgtcaaaatatccacattcgacacaggtataaacaattgacatgaactatttcataattttgagaggagaaaaaaaaaaatgcatacatgagtatacattcatatacattcacatcaatgcatacattcatatgaacatagaanacacacgattaaaagattttctctctcaaaaaaaaaaacggtataaggcaacagaatcgcgtaaatttgtattaataagattctgacgtttcgattatacctggagaaacgaagctttgttctgtcattgagacgaaacggagaaggagaaaacacatgggaagaaaatcagaaccctaatg

SEQ ID NO: 77353 - DNA, 171 bp, Arabidopsis thaliana landsberg
gactaaccatattcatagcgcgtatctggatatttagtcatacacatttggtaccatataattttgagaaagatgagtgtctacttggcatttagcaacagttacaatacccatgcttaccaaatgactaagtccatctttaagacactatcattatctaccctatggaca

SEQ ID NO: 77354 - DNA, 565 bp, Arabidopsis thaliana landsberg
tcggcaagctgcgtgagtggaaatgcgaggtaaaatgggtgtacagctacggagaagcgttggaagaaatatgccgcaataactatacccttggcttttcagactaccgcctcggggccaggaatggtatagacctgatcagggatatacagggccgcagctgcaatacccccgtaatattgcttacaggccggggtaactacgaaatagatatcgaagccaccaaagccggtgcatttgattacctcatcaaggcagacctggacattgacaagctcgagagaacggtgcggtacacactcgagcgaatgcataacctgcagaagcttcgcgacagtgaacgcaaataccggaacatttttgaaaaatcgaaagacattgttttcctcgccaccgcagataccaccatcttcaatatcaacagggcggtaacggaaatactcgagatatcggtggatgatgccataggcaaacagttactggattttattcccaaccccatacagaagcagcatttccatgatgtgatggaaatggatatggagatagagaactacgaactgga

SEQ ID NO: 77355 - DNA, 411 bp, Arabidopsis thaliana landsberg
ttgcgcgtacaccacgatggcgggaaacgcggaagttatgatcattccgatcaggaacaccagcaccagcggcatcggcgggctgacgtaaggcagcaacaaggcgaaaggcgcggcgccgagaatggaaccccagatgattctcttgcggccaatgcgatcaccaatcgggcctccggtaatggttcccagcgccgccccggacaggaaaatgaacaggcagtactgggcatgctggatgccaaggccgaaacgatccatcagatagaaggtgaaatatctgctcaggctgctgaggtagaagaatttggaaaacatcagcaccagcagcacgataaggctggtctgcacctgactgccggtgagtcccgtatacacgtgggccaagcttttgcggccgtgaacgctggt

SEQ ID NO: 77356 - DNA, 576 bp, Arabidopsis thaliana landsberg
gaagcataaaacggagtaatatcaagtaatcgagagctgaacatattaaaactaaacttttcttgctcatagagactcgccaaccaataaatggaatggaacagtccactgttttcatggtccactaatttaattagcattgataagtgtgtcaggtcgagccaatctcaattattttgttcatcaaatagcattagttataacaataaaaacgtacattcgatgtataaagtgtaagcctataaagaaatgcaaaaacataatgtcttaaaaatgtttttcgattttttccacacgtaatttacttactatactcaatcctgataacaattataaatcttttcttcaacgaattaaaattggtttatcattgattcacttttagtcaaaaaaaattaaagcttttattaatcggcttacgtttttggtttttcttatttaattttggttactattcttttcgaatttattaaggataatgtggaagatatgatcttatgtttggttttggccactcgaacacttttccgactagttttctcggtttgattggacatatattttatgcgtgggagt

SEQ ID NO: 77357 - DNA, 297 bp, Arabidopsis thaliana landsberg
  unsure (1)..(297): unsure at all n locations
nnnnnnnnnnnnnnnnnnnnnnnnnnnnnnnnnnnnnnnnnnnnnnnnnnnnnnnnnnnnnnnnnnnnnnnnnnnnnnnnnnnnnnnnnnnnnnnnnnnnnnnnnnnnnnnnnnnnnnnnnnnnnnnnacaaaaccagcatgccaaagacatggatcagaaaaggggagcaaagaccaccgtgcctggatatgctgtagctgcatcctctagaaccacaacaatacatagtggcaatgagattacagaacatgaccttactggataatgagaacagccgctcttagtggagcacagt

SEQ ID NO: 77358 - DNA, 239 bp, Arabidopsis thaliana landsberg
gttttatctaagagtttaaactgatatggtataacgattttgccaattattggtaacgtaagcttgggaccaatgtgggaagctggtaacatatttgtgtggatgattggttcggattatcgatggattgagttcgtattcgtagtatcattgcatgaccttatgaaaattggtgcattaactttttgctcaagccttttttttagtttactcggggtaacaaggtttagcaagaaatt

SEQ ID NO: 77359 - DNA, 275 bp, Arabidopsis thaliana landsberg
caacgatggctactgtggtctacaaggcttgttcgttttttttgaaaatcacaagcctggcggaaagggtatgaaagcatccacgagaccccactctaatattgtaatattcgatgaagcctggtcattgtgattacttggcaagcccactccactctaagacatatatttgaacgaactaatttacatagcttcacgaatatattacaacctaatagttaaatatattcaatacaacaaacgctgatgccactgcaagagtacactactaatgg

SEQ ID NO: 77360 - DNA, 600 bp, Arabidopsis thaliana landsberg
acctattttttggatttctctattgtttttccacaaggaagacctaaatttcttagtttaatggatgattaattaattgttttgccaaaaaaaaataatagcacaatggccaagcatgataaagataactgaaaagaaaaaaaaatcattctatgataagtagctaaaagccatttgagcaccaaaatataatctacagcatgtatttgtaaataattagtacgattatatggatttggttaagtaagagaaaacatttattcaaaacgtaacataattatttattaatgaatcatatgtgtattattcacgtggttcgctcgtatagtaacgttattgcgtgaaattcattttatatgcatacttgttggaattcaatacatactgcataagtgcatagatatgccattattcaagtgccaatgatgattgtgccgtgttcctaccaatcgttgtggatgaggatatataccttccacttacgagtaaattaaaaagaggcagaaaactattattggtttatcttaaaccgtttcatgtcaatctcataagattcgtctatcagaatcgaatcttattaaagaaaacaactttaagata

SEQ ID NO: 77361 - DNA, 516 bp, Arabidopsis thaliana landsberg
tgggcacgaacaagcccgcgacgccggcgggctttcattgcataacttgctggttttacgattaattctggtggctatgggtggactcaaaccaccgacccgggcattatgagtgccgcgctctaaccggctgagctacatagccagaatggaaaattgtaccgagtatgaccccaaccttatgagtgctgtgctctaaccggctgagctacatagccatggggtgcccgccgtgggtgggtacggtgcttgcgaaccggagggcggagcgcggcagtataatcgtctcggcgccggcattcaagcgtacattagcctatggagctagccgatgcttagcgcactgagcttgaatcgggttgaatgtcacgcaccggtcactgatccgacccacaggctggcgcactgcgaggaggcatgatggccgacatcatcgacgctgatggctaccgtccacacgcggggaacgtgcagttgaacggtgccgggcatctgtattgggcgcgccgagtgcgc

SEQ ID NO: 77362 - DNA, 135 bp, Arabidopsis thaliana landsberg
  unsure (1)..(135): unsure at all n locations
cgggaaaaccnnnnnnnnnnnnnnnnnnnnnnnnnnnnnnnnnnnnncagccattctttaccggttatatcctatgtatgttcggggcaacgggtcttatggtgtttgcctctttctatttatatcgctgagtca

SEQ ID NO: 77363 - DNA, 195 bp, Arabidopsis thaliana landsberg
  unsure (1)..(195): unsure at all n locations
catttattttncaccaaaaacataaatcatataattaaaccgcaaaacacctcaaatacaataaaataaaattataaattagctatgagaatagatagaacataagaatcctaaaataaacaaattataaaaatacacccatattaaagaatggaccaacctcacaaccaaacatatttgttatacttgcaaaca

SEQ ID NO: 77364 - DNA, 396 bp, Arabidopsis thaliana landsberg
tatgtgaaatgaacaatctttttttagcatctaattataattaacttttaaatcttcaacacaaaaagcgaagcactataggagtacatatcgtgtgctttgcgtttggcgtttatgtttcttttaaaacagaatgcaataattaaagtcacagtcctcatttccggaaaagaaatttagaggttggcgatgagtttagtgagatcatatggatcgaaaactatgaattttattgatatacaaacagattaatgtgtggaccatctcgagaaccaaacatatcgttgataagtgtttcgtctagcagctaacacatttcaacatagtgaaccgtacgcaacctgggtgtctaaacgtatcacacccattatattttctatctagctcgaatgctta

SEQ ID NO: 77365 - DNA, 416 bp, Arabidopsis thaliana landsberg
  unsure (1)..(416): unsure at all n locations
acattattgtaagtttgtaacaccgtaacgtcgcgaataccgtttggcaggctaagaacatcaacaggagcaccaactctcagtaatagacatttcatatgtaacatcaaaagtgtttaatgtagagttttcactaatgcagtaataaaattaccatctatcagtcgttaaacagaaatatataacctcaaaacaatttctaataatcccaaaaaaatgtattcagaatgaaaagtatagtttgcaatatttctctgtatttcattacttaatactatttatttatccaaaaaaaaacttcaccaaattttagtttcttcctatagcatctntggtatccaaaagaaaaagatacaaaattatctaaaagtctatggatacttacttgtatatttggccaacacagttttcaaatt

SEQ ID NO: 77366 - DNA, 539 bp, Arabidopsis thaliana landsberg
cctcgttgctcgcgcggcatcggcgtgggcgccgagttcctcgggcataccggcgactctagttcatcgacggcggtcccggtattcacccgaggtcaggccttgggcgtcagtccttgaaatacaccagctgatgcgtgctggccagcagctggcccgcccgcgaccacaggtgtgcactctgatcgaagtatccacgcgagaagcgattggcgtgcgcgctggcgagcaggaaatcgcttccgagcgcatcgatttcgctctggtcggcgtggaagtaagtggtcagggagatagtgccggctggcaggaagcggccgctgcgcaagaacacccgagggaagaacacgtccgacagacatgccaatgccgcgaagtccagcggccggtcttcggcgtcgcgtacccacaacgggtggtcgacgatgtgctgggttccaccgccttgaggggcaccgggccgtcggtgaaacgcatgtcgtagcgcgtggcccagacgatggcgtcgacgaacttgcggggcgacgtcctcgggagcg

SEQ ID NO: 77367 - DNA, 311 bp, Arabidopsis thaliana landsberg
ctgggtcaattttgatttttagcatacaaatatatttattatgctattaaacttgaaatgtttagtggagagcttgagtgggcgtctatatagcttgtacatactggtgcactttttctgtatttattgaagtcaattagttgatatattcttatagataaattctgtgaaaatttgataaaacattgctggtacattgaagacattatccacaaagactaattattaggtaatcaaggagagtgatctcccacaattgtttttcattgtccaaaataaaaaaaaaaatttctatctctacttttctaaat

SEQ ID NO: 77368 - DNA, 527 bp, Arabidopsis thaliana landsberg
acgctagagacggcgacactgtattggctgacggatacttaccctcgtgtccatgttttacaatcgcggaatgggcaacccggatgagaaggcaaagatggcgagaatcagtgtgctcaccaacctcacccacgtgcaactcccatatgttgcaaagccatgcggctactccctctttgcgcacgagatcttcccagttcccaaaagctgggcagccaagacctgcaacctcgtttactttaaccagcacgagcatggaggtcatttcggggccatggagagacccgaagagcttctcgcggatgttgaagaatacgtcaagagggcgtggaaggctagtgagtaaggattgggtgatcatgccagtgtaacttggtcagggctggatatcgaacgggttattcttcctttcattcctttcttttggtactttagtctatgtttttgctttccttgactgcatttcgtttcacaggttggcagcattacaatagtacacgtgcccatgcacattacctttggtgata

SEQ ID NO: 77369 - DNA, 211 bp, Arabidopsis thaliana landsberg
tgaatacgtaaacgggaagaatgtcgatcaacttcactgtatccattcagaacgtttcaaggatgcgcaggttggtcagaatgaccgtacgatacgggtggatcccgcttactggacagaccgtactgtcgtatccccctaacctgaagaaaggaacgcaggtatatgccgtagggcatccggatgtgcgcaccttatactacccaggatg

SEQ ID NO: 77370 - DNA, 466 bp, Arabidopsis thaliana landsberg
  unsure (1)..(466): unsure at all n locations
nnnnnnnnnnnnnnnnnnnnnnnnnnnnnnnnnnnnnnnnnnnnnnnnnnnnnnnnnnnnnnnnnnnnnnnnnnnnnnnnnnnnnnnnnnnnnnnnnnnnnnnnnnnnnnnnnnnnnnnnnnnnnnnnnnnnnnnnnnnnnnnnnnnnnnnnnnnnnnnnnnnnnnnnnnnnnnnnnnnnnnnnnnnnnnnnnnnnnnnnnnnnnnnnnnnnnnnnnnnnnnnnnnnnnnnnnnnnnnnnnnnnnnnnnnnnnnnnnnnnnnnnnnnnnnnnnnnnnnnncttttatactttctttctattgatatttttactagaaaaattatattttgattttttaagatttatatatttcttttatattatatatttatatttattatttttttactttctttttatctttattttaattattttttttttcatatttatatacactttctctttttttaatacttttatttt

SEQ ID NO: 77371 - DNA, 609 bp, Arabidopsis thaliana landsberg
agaaaattattcagcccttctgacaattactattttttttagttagggctttatttgttgtagtcatgggtcctctattatgaacttatttagcagttagagattctaacgccgtgagactattatttgtaataaccggcgtgtatttgggcattggatgccgtgatgagtgttaatgagaagaagaagtggtggtggcaaggagacttcacctaatctaacggggccgttacctgttacgaagaaaaagagaatctgaatggttttttatttaaggatctgtcacttttacataaaattacttccaatcattcgtagccacgtgtacttgtctacttacacaaaataattgctactgctactgcttctctgtttcagataaaatcctaaatccattgaatcttgtaatgtgtgaatccatccacttgaaccaacctttttggtcttagctctttgttgctcgctcgatcggtggaaataaatgatttcactgaagaaaaaaatataagattttatcaccaattgttttatatctaaaaccgaatattctcctttcaccacctaagattatatattaatgactaatcaactaagtgaactggttttttt

SEQ ID NO: 77372 - DNA, 437 bp, Arabidopsis thaliana landsberg
tggtttcacactaatactctcccggcaccggctattacatctacgatcgcggcggagtccgccttcgctggaacgacagccagcgccgctactgggaaggccgccgcggcaacggctggcacggccgggacaactggagcggctatcgcaacggccagaacgcgaaccgccagaactggcagcaacgccgcgaggcctggcgcgcccggcagggcaacaccggccagagcgcgggccagagctggcagcaacgtcgcgaagcctggcgcgcacaacggcagagccagccgcagggcgcgaccgacgggtggcgcggacgcggcaactccggcgcccgccacggctggcgcgggcgcggcaactgacgagggcgtccggacctgatctctttcggacgatagggatcaggccacgatccgcgcggcgtgctcgcactt

SEQ ID NO: 77373 - DNA, 456 bp, Arabidopsis thaliana landsberg
  unsure (1)..(456): unsure at all n locations
gggactacgaaaaaactttccctccaaaaaagtaccttctacatatacaaacatgaaacatacacttatatattgatattttttgtaggtgaagtttcctgcctaaaaaaaagaagaaaacaaacctaaggactattgctacgagaagagtagtggaatgccgcccaaaaaaaaagagagaacagaagtacaaaagaatagcccaattttgtttacgagaatccttttgtttggaaggatggacaaagaaaaactatatctccgctggattgttggcccccgagggagactacaaggtgaaaggcagaattttcgatgatgcgcttgatgctgggttgttactatgaacacacatagacccatacatatggggcaagtggactgatacggatttaaaaaacacatctgctttcggaaaagaataatgaatttgatcatggngactccgatcccatt

SEQ ID NO: 77374 - DNA, 418 bp, Arabidopsis thaliana landsberg
acaggtcaacatacctgaaccaccttagaaaagaattaagacctaaagcaaaagaggtgcaagcattagatgcctgggttggttccctttaggacttaaagtaatcaaaatcagtaaaacacacaagaagaagcttaaccattttttagcatataccaacacagaggattttaatattcaaaatctcaactttgatcaaaaaaaaaaaaaaaaaaaaagatacaatggtctcaggaaagaaaagttgcagaaattggttggctaaaaccacagctggtttcactagacaggtatgtaaagctgattgtatataaaaccccacaagtctcagctaatggggctttaagaaacatcacatgtctaacggtagactgaaacaaggatcatcagaaactcctttcacattttttacttattt

SEQ ID NO: 77375 - DNA, 157 bp, Arabidopsis thaliana landsberg
  unsure (1)..(157): unsure at all n locations
cacagcgcaagcaagcangagccactaaagcananncaaagaaacaaccacggaggcacgacccacccaaagaagaccagaaaccaaacggcgaccgaacggacaagccaaccaaagcacaccaaaggcaagccgcacgacccaaaccaaggacaac

SEQ ID NO: 77376 - DNA, 382 bp, Arabidopsis thaliana landsberg
tgacgtattaatgtcgtcccatcgttggacaaatagatttgaggtggacagaaacatagtccaaccttcttttttaattttattttggtcgcctcatcttccacgtctcctcataatcaaatcacataattgcattcaggtttcttaacagcaaaataaaataaattccaatatgtcgccgtgttatatttcaagtttttttttgtttcacatttcaagttttggtttataaatgtgatttgtcactaattgagtggtacaaagaaacttacatggactactttttaacgaatataggagtgtctgaatatatatatatatatataagtcctcagcttctccgaatgatccattttgacggagttgcatgcatatgcttttt

SEQ ID NO: 77377 - DNA, 512 bp, Arabidopsis thaliana landsberg
  unsure (1)..(512): unsure at all n locations
acttacatgaaaaaacagatcgttcaaaagagataagttttaattatgagaattttaaaattacccagattcaggggtgggtcaaggatctaaggaaagcctcaaatcaggaaaaaaaacggagatgcagtttctttctgtggaagtagacagaaacaatagaatctcagataagaaagggacagttttttaatttgattaaatttgataaaagtgtttttatttaatttaatttaattgcttacattggtaaaagctggattcggacatgattgatttgatatataataatggcggagcgtgtttgaggtgacgaacgcaagagaacgaagaaccaggaagacgatgcttcaaaacaaaacaaaaaaaatctagatatctttttcttttccttatttatgaaaagagtcgtatactttctaattattcataatcaaccccacaattgattntacatctaatntttggattttggtacattcccggtttaattcccggttactacctaattg

SEQ ID NO: 77378 - DNA, 321 bp, Arabidopsis thaliana landsberg
  unsure (1)..(321): unsure at all n locations
nnnnnnnnnnnnnnnnnnnnnnnnnnnnnnnnnnnnnnnnnnnnnnnnnnnnnnnnnnnnnnnnnnnnnnnnnnnnnnnnnnnnnnnnnnnnnnnnnnnnnnnnnnnnnnnnnnnnnnnnnnnnnnnnnnnnnnnnnnnnnnnnnnnnnnnnnnnnnnnnnnnnnnnnnnnnnnnnnnnnnnnnnnnnnnnnnnnnnnnnnnnnnnnnnnnnnnnggtttttgtatttacccatacgagacggcttaacaaaaaagaatagtttgttctttagagtgaccttacatgctttctcagggcatgggatactgctcggcaacgg

SEQ ID NO: 77379 - DNA, 700 bp, Arabidopsis thaliana landsberg
tataaacttttgacattatgttttcagatatattcttctgtggttacactaatattgatttgttttccgaaaggcattcaaaaaaaccaaacgaaaatagagagaaagtcgccctcgaaatatacgttgcttttcttttcttatgtgaagaatagcttcttcttctttgtgtctactataaacactaataatctttttttaatatgattatttttatttatttttgggcaaaatgtttttttaatatgatagtattactatatatttaggttgatcggaagttatatcctctctcattggcctatttttgactgttattttctctatccaaatatatctatcaacattgaatcctgccttattttatcgattcccaaaacacagcttaaccaatttggttttatttcagttaagttttcggttcacaaccaatatgttggagtgttactaatcagatagacgggtaaaataaattgtttgcacaacctattcatatagttaaaataagcgaatagagagataattgaaactaccgtgaaaattaacaacaaatggaacatacgtccaagtagttgagacttgaggagtagaaagacaacgtaaggagttgacacacatgtgagccatttgagactaattcacagacaactaaaatcccagagttatactagtaaatgctttgggtattttaaaatatttt

SEQ ID NO: 77380 - DNA, 542 bp, Arabidopsis thaliana landsberg
ttatttttcagctattgcttttagcagtcagcatttagcgatatgttcttactaatcgctattagcttttcgcttttagttttatctctgggttaccagcaccagctttttgaaccggctaaaacatttgtatttctggtttttggcattgtcggcattggtataaccgaatttcaatgcaatttcttccatgctcagcttgttgtaaaaaaagtctttgagaatgctgcagcagggatcgcccaattgttccaggctttgctccacgttgcccaaaaactgttctttcaccaggtgtgcttccacatcttcttccacctcttcggcatccatggtttccttgagcttaagaaccccatcgtactggagtttcctaagccttttcagccacaggttacgggccaccgagtacaggtaagtgggaatggcgcaggtaagtgtaaaatcatcctgtttcagcttttcataaaatacaatgaagcgttcctgataaatatcacgggcatcctcttcatcgccatggttactcaggaccagttttt

SEQ ID NO: 77381 - DNA, 620 bp, Arabidopsis thaliana landsberg
acttgcaagtggcgtataatttgtttaaatgttaatcatcgatccatttttttatcaaaaagaagaaagcaaaatcatttatgatcgcaaatgcattcccccgagccactgttttagtaaagatcaacgagaaataatactgacaacaatataatttactcgtttagttttctttctacaaacaaactgatatataaatgaaaaaagttaagaaaagagatagatatatgttggattaattagtcttgaaggacaattgagtgtgaatcacatggtgcttagtgatctttgtctcttttatgttacagcaatcgaatctatggactaaaagcttaccttaattataaggttaatgaagtagtggcctcatattgtttgcgcaccaaaaacaaatttctatcaatcagtcaatcgaaatgtgttttaaatatgttgaaaaaatatagtaaattacataccgaaaatacgataagaattgttcatttgttttttcttgggttgaaattataaagtttcaaatttgtgaaaaaaaaacagaaccccataaggaaatgatcacttttaacgttttattcattaacattcatagcaaaaaaaattaaaaaatgatcacttttaat

SEQ ID NO: 77382 - DNA, 559 bp, Arabidopsis thaliana landsberg
cgctgccaggctgtagctgtcaccgtgcttcagcgcggcatccttcttgagcatttgtgccatccagtgggctcaacgcaagggcgttttgcttgtgcaacggagttttcagctggcgattgctcaagctttgaaggtgcaggattcgccttcaactttgatagtcaagactttctcacaggcctggggcggttccggatcctccagctttgtgatcacgccaggtttcacggctcttgcataccttgtgctagcatacaaaagcgcaacccgtcaaatgcagacggctcgcaatatgctggacaaagcgttctacacattatagattgctgggtttgcgctgtcacaaagttgagctgcctagcatcaaacctccgcaagcctgcaatcatgacatttgatcttttacgagagctgtgcagacaagcaggtgccgttgtccgttgatgagtatgtctatcggtaaaatcgacccaccgttccgcaacattcagcagtcacatcgaccagcgtacgttgtaactattccccagtacattgtgcttgtgatgttatatac

SEQ ID NO: 77383 - DNA, 444 bp, Arabidopsis thaliana landsberg
attcttgaaaataatgaaaaataagaggagatgatatttctatttgattatctcaaaacaacatgccatacaaaagtagcataaaactggctaaagatgaatgctcttatatgtaacatacaaaagttacagcctacagtaaacttcagaaagcaaagagggtatgcgatctgtgaattaatgtcggattcttgcagttacaattgtgtggagaaactaaaccacattgatcaaaagaaatgactcttgaagctctctacacgaatgatgattgatgttcacaggttagacaaaaagaagaagaataaaaagaaggagaagaaaaagaagatctaacggggttgtgatgtattaggtaatggattctcctgggtgacttatggtgaaccatgtcttccaagcatccatgtaatgggaaaagaggtcttttcaaacttgaatttg

SEQ ID NO: 77384 - DNA, 390 bp, Arabidopsis thaliana landsberg
accgaagaaaacagattcaggtatggccaaaggctcctttcgtggccttttcacgagttatcgtctgatcatttgcaacgctagtcaagaagaatcgcttgtcaaggaggacctccgatggtgtaagggtgttctttctcatttccgtcaagtgggaggaatgatatgagtagatccaagtttcgtagcagcttcggcttagggcctgcgtgaagtcggcgaaccataggcttgcctcctttggatcctcaaacccggcttcaagaagctcgttatatgcgttgtcccagcggttgagccattcttccacttccttttttgtagagagtctctttcgttgcggtatcgctagggtatcggcatattctaagcgtgctcgtgtcttgcggt

SEQ ID NO: 77385 - DNA, 327 bp, Arabidopsis thaliana landsberg
  unsure (1)..(327): unsure at all n locations
aaaccttataactcccatccccccctncttaaaacccaacatttctctttcaactctctcatactacaaacaaccccttaacatagctttacattatacacctccttacaaaatataacctatactccccttacactctattcttttaacatacttgaaactttcaccattcatcacaacgtccattaattcttaagaattgtaacttaacttgtaaccttacagattgtaattacataataaatccaaacaatctttatctttaattcaatctctttcactttcatacaacttaaacacacaattaaatattgaactaaaacccta

SEQ ID NO: 77386 - DNA, 527 bp, Arabidopsis thaliana landsberg
tatgcacagtctctgcacactgcacaaacacaaaaaaattttactgactactgccttaaattggatctgtgagccctccattgctgctctctctgcttctctttttttttctagttcaaactcaacatttcttcgatctccttcaccggatctcagattcttcagctggacttagatcaccggttgttgttttaggatctagcttcaatgttcgattcttagtagctgttttttgtgatcaatgttgtttttgattcgattattatgaatcctctttgctgcattgctccggtttcgattgatgaccggactaatcccgtcgtagcgaaatcatcgaatcatcatttagggctcgaagctattccggttagtaaacacgcttctaagccgtcgttttcgactcaggcgtcttggatcagccaagatcagcttgagagactctcttctgaagtagtagacgacgtcaatctcgatgggaaagatgcttctttttcttctaataaaagatgtttcttctttgggaactg

SEQ ID NO: 77387 - DNA, 492 bp, Arabidopsis thaliana landsberg
  unsure (1)..(492): unsure at all n locations
atctttcttgggacttggttttatttatttattgtcaagatttaannnnnnnnnnnnnnnnnnnnnnnagccggggggataggtgaattacctggaccatacataaacaattttaatgagtggttgacagatttggtgtaaaaacaaatgcagctaaaatcgattaaatgaaattgcaagtttaacatttcgaaccatgaacaattacatttttatataaagttagatgaaagcattttgagataagaatgtacatatttcattaaaaattctgagctaagaatagtgatgggcatgtgggtattcgggtcaagtctttcggatttggggttcgaaattatggatctgtttcgttatatgaacagcttcgggtcatgttcacgtcggaccgagtaatttgggtattggtttaaagaactcattaataaccatannnnnnnnnnnnnnnnnnnnnnnnnacccaaaatttgtccaaatatactccaacataca

SEQ ID NO: 77388 - DNA, 556 bp, Arabidopsis thaliana landsberg
  unsure (1)..(556): unsure at all n locations
tgaagagatccccctgtccgggcggatcgttgccgtcttcgatgtctgggatacgctcacccacgatcgcccgtatcgagcggcctgggagatcgagcgggcgctggaggagatcctcggcggggcgggcacgcacttcgatccccgggtggtcgaggcattcgtctcgctcgaccacgatgcgttcagcgcgccgcagccgaccgctggcatcggcacgcagcgcgccgcctgagggcaggcgcattccccgcgcgcccgtggcgggcgaatccctccgctgactgaccgtgggccgccgccgcccgttgcgagcagaagctcaggcggccgtcgtgggcatcacggtgcccacgcgcccctcagcggcgagcagcagcttgaagtcctgcgggcttgaggcagcggccagcgccgcctcgcgcgtgatccgctcatcgcgcacatgctggaacagcgcttgatcgaaggactgcatgccgtagtacgtaccctcggcgatgatctgcgtcagctctgacacctgaccggtctcgaggatcgcgtnccggacgcg

SEQ ID NO: 77389 - DNA, 605 bp, Arabidopsis thaliana landsberg
  unsure (1)..(605): unsure at all n locations
gtgcgggcctccgcccgctatctacatcgcgcgtgctggtgcacggcctcgagttcaaatcgagcgcggcagggttcgaatccttgggggggtgcttcgcccgttgttcacacgacgggccgccgtgtggctatagagccgctgggtgatgcccagcctttcggcatggcgatttttttcgtggagtagcctagtggtgaggcacttgcttcgggagcaagaagacgctggttcgatcccagtctccgcgacgacgtaagcagacgtagctcagccagggagagcgctaaaacaccttttgtcgatctttgnnnnnnnnnnnnnnnnnnnnnnnnnnnnnnnnnnnnnaacnnnnnnnnnnnnnnnnnnnnnnnnnnnnnnnnnnnnnnnnnnnnnctttcgccgcgcgcgcggtgaattcccgcccttagttcaacagcagaacggtcgctcgataggcgattagctggaggtgcaaatccttcagggcggactgtggccgaggtcgaagaagccgagacgcgagattgtgtccctcgttcagtggngtgcgagtcccatcgtcaccccacggagtgttgacggtaagataccgagctgtctgt

SEQ ID NO: 77390 - DNA, 459 bp, Arabidopsis thaliana landsberg
gaggttgaggttcggccaaagcgccgggtcgtccggcgcggccagggccgcggccaggaaaaacccgccgcaggccaggacgccgttggtgaccaggccaaggctcaggtcggcctgccccatgagcctcgaggacatggtcaggaagctgcagatctccagcagcgacagcagcatcaccagcggcgtggcccatccgagacgaatggtctcgcgcgcccggatgagcttgaccgccgacagcagcagctgggcgacgcccagggccagcaaggcgccataggcggtgaagaagatctcgatcgcgtccatcagtcccccgggcgactcgacaacgctacttgcagatcggggcgccgtctccgggcaaaccgaggcgcgcccatttttccgtgaccgtatcaatcaccgattggtccatgcggatttcctcgccccactcgcgcttggtctcgggcg

SEQ ID NO: 77391 - DNA, 450 bp, Arabidopsis thaliana landsberg
gtgatgtttcttctctttattttttttgtaaaggtgtggtcttcgcctaattactgctaccgttgtgggaatgtggcttctatattgagtttcaatgacaacatggtgaggcatttgttttctcttttgttactgatctgccacaatatcttgtttcatgttcttcttacttttatgcactcgtcttcggattctacttttcctttttgattaaataagttactgcctttgatacttgtctctcgacccaaacatatacacatgagtgactcttgtgagatagagttatgatgtttaagccatttatttagtaacaattcacagtttcgcgtggaatcagtctgtccatattgattgtgctctgtgtgttacttttcatatatagacctgttttgggaagtgtttagatctggtcctcactgcagaatgatttgtaaaatatcttaatta

SEQ ID NO: 77392 - DNA, 394 bp, Arabidopsis thaliana landsberg
gatgtggctgatcttatcggcgtggctgaatttttccgcgatggtcatgacttgtatccttcggggtcgcctagggtggcaacgatgccattcatgagggcatcccaaccagaggggtcaagactgggaacacctgcagcgcgctgaaacagcatgccgaggcgcatggagcgaacaaaataaaggacggcttcaggatcgagcccgtcggccacagagccatcggacaacgcctgatctactagcgtctgaatctcgcgtcgccagacgtcctgcgactacagcacggcttaagcgacatcccgctctttgcgggcgttgacgaaggcttacaggcgcactattcttgtgtcggtcagcggcgcatcctacaacccggctaggcgttcgatga

SEQ ID NO: 77393 - DNA, 553 bp, Arabidopsis thaliana landsberg
atttgcttcgtcgcctatagcaaaccatatttgtcttttatttattaaatctatccgaaactacgtttgggatggtaataatttggtcacaaatctcgacgtatttactcatcggattagattgctttaattgcaccactgtatatttcgttagattattcacatgtcataaaaaattttttaaaaaaatgccaaacacccctcaaaatacgaagactatttgcatattatattgagatttaagctattacaatagtataagatgaatcggtcaatgtagtctcgaactagcaaaatgacagatttcaaaactaaaataagttggatacaccttccacacttgttaatgtataaaaaatccatcagctttgcattttaattcgtttctactggaaactcacatatttatatattgaagatgaattgcaaagaaaattcattttagtaaacgtatacgatattgttcacttcatcgaaattttattattcatgtcatttctctagtcatcgaaaaaatgttttgtcgcctctctaaattttttctctagttttc

SEQ ID NO: 77394 - DNA, 534 bp, Arabidopsis thaliana landsberg
  unsure (1)..(534): unsure at all n locations
cggtatcgcccatagactgcccttnnnnnnnnnnnnnnnnnnnnnnnnnnnnnnnnnnnnnnnnnnngttcacagtattttttgttctcaaaatcttcaacattatgacacgtttcaaacaatggttccctgttatggcaggcctgatggctttatttgtatttaccgccaatgtgcaggctgcggaaaaagtaacgatcacctcatcaccgcagaccgccaggatatatgttaatggcgtacagatgggtaccggcaaggtagagatcaaaatatccaagaacacatgtaccacggtagaagtaaaaatggaaggttatataggcgaaacccgtacctattgcaataaaaaaggtatgcccgatcctcccaataccgattatatacagctgcaggaagatgaatcctacacttcttccatcgaatccaatattgccaatacggaagtgcaggtgaatgtgaacccgggcaggtccaaagaagatgcatggaaacagatcgtaagcactgtgctcgacaagtttgatgtactgg

SEQ ID NO: 77395 - DNA, 310 bp, Arabidopsis thaliana landsberg
ggacatattggcctgctaccacacaatgaagtaaccatgaagaaccacgtctgtgatgccgttatatgtaaatggaccctctcactctacactgacggattcaagggccacacacatttggtgactggcttcaggagactctagagaaaaaacatgcatacaagggaacatcaatatatttattggactacaacgacatatcattaataagaacgagcaatcaactagggtaaactacctgcctttcctatgtaatcaccgccgtgacatgatacagattgaaagattccataacgggaccggatcttat

SEQ ID NO: 77396 - DNA, 520 bp, Arabidopsis thaliana landsberg
  unsure (1)..(520): unsure at all n locations
gtttaatcatttttaactctggattgcttcttggctttgttgagacgatacttgatatccacgaaaaacagcaatgctcctactacggccaatcccttgacgaagcttnnnnnnnnnnnnnnnnnnnnnnnnnnnnnnnnnnnnnnnnnnnnnnnnatcgtgtgatccggaagctacacaacacattaaatcaatcatcacacagtgttcacaagctacaattattacatttacatgtaggcctcaataacgcacctcacggaattttgatttcacttgctctatctgctgctcgacaaagtctgatttgcagagatggtatgcagaattgtacgacactgtttcgttcagaatctgacaaacaaaccaggagacaagaacaggaacagatgagcagctcaagaaactgaaagtgccttaaaaagaagaaatataggtcgttatacccttatgagtttgagatatagcagcccaaattctgtagtctctaaacgatgattgcagaaatcatgatgaacca

SEQ ID NO: 77397 - DNA, 414 bp, Arabidopsis thaliana landsberg
caaagagcctctgctttgggtcggatacaactcattgtctgtctatccattttatatctatttgagatatgcatatagtctggtaggatgcttctatttaggcatttctttgtcataccaccaataacgccgcatctacaaaaactgttaagaaacttgttgtggttctgtcttaccaggttatgaaggttagaaatttgaaattgtatgacagttactcatcttcataagaggaatcattttctttagtttgtcgcggacatcttcgatagttctctatcaaaagatattcaaaaataaagaaatctgtttgtattcggttaattttggtttaaatcgctttccttctatcttactattttagttgtaagtttgagaaaaagtgtcgtttaataccccaactttcaattatgg

SEQ ID NO: 77398 - DNA, 579 bp, Arabidopsis thaliana landsberg
cgaatactgtagtattcttgcaacaaaaaaatttaatatggtgttttacaataattataagttggatatttgcatgtgataagggtcacacaacagatttgtatatttaggttttataaaaaaaagggcgctagattttcaataaagctttgagagtaatattgaatttaactaaatgattaaattgatcttgatatagtgaatacaaggaataataagtgaatacaagtgttttggtactagtgagttcttggtcgagtagagtttttcttcaacaattacaagaagaaggagaaatcagattgaaatgttgaaaaatgatgagaatttataggttccgaatatgaaaggtgaattttgcggcgaactactataatagtctctattctatggaagatgttgatgaaaaggtggaagctttgctgcaagaggattttgcaggtttaccatgggatgagttattgacgcttactaaacctttttctggacatgaagtggaaaagttagggtcgataagggaaatggttaaattcaaattacaggtccagacagctattagcccatcttttaccatgaatg

SEQ ID NO: 77399 - DNA, 569 bp, Arabidopsis thaliana landsberg
gttgatttgaatttttaaagtatgttttttgtgtttacttttttattagatgatgtgtacagtctacggggttagtgtgtacgtggaaatgtggaaatgtggaggaagtttgaatgggttatatatacttatatgtggaccgattatgggttgttgttaggaaattagttggtggggcttgtaatttgataataaattaattacttggaattttaattttagtttctatcagttttggttagcacttttggaattcaatttggaaacgaacttttttaatttgaaatcctaaagaatctaacactatatttttttgtcaaactcttaacacttttttgacgaattatagtctttactttagtttgctcgaaaaaaataatactctagtttgaaaatcaaatgatagtagaaagaaagtacataatttactagacatatatataacaaaacacattatatgtatatgttcataagtctatattttcgcaattctgtacaagtatacacgttcatgcattcccttgaacgtttacacctatcggtgaacgtccataccaaataattacgtt

SEQ ID NO: 77400 - DNA, 255 bp, Arabidopsis thaliana landsberg
ctgcccaaaccactcaacacccggaatcatgccctgtgcgagcattacatgagttactctgcctgagattaagaggaacagtacagacgcaccagacatcgagaccggcacaggctgtcccatgatcattagcagaacaaagggtccaatctgggggcccatgttaggtactggaagaggtactggggaatatacgggtgtgagtgcagccctttaatgcagcgactgatatgccatgtggatctgcaggatgga

SEQ ID NO: 77401 - DNA, 478 bp, Arabidopsis thaliana landsberg
  unsure (1)..(478): unsure at all n locations
cggctacctgggcaagatgccgggttggagctatttgagcatcctctgccactagctgggcgcggaagtcctggccgtgggcgagggcgtggaaaacgtcaggccgggcgacaaatgctcagtcgagccctatatcaacgacccggacagctacgcgagccgtcgggggcatccgaactgctgcgagaagctggaagtcctgggcgtccaccgggacggaggcttgaggcccgagttcatcctgtccgcccgcaagctgcacccctcggcgaaattgagctacgaccagctcgcgcttgtggagacgcttgccattggctgccatgcggttgaccggggctcgccaacggcggaggagtcgtgcctgatcatcggcgccgggccgatcggactggcgaccctggttttcgcgaagctgacgggcacgaaggtcatcatgctcgacatgaacgagcgccngctggcgttctgcccggag

SEQ ID NO: 77402 - DNA, 602 bp, Arabidopsis thaliana landsberg
ccccctttcttttcttaaaaacataaattgtatatgtgtctcaggaatttctttcttttcatttctccctgcttccttaatgaagagctctgcaactgagggaattctgtgcagtggtgagaagtgtgatgaagctgttggctgggagttaaggaaggaaaccagacttgataactgtccattgggagacaatgaagatctataagcatgcttagtcacagtcatgtggactgagagggggactctggtacagaacttggagttcccagtacttaccaagacaactcactcagctcctgttttgtctttattttcatgactgaatcctgagcaagtttttgtttacatgtatatattttttatgtgtcagagagcacacatgcctgtgggtatggttgcctttgtgttgcaatgcacatgtagaggtcagagagtaacccataggagtcagttctcttccactatgtgggctccaagaattggtctttgaggcttagcaccaaacacctttacccactgagccatgttgccagccctagagcagattttttggcttttcaaaaagtttttttttttttttcataaccttattattgggcttg

SEQ ID NO: 77403 - DNA, 338 bp, Arabidopsis thaliana landsberg
  unsure (1)..(338): unsure at all n locations
tctgacttgtatggaacaagagaccaagtttgtgtttctgaacagtttccaatctcttttgtcatggcaccggtccatcctggatgtttcaaagccgctgttactgttttcggttcaggataagagactttatgggacagaaagacatagcgtggatttggttttgaaattcccattttagctctagtcaccatcggatgaacattggttgaagcaggagtttgatgaacattaactgaagcgtgttgtatggtctcttcagagtcactgcctgcttgtgaagaatgagannnnnnnnnnnnnnnnnnnnnnnnnnnnnnnnnnnnnnnnnnnnnnnt

SEQ ID NO: 77404 - DNA, 522 bp, Arabidopsis thaliana landsberg
  unsure (1)..(522): unsure at all n locations
ccctancnnttcgccaaggtagaaaaattgaagattgtcacctcttacgacaaaatggatcagatgcggcttgggggtattatcataaagtacatcaaagacaatgatttggatatggtttttgtcgacaaggcagagggtaacggcgctgtagatcgagttaaagaacttggttttggtgacaggattatggcgattgattttggaagcggacctactgatgaccagtacctaaataaacgtgcagagatgtggattgaagcttcgaattggatggacggagatgttgaaatacctgatagcgatagcttgcacagggatcttgtcatggttccggattacctactgacctcatcagggaagaaaaagcttttaagtaaagatgaaattagagcgaagtttaagcgttctccaaacgaaggcgatgctgtggctttgacgtttgcccatccagttaagacacgcgcacttgacgttgcaggccatggggttacaagaaaaatagagacctcatcttttaag

SEQ ID NO: 77405 - DNA, 388 bp, Arabidopsis thaliana landsberg
  unsure (1)..(388): unsure at all n locations
atgggaactactgtcctatggtattattttactcatttcccgctgatagaattacatgagggtcattgggtgccgtcactactctagtgtacagccggatcgaaatgnnnnnnnnnnnnnnnnnnnnnnnnnnnnnnnnnnnnnnnnnnnnnnnnnnnnnnnnnnnnnnnnnnnnnnnnnnnnnnnnnnnnnnnnnnnnnnnnnnnnnnnnnnnnnnnnnnnnnnnnnnnnnnnnnnnnnnnnnnnnnnnnnnnnnnnnnnnnnnnnnnnnnnnnnnnnnnnnnnnnnnnnnnnnnnnnnnnnnnnnnnnnnnnnnnnnnnnnnnnnnnnnnnnnnnnnnnnnnnnnnnnnnnnnnnnnnnnnnnnnnnnnnnnnnnnnnnnnnnnnn

SEQ ID NO: 77406 - DNA, 522 bp, Arabidopsis thaliana landsberg
  unsure (1)..(522): unsure at all n locations
tgttccgttttgatataacatattgtttttatataactatatttcgtcgttgatccgggtcagcatcgtattagggatccaaaactagttatttaaccacatgatccgacttaagccgttcgactaatctcaaaagcagttgttcgactaatcttaaaggtgagtcagttctactgaaaaatctactatctaataatggtcgtcaaatattttgaaacggctatgagtgtaagagtctactattaaagcatgttgtttgaatcataatcataatcaaatctgatcatagttnnnnnnnnnnnnnnnnnnnnnnnnnnnnnnnnnnnnnnnnnntttcatctttaaacaccgattttgaagttactatatttgacatcttttttgaaacggcatttttcaaactgcagtaatgtagtactctaagatttatttcacatttgtaacaacttttttttttttttttatatcttagttttggtttgcacattttccggttcattttagtatatagatttattttta

SEQ ID NO: 77407 - DNA, 499 bp, Arabidopsis thaliana landsberg
  unsure (1)..(499): unsure at all n locations
ccccccggcatcgcgtccagccatccatcaacgtcctccttctcctataggctccagcatgcatttattcgcctggggaatactctgcagcggcagaccgcagatctgatccccgccacaattccggctgtcaaaggtcctctgcagcgcgtcgccccgccaaccgaacaaataatccccgtggtggccgtaacccacgcgatccccgaagctccacacaaacggctgggacccgtccgtcggccacaggtcggggtcgttgaacgnnnnnnnnnnnnnnnnnnnnnnnnncaggacctgcgggatattcacggggtggctcggcgggcaggccgcgcccttgctgtagtctccctgcgggtacgcgacgtggctcatgtggtccgggctgtccaggttcttgccgtcccagcacggcgggaacgggatcgtcgtcaggatgccctccggacagggctgggtcggaaaaccgtagctgagattggtgtagcgcgtgtca

SEQ ID NO: 77408 - DNA, 519 bp, Arabidopsis thaliana landsberg
accgcgaagtggaactgtatgcgttcacaacttccgaattctataaatcacaagctacgaatacaatgctctggatggagtgatttctattaccgatgtaaatggtaaggcatctacttatacttacgatgctttaagccggttaatcgatgttcgggataactccggaaatatgactgagtttatcgaatacagattgcgtgactaattaatacgacaacgatttaaaagacaatgatgagaattctagctatacttattgctgtttctgtttcatatcagactctcgcccagacgatcacgccaagttcgtcggccaactatgttgtgcactacaaagttgaaacggcaggaaatacctcgggatctgtggttaaaaatctttccgtgagctcaacagatgttgtagtgaattatttcgacggacttggaagatctttacaaaccggtgcccgtcaaggttcaccaaccgggcaagacatcgtgagcaccatttgttacgatcagtttggacgacag

SEQ ID NO: 77409 - DNA, 496 bp, Arabidopsis thaliana landsberg
aacctacaaacaaaacaaagtaagagaggcagtgtttataaattggattcctttaatgttatcgaaagtagcttggcgctttttacctgttggtcgatgtcagagacatatacagttctcctgattacatcatccttctgagccaagcttgtccttttgttcattcttcgcttcccttggccaaaactccttctctgtaacaagaagcacacgaattaccaacagacgattttaatcaatagtacagttttgcatactttcctttcacatatctgacagctaataccattgtttgaactttgaagaatgtcaccacagaaacgatgaaactttctatttaaaacccgaaaaattcaaagctcatacaaagtgtaactgataaggaaaagaaaaaccaaacagtaaacaaatcaaatcaacaacaaactacacacaaagtgaaacctgtttttgtatcaatgatcaagtgatagatgcaagaacacgtaaagctcga

SEQ ID NO: 77410 - DNA, 547 bp, Arabidopsis thaliana landsberg
  unsure (1)..(547): unsure at all n locations
gtcgaaggcgttctccagctggtagtgctgctggtggctgcccgtgccctggccgaacatgatgccgatcgactggaacgccgcgacggtcagcggggtgccgtccggcagccgcgtctcgtgcgcggtgaggtactcggcgatgtcgcgggcccgcgccacgtcctcgggatagcgctcgtagtgcgcggcggtccggcgcttgacggtctggtaggtgagccggtagacgtcctcggggcgcgtgtccaggcccggcagcccgccggtcaggaaagcctcgcggaggccatgcggggcgtaggacaggtacgtgaccgtgcagaatccgccgaagctctgcccgagcacgctccacggcgccccgcccgtgacctcccggcggatcagctcggcgtccaggacgatgctgtcggcgcggaacagcgccatgtagtccgcctgcgcctggngcttgagcccctctagcgagcgcgcggtgatccgcgacgaccggtcggtgcctccgtggttcagcagcagcacccggtaattccgcagcgcccgg

SEQ ID NO: 77411 - DNA, 465 bp, Arabidopsis thaliana landsberg
gatatgcatggtctatttgaaacaattagatcacattagttgaagaataatgaagggtaaaagtttttcgatgagattgatttatgttatgtcgagaaaattataaatatgaatatttttcatatctgttatatatttccataagcttttatactaaaatcaagatatatatatctagaggtctagtgtttatgtttattttgttttaaaaacacataacccctaaaaactaatatttttagattagtttggattttgtaagtttagttttgcaaattatttgtttttgtggatttgactttgataatactacaaaagcatctaaattgtgcacttatgagtactaattttggtctaaaactcgacctaattacaacaagctccagtgcatgagtccgcacacaacggagggagcaaatagtctagatgaaatgttgggatagactacgtagcactatatgcaac

SEQ ID NO: 77412 - DNA, 479 bp, Arabidopsis thaliana landsberg
  unsure (1)..(479): unsure at all n locations
agaacggaataaaattgaatggagacggcgagaaaataaagggaattacaagatatagatagattaaaaagttactatatatattatatttatttatgtgtacacacaacttataacaataccatataggctagcttttaattagagagtattcagtacaacaccacatatttttgtcacataattagaaacttttttgaataaaaataataattaactttaaaaaatatcaattatcagaaatatgtagtccggaatatatcattttataaaactagtataaaatatatcaattatcaaaaatatcaatctagtaaagatatngtagacccctttctaaaaattaaaaaaatattataatctctaataagtattaacaattagcaaattagagtttaaagaaacatttgacctagttaatattttccaccacaaaaggcctattgccctattattctgtgttcataactttcttactc

SEQ ID NO: 77413 - DNA, 434 bp, Arabidopsis thaliana landsberg
agtgtaaaagtgatgtcataatatgttttaactttattactttttgaatataatgattaatgctgcgtagatgggctttgttttaaaatatcatatttatattaatacatcatatttagtttatattaaatgtaaaaattttgtatccaagttatattacgtattttatttgtttgagaacatatagtttttggcccaactttgaattagtttatgtattgtgtgttggttttagtcgtgggcctaatttagtccaatgaagatatataggctctagattctattatgtctgatttaattatttacaaatttaataaataaaaaactatacctaaaactcaatggaattgtgacaaacaaaaattgattggaaattacatgacttcctacgactgtggctgactacagctgactgcggctttttacgaccatca

SEQ ID NO: 77414 - DNA, 453 bp, Arabidopsis thaliana landsberg
  unsure (1)..(453): unsure at all n locations
cttctcgtcgggggtccggccactgggcaggggcgcggccgtgcacggatcggtaacgcgaccggtcatggtgggaccctcgacgaccacatgcagcaccaccttgaaatcgaggtcatgcaactggttgatcgtggcggcgggatcgggaaaaaccttgtcgttccaggtgaattcgccgttataggtattccagccgttcgggcagaaaccggtgctgagatagatcatcgtatcgcacggcatcttctcgtcgcggaaccgcctggcctcggcgacgatttccgccggctcgccgagcgtgcggtgcgactgctgatagccgagcgaccacaatggcggcatttcggcatagccggtaatatcggcataggcggtcatgatggcggcgggttcacgcgcccncactacgacagatcgatcgcgtaaccgggttgatcggagaaaaagcgg

SEQ ID NO: 77415 - DNA, 419 bp, Arabidopsis thaliana landsberg
tcaagcagaatcccgggaagtggcggaaatttctacaccaacagtttctttcaggagcctagcaggctgtaagaccggtcgcggagcactccaaggacgcctcctcaggtattttgggacaacaacggatcgatccagccaggctataattggaacaaggacaaccagccaggcctatctgatcatgggacccaacagctcctaagggatgcaatctgcaaactgaagtccccaccgtacctgagaacccggctcttcaaccccccggaacaacaaacagaggaccctaaacccggcgagtcaaacgactcgacaccaaggacagaacccataaaacccagtggaaaaaaacatcaaaacaagaagctgcagaacctcccccaggactcccggaacggcaaccacagcctgaagggcca

SEQ ID NO: 77416 - DNA, 564 bp, Arabidopsis thaliana landsberg
ggagatctcccgacatcttccgatggctgagaatgcgatttccggcgatttttaaattgttcatctgaatcggacggagagggggacgaatctgagagtctcgacgaggaagatgaataagaggatgataccgacggagattcgagtccgttgacgtagatattctcgtggttgatcggcgggaagatagcgagatcgtccttagcgaaacaagtcgattctctaacgaaaaccattggaaactggggctcgtttctcagatccaagtgtgtgatcctcctctgttcttcaccttccaccatctttggttaaattttgagtcgctggtttgttcctgacaaaggaacgatggagactacctgaaactccaagcttcaaatatcggcaccatagatgctttatcatgtagatgcggtcctttcttttactattttcttcacaaatccacccaatttatttgccataacaattacaaattaaatcttatttacgtcacataccattagtgaaaaccatattgtatatatcctagacacttgagatggttcattgcaaaaactagct

SEQ ID NO: 77417 - DNA, 164 bp, Arabidopsis thaliana landsberg
agctttataagaaaatagagcaagcacccaaagttctcatactacttttaaaaaacattttataaaagaataaatgagtcatatatggagctaccttgtaactatatcagtgcaattgggatcgatctttctgaaaagtgcaggagaaagaaaagaaggcagct

SEQ ID NO: 77418 - DNA, 530 bp, Arabidopsis thaliana landsberg
taaattaatagttgcagttttataaatatatattttttattttaatttctctttttgttaacactgggtgaaagtatctacacacgcaatttgtgatctgtctttaatatcgttttctatttgaattatatgattatacttgtctttgtaaccatttccttaagacgaagacatcaaaaaatatcaaatatgatagaaagcaagaaattttatttctttttatattagtaataatagtagcaaattctctttataaaaatagaaaggtttgttagaaattgagtttccctttttatgggcaatttctctttttgttagactatactagataaatagaaaatacgtacagacagacgcaacttgtgctatgtctccaatatcgtttttgtatcatgattgaaataatttgatatataaaccaaaaggataatataaaaaaaatgttagagaattagagataatgaagtgattggtcaatgaattggaatagaacgatccacataaaaagcagagcagagcaaagaaagtga

SEQ ID NO: 77419 - DNA, 473 bp, Arabidopsis thaliana landsberg
  unsure (1)..(473): unsure at all n locations
tttggtcggggtgatgctggcggccctgtggttctgcaagcgcaacaacaagtcgtgcggcgatgtgatggactacgtcgcgccgctggtgcccatcggcctgggggnnnnnnnnnnnnnnnnnnnnnnnnnngccgagctgtggggcaaggccaccgacgtgccatgggcgatggtcttcccgccgttcatcgacccggcgcagctaccgcgtcacccatcgcagctgtaccagttcgcactcgaaggtgtggcgctgatcctgatcctctgggcgttctcgcgcaagccgcggccgaccatggcgggatccggcatgttcgcactgttctacggcatcttccgcttcatcgtccaattctgccgcgtaccggatgcccagcttggctacctggcctggggctggctgaccatgggtcagattctgtgcgtaccgatgatcctggctggccatggactgatctggtgggctt

SEQ ID NO: 77420 - DNA, 557 bp, Arabidopsis thaliana landsberg
  unsure (1)..(557): unsure at all n locations
ctgaataaagacaaaacagtgttgaaaaaaaaaaaaaaaaaaactcattgtttaatcttaaacctataacaacatcatgtaaatccgaatctctaaaaggattagccgaagtggggatttggatttgtactaatgtgtccttggcacattcaccagccgccctgctcaagtcattgctctgccaactcaaactcaaacaactcaaggacgttgattggatttagttcattccaccgatactagtaatgactaatgagaatatattgggctgtagcaatacttagataatgaagccactgttttttggggcngccttgttnatttgaagaagacaccaaaacattgggctgagccatgtaatgatttttcttctgatgcattttaatagaaagtttttgatcaaagaaaaancccaaacaaactactgctcannttattncanctcangttactgnaatactgnncatattgttttttatattaaaaactttttccaaacaacaaaaagtctgtaaatttancttatgggaagaagagtcatccaataatttcatgtt

SEQ ID NO: 77421 - DNA, 234 bp, Arabidopsis thaliana landsberg
atcaacgacctgccaatgccaggggcttggcaagttttcgaactaaggacgcacaccaccaaaaagggaatcaactggataagaaccttttctcccaacgatcggtgctgaagaggagaagaatcgcgtgatcatctaactgccacttattagaaagatatcacgcatatcatctgaccgacactcgcctctctatcgaagaatctacaaaggtcggtcggatgtcctaaacca

SEQ ID NO: 77422 - DNA, 455 bp, Arabidopsis thaliana landsberg
gtgatattttagataccacggtcttcatccggttttagttatttaccaaaaaatgattgtctaaacgagacgtggctgtttcattgctggatgattactcctagtgatttcaaagactgttttttttcgttcgacaactaaatctaatgaaattaatccgtcaaatctctagtgaaatcacttgaaaatagactgttacttgcgccacgatttttctcaggagaggaatgatgtcaaaaactgtttatatttgtacattaggctagtaccattagcagtgagagtaccaacgtctatcatgcgttaatcgaatacattctttctgctaaaaagtaacatattttgataatatgtatcaacgttaactttaggaaaactacccattttactgttaaacatacatttattacaacattcatttacgcattttttcattcgtgacaatcaacccaaaa

SEQ ID NO: 77423 - DNA, 529 bp, Arabidopsis thaliana landsberg
ctacgatttgaggttcagggttggaccataaaatttggaatttatattcggatactttaggttgggttggtaggtttgagatattgaaattgggtttttggacctttccttagtttttgatttaaaacaaaattgtaaaagaaaatgaaaatacgaaggtggcattctagctttattttccagagaaagtggctttccagccatttattaaaaaaaacaaagaccagggtgttttttttctgacaaaacaaattgtaacactcactaggcatagcattctagttagttctgcagaaatttatagcgacactggtccaaattaggaggagcgagagcgaaggtacgagtgaggatttacaattgtcgatcgttttcacctagaaaccctaatttcgggggctcgcacgccctctctgatcagaagcgacttcattatcggtcactagaatctgctgcttcttttctggttagtgtttaaccaagctccgttttgtttgctcttaatggaatcagaatttctatcattcct

SEQ ID NO: 77424 - DNA, 581 bp, Arabidopsis thaliana landsberg
gaaaccgattcagctatgagtatataacatatttgtaaattttagttagctagttgtataataatactataatagttttaagttaagtaattatatgtcacatgtaaattaatatatctatatgaaaaataagaagtagcaaatcatacacaatccattttataaatatttgaattcgatgtaaattcaggtttcaacagaaaaacaagatgcaaagtatagatgtacacaccttatgactatgtcattgtcatgtcatcaaacactctacaaatgttgtgatattacatttgcgacatctattatgagaatgagtggcatgtaataaattttaaattgataaattaccaaagaaaccataagaacattatgttgattttgtcatataaactgtaattaattaagcgaataattaaactgaccgtaaatcataattaataaccataacttaagataggagtggactaattaaagcgcttttcttttgaccgtcattgctacaaggaatacaatttcgtttctttattcatggagctcactaccccacgtgtctgtcacggccatgatgattttttccgatc

SEQ ID NO: 77425 - DNA, 502 bp, Arabidopsis thaliana landsberg
  unsure (1)..(502): unsure at all n locations
tttcgacgaggttcttcgtgatgaaacgggtcagcggaagcgcgatcttcgggaactcgtcggtcttgaagaacttcagcgtcacgacgttcgggcggccctgaaccatcgcgccgaccgcgacgggttcgtcgccagcacaagcgcagatgccactctgatgattgccgtagtctcgcaccagaagagcggccagttcnnnnnnnnnnnnnnnnnnnnnnnnnnnnnnnnnnnnnnnnnnnnnnnnnnnnnnnnnnnnnnnnnnnnnnnnnnnnnnnnnnnnnnnnnnnnnnnnnnnnnctctcattcttggcgccctgatcgacctggaagtgcatcacgagcgaaccgagcttatgcggcccgatcccgcggctcttgaacgtgaaggaataatgcgaagccgatccccgccccgnnnnnnnnnnnnnnnnnnnnnnnnnnnnnnnnnnnnnnnnnnnnnnnnnnnnnnnnnnnnnnnnnnnnnngtcagccgagacat

SEQ ID NO: 77426 - DNA, 567 bp, Arabidopsis thaliana landsberg
aaatcagttaagttcttttgaaaatgtgtactattttgcttttatcttcaaacatgttaactttcgggaatatatctaaagaaatataaaaccaattatgaaattattctcatgcttcaaaaatgtaaaagggcagcaatcctaagaaattattggtttaagccaattatttatcttcacacagtttacacacaatagacaaagttatatattggacactttttcatgaatgtttagttaatatatatatacttctgcaacctacaccattgaataataacgttactgatttccttgaacgttttaaacattttcttgtacttttttaattaacatctttattagagccatcagccatctatatatacagacgcctatatgggtgaaaaaaaacctcggcaaaattgaacttttgaaggctcttttgttgactaacccacaaaaacctacgaatcgtcatcgtgcttaacactaggacatgtgttggagctcctttattattttagtcttcgtacaaatcagaattccacaaacatgtatttaaatataattaaataccccactatc

SEQ ID NO: 77427 - DNA, 565 bp, Arabidopsis thaliana landsberg
  unsure (1)..(565): unsure at all n locations
aatcaaaagcatacaagaaaataaaatacttgtactgttcgagcgatgaacacatatctcgaaatatttgaaggcttttgcttctttcagattccataaggccaagtattttttttttattttgtcactctcagaaattcagaatgtttctacaaatcttattttgatgtttattgtaaaatttggcccaagaaaagacgtctaaatgagtcacaatttaactaacatgagttgggcttatattatatgtgtcatctcaagtggtaccataacccacaagttttaggtttcaagttcgctaacattagaaaatcaacaaacgttcggcttttaaatgagcatgggctttttgtacatcatgggctccaagtcatgagaattgagagcaatattcaacaactaaatgtaagggattacactagttttagaacatttaaccatgttttcatgtttaatcagaaaaatcattagctatntacgtttttttgttataaggattaatttttatcaaaattatgtttagttntagtaactagtactaaatatatgttgacgataataattc

SEQ ID NO: 77428 - DNA, 565 bp, Arabidopsis thaliana landsberg
ataggattttgtgttgtggtaattagacggaagatgtttttagcttaatacaagaaaaggaaagagaaggttgggttttaattaaaatgttaattaatgctgatgttgacttttttacaattttggcaatttgttttacttgcggtattatgtgtgtatatgtagtaattttttatttatttttacatcatgtagtaatttttattgttatataaacttcttacagagcaaaactactaatacgatagacgaaacttatgactttaaaatttgaaaaacttgcattttttctattttccttttgcaaataatgttcagatatatatttttgtcaacataaagaagaaaagaaaaaactaaatttcttgcttacaatcctactagaacaaaaaaaatcctaattcaatttgttctagtaggattgaattagttttttactcctctgtgacttgcactcatctaaccctttttgattttatttgatttggttcagtggttaaaaaacagaataaaaaacctaagtcaatttgaaaagccttacaaaagagtgttttttttttttttt

SEQ ID NO: 77429 - DNA, 571 bp, Arabidopsis thaliana landsberg
tctggcgcggcccgcaccgtttcccgagacgatgatcgtacactaccctgtcttctttctcgaatatctgctgtggcaatggacggccgccaaggatctctccgctttcgatgcccgtgcactcgacgattaccgccggagcttttccaaacccgaggtgatccatgcgagttgcgaggattatcgcgcaggcgcctcgtgcgatccgcggatcgacgcggaagaccgcacggcaggacggcagatcgactgtccgatgctggcgctttggggcgcctccaggaagcacggcttcttgaacaagccgttggaaacatggcggccgaggtgtccgcacgtgaagggtggacccatcgagtccggccacttcctgcccgaggaggcggccggcgacacgcttgcagccgtgctgccgattctaacggaaggacgttgaagcaggggtggcagggcgaatagaggaacggacctgtgagggcgctgagaccacgttgtctgcaacgacatctcaatcgacggaggtggctcaacgaagccatccacggatcgggctggctctgggcggcggcgg

SEQ ID NO: 77430 - DNA, 469 bp, Arabidopsis thaliana landsberg
ccaacttttcaagtaaaagattgagcagaatattattagagtactattccgttcatttaaaatcctcaattaaattattaatcaaaaaaatccttaaacaccgaagaagttaaaagaagattaaaatatgagatctgaagtatggtgataaatgaatctcacacaattgaaaactgaaaataaaaataaaaataaaaacaatctaaaaattattattcgctgatcctggtaattaaacttttgacacatgtcagaactttagtaagagggtttaaagtttatataatataagatatgaggtttagtttaggaaaataattacacatatatatatatatatatattctaatattttatctagaaaatttattgtatcattcccaattttggcccactagtaaccactcaatatgaagctgacccaccctacccaactttttcatcatatatatgaagattttgatatgtt

SEQ ID NO: 77431 - DNA, 450 bp, Arabidopsis thaliana landsberg
agaaaaatgatcaaagacaaaagctcaaagagaaaaggtattcggtactcaaattaatcgtcaataaatgaaggataagaaacgaacatatctatcgggatattttattctgttcacggggttcctctcttctctcgcttttcaggtaaatggccagggatttttacatgcccaaggaaagaagatcgtggatggaaacgggcaagagattttgttaaaaggcatcggcctgggcggctggatgctgcaggagccttatatgctgaagctatcgggggtggcagttaaccagcatgatattagggcaaagatcgctgcgctcatcggccctgaaaaaacaaaatccttttatcatgaatggctgaaagacggcatgcaaaaatcagatgtggattcgctgaaagcctgggggtttaattccatccgcctgccgatgcattatgacttatt

SEQ ID NO: 77432 - DNA, 497 bp, Arabidopsis thaliana landsberg
  unsure (1)..(497): unsure at all n locations
ttcccagcgaccagaggagctttctacggtggcaatggcggcaaacatcttttgaaacagttggctggagctgccttcgttgccgtctggaatgtggtgtcgactactatcattctactcgctattagggtgttcataccattgagaatggctgaggaagagctcgggattggagacgacgcagcacatggggaagaagcttatgctctttggggagatggagagaagtttgatgctacaaggcatgtgcaacagtnnnnnnnnnnnnnnnnnnnnnnnnnnnnnnnnnnnnnnnnnnntgctagaggtgtcaccattgttctatgatttttcttcttctttttcttatttattttttgtgtattgatttccttatgagatgtgaatgagttatttgtgttctgtataggtggtaaaacttcacttttcatattttttggtgtgtatttggagttaacaaccatctgtgattttggtgaaatgaaaacatagagttc

SEQ ID NO: 77433 - DNA, 584 bp, Arabidopsis thaliana landsberg
  unsure (1)..(584): unsure at all n locations
acgtaccgctacccgttcgcgttgcgactggtgagctgaagctcggcatgcatgccgcgggaaaggaacgcgaaggttcgcgtgcctttcttttttgcgcgcggnnnnnnnnnnnnnnnnnnnnntacctttggcgggcatccgcgttgcgcgttcgagtcccgtgtcgggaaaacttggggtcaggtggcccagcgggcaatcgtgaaggcgttgtcaccggtacctgcccggatgacggcggcaccgtggccggggaaatgtcccggcaggagggtcgagccgtccgcggcggcctgggcgagaatgcgctggcgggtggcgcgagcctggcggacgtccagatcgaagcagcaatggctgtgcggatgaaggatctgcatcgggctgtgcagcaggtcgcccacgaacaaggcgcccgtgccggcacgcagccggacgatcgaggagccgggcgtgtggccgggagcgggttccaggctgatgggcaatccttgcacttcgtggtggtcgctccacagctgcagctggccgcttttttccaccggntcgatgctgtcggcgaaaagctggcggatgccctc

SEQ ID NO: 77434 - DNA, 447 bp, Arabidopsis thaliana landsberg
cccaacgggtactggtccgtattcactggcctctagcctcggagcagttcggtaccaatatccgcgctacggtgtaccaccagcgcacccaattttgcgcggggcatggaggtgctcattactacattgtttacgctcctgtctgcaaatatggaaatgggctttgttggcgcggcggccatcctggctgtgctggtcatgagcctggctatagggtcagcagtgaagacacccgacactttcgacaaaaatctcgactatatcgagggctaatagggtccggcggaaagaattcataccgatcacgaaacatgggacctctggcataaaaagaccggcaaatttagattctgccggtctgtatagattgtcgtaaaacgcgatacagtggatgaataaactgttctgtttgctgcttggcgtctgcccaatacatttaccaagggc

SEQ ID NO: 77435 - DNA, 335 bp, Arabidopsis thaliana landsberg
  unsure (1)..(335): unsure at all n locations
caaaatatgtcagatatccatctctatttccaacgtcggattattagtccatgttttcatcttttacatgataatgggactctaggcacgttaggctggtgacattggactacttcactaccatgacaaagaaatatatcccataattttgaacaccactaagaagatnnnnnnnnnnnnnnnnnnnnnnnnnatttaattttccactcttaatgaaaatatattcaaaatacacaattacaaacaactttacaaactaatgttgaaaggttttaactcattaataactacccaaaccaaaaagggtactataaatatagttaatcatttaatag

SEQ ID NO: 77436 - DNA, 623 bp, Arabidopsis thaliana landsberg
tcaaaagttccatatcgataccccccgggagattaagtaacttcctcttgtcactactcagggtccaataggaacgaccagtgcctgggtactgagattcccacttcttgatctgattgtaatcagacatcaaagaatcccatttcctcctgcattggtttagatttctgctaacatccaaagcgttgcagttctctgtgatcattgtccatttctggaagctagataaagcattcgaacaatcggcttcaaccgcagcgatctcattcacgaggactagacaatctttgactgcccattctggagcaacttgagaccgtgttctccgtgaacctgaagttccttcctccatccaaaaaggcttaaactgcaatttggtttaccaacctcgttaatatcatcatcatcagtaaagacattacaacataactgtgatttgaaactctaataaaacctattgtcaatgaacaataaccaaagaggtgcatcttcatgtttctgagttttgtataaatctgagaatggtaagcgatattgaaattcaggaactaaagtacacagataaactccacaaaaaatgcagctagatttttcacattgaagaatataactcgtaccaacaa

SEQ ID NO: 77437 - DNA, 209 bp, Arabidopsis thaliana landsberg
acgaaccagaccaaacaacgagaaacccacccccaccaccactgaacctaaaaccaaaactataacccctccgcaagccccacgaaacaataaaacgcacccgaccagacgactcccccgacaaaccatgagacacaccaaactaacggctccgaagaaacgaaccccaccacgacaaaacacgaaccccctccaagaaaaagacaacc

SEQ ID NO: 77438 - DNA, 556 bp, Arabidopsis thaliana landsberg
  unsure (1)..(556): unsure at all n locations
accctaattccttgcggcttcttcttcttcctcctcctttattcctctgtaattatcaaatgtttggtgttgcgatgagaacattaatctcaccatctcttgctcccttctctcttcatctccataaaccctctctcttctccaccgctcttcgcttctccttctcaatcaacaacataacccccacaaattcacctccttccaccatttccaccagaaagctacaaacgaaagcgacgagggtaacatcatcatcatcatctcagccgctctcctcctcatctcccggcgaaatccacgtcgtagtcggtccaatgttctccggtaaaacaacaacacttctccgccgtatactcgccgaaagagaaaccggtaaaagaatcgcaatcatcaaatccaacaaagacacaagatactgcaccgaatcaatagttactcacgacggtgagaaatacccttgctggtcactccccgatctctcgtccttcaaagagagattcngattcgacgactacgagaatcgattagatgtgaatggaatcgacgaagctcaatt

SEQ ID NO: 77439 - DNA, 347 bp, Arabidopsis thaliana landsberg
tcccagacgttcgtgttacgggtaagattttcttcccgtttaagcagagaggtccacatgttcctcctctggcagttcactcttcttctctttcgtcttctcttctggttaaattctctctcggagctgaccgtttcttcactcctaaatccaagccacaccatattgattctattcactggtaggtttcgttcatgacgtctctctcatttggggtttcccctttcaagctaggtttttatttgttaatggcggattctttgggtttttggcttcatcaccaacactgattactcctttttcctttctggagctctaattttgcggatttggttttcgatcggatt

SEQ ID NO: 77440 - DNA, 461 bp, Arabidopsis thaliana landsberg
aagaacagaggaaatgagatccaaaatctccaaattcctttttgttgattattagagaggagtgagagtgtgttcttatgggttacttttagagtattatgactatctgtgctcaaataaccaaataattaagtatgtttccatgcttttttttttaattaagtggaaaagagagagattgatgttttgatatttttacgcttttcttctatacacctttttcatattatgtggatcttctttgacagagttcgaggctagaatgccagtaaatatttttttttcatattctaaatggatattcttttatgattcaagagccactgtaaatgtgatatctccaaattaagcttaatgaaattaatgacgattgctacaactaatgaagaagaacaagattagaattgcaaggatacctaattattagattagggtaagagtcttttcgtttttcatattaa

SEQ ID NO: 77441 - DNA, 532 bp, Arabidopsis thaliana landsberg
  unsure (1)..(532): unsure at all n locations
cagcgtaaccggcaggacttgcgatccgctacgcgttgcgcgtaccatgccctcatcgcgcgcactacgcgctttgcatcggtggttgacatgaacgagcgcccctactgggaggcttacgtggccgcgaatggcggcccgacaggagtgtccgagaggctcggcatcccctattccacgatcgctggggtctgcaatgggagccgcggtatcggccacgcgctcgcgcagcgcatggcaaaggccgatccgctgcttgacgcctcgcgtcttatttgggtgcgcgctgcccgccagagcgaagcggcttaacccatgagcgccgacctgaaggacgtgcgctggaagatcacgccggaggcgtggtgtgcggtcgaggccgacatctccgtgtccgggcgggaccacagcgagattgccgggacgtgctgcatgagtgggcctgccgccgaatcgaggtggcgagggtgacacgtcgcctgctggacgccgagggaatcgcgggaacgtcggngagggcagggcatgaacg

SEQ ID NO: 77442 - DNA, 441 bp, Arabidopsis thaliana landsberg
ggggcggttcctgctggacgcgcacccggacctggcctgtttgccggagacgaacgttcccgcgctggagagggggttcgtcactgtgtggtcactgctcgagggggcgccgctgtctcagaaccggggcgatgagccgccggagatccctgacgcggccatcggcggggtgcgggagacgatggaccggatgaccgggtcctacctggagcggaggggcatgaatcgttactgcgacaagtgcctgggcacggcccggttcgcgtacctgatgacgcgcatctggtcggaggccaagttcatctgcgtgtaccggctggggaggggcgtgatcgcgtccggcattgaggcctgcccgtgggggctgaacgggtacgggttcggaccctacatcgtcgagtgacccggctacgcggtgttcgccctggcccggatttgggt

SEQ ID NO: 77443 - DNA, 467 bp, Arabidopsis thaliana landsberg
agaacgacagaacacagaatctgacctgtcctgctctgtgtcctaatgagcttttgagtttggaaaaggacacaacattacttgtcttccttagggaatttattcttttccagcctttcttctaatgggactttgcctttttgcttgcctttacaatctgcaaatcaaactttcagttattttttcttttctctcatgtgtgtaaaatactcgtcacagatctcatataagtccaagcttgaattgaaatatcagaagctgtgtttctttcactatatctcagattccttgtttttgtttttgtttttgtgctacatgggagccagattttcacgtatagcgaaaaggtttcttcctaaaaagaaagtaaggattttgatggttggtcttgatgggtcagggaagacaaccattctttacaagttgaagcttggagatgttgtcacaacagtgcctactatcgggat

SEQ ID NO: 77444 - DNA, 495 bp, Arabidopsis thaliana landsberg
gcacaaggaggctagctatccaacatcattattttttaagccgttgcaaggaatgattgggtgcgactttattgcaatataatcatggaatgatatgacctgatcacatgagctagctggatcttgcgagatgaacgtgggtgctagttacattctctcgatgtcaacaagactgccacaaacaaattcggcactggaagcgaaggaaatcttttccatgcaattcaaccgatttggtgtcaaggacactgattggttgtcatggatgaagactacaactcttactaggttctttaaataaatcggatatggtgggacccgaatacaccagttcaaaaacagatacttgactctggtctctggaaaggttttcacttgccccttctcgccaagtaataaggacgagtggatcaggcctagtcaacttttcctaacatattatttatactatttgaacatttttgatcctctttctctaaaatttctttatttccg

SEQ ID NO: 77445 - DNA, 583 bp, Arabidopsis thaliana landsberg
gcccggatcgcgtcgatgccagcggcggcatgcggcatgtcgtgcaagcctgaaacggacagtcatcccggtgcccgcaaaccggaagatcgtccggtccggtctggatgatcaggccaccgtgcgcgacagtatcctgcgccttgtccgacgtcgaaccaggctggtgaaagtcgatcgtcatcgtgtagtggccgaaaaccacggtctgcggttgcagatcgacatgcccgtcgaaccgcgtcggcggcagcacgcccaccatttttccggtgccctgatgggcgaggatcagcggcgtcatttgcgccaccaccgcgtaggcctgacccagcgcctgcccgtcacgcgtcgacaaaaattcgggcgcatacgacgaatagcccatggcgcccagttgcgcatacgcgtacagcgcattcgcacccatttgcgcgccggacaccctgcccgtctcggggatgaagaaagccttgccgggctgcacgtatcggcgcgcccacgaacggaaattggggaaatagatgtccggcgcataataatcgatcgccggcgccgccgcacgccagatgtcgaacaaatg

SEQ ID NO: 77446 - DNA, 280 bp, Arabidopsis thaliana landsberg
  unsure (1)..(280): unsure at all n locations
aacactactnaaccatantaatttttcctaaccgccaaacaacttagagtcaagcttacatattacatcacctcacacccaaccccaaaacactaaccaaacttctttttacttttaaaaactatcactatttaaccaaaactcataccattccttttctttatatcatctaacaaataaaacctactcattaaatcataaaaacaatgccttataagtcattatactcactcatacacaatatataaattcattatctaatactaaacacttaccaaac

SEQ ID NO: 77447 - DNA, 715 bp, Arabidopsis thaliana landsberg
cgaacttcttccaaaatgattctctttggtccctctcctccaattatgaaatttaaatctggatatttctgacagagttcaggtattataccactaagcaaatcgatccctgaaaatataaagttgaatgttggagatattaatatttaaacttaaaaaaattcaccagaacgactgagaatccacttattttgaaaagtattagctatgcactccataaaggagagaaactctcttaaaccttttccaggagtggaattgtttgcaaactggcagtggtcccccaagagttacaattcttgaagacgtagaccttgacatgcattaccttccacacacccaaaatatggactattctgtttcatctcaacagactattctttaagttattcacttgtgtttatacattgcgtacttctaaaaaaggtatatttaaggtggctaaggtttgagttcgttttctccagagcaggcagctgattggagatctgggtcttttcccagcttttttaaccagcaagcccattgatcgtggggaagtttcaagatctataaaataaagacacctatgtacctaaagtctctttcagctataaaattctatcagtctgtgatcccacttactgccacaggaaaggctaagcaacgaaatctaactgctggcctcactttgtttaaaatgtggctggtacagagaattttgcagtgaacacta

SEQ ID NO: 77448 - DNA, 224 bp, Arabidopsis thaliana landsberg
caatgaaaaatctctactagcttctcatataaaatctacaccatttaaatactctctacctaattaaagctttgagggaaaactaacaattgccacacaataaataaaaacctataccccagtttccacataacttaaaaagtaaaaggtgtcctaacttacatattactattatcatggatgaatctaatacatacctaccaacattgcatcttaaattgacg

SEQ ID NO: 77449 - DNA, 327 bp, Arabidopsis thaliana landsberg
tttagaattcattgcttttgtacagacttaagttctcttagactttttaaaccaactggtgacacaccctctgaggttgcaagaatccaattcaaagagttgcagctaccgatggacactcagaaagggtatgccttttaaccttcattcagttggtacttatctagctcttcttctttactcattcgttgcatgcttgtcctaaccggagttgaggtggcacggattgttttggctatatttaaatgatttagaaagccatccagtagtcttagactcttacatctaactatggatctcttcttctacgtttagctgcgagcttga

SEQ ID NO: 77450 - DNA, 590 bp, Arabidopsis thaliana landsberg
ttgattttgaatacttccggctaattatgacgatcatctgacgtctcttatacagtgtctttgctaatctttttatatatggcttattcaatatatataattcgtttttgttcttacaaaatgatttttttttttttttgttctgattcttttctctctttttttgacaaatagtgcctttatcacttagtttgatatacaaccattgatgggtgtgaattggtcccatgatccttttttcatctgcggtgaaggttggtatacccaacaactcacaccataagtccaagtcatctcgtctccaaccgctcacgtggacaattttgaaaccataagaatatatataaaaaatataaaatgtttgatgggtatgttttattgaaaactaaggagatagtcattgctctttgtctaactttaattagacaaatcaatcgctctatagtaaataatgttcaagaaagaatgtgctaagtaattaaccaaaggaaaaaagattgttgagtaacaacgatgtttctggtttaatagatgtttcaggtgcaaggacgagaagaaccctatagccaagccctacaaaattcactaac

SEQ ID NO: 77451 - DNA, 288 bp, Arabidopsis thaliana landsberg
cggggggatactcacactacggatacaaaaaaccaacgaattaactaacctaacatccatacccaattaaaaaaaaagaatttttttttttaacatacttcctttcccacccccaacaaataactactacttcaaatccaaaccatttacatactttaaaaaaaaaacctcttacgtatattccaaatcatttattcgataatcaaaataacctttccccctaacaaaatacctaataattacaacactcttataaataagcatcgaaatactctttatcaaaaaatt

SEQ ID NO: 77452 - DNA, 599 bp, Arabidopsis thaliana landsberg
actatagcccacttgttttgattctaaagaagcattgaaaaacttttgttccatatcatgttataacaacagtgtgggcgtataactatgatcatcgcatatagattatcatccaatgtaaaatctcgactagctcttcatataaaatttagactatttcgatactctctagctaattaaggttttgagggaaaacgaacaattgccacaatataaataagaatctagacccgagtttcgacataacttaaaaagtgaaaggtgtcttaagttacatatgagttgtggatggatgtatctataacatagctaccaagatggcatcttaatttgacgtgaacttttcactggattgagttataattcatctgcatcgtcgtcctcctcatcctctgagtctgtttcactgaattcagaaaaaccatatcagatttcttatcatagttttgaggcagaaatgtataggaagaaagactattgtgctaaccttgattgtcggcagtggttactcaaagtttgacacagaacctttcggacttctcctgcttttagggagccattctttatcacctcacctagctgcggtcactcatcacata

SEQ ID NO: 77453 - DNA, 451 bp, Arabidopsis thaliana landsberg
  unsure (1)..(451): unsure at all n locations
ggcgcgctgaagccgggtacccggctgcgcgagaacgaacatgcgtagtggctcaacagcanccgcacaccgatntgtttatgtaatgaaccggcttcagcccccccgcctggtggtgcatgagcctcttttcgaaatgatcttaacccatttttattacaacatggtggaggaatcttttacattatttctctaaatgctattattaacaacccttttattatattcttatcattctcaatactcttcaaataatgatctattacttctctataataactcctttctttcatttctttttaataaaaattttaatatttaacatattatattcaggggtgggtgtattatctttaaatccaatataatttttttttgaatttaataaagtcatttttttttacactcaataagtttataatccttattatcatttactgtttaataatta

SEQ ID NO: 77454 - DNA, 546 bp, Arabidopsis thaliana landsberg
  unsure (1)..(546): unsure at all n locations
ggacaagcgcgcatggaatcacacttgttctactttatattcaaattcacacacaaactcaggcacgttcttatggaaataaaccgagagaattacagagagaattttaagaaacttaccttttgagaatggagaaagctaagtctttgaagaaatcagtgttcgtagtcgtctaagccattgttctcctgaaacagagaagtgtgcttcgacaagataaacagaaagaacgagatatgttccttaaagactaataagatcgtgcnnnnnnnnnnnnnnnnnnnnnnccttaattgggtttaatgggcttttaaaattgatgcttatatgagaaaaagcccaaagaagagattatttttacaggatttgggtccaataataatatgagaaattgagaattatgcaaaaacatgtttttgactaaaagaataaataaaagtccattatatattacacacattatacacaccagtcaccaattatctcttttgtcaaatctccatagttggttcttttactgttaactcgttgtctaaccaaactcta

SEQ ID NO: 77455 - DNA, 591 bp, Arabidopsis thaliana landsberg
  unsure (1)..(591): unsure at all n locations
tttgtgcaaagcggttctaaacttcttgatttcttcacattgttaagaagggatnatggaggggacgttgggtttacaccgaaagtaacggatatataacnatgctaatncgatggttcgttgctcaaaaggggaaggaatagaagacgcctttccgcgttttctaagggagatgctcaaaaagggaatagaattaaacctggtgacttataacaccctcattgatgggttgtnnnnnnnnnnnnnnnnnnnnnnnnnnnnnnnnntacttcttgaaatctcaagaaagggtctcaaaccagatgtattcacgtataactcactaatatctggatatggattcgctggaaacgtgcaaagatnnnnnnnnnnnnnnnnnnnnnnnnnnnnntcaggaataaaacccactctgaagacatatcatcttttgatcagtttgtgtaccaaggaggggatagagctcacagagagattatttggagagatgtcattgaaaccagacttattagtttacaatggggttctccattgctacgccgtacatggagacatgggaaagcttntacattgcagaagcagatgattgaaaag

SEQ ID NO: 77456 - DNA, 319 bp, Arabidopsis thaliana landsberg
gctaatgccagagattgtataaagcacacccccctgtgccgtttataacccgctgactgtgtcaacgaagacggaccatagaccaaagggtgtgccctaaatgctaatgccactaccgggctcgttcgtgcatggaaagagccagatcaagtaatggcgcctcaggcctagtctctaacggttcagagtgtctttaacctttttcaacagggccgtagcctttgcggcatttgcggtgccagaggagaacgcaacgattgaggaagagacctcccccagttcagaacggagagcctgtgctgaactcacgcatatatat

SEQ ID NO: 77457 - DNA, 186 bp, Arabidopsis thaliana landsberg
caaacttataattcctacaaacatcatacacacgccgtatttcatattgaataagactcctgaagcacctgacccaaggctctacaaccacatataaaaacatctagcatagtgaaactttcctcaatgtgcgatacattccttataatacaacgaatgctgcgagtgtccaacgctacgatcaca

SEQ ID NO: 77458 - DNA, 509 bp, Arabidopsis thaliana landsberg
accttttccgatataaattggacgaaataggggacaagctgttgttaacctggatcttcgcgcaagctcggggaccgcgatgtgcgatacttgtcgctcgactcgtccaggaatgcattgccgactttctcaaagtagagctgttgctccttagacaggacatgcttgaccagcggcttaaccgcgacgtttccattcccgctcatagccgacagcgtagcgttggcgttcgggcccttggacattagttcaagattacgcgaatctgcggccgtcgggttttgcggtatagacggttgtacgccttcgactgcgagccagtgtgctaaatagcaggaccgtaggttagccatacgcaacccataccaagcagcacaccaggcaagaagaggagtaggtaccagtaaaactgatctacctcggcactctcggcaacggcgcattaatcaacttctgaaaatccacctgctcatcctcgacgtagaaaagtggctggccgggtcccagac

SEQ ID NO: 77459 - DNA, 568 bp, Arabidopsis thaliana landsberg
agacgcttagataccggtaatgtgtgacctcgcatctgtatttaatctctgaccccaagtcttggcctggtaaggagctgtttggaaaatcatgtacctgcatacccatcgctatgagtacaggctacagctacggactacagagtctagattcatgttcaaaccatggtttccattcgaaatggccttgataacactcaactagcacttctccaaccatgtgcggggtcccgagttttgaccggatcaggctacccaagagcacgctcgcctggcctggacttcttttaaaagaccagcatcctcagcacgggtcttcatctgcttggtgaactgaggatagtgttatccctctgctcggtgggtagacggtctctagtaccccttctcgcattttaacagtccttctagccgaccacaaaacagcacaatgcagctcagcgcatctcagttacgctatctcaaaccagttcagattgctctccgacagtatgacgagaagcttcaggacataaaccacaaagtgagtcggtcaatcgtcccgcaatgtcgtggtcaatggacatgc

SEQ ID NO: 77460 - DNA, 521 bp, Arabidopsis thaliana landsberg
gaccccacagaaaccaaaggaaagtcctgggagtgaatatgacagatttttacagcaatctttagcgcaagacctgagggtcctgcagcttgaccgctcgccaggaagctctatggcaactatgatagacagggaaagcccactctcaacacctttaccccaccagccatggtcatccacggcagcggaagcaccgacactgcaggcatcaccttctcgacaccccgcggaacaacaagtcaggccagatatggagccgtcccgcgctcagcctccattattttctcaaccgcaaactcagccgcagcccccttcaccaatacccccaccaacaccgaagcatgcctctcctccgccgcaacctaaacaacaaaagtatgtacatgcaccgttgcagaatcttccatcaagtcatgtcaacccaaacagcccttcatacaataagcccgccaactcgaacgcacaagacatgaaacagtcacgaacgcctcacgaaatcactgccctgaacagcgtcattc

SEQ ID NO: 77461 - DNA, 488 bp, Arabidopsis thaliana landsberg
atcgggtcgggggactaaatagctgatattgtgggtaggttgtggtttggtgctttgctgtatttgtccaagggtcttggataagaataatatctgcttcaaaggagagtagcacgtcatatacagcacccccccttcctatattagcttatagtactttcatagttcaggggaggtcagggtttggtttaagagctcctgggtgagctgtcttgtaggctggtttgtagcataggtattatctggttattacttagagctttcttgtgctttcttctgctcctgttagaagacaagctggcctgccttgcagatagcagctagagcatcttttgagaggcaggtaatagtgttcctctggatatagagtctggctgggcatttttagaagtctactgcatgcaggccgcagcagttaatatactgcatatagcagttatattcctgttctgaggatctgtatgagatatagtatttgctggagcagc

SEQ ID NO: 77462 - DNA, 511 bp, Arabidopsis thaliana landsberg
ttcgtcgcgcagagccagagccagctgctgagccttcacagtctggtggacatcgtcacgagggaaggaccagcggagacaggtgatgggtccagtaagcatacccttcatgggcttggatgaaatcgagacagcgtacttggactccttgacagtcatgggagctggacgagagatgtcaccgacgataatcgggggacgcacgcaacgggatccgtaactctgaacccaagcgtgggtagtgaaaacgtaaccggtaagacgctcaccgaagtactgaaccatgtcgttacgctcgggctcaccatgaaccagaacgtcaaggccgagctcctcctgcatcttgacaacttcggcaatctccttctcaatgaacttctcgtactcctcagcagtgatctcgcccttggtgaacttgtttcgctggataccgatctccttggtctgagggaaagatccgatggtggtggtagggaaaagaggaacgctaatggacttggtctgctcggcg

SEQ ID NO: 77463 - DNA, 571 bp, Arabidopsis thaliana landsberg
  unsure (1)..(571): unsure at all n locations
tatgaacccgtggctgcgcatgacctgatgggcataatactttgccattatgtacttccaagaccttctcaatgttgtcgtgcccctgactgcaatgagaacaatgccaccctgcatgaataaggagatcctgtcagccaggcaatgcagcatgtataggatgctatgaggcagctggctcagcatagtcagtgcatagtacagcactgtgggaatagtatttgtataatagctgcgagcacagtgcctaactagatcccacactgtctactgcacgcatatatggataagacaagtattgcaaagtatatatagctatggcagcagatcctgctgttccttatttacatgcagactaagtagccataataataaaaaaagctaagctatgttatgactgtataatagcagtagacctggcagcaactatagcagcttgcctgtagatctgataaggtaggtaggttgccagcatcatgccagagccctgatctgatcttggataccaaccaactngaggcatttatgatgaccctgttggagacagcctgccttgatttctgcattgagc

SEQ ID NO: 77464 - DNA, 573 bp, Arabidopsis thaliana landsberg
  unsure (1)..(573): unsure at all n locations
ctatgaaaccatccatgcctacgataccccaccctatctacgttactcatttatctcatcaactatacgggctcaggggcagacatgtacaatatgctacggctttggctttgcgttacttcgagcacaagcaccataaacacttacacaggacatcgggtttggcgtttatatttttccaagtatggtggtcgctccgtttcgatcgattccattgctattctatcatacctatactcctaggtcaggtgttttatattttccatattatttgaacatgattgcttgattggttgatttccattgatcgacaactcgaccagacatgacccggcgcggcgaggcgttcgtttcgtgtctttggctagatgaatttttggagctcgcgcgcttgtctgtttgttatctgtgctccattacatgccatatcttcttttgggatactcagctacagtcatctattgatttatctacggtgtatggaatatgcttatatccaattcaatttaccattattcttcctatatcccnggcttagatgtgctgaggatgtaagaaaaggtattaagagca

SEQ ID NO: 77465 - DNA, 547 bp, Arabidopsis thaliana landsberg
cgcccacctgccgagaaagacactgagaaattcggagacgatgagtttgcaattgacgcccagtggttatacagcatgggcccatccggggatctgagccaactcgtttggcctgagaagaagccctttggtgaaggcctcatcatcagctccgaggctctccggattgcaagcgaaatctgggacccagctgaagttgatgatgcatatgacacgtttcaccgcgaattcgcagagttcaagaaaactgctgtatagagtgtcgtggtttttgttacatttgcttaggagcctgcgcttttcatctacgtgttagaatttgtcttgcctgttgacggcatgtctggagctttcatggctgggaggaaacgaggttattctgcgatactttttatctggtcggcagtgggctgttctttattgcagcgtcccccgagttggcggccatgaattggcgttacacatgttcatgtatactttgttgttggagtacggaatgggttgattctttctgtttcttcgtcatgtcttgcgcattgtttctcag

SEQ ID NO: 77466 - DNA, 374 bp, Arabidopsis thaliana landsberg
atggtcgccggaatgactcctaccacggtccacctctgttttgtggccgctattatgaacgctgggttcaggcatagctcgccggaggaggctaccacaatgcctccgggagggaggctgctatatatgatcttgttcccagaattccaaaagagcgaggcatcacctgcaaccttatatacgccactccccggtccatttcgtggcaaatacaacttttgcgccgcttgtcaaatggcaatgttcgctattgatctcttaacaataagcgctggtgttccttccctcaccggggcaagcgactatattgtgaccttgggactgcgacacatcatctttaagctcgtgactgtggctgcaatacgaaaagtact

SEQ ID NO: 77467 - DNA, 474 bp, Arabidopsis thaliana landsberg
acgaccgccgacgtatctattgttatcgggggcgcttgttctttgcgaagtggcgtcaatgcacgcgggctggagacattattcttgctcgactgtgtcggctcggacatgatcggccaactatgcgatgacggaccttaaagagcctcacgaggacagagaaaggctggatttcaataagaatgtggctccggaaggagcaactcgaatgtgcttgaaccggtcatgaaaacagctagcatggagagacaggcctcattcagcgatcgatacctcattagaatgctgaggctgccagtgcccaatggtccgatcggccaatggcaggggcagcaaagggcgaccaagaaagagatgaatgggatgtactgagacatgagaacgaaaccaaggcctctgaaggtaggagaccctctagcggacaatagactggacgagcaccagactaaagacgtacgctttgcttaagtcact

SEQ ID NO: 77468 - DNA, 541 bp, Arabidopsis thaliana landsberg
ggaaaagcatgtgaaaccatgatcttgctgcactggtgctgtcagattttggcaagtcatggttccggggacacatgaatgaggcgagttgatggttccataactcatgatttaagaacgattaaagaaatgtgttccacatctgcaatccattatttataaaaggaccttatgattcgggtagatcaactgccatacctagtgtgagatggcccatcatgagttgcgggaatgtctagtcagtgatacgataggtaagcccttagccctgattcgtgctgttgcttctaaatagcatcatcacacgacattcagctatggctccttcatattcttcccatggatagattaaatctttcccctacaggctctgattcggagagaattttagaagaaacgaaaagaacgggtgattgcattgaacgagttcgaagtccaagaagaggagcaggagggagaagatgcgccgctaccccaccgtagccattatcggcaccggtccagcaggcatctcagccctaagagcgttgcacgacgagaa

SEQ ID NO: 77469 - DNA, 410 bp, Arabidopsis thaliana landsberg
aagcagggccgataatcgtgctcgtcttgaaaaatgccctggacgcttcgtttttggaatctatgatatatctcaccggggttgggcggacattgaaaaacgccaacacagctagccccggcattatcactaccactgagcgaactacacaaccggtagcgcctgtatcgcgcgaactgagtgcccaaacacatacacaaaccactgatgtcggaaccttacatgcaacacccgctcatgaagtacctgcgtataacaggaactgtgcacaatagaaaccaatcctgcctaacaaaagccactacagcatatgcacatccgaaccttactccgaagcagctgagctgagctcgaagcgttacctcgaagtgaatccactggccagaggatattcgttcctaacggtactt

SEQ ID NO: 77470 - DNA, 382 bp, Arabidopsis thaliana landsberg
ggcaacgcctgccccatctgacagtgacagggttcaaaatgctgatttgcgattcctccatttcgatattacactgaaggtgcaggttccgcttactctagaaagacaaaaggcacgtttgaatatttatctctataatgcgggtttttctgtgagttcgccagcaatattgttctactacccggccctgactggtgcagtcttggcgctacaggctatattggaggcgaagtccttcacgcactagacaatactcaccccgagtatgaaatcgcagcgttgatccgaaacacggagaaggcgagtaaggtcgtcgcagcttatcctcagtcaaggtgatcagtggcaacctggacgatatttctgtcatcgaggaaaaacc

SEQ ID NO: 77471 - DNA, 454 bp, Arabidopsis thaliana landsberg
gaatcgggctctgtatatccatgtacttttttattacatattgagatgaacgatctatgggtcatgtttgtaattataaattggaaggtttctggtttggtcgtaaacaaacctcggaaagctgccctggttgtatattttaaccaatcagatgtagcctaaaactctaaagctatatgtatgttgaggctatattatactcattctccctaatctgctgttatatttatgctgcaattacaaatgacttcattgtcaaacagtctttcctacactctagttgtatacaaaatgtaaatcttccttacctttgaatattgtcagtctttaccagtaacgagttggtgctgacagctcagccgcagctctgcatcttggtcaagcaccagcaagtaataaatccctttgcttcgagtcgtacgcgcttttctcctttgaacccaattgcacatta

SEQ ID NO: 77472 - DNA, 489 bp, Arabidopsis thaliana landsberg
gtgtaaaatgtaatcgggaaaataggaattttcccaagaaaaaaaaatacactaaaattttgatgtgtttttatgtattaaatacaagtacctatttctttctacaacaggtatcacatgatctgctcaatctcattttgaaggcaaggtcgaaccctgtttgtaactaaatattttacaaatacactaaaagttttgttttgttttcctcatgcagaaaaaagaaaagaaagaagaagaaaaaaaactcacaaaaacatacattgttctacaatatgttaaagtaattgttccagggtaataaaatccgtgtctgcctcttccacttcaataggaaagtgtaagtttttcgaatctttttggccagataatttaaaaccgaccgaggaaacttacttttgtaaaagtgaccatttgcacataggaagtagaaagttgataattggaaaaattataatattttatacaaaagaagtgttaagaaccacc

SEQ ID NO: 77473 - DNA, 523 bp, Arabidopsis thaliana landsberg
  unsure (1)..(523): unsure at all n locations
actcccacatcaaaaagccatatagggggctacacatcgatttgccgtttagtcatcgaatgttggaaagcttggctcaagaagacggtcacatagcgcatcaagcattagagcaaagatgcttgtttagccggcacgaacaagacgtggtctaccgggcagtgcaatatgtataatcgcaacttttgcgaagnnnnnnnnnnnnnnnnnnnnnnnnnnnnnnnnnnngggtaacccgtgtgttgtttgctacgtatgttatggccaaccatcctaagccttgagggtcaagaaccctaattccagagccctagtgttcttgtaaacagttaagtctatatttccggctgagaccggtttgtgaatggtaccacgttaggcagaaatttggaacagtaccgtacagtaacagctaaagatgcacccggcttagctattacggtgcctccttattcgcaagatcattataatttcaccttgcaactaatgtcaagatggtactancaatccgttcgtctgttaa

SEQ ID NO: 77474 - DNA, 540 bp, Arabidopsis thaliana landsberg
  unsure (1)..(540): unsure at all n locations
cgacaagggttcaatgaccgtttgatccttgtagcttaggctnnnnnnnnnnnnnnnnnnnnnnnnnnnnnnnnnnnnnnnnnnnnnnnnnnnnnnnnnnnnnnnnnnnnnnnnnnnnntctgcttgacatacatcttgacctacacgcgaatatgaagaatcgcggttgtctacagcatcacgcgaatgagacctccaaatcaagccttatagcccgagcgtatgtttcagggtatatcggtgtgccaaaagttagcgttaaggggcctttcgtcgattcaagcgtcaatgcctcgacgtgcgacagcctcaacactgagacgcgatcaacgcgtttctcttcagccagcggggttctgccgggcggtcaagacaatcaagtccacccacagctcgtccaatcagcagctcggaaccgataaggcactttttcctacctaaatttcttgagcacaatcgatccatattgatccctcttctatcatcggccaggaagtaatcggactctaccgttatcatgtcctcagattcgactactc

SEQ ID NO: 77475 - DNA, 545 bp, Arabidopsis thaliana landsberg
  unsure (1)..(545): unsure at all n locations
aactgccgaaaactcggtgacaatgtttgtcactatcttctctttgtcatatgaaacgtcgtgaaagtcactgcacattcttcaaaggggatcgctgacagtcgagggatgacttctgcgcgagtcatcatatccgcccaactcaggccccaagacatggatacgagatcgtggcggttactctgtgcgcgacaggcaggcaaagggaatctcgcctttctcggtgtcttgtcatctgctgagtaggtgattggtccttacctctgtggctgagtcgatgacaagattctagtctcgcaattctcggtctcttgaagcatgtcaatttttgattgacaataataatgcaaagacaccatgacggtacattgacaaaatcattgatccctgccccattctgagaaggattcgctgtcatcgaccctgatgatggaggtcaaaaagtataaaaaggtcttttgcgtccttcaaacccggcaccaaacggacacagttccaggatcctcnnnnnnnnnnnnnnnnnnnnnnnnnntgcattgaacact

SEQ ID NO: 77476 - DNA, 461 bp, Arabidopsis thaliana landsberg
acgccaacatgatcacttgcgcctccatctcctcagggcccgtctcattcctctcttgatcatcaacccgcaacgtcgcggtatcatccccttgccttcccttgagtccccgcgccaaatccccttcctccccatctaacttatcataaatctcatcgatactatccacatccctcttcttcctaggaataatatgcgcatgcacatgcggcacgctctgccccgactcagagccatcctgaatcgcaatattcagactatacgccccgtacacgcgctgaatcattctgccgacatgccggaccgttaaaaataaatcgactgcctcccagggcgttcggtcccagacactgacgaccactcggcgcggcgagactaggacatggccgggaagaataggcttcagatttacaagggcaaagcttataggcgttgtgttgaagacctgatgacaaaaacta

SEQ ID NO: 77477 - DNA, 713 bp, Arabidopsis thaliana landsberg
ataatgtaaattcaacattggtaagtcaactcgtgatgatacatttttggttaatagaatttcacaaaaattgagttttgtttttttgtcactttataatcagacagttccatatagttcactggtccgtccaatgcaatcttctcttccaacatgttttcttccttttatccgtgtaatatcaacaacacttgggactgatttttttttctttttcctttttacttttgaaattcatgatgaaaactaactagcaagttgatgtgcatatttatgaaaatacatttggacgaatgatcaaatcaagaaacctgctgataattttagttaatgacttttttttttgtcaactcattacaaagttctggattttaaatatttgcatttctcttgatattaatgattcaattttgattgtttggagtttggaccatgcatatgctgacaaccaagttactctggattttgggagggatattccagactaaccccaagttatgaaataaaagacattgaaatcctcataaagaagggataaataaagtttatcttttgaacagttaatttgttttaacgtaattttatcaaacgaagcgcgagctaaaataaaatgaataattggaaatctaattttttcaaacacgaacaataaatatgcctgcatgtcaaacatgttgacttctccatacccatagctttagagacaaaatgaa

SEQ ID NO: 77478 - DNA, 512 bp, Arabidopsis thaliana landsberg
  unsure (1)..(512): unsure at all n locations
agccggcgcagtattatagtatgagggggcgactggcctatctctttattgattctggagcatcaaacgggggggatgacctcccatgttcggcaaacggcaactgattagtgcaaccttacctaacgacaaagtggacactgcggaattctacaagcatattgcggccgactgcctgcaagagccaatgcgaatgacgcagcttctgatctggtgcggtacacgcgcgctgctggaaaagccgcctggctcgcgctctggagacgagagcgcacgattagcatgtaggcagtgtcacatcagtcaaaggcgtgattactgaactaacttcttgcagcacgggtaatccaggaagagctaatgaaagattttttcagccattcggagttatcaaattggttctcgcgggaggacacggataccacggcggttgtcaaaaaggccaatccgactactttgcagaaccaggacaagatcacngaattggaggagcaaatacaaaagttagtgct

SEQ ID NO: 77479 - DNA, 528 bp, Arabidopsis thaliana landsberg
aacggtacttttaattgaccgcgctcgaccttttcactttcggactaaacattattgattatttggcttcaactacaccgaccgacaccgacttacatttacatacgactaccgagttttgttttttttccttcttaaactgaaaacatctgattgatgtgcagaggaaatggatagatgacagatggtcttgacatggctttacactagactcttcttgggtctccagagatgaaaaaaaaagcatgtgaagagagtcgtgataatgtctcttattagacctagcctaatggttccagacagtgttacagaaatgaactctcgggaaacacaactacaccgagagaagtagttaccacaagatcactctctatgagaagcaatttgatgacacgagattgctcactaaagcggaccacggattaagctactactctaggctcttctattgggaaacgctagctcctctttcgggtaatcatctgcatgaaacccgaggatgagatgaagatcacaagcttgttaaaa

SEQ ID NO: 77480 - DNA, 541 bp, Arabidopsis thaliana landsberg
  unsure (1)..(541): unsure at all n locations
tcgcaccaagaacaattagccgaattgaaatcagtccttcatttaatgtacatttccaaggacgatctcgatgggcgcgcgagcaatctccacagcaccaccttctccggctggtccctcacaacctcccgccttcactaggaagagtatggaagctacagatatccctggcgatgttgtctgcgcnnnnnnnnnnnnnnnnnnnnnnnnnnnnnnnnnnnnnnnnatcaaaactgtatgccgaaccgacatattggcttacgaggattttcgtgagctgtttactatatcgaagagttcgaaaccccnnnnnnnnnnnnnnnnnnnnnnatattcgggcttaaacgtcatgagtctggctggctttggtggtgcggcgttcggctcgggctccccctcaccgtcaaaatctcaacctcattcgccgagtgggagtgtttcttagcctcaaccccctaactctagcgtacctttgaaggatgcacgattctacaagcgtgcacttgtggaagatatcgaacctacgttgagactcgatgcg

SEQ ID NO: 77481 - DNA, 562 bp, Arabidopsis thaliana landsberg
cttgcaatcgtaactcctcgctcaaaaaagctttagctggagtttccttctcccagatcaaactcagagtcaagtgcgtcggtatcgagagctgatgacaaaggtgaggaaacttccattggcttgttctctttaagatagtttttttcttcatgcgagctagcctcatatcgcttgaattccttgccatccttatcatgagtattcgagttcaggtttgcccgattagtacgcaatggtttcgtactcgttggcggccgtggcgctggagaccgcttctgcataggtaagaagctcaattcatcgtcgtctgccgctgctgaggggagatcatcttccgaatcactaagcacatcaaattttgatagattctggcgtcttggccttcttcggcgcctttggggtaagagcttattttgtaatgctgccgtcggtaactggagtttcttgtcttttgctggtgcgggcttcgcattgcgagcccttcttgttccaggtggtagcctatctgcctcctgggtggacgtttccagtgtactattaaacacagggctgctcatgg

SEQ ID NO: 77482 - DNA, 506 bp, Arabidopsis thaliana landsberg
actggactggtccggcactgtctggttcccattccataattttactcataaggcaggtagcagcaacggaagcggcagtgaaaagacagaggataccgaagttgcgccaaacatgactaaaatagaacccgtatttgactgcaagatagtcatcgccgttgactatagtgcttccgatctgacttccagcataagcacatgtctggtaggcaatgtcagtatagacaggtcctgcagggacaaccgaagctggggagcaggtaaagttggtgttgtgaaactccgcagccatcattgcctcgtatgtatataacgctggtgtgatatactaggtatgccttagttttattatatagacattaggtaagatactcaccgctatccatccgacccagggaacatcagccatcatcttgtccacagagagtacgtaacctccaaaaacaatgcaaagcagaacgaggaatcctgtgtagcggagggcaacctcgaagttagaggacgcg

SEQ ID NO: 77483 - DNA, 576 bp, Arabidopsis thaliana landsberg
  unsure (1)..(576): unsure at all n locations
atatccgagggtncgggaaaaggaccgggagatcactatagatcgagttacaatattagatnnnnnnnnnnnnnnnnnnnnnnnnnnncttactcaatgaaaaatttcattgcgccggacaagcttgaagctagatagatcagagcctggcgtcagaatgcgtgggagcttctggccggagacccagaccgcgttgagcttttcccttctgggcggtcgatgacaccagatcacgtgcttaattcccgataaggctccgccagaaccgtcactactgacttgagcagttgccaacatagaagcgattcactagctgggatgacactgattcgagaggaaccacttggttgagttcggttctcattctaatcttatttttctcgtttctgcccttcaaccggccggctttcttcctccatacaaccccgctaccccacattattgctatgagcaaaaagttcaaatctcaagcgtcgagcagccgtgctgctgctggcacctttgggggctttggagggttctcatcatctgtgtcgggtcagggaagagagctgtcttcctttacatatgtgactg

SEQ ID NO: 77484 - DNA, 567 bp, Arabidopsis thaliana landsberg
  unsure (1)..(567): unsure at all n locations
tcttcgtcaagcggttatctgacgtggcatttaataccacattgttactgtatatcatctcatcacttnnnnnnnnnnnnnnnnnnnnnnnnnnnnnnnnnncgtagaaggaaaccatggagcagcacagtccaaggactccaactttctactctgctgcttcaatgaaatgctagtactacagcttcgtccaagccggttttccaagcgtcatttgtccaagaatccgttaacagaccattgtccagaaacacgctatgtaacataagaaccaaacctggaatccccaattcatctattgtacagtttataagcaacataagataaggtatcatcataactcgtcaaacagtcaaacagtagcctgtgatatcgaacgccagcgcccaaggcaaagaaagaaagtaaacatatacttgaaacactcagagcgtaggtgccctcttcaagccaacgcaataacgcacaaacaatgtatcaatgaagtgtgcatgtctgattcctggcggacgacgcttctcgaactcatcaatggcttcttggacaccgaatccgcatcgctcaatc

SEQ ID NO: 77485 - DNA, 428 bp, Arabidopsis thaliana landsberg
gcacatgaacttcgataacagaccaaaccacacagtctttactttttcatagcacaaagataacgaccggggatgggaacagatgctgggcttatgagactccagtgcatacaagggctccagtcaacaaacgcggttcacaaacctgatggccgtatgaaggctccccgagcctaactacggatactgaagccggtctctactggcaagtacttcaggcacagggagtgcaatcttgcttacgcattatgcggctgactcactggcactagaacaatcaatgggaaaaaccaagtccgcttcgatcacatttatttatctgaggataaaaacaccgcgttggtggactggctaacagggctgctgtgcattacaatactgaccattgatcgatcgccgtgacatcttgcgggacacacttatggttc

SEQ ID NO: 77486 - DNA, 458 bp, Arabidopsis thaliana landsberg
agaagggacgcatctactccagagagtgtttatgctgctccagtcttcatcggacacccctcccgcagacctccttctgtcttggctccgtctaatggttgacaatgttttcctcgaatccctccagtctgtatgtttccccacgttccatctcttcaaagacttactaaatctcggccgccctgtgataaccctctagaacttcttttaccgcttcaagggtttgtgtgcctgattactctaacttttctaagactgcccctttctatccctgccattcttgataaagatcagagcaatgatacattctccaagccaccttattatctttgaaaagacgacattggccagatcaaccaattatttacagcagttgcgcttcagtcaagaactgcacgacccgcaccgtttgcatggcggcttattttgcacaccatgacagagctcgctcttaacga

SEQ ID NO: 77487 - DNA, 523 bp, Arabidopsis thaliana landsberg
aagtggtgcagcataacaattcctttatgattatggagggggtagtgatgccggagcgggggcagtatagttggggtagtctcggaggcagtaagtgctccctagccttccacgcccgtgcacagatgaaatgtaagattagtaccgggcgactgttggagagataggaaggccatacataagtatcaacccataagctctggcatcgagacccaatagccggattccatctgaccaacttggccagggtcagacctgaatacttttccaaaaataccttgccgctgtcaccgtacttgacgagatcccaccgcttacaggtccctatctggacaacctgggtcgtgccatgggcgtttccagtcttggtggtagtagaggttgtcgctgttgtcagcgtcgcgatcgtctttgggggcttggtaagcgcaagctattcccacgctaagacgcaatgcgacttgtctggcttgaatcctttacagctagctgtgatggactgattctaggagatgttagttta

SEQ ID NO: 77488 - DNA, 532 bp, Arabidopsis thaliana landsberg
aacaagaccatgcacttcggccgcgcaaaccccatccaatttttcgacgacatcctagcagaccgcgggagggagcgccgtcaacaaagcactcatcctttctgccctcgcagactttgattccgatgacgacgaacgcgacgatacctatgacgtcgcggatgtaggtggcaccgtcgacgccacagacgacggcactgcagaagatcgtaaaagctgatcaaccgacgaattccatctcactctcctccgcgcctacaagtcgacaccatccctgtttgcacgtgattcagcaacgcgccgatcccagccccgtaatgctctcaagcgcgagtctggtctaacagacgaagccatcgagggctgggcagtcatgctaaatcgtgatcccaaacgacttgccatgttggagagtaaactcgctctttcagctggtggcgatggatgcgggctatcacaacccgaaataccatcaacatcataccgctcgccaataggtgatgcatattctgagagtgcaactgaaggcgag

SEQ ID NO: 77489 - DNA, 391 bp, Arabidopsis thaliana landsberg
tggaaatatatgtgctggttagatagtaaattacatgagagtttcgaacttctttggctactttcttatcaatcgtaaatcttatttacgatcttggtttttttttcctcataagtgttgcctctcattataaagagttcgccaacggtacaagagcggaacaatccactttcaaactacagacaacacattaaacagaaaacaacattggaagaccaaacaggtggtatccatgctgcagagaaaactatttataatctgatttggttcgattataatcaaaatgcatatcaaagatatcataaaatgacaaagtagttacaagattctatatgaattgatatgttcattcataatacataaaatactcaactgaaatgaattttgttta

SEQ ID NO: 77490 - DNA, 529 bp, Arabidopsis thaliana landsberg
  unsure (1)..(529): unsure at all n locations
ccgcgggactctggacccatgggatggtatagctgaatgagtgtcatttgaagatcctttgacgggtcatctgggaccgggtagtggacataaggcttcnnnnnnnnnnnnnnnnnnnnnnnnnnnnnnnnnnnnnnnnnnnnnnnnnnnnnnnnnngagcgcgtgcggctgcgcatggccgccccccgcatttnnnnnnnnnnnnnnnnnnnnnnnnnccattgccccgaaacgttatttcggtgaaacatatgtcgaggtaagacggcactcctctgtacgaaacatgagcgcgttgcatactgagtccttggcgttggctcgtgcacatattcccggataggctttgctcgacatgagggacggctaatcattgtaagcgagaatatggagaaatgtcagtacccacgtacccacatcgggcaattcgtactccagcaaaacccatggtatccctacacatgtcaactcagagtaagtgtagtctgctttaaaaattggtgctgagcccgagactaaagcacgctg

SEQ ID NO: 77491 - DNA, 550 bp, Arabidopsis thaliana landsberg
atacactgccaatacaagataaccataaacctttgctagagccttcattttctttgaattcacagcggaaggcaaagctgaacaggcgcttcccccggccctagctccccatgaagctgagatcgcagactttgcatccctctgcacaaagacctgcaaccgcattctcagccttctttctctaggcctcaaagtacaattaccctacccttcccagctcctcagagcgatgagagttgaccctgccagatctccccctcattctttttaacccgccacgatccaatgaggggcccaacaggttgcatactgcgctatctatactacccatccatctctgcgccccagacagcagactacgaccatactgttgacgtacgtgctggcgcacactcggactacgggagcatcacattgctattccagagacctggacagccgggattggagatcctcacgccagaggggacatgggcgcctgttgccgtagagcctggaaggccgagtccgagcggggatgacgttaacaacgaaattgctttcccgccca

SEQ ID NO: 77492 - DNA, 501 bp, Arabidopsis thaliana landsberg
  unsure (1)..(501): unsure at all n locations
catgaattcgtgacatcgtgaaatcaaagagattccaaacttttcctgtaccacctagggccgtacttggccttgattgcgctcaacgttaccaacccagttacggtaccagcgccagagggtaccggagtagtgaacacccacagtatcgattctatcccctatcagtatttttccactgacgagaaacaagatactcaccccttgacctcaaaaccggcctgctccaagcacttgacgtaataccacagtggagtcgaagcgtccgcgccgcggaaaatgtacttgttgagatacaaaccccagatgaagtcttcgtactgccacgcctgtcggagaccggaaagctgaacgtacatggcgccatcatccttgagcatatcatagcactggcggaaaaagccggtgagtctgcggatccaacgtgttctcccatttcgagctgcgtaatcttgtcaacttggtgcgnggggcgtcgcggtagtccatgcagagaatctt

SEQ ID NO: 77493 - DNA, 516 bp, Arabidopsis thaliana landsberg
cactcggatttagctggcaaaaatgcccttcagaatctttctatcttctccaactggcagcaagcttataaatctgctgatactgctgttcatttaatacctcggctagcaatgcgatcgcttgagaactctgataagcaatatttgcttggtgcaatggtgggctttgcttctgatgccgcagctgtggcactcaacgcacaaaaaggagccgttgttgcattggatttacttgaattgggtcgtggtgtgcttgcagcatctctcgacgagatccgagtagatactgaagatcttcagcataagcaccctgtcatggctgagaggtttgtacagctgcaggctcaagcacgtcagaatgttgaggctgaaagggagctggacaatctaatcatgaatatccaaagtcagcctgggtttaacaaacttcttaaaagcaccaagcgaagaagagatattacatgctgcgcagaaaggtccatattactataaatatcaccagtatcgctgtgatgc

SEQ ID NO: 77494 - DNA, 543 bp, Arabidopsis thaliana landsberg
ccccattcatcttcttgcttagctgaggatgttggaggcctttgaagttgccaatactgaaccgatgacggccggtgtggacagagctccttcttctgcccgagagtgttcgattcctatagtataaccaatcagttaccgcggtgttagtgagctcgtcttcagagacatacatgattgcgacttggccgtatttagacgcttgctgaggctagacaggtggtgtctttaaaaacaaagggcgactagttgtgtgttatagtcgataaccttagactgggatgcaccttcctcgatgcgcttggtttcgaagtatagggctgaaaacgctcttcggccggtcagacgtcttgaattctcgtagcttgataattcatctagttaccacaaacggattcttctctaaatcttttatcctgatctcttcgatatacttcgtgacgtcacgaaacagattgagatcctgaggtcattctgcgctacataggacgcacatgatgaagacaattcatggttctgtcgagcggttccgctgggctggga

SEQ ID NO: 77495 - DNA, 595 bp, Arabidopsis thaliana landsberg
gctaacggctgcttagcacctggcagcgtattaactgggatggcaagacttgctatgtcaatggctactacactgatagcaagatgcactgttggtatgtatttcagtccaggctgaattgtgggcagagaactgacggtggttgtagctgctcttggaaagtgctagagtcaatgttttcggtcatgccacgaccacggcgttatggcagtctgaatatctaggggtcaatatagtcggtttaagggagggataacatattgggatagacggtccagtgccagtacataatgcataaagttgcgtgaattttgccagtatctgaccgtatcgtatcttgacatgcctagataaggtcctcccgtatatattaccatcggcgcctgcatcagacgctgaaatttgtgcgggaagaatcttaacaggtactggttgacctgaaaacgttgtaaggaaaggccaaatggttctacgaatttgagcaagagatgcccctggaggtttggcagcgtgatcgactcaagccacaagataggattgctagcagctaagtctgtcattcctctatggacgaagacgtcatacaagcactctg

SEQ ID NO: 77496 - DNA, 554 bp, Arabidopsis thaliana landsberg
ttatctgggcgcagtgcagcgccacgttcttggtcagcgagcgcaccgcgcccttgctggcgcagtattccattgcgtacgagctgccgcgcagcccgagcaccgacgagatattgacgatcgagccgccgccgccgtgctccttgacggccctggccatcgccgggatggcgtgcttgcagccgaggaaggtgcccatcgagttgatgtcgttgacgcggcggtactcctcgagcgtgcaggcctagatcgagttgcgcacgccgacgccggccgcgttgagcaggccgtgcaggccgccgaagctctcgaccgtggccgcgaccgccgcctgccacgacgggtccttggtgacgtcgagcgacacgaacagcgcggccttgccgagctcggccgccagtgcctggcccttggcggcgtcccggtcggacagcacggacttgccgccctcgcgcactacgagccgagcggtggccgcgccgatgcccgaggcgccgccgctgatcaggacgaccttgttctaacgcgcgccaaagaggcctctccgggtgatg

SEQ ID NO: 77497 - DNA, 316 bp, Arabidopsis thaliana landsberg
  unsure (1)..(316): unsure at all n locations
atgggatgcatcagctgaccgctcgcaggttgagtcagtaagggctgaagctgggcagaaactaattcttgaaaccagcgttccattgagtgggcggggccatgggggggcgnnnnnnnnnnnnnnnnnnnnnnnnnnnnnnnnnnnnnnnnnnnnnnnnnnnnnnnnnnnnnnnnnnnnnnnnnnnnnnnnnnnnnnnnnnnnnnnnnnnnnnnnnnnnnnnnnnnnnnnnnnnnnnnnnnnnnnnnnnnnnnnnnnnnnnnnnnnnnnnnnnnnnnnnnnnnnnnnnnnnnnnnnnnnnnnnnnnnnnnnnnnn

SEQ ID NO: 77498 - DNA, 454 bp, Arabidopsis thaliana landsberg
  unsure (1)..(454): unsure at all n locations
cctcgcctgggagggtcttggacggggcagggaggttgagccgcgtttgagggaataattaagatagatgaggcggaagaagcgggctgtgcggtcgaagagccagaagatgccaatagcggtgatccagggcatttgagggagattgtcgaggtcaatgtggaagtagacgccgaggaaggcgagcaaggctgcaagctggtggaggtgaaggaatgtctcataaaaggcatgtctgattggcgagggagagtgcaggaggagaacggtcatggcgactgtgcctaccaagccccaggcgaagaaaggcgtgttgcagaggcggtctatcatgtccgagacgtctgtctcgtccacggcgttgacggtccaggcgacggtgtgtactatgctctcgatgacgacgataccgcctatccagcgatgcangaagttgtcggtgtacaagctgatg

SEQ ID NO: 77499 - DNA, 571 bp, Arabidopsis thaliana landsberg
ccggaggtgtgtaggcgggcgctggaccggagggcttaagcttattagaaagtcggacggcgcccctggccggggactcctggaggctctctggcgagcgcggataaggagactgcgcctgcgcaccgtatactggtgggggtacctgttcgggtgaaggcattgcgattggaggaggacctgtgcggctgactgaccgatgtctaggcacaggttctggcgcaagagcgaccatggaaggtccaggggcatattcaaacgggttgggagccctagacgttccatgcggtgccggagtctcgaagataacgggtgcagggggtgcaggcgctccataatggatgtttggggcaggctgagctgatggagcttctatatggatattagccgggggtgggggagcagcgctttctatatggatggttgcaggggcgggagcttgggtaggaggctgtggtggtgatggtgagggttctcttggctgttcaaggaatggattactgggtgctggtggtactgagggttctctcggctgttcaaaagggttaatgggcgccgacgagcctgactg

SEQ ID NO: 77500 - DNA, 582 bp, Arabidopsis thaliana landsberg
ctcaatagtagccatgcgaatggcaagaccggtcaagggcttcactttgcctatatcatcttcccgatattgagctgtctgcaactaatgtattagctgtgaacggctgtcttccaccaacacaaaaaacttaccaaaaagatgacaaatgcttgtagaacttcaaagatccttgaggacataaactcatgttgtttcaggtatatttctatcccagctcgataccttcgcaggagacaggatttgtcggtgttgaagactgtagaaacatctgtttccttcatactattaatggctgcatggaagatggacatggtcagcggctcaaatgcatcagattgaatggggtcgaatgcgatattgttactgtcttgtctagggagtaatgggtacgtatgaatccatcaaagcgtcgagctaactgggacggtgcactattcggactatgggatcgacattggctaggaaaacattgagcagtaaatagcaatcttctcgagtatcgggataaaagctgtacaaattagatggtgaggaatcgctttcccagatgagatgattgccttgaggctcgttgggcga

SEQ ID NO: 77501 - DNA, 533 bp, Arabidopsis thaliana landsberg
  unsure (1)..(533): unsure at all n locations
ataaccagaccggatcccttgaccttgagtcgcattaagtattttcttgttaacttgcaccggtgcagcctggagcgttgtgtgtcgtaaacactgcggccgcggagcagggcgtctcagacgtgatgagcgcaaggtctgggaacttggtgttgnnnnnnnnnnnnnnnnnnnnnnnccctgagacaaagaatcccttcggatacgtgcccgaggtgggaatgtacttgcgcttgctggctgggatagcggcgtccacgggtgccgagtagcagcgcatttggcccttcaccatacgggtgaatgtagccattgcggctgtaggttgagcggaaggagccatgggctgcccagctgggatggtatttagtaaatagagggaaaggaagggaaaacagctcaataacaaagcccggagatctgaaggatataaatacctctctcgatgactcaaattttggagctcgatctgcgactcaattcttgattcctcaagcaatgtggacgatatgtccacagccagattagaaagt

SEQ ID NO: 77502 - DNA, 419 bp, Arabidopsis thaliana landsberg
caggagctcgagcttcggacctgcacaaacgctgttctcttacgaggagatgaccgcctgctgcggggcgagtggcaaacccggacgactacggcccccgcatcaaaccagggaccggagctgggcaggactccaacgaaacccttacgatgggcccgtacagggacgcaaatccggtggttacgatccctgaacggcgtcgcagacggctgacaccgtcgacaaatagccgggttgtcgagcgcagtcgacaggagatcgagagcggccggtgcagtatctctgtgcctctaaggcggcgaagcattgtggtagaagacatacgattaaaaaacgactcaccagacagatctgagcgcgcggatgaagatgatcgaccgtggcatgtgcagtcacagcattccctacgatcccagtcg

SEQ ID NO: 77503 - DNA, 330 bp, Arabidopsis thaliana landsberg
cggctccagccgacttccttcttgatcataaggaaacatcggttcataagggggcttggtgtgcaaatagcttactgggcactgcacacagaacccactcttagtgagcacaatcaactagatagcctctaccgacagatgctgaaactatgctaacaggagagggctatcctgcaagacgaaccaagcgacgtgatcaagaacttgggtctactgactgcacttctgcaggcttgggaagcagaatccacgtgtagccgcgcggcttctctgataaaatcgctcaggaagccacatgactttgtcggatctgatcatatccaccagagt

SEQ ID NO: 77504 - DNA, 601 bp, Arabidopsis thaliana landsberg
  unsure (1)..(601): unsure at all n locations
ctaatcatagtgagttgatgcgtttttcgttctattttttcgtacttatattatattaatttagtaatttctcatttaactaacaaataaaatccttatttttgtccttttccataatttctgtaatcaaaatctaaaaagagataaaataataagataaaagcaaaaagaacttataaagtagtagaagaaaaacaatttaaaaagagatttgtattggttgacattataatgtgataaattaattcatgcgtcgacaaaacaaagaaaaaggaagataattctcgctctactgtattcacaaccaccatcaacagtaactccagattattatgcagctcctattgctcttctctctctggtcttcttcttcttcttcctcctccagttttctctgcaatcctcactttctctctctccccatctctctaaatgcagctacttctatttcatcactgctgattctccgtcttagctcccatttctccatgaagttctcgcagctactccgacgaattgtgctgtcggtgagtttttcgcgccttcgagaatcttcgctggattatctcanagctgatttctttaggcttcttacatgatg

SEQ ID NO: 77505 - DNA, 539 bp, Arabidopsis thaliana landsberg
ggtaacggccactgcttggtggtcagcaatatggatgatgctctttctggtctctactttcgtgatacggatatcatcgattggggggcagggtggtggtcggctgaacagcggatagttcgcgcaccaagttctcatgcttttttttaggttagacaccgtttaagggggatgtgtggtgtcggttttagactcagtgacagcctctctagaaccacttgagataaactaactgactgattgacgggcgttgaactcttatcctctgagcaataatctcagactcaatgctctcctccataaagccatatttgacgtctgagagaccctatgtctagggttgcacctcgtatattctatggatcagatttactggacctctatacccaacaacctttcatctataacccgcaccttctacttacgaatatcctatgatcactcccgagcgacactcttcagggccaggacaggacgatcaaccaacaaattccctgaagaacagtactttgctttcaagcaacttgagcggcaatagc

SEQ ID NO: 77506 - DNA, 448 bp, Arabidopsis thaliana landsberg
ccgttgtaactgtgcatacctttgcctggggcagtgccttgatgtctctgtctaaagctgtttgctatgacgggtgggtgcatctggtgggacatggcatacggagggataagaccgaaaaccattgggtcgcagaaagagggttggatggtaggcgagtttgggacacctgagacggcctgatataacgggtccgtaaagactggcatgtaggtttggtgagaaacatatattgggttgaccatagcactgtaatctgcgctgtggtagtttgtgctcgagggtacaacgggtcttgattatgattagcctagacactcaacacggacggtgggaaagcctactcagtaggtacgggagagggtggtatagcgcttgctttgggccattcttggcggcggtgaatacactgtgacatagctgggctgtataatacatgtaggacttt

SEQ ID NO: 77507 - DNA, 419 bp, Arabidopsis thaliana landsberg
gcaggaactcccggatagatcgtggccggactggatcaacttgtgactagccattggggagaccggggggaggtgtcaatgtaattgaacaagagccgcctcgattactcgtcgacagaaaaatgctcatgctcgactagcacttcagctactggcaatacagggatgctcctgccagatggttgcatggactcaagcggtatgatgcccccgactctgcggacagatattgagatcgaaactgatacgcctcctagttcacacatggatagaggtcaaagggcgttaatcgttctccaagatgcgtatacctccacagccgacacattaaatatcatctggagcataagctcgatgcggcaatctaaccataatcactcttgcacagtatcagcggctgatcattatcagctaatggt

SEQ ID NO: 77508 - DNA, 455 bp, Arabidopsis thaliana landsberg
ttctgaacaaacgccggtaaaggacgaaagttataaatttttacgcgacgcatctagtggagagggggccggattctcgtatgatgagctggctcttgacggacagaaatatctttgccaaatccctgtcgtggaagatggcgacagcattcgaacaaacatgtaagctaatgaggaggacgagctaaatgagctcgcgcgagcaacagaccgatgtttggagctgctgcatgagatggaaggcaaatgcctctactatatctcccgatggaggacttattccttttgctacatgaaccagattaaccagttccacgcgcttccgataggaggtggcgtacccaactacccgacaatggaggatcacacgactcactcgttcatactggcgagatttccgcacgaagaaagtcttgatgagggaaagggtgcgaattcagcgaagccttccacag

SEQ ID NO: 77509 - DNA, 552 bp, Arabidopsis thaliana landsberg
  unsure (1)..(552): unsure at all n locations
gcattcgcatctacaaaaaaacaagatcatgttttcagacacaatcatgcacaaaccaatgtttttagttttatatcaagcaaaatttgtttaccttcgaagacactactatttgaaccatcatcagaatcagaatcgatgtagctaaaggaatcataccaagcctcctcatgtgaaattcctaaaacagagaaaaaaataataatgacgattcaacgaaaacacaattttggaagaagaaaaaaacagaatcaagatatagagaatgttgcttacggtttccatcgatttggctgcangttccattttgaagcttggagggtttaaactggggaagatttcattagacatctactctttacacatattggctgacaattgnnaaataaaataacatattcgctcnccnnntgaancctaagactcgcattactcatgcgtttcatangaacatcgggcatanaancccatattttnnaccgacatttgccaaatcttccncntttctgcttcttctgttgaagcttgttactgagttttctctgagaagaa

SEQ ID NO: 77510 - DNA, 529 bp, Arabidopsis thaliana landsberg
gactacgatgctagcgatctcacgcctctaaagagtcctttttgtccaattgagcggttggccatgggggtggactagtgccgcatatgtcagtacatggaggtttggtatgatgtggatcttccaggtatggaaagtcttgcgatgaatgctcggcaactatcaatggtatgtatgtctccagggccttctttagtgagaagcaacaaggctcgttagatttggcttgggcttgggcttgggcatggtgatttagtatcatttctcacaaatttatatcctttctataacgaaaagatcatgggcaaccatccatacccatttcgttcaagggacccgtaattaccatctccagccattatcccaaccgtcaatctacctgggcaatgtaaaccccccaggcaccctctcctggaagataccccttgcatcatacctccttgaaacccggcaaagctcttttacactttcctggccatatgcagaaacaacatcctgccactcggtcggataattcatatacctaaac

SEQ ID NO: 77511 - DNA, 518 bp, Arabidopsis thaliana landsberg
gaggaggcgcaagcggggtacatccagcccccagtggtataactcagaacaacctacgtggcttgggatacggatggaacaatatacattacttgcgggccacagaacggctgacagcgcacttctctacataccgatgagctcgcgtcgaatattatacagctatattattgacaaaggtaccagaaattgtttgaggagtcttgtgaaggtctagtctccagctgagccttggagcacctgaacctcggagcatagaggatgctggacagtgagtcctccctctcagctgatagtggatgagcaggcaacaataacccttatcatttctatctctctacggaagaacatatcactgtcgcacctctgtgtgaaagcgcttgtttaccaagccagcgaacgtcttgcctaacatatcatcacattacggagatattgcctccgtactggcgacgtataggcatagtgcccataaactgtctgtatgatatccgcctgtcatactaaggaataaacct

SEQ ID NO: 77512 - DNA, 456 bp, Arabidopsis thaliana landsberg
  unsure (1)..(456): unsure at all n locations
agcgtatggttcgtcaccggcaggaccagttggcctttattctaaattggaaaatccgcgtctgaaagggcaggggtcagcgcgccctttcgggggtatagaccgtacagattcgccgcattgattgagaaaacctggacgagctttgtgagctcaagctttcccgccgacatggcaaggggcatccgcgtttccacgcccggcaggccgttggggatgaacttgaactgccccacggggtgctcggccgtgatnnnnnnnnnnnnnnnnnnnnnnnnnncatcataccggaatggacaatgatccgagctgaggatggcaaacgtgccgctgtctacacccatgcagatcgctgcctgggcgatttcgtcccgcggaggaggggagcagacgcactttgctccttcgaagctcgccttgtcgaggccgcgccgagtgaagaagacgtattgcagg

SEQ ID NO: 77513 - DNA, 570 bp, Arabidopsis thaliana landsberg
  unsure (1)..(570): unsure at all n locations
gagcttggtcgtcctttcggaagaaatcgcgctattccctttcctagggacggaaatttctgcaggagcagtgggccttcatacatgactgcacgcagctcttatacggaactccaaaatttcacccgcgatctaaaccggacaacgctccccagattgccgcctgttcctggctcagaaggcgactttgaatatttgcagcaaattgagatatggaaacgctggattaactgggagaaaggagatccccttgttctgaaggaagacgatttgactgcatacaaaggccgtgtggtttatgtttacaagcaagccctcatggcactcacatttctccccgagatttggttcgaggcggctgatttctgctttctgaatgacatggagacagaagggaacgagtttctgaagaacggcatagacgctaacccggaaagttgtttgctcgcgttcaagcgtgcagaccggctcgaaataacttgtgagtccgaacaagatcccatcaagcgaggcgctaaagtgagggagccctacgacaggctactngatgcgctctacgattcgatcgcc

SEQ ID NO: 77514 - DNA, 545 bp, Arabidopsis thaliana landsberg
tcattcctattcatcacattcagcatgactcgagcgttatctttgttccaccccatgccggctctggtgagcatggtaggtacagatgctttcaaccgcactccgcatttgtaccttgatatgtcgcctacgaccctcgtagtcggtattacaggacaattgagcagctcattctgaatgttatatctgatatctgtcccagcagtctcacttccgaccatcgttctcatgaatcttccacaatgcgtccgcatctgcgcgtaattagcaccggctagggccaagtttgaagcaaacttggaaaccaggacataccaggatgtttctctgtagcctcaatgtctgccctcttctccctcttcaccttcgtatctactccaaacgctcgatctcgctccttaaccaattcatccagcccgccgggtactgcattcttcaccttctcctcatctgtaaagctcaacatgagcttcggctcgcctagcgggaccggatcaccacggtcaaacctgcaaaagtgatacgtcttgccgtagagcgggatg

SEQ ID NO: 77515 - DNA, 521 bp, Arabidopsis thaliana landsberg
agaacaggagtaggtctcctctcgacactatctgtttgatatcagcggacgcgtgcaccttattgagactgggaatccagcttctagagcgtctcgtatcgcggagaggatccgaaggacaacagctacagagcaaaatgaatccatcagccaatatcctcaggtggttattgtagcgttcacgcactgaatctccacgcttcatatccatctttccctgggaacgagtaggtgacagttgtttctgctcggactgcctggagtgcgccggttgaggagtcgatacggaagacagcggtagtcgggcttgttatccttcgcttgagtgttatggttgcatctccttcgccctctccgggcttggagatattgagttgcgttaacactgttgtgagggtgttttcgaggtatttctgcacgcgctgttttgggctaaatggtggttggagaagagaatccatgtgtctttgttagggttccattcagtatctgaagagactgtttgatgcgattagatattg

SEQ ID NO: 77516 - DNA, 549 bp, Arabidopsis thaliana landsberg
ctcccccaaacccttcgctccatcaccgccaccaatatcattgagctctccaaacagcgcggcttatgggaaaggcgccgcgatgagattatccagtccgctgctgcaacctctgacctgcgaacaaaggctcgagttctcttggaaggcgtcaccagactgaagggccacccgaacgatgcatttgacaaggaggatctcgatgtcgacgctgagtcatttgaaacaccagttgaagctgggacggagcgagcagtccacgctaacatccgtcggttccttttgcaggggaagtatgacccatccgtgtctgagtcgagcttgagggaatgcattgagtcgcttgagaaggagatcatgtatatggagcgagcgcatgatcatgcctcattgtatagtgcgcttgtcacggaatggctggaggatttagaggcttctggcggcatttcagctatgaagggtgaagaggatgagagtgttgaagacgtcagcatggagaagctcggacgtacggaaatgcacgagcagaggagaatatgggagcacatc

SEQ ID NO: 77517 - DNA, 570 bp, Arabidopsis thaliana landsberg
  unsure (1)..(570): unsure at all n locations
tcgcaaaagcttattgtgactgttgattgagaataaattgcgagttttgcgcttaaccttggagtcaaattgcgtccaggcgtgaggtgcggaatcttaggcacaaacccaaggcaatggtgcgctttgacccggccgccggactcagaagaggaggcatcatctactgtgctgtatacgttctattggactcgaagtattggttgccagccagtcggtggatattgatacgattgccaaacaagatatatgtaaggggtatagggcttgtaaggaataaagcacctcagtgctcgcataaagagaagtctccccgtgtgaacatctcattttcggactccgacttcgnnnnnnnnnnnnnnnnnnnnnnnnnnnnnnnnnnnnnnnnnnnnnnnnnnnnnnnnnnnnnnnnnnnnnnnnnnnnnnnnnnnnnnnnnnnnnnnnnnnnnnnnnnnnnnnnnnnnnnnnnnnnnnnnnnnnnnnnnnnnnnnnnnnnnnccagtcctccctctgtggcgggaccgtcgcggttgagatgatgcgccggctgcgatcaatgagaaagagcgc

SEQ ID NO: 77518 - DNA, 584 bp, Arabidopsis thaliana landsberg
  unsure (1)..(584): unsure at all n locations
cctgaacagtggacggaatgacctttcagctgcacacagcgggtagtagcatgtttaattatacnacgggcttgccttcccaccggggatcagtgccatacgctgcaaaaacaaatgcacgcacctccggacgcnnnnnnnnnnnnnnnnnnnnnnnnggcggacctggacgcgggcnacaaaatttaaccgatgctcttacacgatgtgccgtgccgcgcacgtttcgtctgggcaccggcaggatacaactgatactcgcactcccgccacgcatgagccataatgtctgtaccgaaagaatagagagaanaaatantggtattaccagacggactcgatcacggatgtagcgtgcggtattcgaaaacctttagccgatatacctgaacgagcctgggccaggcgtttggcaaaagacctgaggaccagcctgaatttttgcacaacaaaacctgttatatgagatacgtttttctcgctgcattatgcagcctgtgtatgttgttacatgcccagaaaaagaaagcacctgcggtcaccgaccacttcgtgggattggacaccgcttttgaccgtgtact

SEQ ID NO: 77519 - DNA, 544 bp, Arabidopsis thaliana landsberg
ctatacagaattcgaataattaatgatagtttttttccgaaaggaaccacatggaaagggataggtattaagtaagctagctggtgcgcgcaacggtcctactacattttacttgtttagaaaaatgttgaagtcaaagaattattgcattagtggtgattggcctccatgctaaattagaatcaagaaaaaccgagaaggagaatatatataaagaaacattacagatatgagtgtacctttattttacagatttgcgcaaatagtaaaagatttgcttatttattcatgtttctaaatctcgacatattaatgtgcatagcaacatacatataagatgtgttgtcaattattcgtaccttcaatcttataacaaaataaccaatagtactattggtgtttttggttttggatcaatactttggtttcaccttaattcatacaaacctcacctcaaaccaaacattggttactttaaaaattaccgaagttatatttctttatttgaaataaggcttaagactgtcacaaggaggacttgact

SEQ ID NO: 77520 - DNA, 597 bp, Arabidopsis thaliana landsberg
  unsure (1)..(597): unsure at all n locations
tcttccagtggttgaatatcatccaggtccagcatatcttcagattttgtatacgatgcctgatcctgttttgggttccgcaacagttgccgttggtgcggcggcagcggcggccatttcttttttcttctcttcttctttttgtttggcgcgttgtatagctgtgatcttatcgctcataatgcccttgaaatcttccagcgagctgaacacgaggtcagcgcctgtgatgccctctgcaccttcattcagtttgttgatgaactgctgttgtctttcttccttgggcgagtatccttcgggcacccacatcaaacgctgcagaccgcttacggaactggcagcggcagcaatctcattctgtatttccacgatggacttctgcgtgccttccggtacgatgccgtaattctcaccgatcaggtgtacggccagttcggtttctttcaggaaagcgttcacatctttcatcaataccgngccaaccagcggcagttgtttatcggagaatatctggtatccttcatcctgcagttcgcggcggaggctgtcgcggaaatcgcgtgtttatagctggattcagcgaggatattctga

SEQ ID NO: 77521 - DNA, 543 bp, Arabidopsis thaliana landsberg
ataacgaaatccttcgctttacaaattagagagacctttgatatttctttccaaacatagactaataaaccatactcctcaattacgcaacgattaagaaagagaacttttttttttccgggagaactcttgatttttttccaggaaaaattcactttttctgttctctttctcatttctgggttatggtcttgcttgcaaaagttttctctctatgtaagcacttatctccttgctagtgaatctttaaaccatctgattttggaaaggaaagagccaaatttttttttaactttggtttttttttttttaaatccgaccagctctgcaacatcgtacttgagcagaaaaacagtatctaaaagacaacctctgttgtcttcctcatcagtgtctctgtctctctccttccgtcaccgtcaaacttagtttctactcttcttcttgaacaaggttctatatttagatcgacctttttcgagaaaaactgaaaaagattgtttctttgttggtattctgaaaacttactctgttttttttttt

SEQ ID NO: 77522 - DNA, 482 bp, Arabidopsis thaliana landsberg
  unsure (1)..(482): unsure at all n locations
actaacggatgcaaccagtaccactgactaatgcactgtgttccttttaaaactcctgagtttaacgcgctagggcgagagtaaaactaggatcggtgacctccacgaaaggcctatagggggatccatctttgtttatgatagattaacactgtatgacgctataactaatatgccgagaggccaaactgggcatgcaacaccttcgcggaaagcctatagagtgccctgcgacaaaagaactaacagaatgggctcacccacattgactttgtgaaagctacagatgctgaccatcaagtgcttgctcgagcgttttacatataagtgctacattacagaccgaagattactgttagaagcattgcttaagaacatttttcatgcatgaaaactcgtaaagactagatggggtatgcctacatggccggtggtgaccacgggcaacagctcattaagactcanaacactatatttacaat

SEQ ID NO: 77523 - DNA, 583 bp, Arabidopsis thaliana landsberg
  unsure (1)..(583): unsure at all n locations
acctatcgaagcgccgaacatcacgtaccgcgatgacgtgattacgcactcccgtgagagctacggaagacatcgatccgatatcgagatgggcatcaagcagcgccaggacgaattcccgatgcccgaaaagaaaaagaaagagcgcagtaatttcacgcccgcgcagggtccagcggcggcttttcgccgagaatcgcctcgcagcgacgaccagagaccgcgtcctccaatcgaccgtatacagcaggagcgcgcgccagtgaagcgcaccgaagcggacgagcgaaattcattgaaagcggctatcgagaaggctcgtatggaaggcgtgagcagcgcgccagtgcgttcacctgcagagatgatgcgagaaaagaaggggaatcgtccgcagtcgcagcaggcaccgcggccaccgcagcagcctcagcggcagcatcaggagcggccgcgagatgagcatcgtgaacccacccgcgagcaacacaacagagaagagaagcaagaaacgcatgcaaaggaagagnaggcagcgacacctcgtccttccttcgatcgtgagcacgagcatgcgcatgac

SEQ ID NO: 77524 - DNA, 454 bp, Arabidopsis thaliana landsberg
ctggaacctaacctaagcagacatcactcccattatacttttttcccatacctgaaacaaccataatatgtagggctcctttaaatccaaacaatacgaacatgcctccagccaattgatatgctccaatatgggaccaaaatacattaggcatcaaacaagatttataatatcttatacatatcccatattcatacaacttgcaagtgccatgtacctatatatcttgatattacgatccttgactttacatttttttcttgtaactattaaccaattataaaactatgatctcttctggcagtgaaaataccaacatacattgatatatcaatacaatctaccacacctgtccccgccttagagccaccgtaccgctattgttacctaatataaatgagaaaagcccatcatcactgtcactgacgctgacaccgtcggaggtgcactttta

SEQ ID NO: 77525 - DNA, 521 bp, Arabidopsis thaliana landsberg
acatgtatgtacattttcggtacctgcaaaagattttatttaagatggacccaatattggacccacccgcctgtaattttttattcttcaaataaaacctatctttggatgctttggtctaaacgtctcactagagatataacacaattatgggccataattgtttaaatgtttaaatccgataacgcgatgatgtatcattacatttacatagtagactaatcattcttgtcgttggaatgattctctttgcttttacgttttactgaatttaataaaaataataaatacgcccaaaaaagtatgcatcgtgaacttaccacatttccctccaagaaatatggctactttcgtggtagtctttgcccttacatttttgtgtatatataaattttcattagtctataattataggataatatcattggtgcaaatttattggtgatttgcttccccatctcttagattataacatgacgtgtaaacatcttgcccgtattcgatttatatgaataaacgaa

SEQ ID NO: 77526 - DNA, 569 bp, Arabidopsis thaliana landsberg
  unsure (1)..(569): unsure at all n locations
gatctcgagctaagtcttgggatatcttcatcgtcaattgtttttattttggaaccagcagattattacatggggttggatcgatcggtgacgagtttgcatgggaagccgttgccgggatatctaccgaacacagaaattaaaccgttaaagnnnnnnnnnnnnnnnnnnnnnnnnnnnntcattaccatgatcaatccttcttctttgtccttatcttgttttgatccatgaggtgatcactatttacttttaaaattttcccctttttattgataatctattgaatgacggaatgattatgtgacttatatctttttataaaccatattcttgtggaatcaggaattttgtgccaataaaaaaagacaaagaaccatcatgtactatgttgtcaacgatgataattcccaagtgtgtgaaagttatagtgtaagtactagtgagtactcgtgaggatagtaacataagacacgtgcataattgcaaacaaacaactttgccgaacatttgtacaatggttaagacaagaaaagagagtattgaatgatcaaagaanaggagatgaa

SEQ ID NO: 77527 - DNA, 609 bp, Arabidopsis thaliana landsberg
aaaggaaaatatgttgtgttgtgttgtgttctgttgtgttgtcactgcattgtttgaaatgttacaagtgtatcgtcccagtactaccaccattgaaatcattcgcctaaaatatattgtcaacttgtagtttataccattcttgatacacttggcgaaaaggccaaaagcattaagcatgtgtcgcttcctcaaacaaggggtagtgtagaattctgaatcatgtacctggacgttgtttacgtgaaatccttaaaagtgatacaaaatagccatgtcgataactgtatgcatattttttttttgagctctctgttacttgttacttgttacttgctaggacgtaaaatttgtaataaaaagtttattctgaattatgtacctggatgtttgtgacataatcttggccatttatagtttatggttgatgcgttttgctgatctaactagcatggaaactttagttccatcagcaccatatcatgatttgtgtcatcaacctatgtataacttgctcacgaattttaaaaccgcgaataaaaagaacataaaaataaaaatcggaattacttctggaagagtttggtaataatagctttactaaaaccg

SEQ ID NO: 77528 - DNA, 707 bp, Arabidopsis thaliana landsberg
aagtctgtttcttttttggaaaggaacctttggccctggtctgtcccaaatgagaaatctatgtatataatataatatttttaaaaatgagttgctttaataattctgtctttgcttatatgaaaattactttcttgtattctgtattgaaagcaaaacttttggaagtgtgtgtaaatatttcaaaattgtaaaatattgaattaataaacttgttatcaacatccatacctaatacttaaatatttaatagttcaactaaaaataatattataccattcttcaaatttcttaagaataaattaattaaattttgagaaatttaaatggcaagaatttaaaaattaattaaattggagagaaaatatatcaaagaataccattgaaactgtttgttaacagagatatttgatatctgcaagttttgttgaagatttgtgtaaatttgaatctttgagattgttagtgttacttatgcagcatataattgttttgatgatatgtgagcattaccatgatatttagaaaaatgataattcaaactttaacttatttgatagataacaacatgagaaatattacaatggacctgatttttcctaaaaaaacctatcaccagatttggattgaatctttgatagtgttactatatatcaatgatattgatttgttgttccgtgagcattacaatgacgcttaagaaaaat

SEQ ID NO: 77529 - DNA, 376 bp, Arabidopsis thaliana landsberg
  unsure (1)..(376): unsure at all n locations
ctcaccgtgatgaactgcaccggttcgcgttccatttccaactgttagttttggtaatcttcaaaaatgggtttgggcggggcaccgaatgaaccgtggttcaaaaaggtgatctgcggatcgagatagaactgtgatttgagctggtgcatattcatttagtgtgttacaataacttttcaacacagagagacaganaaacggacttacacagagagaggagggggtcctgaacaattgaacagggtaatgcctggtcacatctgcgtctccgaaaattccgttaaaaactccgtaataggtgccttttgaaactttttttcctttttaattttttccgtcccaggcaaatgccgggtcattcgactcaaaaacc

SEQ ID NO: 77530 - DNA, 471 bp, Arabidopsis thaliana landsberg
ggttttacaagcgccacccatttttaatgcaattttttaaatagaaggacctgatcaggctaaaatcagaaatctttatcgaattgattgatagacaaaccatgatccattaacaaaaacagccttttttataggaacactttctctttctggtatccacccccttgcttgtttttggtctgaagagtaaatagcaaaatcactcatagaatacacaccaacataagcaacaatatcaatttcaacaatatcattaaccacataaacttcattgaacatttattcacactcattaaaatcacataaaaacacttattttgtaaactacactgcaaaaaaaagtgaatacttctattcactctctttatgaggaagatcatacatttcaatgctttcttccatctcaaacaccagaccatcataaacaacctaaaatacatataaagcttcttatctttgcaatctaacata

SEQ ID NO: 77531 - DNA, 507 bp, Arabidopsis thaliana landsberg
cgcttggctctggcctgccctcgcgggggttgaggtcgcccgctacgccgtgcagtgcacggtcggcgaacgcgccgtggttcagcgagcggacgactacctcctgggcggcgcggggcgcggcgccggccttgtctacgccggagcgggcgggccgcggggggctgccggggccgaggctgccggcgcggggtccactcggtgcaccgtctcccttggagcggacgggacggggtccccccgcgccgtcggcgcggccgggacgcgcgcctcccgcggtggacttggcgcccttgccggggttccccgttgtcgtcggcccgcgcttggggcggcgctcccagcggtccggacggtcggatccgcgcttgggcagcttcggagtcgctcatcaggcgggccggccgcgaatatagtttgtgtaggccatgggggactttccggggggttggacctcgagcagctgcatgctggcgtcataagctatggttgtgccgcggtccccca

SEQ ID NO: 77532 - DNA, 373 bp, Arabidopsis thaliana landsberg
cacacacaccaatgttatttgcatagctctatttaaaataaaaaggatacttggtcacatgtgactttaacttgatggaactttgggtgggcccgtcttatgcgatcggtgcattcatctttgtccatgccacgtcattgtcatcatctgctgttttagacagatgccgtaggcgctccttctgctgtgacaaaacctataccgctagtaccttcttcctcacgatcactttcaatggcaggctgagcatgttccatatctgcatcagactgatatatgcgcaaatcatgcatggcgcaccatatattcatttcagcataaaccatatctagattaatcccgatgcacgcggcccgtatatgaacaggatgct

SEQ ID NO: 77533 - DNA, 557 bp, Arabidopsis thaliana landsberg
caagaccaaattccaagaaatgtcgcaggttatttcgtgatcttttgatgctagtagataacaggtgggcaagatcacgggtcataaaaccagagtagacaaaaccaatcacattcgcagccaaacagaacctgcaaccaaaaatgccaaacaacatacacaaataaatcaaacgcaagaaaacatttgcaagaaatattagcagttaaaaaagtaatccaggaaaaagtgttacactttagctagaacatgtcattagataactacataagctttacacacatccgtggctaatttcatcagaaagcttcgaatatacacagagtgatttaaaccaaatcagagtaatctaaccaaatatgtctgacttcaaatgtaaatcaaaatctagttttattactggtcattggataactttctcagcttaaacgactttaagagaaagcttcacattcgatacagtgattaaaccaaatttagccaaatacattcgacctcagatgaaaatcaaacctaaacctagtcttattcctggataacttcattagctaaaacga

SEQ ID NO: 77534 - DNA, 567 bp, Arabidopsis thaliana landsberg
gtatgcatcgtaatatgttgtttttggggaatatgttatttaattgtcctaatatatctaatttggtcatacctttgcgccactattgggtgttttctttagcatttagcaaccccttgtttttcttttgtatatattagtcattcaaatataaattttgtgtcgtattgctatcgtaataacaacgtctgaaatggatagatgtcgtttgtggaccattgtttattggcaagtatactatagtcgtgagtgtgaaaggctatgggattcaataactaaccatacctttggattccaaaacgtcgttgttccatagttcgagtccatgaccattgacgatttccataagttttcttccaaacaaaaattaaatatatggagaagagtaaacgaggctattttatacgaaaccttaaaaatgtcaaaactcggttagcagtcaacaatctttcttcatttaattagggtttaacattagagtgcgacgtcggtggtcgaatgagagaaaagaaagtgtggaaaaaatgttagacatgtaagtcgtctatttttgaaagaaaatctaac

SEQ ID NO: 77535 - DNA, 477 bp, Arabidopsis thaliana landsberg
atcacctgccacataaaccgtctggttacgccagtcgcttaggctttccttatcgtggtaacggatgatcttaggcaccatcagggtcgcttcggccatgttgcgggcggggatcctgcctacgccgatatccagttgcatggccggatcattgcggttgatatcatctccatcatcgagcaaagcaaaaaaatcatcggaggtataggtgttgagcgggtctatagattgactgctttcataaccgggcacgagcgggcggttgccgcctgtggcagaacgatattgataagaggccgtgccgaacaacagcaaccaggaaggcttgcgggtattattattgcgcgccttgtcgtaatacatcttcacacaatcccgcagcgcggaagggtcggccagcccggaaccaaattcattggacacctgttccatggtagccactactacctgggaaccatcatgctgcccgtgaaactg

SEQ ID NO: 77536 - DNA, 571 bp, Arabidopsis thaliana landsberg
  unsure (1)..(571): unsure at all n locations
ggctttttccgggctggaaaagtatgccagaaagtattacaatatttcatcaataaaataccgctggtcgagccagtattacgtaccggtggacggcttcccttgtattggacaaatgccgcttattgccgatgggatttattgcgctaccgggtataacggcaatggaatgatgctgggcagcattgcaggaaaaatattgagtgaccttgtatgcgggaaagaaaacaagtatgcagatgtctnnnnnnnnnnnnnnnnnnnnnnnnnnnnnnnnnnnnnnnnnnnnnnnnnnnnnnnnnnnnnnnnnnnnnnnnnnnnnnnnnnnnnnnnnnnnnnnnnnnnnnnnnnagattcattgaaccgcctgcagcccggtacggggaaactggtggagggtggacggccgcaagattgcagcctaccgcgacgatgacggtaatattcatgcacttaacccagtgtgtacacatagccggttgtattgtgaactggaatggaacaataataagctgggactgcccctgtcatggcgcccggcatgacattgttggcaatgtacttacaggac

SEQ ID NO: 77537 - DNA, 517 bp, Arabidopsis thaliana landsberg
aaaatattaggatcttctggaccatatcttatcttattagacttcagagatttgctatcctatctaatttaggatctgtattgactgtattagatcagaactttttgtttgctcatcaatgatcagattcaaacgaaactagtttaagatgtgtttttttgggtagtttaaacatagaaaccaagggaaatagttggaagaataaactaatctatgatttatccgctagatgaaactagttgatcggattaacctaatcttcaaataatacttaatcctacagtcctactaataatcaaagtggtaatcttagaacggtcactttagacgacatgtagttagcgttttcataaaactaaacaatggacacgtggacatcgggtgaattaatgacccgcaaaaagagagattagtagaattggagagacagacccaagttaaaaagatctgaaaccaaaaaaaacaaagcaaacaattgaaaaaagagaaagagagagctcgagagagagagagagag

SEQ ID NO: 77538 - DNA, 573 bp, Arabidopsis thaliana landsberg
  unsure (1)..(573): unsure at all n locations
gttcttcccgctcttggcaacccactgttggnnnnnnnnnnnnnnnnnnnnnnnnnnnnnnnnnnnnnnnnnnnnnnnnnnnnnnnnnnnnnnnnnnnnnnnnnnnnnnnnnnnnnnnnnnnnnnnnnnnnnnnnnnnnnnnnnnnnnnnnnnnnnnnnnnnnnnnnnnnnnnnnnnnnnnnnnnnnnnnnnnnnnnnnnnnnnnnnnnnnnnnnnnnnnnnnnnnnnnnnnnnnnnnnnnnnnnnnnnnnnnnnnnnnnnnnnnnnnnnnnnnnnnnnnnnnnnnnnnnnnnnnnnnnnnnnnnnnnnnnnnnnnnnnnnnnnnnnnnnnnnnnnnnnnnnnnnnnnnnnnnnnnnnnnnnnnnnnnnnnnnnnnnnnnnnnnnnnnnnnnnnnnnnnnnnnnnnnnnnnnnnnnnnnnnnnnnnnnnnnncagtttgcgcgagtggatatcgccatccgcatcatcatcggaaaccagtacgccatggttctccaccacacctttcgatccgtgtgcatagcgcacattcgccgccagccatgttctttcagaaccccagtatacatcctg

SEQ ID NO: 77539 - DNA, 526 bp, Arabidopsis thaliana landsberg
ggccgtggtgcggcgcctgctgccgcattctcccgaattccaccatttcgttggggccgaccatctgtcgtttctggcgcccggcacgcctgaatcggcgtcgcaaatctgccaggatcgcaaaggctttgaccgggccgccttccacgaggagttcaaccgctccgtcgtcagcttcttccgccagcatttgaggggcaaaaacgttggccggtaaagtagctgccggtacacctgtggccactgccggcgggtctccggtgaccgggcacccgctcagaaccaagcggctgatccttcggcgggcacggattgatgatctggacgcgatgaaccggcttctgagcgatccacggtcgatgcgctattggtggacttcggtgcactcctctcttgaggagaccgaaggatggctccgcgccatgatcgatgctccgccggaccagagcaacgatttcatcttagagattggcggccgcgtggacggaaaggcagattgctggccactgccggacatcggcttcat

SEQ ID NO: 77540 - DNA, 595 bp, Arabidopsis thaliana landsberg
ttctcttgtcgtactgaaaagaatccgtaaccgaagtttcgagtagtgtaggaaccttttgcttttagttctaactcgctcgtaagtgcttctggcagaggtgcttgtacgccatttgtcttcgaaatgctctgaaaggcttcggtataacgcccatctttgtcaacaatgggatcatctaaagagagtttctctgacagaggacgtgttgcgatatcagtctgatgggtttgataacgggtgtgggaccgaccataggcgaacaacgagaatgaaggaagcatatagccgatgacggggactggtacggaagggagtttccctattgcaacgcctcctcctatatcacctagatcgggggattgggtgtatctatgaattctcccataagaatctctaaagtacgcgagttcgcccaaatggtttgcaccaaaaccgaaaatgaagctttgacccacaattgtcttgaggttggcaacgctcgctgaaagtccaaacgaaggttcaatggagtagtaccgtccaatcgttttgaatcttccgaggtcaccacacgctgtctctatgggatttgagaggagatggaacaaggggg

SEQ ID NO: 77541 - DNA, 459 bp, Arabidopsis thaliana landsberg
  unsure (1)..(459): unsure at all n locations
ccccgaaacagataccgtaagctacgagctgaacgggcactacattcctgttgtgtataaatactgcgccggataccagtacgacggcgaagaccatcgtcgggtttagccatacccatttcagcggcacaggccacagcnnnnnnnnnnnnnnnnnnnnnnnnccgaccatcggcaaggtacaacttaaccccggcgttgccgataagcccggcagcgggtaccgctcggccttttcgcacgcgaacgaggtgagcgaggccaactattacaaggtaaaacttgatgcgcacaacatcatcgccgagatgaccaccaccacaagggtaggctttcatcaatataccttccctaagtcggacagtgcgcacatcattcttgacctgatggcgggcatttataactatcccgataaaacgtgtggacctatatgcgtatggtgaatgacagcacagtagc

SEQ ID NO: 77542 - DNA, 595 bp, Arabidopsis thaliana landsberg
  unsure (1)..(595): unsure at all n locations
accaagttgcaccaactccatatatattaccaaaaccaatttaattttacatatttggaaagaacataaattggacagaacggatcaagcatgtaatatacagaagccgacaaattgcaaaatttacctaaaccccatcttacaccaccgtcagattctgatgtaagtattatcaaagctcaagaacaatcacatcatcagaatctaacttatatatcaaaggtccagaattttctccattgaagctggattctaaggtcagttcttgcttctttatctcaatctgatgattccatatcgaaagtcttactttttcacttcaatttcaatctgatgattctaagatctttgattcgaggtcgatctctgatagttactacatgtttctgggtttatttatttttaatccatatagtaattaaaaactcttatgaggtttaattatggttacttgagaatttgcaatcgtcatctttctttgactcctatnccatttttggttnttccttnggttaatttctggttcataattgtaattggaacataaccaaaacanattgatcagaaaccttttcctatggaatattatcacacg

SEQ ID NO: 77543 - DNA, 268 bp, Arabidopsis thaliana landsberg
caggccacgatcccggcgcgggactcggccgggaggtcctggtgtttcatgtcgccctcggcgaaccgcagccgggggtggtcgcggcgcgcggcggcgagcatgcccggcgacaggtcgatcccctcggcatccaagcgcgccgtgtgcaggaacgccgagatccgaccggtgccgcagccgatggacgtaacagggccagatggatcggaggtcccgagttcgggaccggcgagttcagaggctgcctatccagcgccggtatgga

SEQ ID NO: 77544 - DNA, 556 bp, Arabidopsis thaliana landsberg
  unsure (1)..(556): unsure at all n locations
aaagaggccangtgtcaccaaaagagagtgccaaatatcgcaatgttcagaagatttaggtaaaaccttcttttattatagaagataggatgttgagatttataaatggctaagtgtaacgatccagacttggcctaagcgttcatgtattcggtttggtattttctttccaatattttaaggtatttcaatatttttgggtatttaaagatattttctagtattttcagatattttgatattcttaaatatattttccaagtatattttggtattttgtatatgtttggttattcgatctaaaaataactaatattttggatataaaattggatatttttgagtatccaaaatattttggtttggttcgggtttgattataatctttttcggttctagaattttggacctatttgaatattttacaattttggtctgagttcagtttggttcttttttcttcggttccagttcaattctttcggttcacttattatgtccagacctaatccagacgatggactgacttgactaattatatccgataaaatcagac

SEQ ID NO: 77545 - DNA, 583 bp, Arabidopsis thaliana landsberg
cgagctgatcccgtacttggacttcgcgctgccctgcttcaacttctagctcacaagcttctctccatctacttacggctgggtctgcttctcttattgctttcactagctcttcgacctttggttcagtataaaagcctctctcgagtaagagatttgtgacaaaattgagaaacatatagtggaagacagaagctattgatccaaaaatacattacgttttgagcaagaaacttctcttgattttgcagcttgttgatatacaccgtgttctctgctaatttctgagcttgttcctctgtaactttcctcaaccccacttcttctaacctgtcaaaacaataacaagattgcatttaccaaaatcgaagcgtagctatctattgagtatgagaaaaaagcttaccttgattcctccaaagatattttcagctgagaaacctcttgccgcagcttcttcattgttatctctattgctataacctgttcaggccatagagtccattatagctaaacctttgtgatcatactagaacgcagaatcacaagaatgtgataaagtaatgaacataccacaccattc

SEQ ID NO: 77546 - DNA, 572 bp, Arabidopsis thaliana landsberg
gtgttcagcagcaggtgcttgcgctcgcgcatggtgtcgaccagatctcagcctggtgatgcccggatggccccattggagctcgtccatgaagtgcggcatgatgccgtgcacctggccgcccttggacagtgccccatcggcgaccgcgcccatggagccggccgcgccaccgacgaacaccagcgtgtgggcggcctgcgcgatcagcgcgcccagttcgaaggccgcgtcgcggtaggtctggtcggattggttggacgaggcgcagtagacgcagattcgcatggtcgtgccggtaacgaaacaaaggccgacattatgccgtgcatggcggggaatgcgatggcggcggctcagcgcagccgtgcggcccatgccgggccgaggctggccagaaaggcgtccaccgtggcggtatagccggatggcaggcccagcgtctggttgatctggccgtggcgcagggcttccggcaataccttgacgcgggtgccgtaatggcgcgcctggcggcgaaggcgcgagcctgccggcaggaatcggcacgcagcgaggaacacacggtcaga

SEQ ID NO: 77547 - DNA, 112 bp, Arabidopsis thaliana landsberg
acctgcaggttacaaaacatgttacctggcaggttacaaaacaagtatgaaacatcttttgattttgaagcacgaaaaagtaaaacatcctattatcttttatggatctatc

SEQ ID NO: 77548 - DNA, 555 bp, Arabidopsis thaliana landsberg
aaaatcttttttgccaaccactaccgtctgcaactacaagcgctatcgggaagaaacttttgaaattcggttatttttttagttttatagagattcggagcagtttaaaatgttttttgtgattgttttaaacgttaacaactgcgatcgtccgcaaccatatcatttgcgggtggtagcgaaaaaaccaatcaatccttaaatacacacaaaaaaaataatgttacacatataccaaaactagaaaaagaaaaaggtttatagaggaaagaagaaaaacagaaattatgggtcaatctttgtgtattgctgcttcttctgctttgtacttgtcgtggaagtagcaagattcacaatatgaattaaatcaattaataaataaaagacaaagaatgtgggctcaccacatcaacaacaaacatatttcaaaatttgtgttctataaattttattataatcaaagcttcaattcaaaatagtttttttagaaatattttgattttgacatttaacttaggatttgtgcttttacattcttggaaaagtttacatttg

SEQ ID NO: 77549 - DNA, 558 bp, Arabidopsis thaliana landsberg
gaagcacagtgcctacaaagatgatgacaaagctgttgaagaagagagcattgagattgtaaaacgccaacgcatcaccctggtccaaggggaaatacaaactagtttaacatttgtccaatgtctaacatttcctttgactaaactgatttatactctaaatcataccttgaagagaacatggaaaagacatgtccttgggtttgcataattttcaactggtgcctgtatctaagaaagcataaagttttggtaagattagctgtagcaattttacattgtaataaccattacgatgctacccaaaagagtacataaagattattatccgccaacacatcctctaacctagcaatgtttatttagctcaaatgcataatttctacggattatcggagaccaaaacgtcgaaacacagatctgacacaataacatctagatcgaacaactagatacaggttaatcaagaatctgatatgcaatcgaactcagaaattaagtcagaacaaaatgagaggaagcagctgaaaattcacctgattattatggtccatcttt

SEQ ID NO: 77550 - DNA, 599 bp, Arabidopsis thaliana landsberg
ccccaaaacccaatttaaaagcttcaataagaaccctaaagactgtgttgagccttctctaaaaaggagacacctttgaaactcaaccacaatttctaagttctcttcacaagaaagttaatcacttttatcctgaatctctaaggagagatgctaaaatttacctggtgatagagactaatggtgaaatcacaaaatcgtctctgtaactgagcaatgagtgtgtccatggctctctctactcgtcgtgaaggcaaaagcagagagaagaagaagatgtaaagtttgtttgaaattgcaatcccaataaagagattcttacagatcatcaaatttggacagaaataaataaagaaatagtcacaaagcttttccataaagggcagagaaaaagaattagaatatgattagttgtcaaaaagacaacttttacaagtgagaaacattgatttaggccataaaaaatggaatctctaattcatgattgatacattcattcattctctcaaagtttttagcattttccaatgttaggtatgtttctgttatgtcaatccacccacactaagaatctctcacgctggaagattctctataga

SEQ ID NO: 77551 - DNA, 600 bp, Arabidopsis thaliana landsberg
ctatgtattagtttcacaaaagtttggaccataatgtttctcattatcttgctaaatttagttgtattcactcctttttgtattccaaaaatgtaactcacccgcggtggcttagatactttttatctcgattatttgtgttcgttatttaatttaaatcaaataatagtatatataatatagaaatagtcgaatcaatttacatgaagagacgaacaaaacaaaacaaaacaaaaagagagtcgttggaatattcctactacattctggatgatacccgaattaaccgacccatgtatgtaagtatgtcagtatgtaactattactcaataattaaatcaacttcttttttttttttgtcaaagaaatcaacaacttcttatgtcctaccacaagacaaaacatgtgcacttacgaatatggaccatgatcttccacattaacgtctatgtattaacatagccattgtgaccgactctaatactcattagacgtgtacggttcatagactagtgttctgattttatacgctgtagccataatgttttttgtctagcaatttctgattcgaatccgatacataacgggctataatttact

SEQ ID NO: 77552 - DNA, 592 bp, Arabidopsis thaliana landsberg
  unsure (1)..(592): unsure at all n locations
atctcacaaatatcgcgagaaaaagaaaaaaaaaggataatttgagaaaagccaaacgaagagtgcatcgaaagctgagagcgacataataaaggagagagaaaaatgtggggaccagactggacgtgtgcacagaatattcacactatttgaattttgttttcgaatccgccactctatctccaaatcaacttatcactcaattttgataataacctaacctacctctcttataagcacagctacttttcaccgacgaagactccgcttatatctgataagtcggtagaacgatgtctctgtgcaaagaagaacgcgtccaagaaagcgaggtctaaagtttctcaatcccccaatcttctcctccttttttatatattctctctctctctccatttttctctaaaagctagagctcttcaaaaccctagaaatcctcgaaatcagagtctttacctgggctcgtgtagatcttcagagctcggattcgtgtttctttcgtcgtctctcttcttcgtttctcgtcagatttgagattcgttgagaatgtcgtcgctgagtcgagagtnggtgtttctgatacttcaatttc

SEQ ID NO: 77553 - DNA, 297 bp, Arabidopsis thaliana landsberg
  unsure (1)..(297): unsure at all n locations
gcccccgagggggctgggcttacctaagctggcagaaaagccagcatcagggacaggacttatagggctttgccaggaggtgccgatttcaactgttattaccggcctttcgnnnnnnnnnnnnnnnnnnnnnnnnnnnnnnnnnnnnnnnnnnnnnnnnnnnnnnnnnnnnnnnnnnnnnnnnnnnnnnnnnnnnnnnnnnnnnnnnnnnnnnnnnnnnnnnnnnnnnnnnnnnnnnnnnnnnnnnnnnnnnnnnnnnnnnnnnnnnnnnnnnnnnnnnnnnnnnnnnnnnnnnnn

SEQ ID NO: 77554 - DNA, 527 bp, Arabidopsis thaliana landsberg
tattacgattcatgaggaaagctcatggcttaatatatacatctttgatcaatgttcacttcactaatttaatgcatgagggcgacttaaatatttgacaaaacatttatgtgaataattgatcactgcataagagagcaaagctaacctacgatactaacgttgacatttttctttcttttcttcttgccattatgttatataaaccacaataatgagctagaaccgtgaaatttaatacaaattttggagacatttcaactaccttgtcatcatcgaaaatagtatcttcttaataaaacaaataatgaattaaaggaagtggccgaagtggggttcacgaaagatagatataacaatatatggtccggacaactttcttagaagagttttatgggatcaattatgggattggcacaattatgtgaggggtattgtgaatttaggcattttcttgagtttttatatagatgtgtactcttgctttatctaaaagacgaatttgcccttactcttctttctcattg

SEQ ID NO: 77555 - DNA, 688 bp, Arabidopsis thaliana landsberg
cgataacattagagttagaaggccaggtagtaaactctttcttcatgcaaatgaagaaatctcctattgcgaggagtgtccttggttaaaattaagttaattaacaatggtacacgttatattttctctagcataccattaatgttaatttattgcttgttatttacttggtaaacatcactcttgtcactatcataagtatcattagattaataatattcatttggtagtagagtttcactaactactactatgtgtacaagtcacatgagataaggatgatgaacatgttatttttggatcatctgaagataccgattatatttaagtatttaactaccatctatagatatattatcatggttcaattatcactctcttcgtatttatctcatatctattaagtagtgttttagattattattattatttttttttttgttaagaagagattattttattgtaacgtgattcatagttttactaccaaattattatttttatatgtgatatgattatttatattatctagtttaatttgtattatcccttctttctttttcttttttttttgaaatattatggtaaaaattatttcgaaaaaaaaactgttttttaacatcaaaagtgccggacttggtgtttttataaacaaaaaatttttgagaagcccttttaaacaaatatt

SEQ ID NO: 77556 - DNA, 424 bp, Arabidopsis thaliana landsberg
  unsure (1)..(424): unsure at all n locations
ccggacgttaccgggccccacccgccgtctggggttgtgcccattccggcttgtgcttttttgatctggtcttttaaagtcatttagggactccaatgctttgattaggtcttttgtgttctcgacgcactcgcggccctggcagagcgtttcgatcgtcgagcggatattgcccatgcccttttccgacacgcagagnnnnnnnnnnnnnnnnnnnnnnnnnnnnnnnnnnnnnnnnnnnnnctttgtctctttcgcgttcagccagtaggcgcagaccgcgccgagctttcctttgtctctacagaactctaagttcttgatgttcacggcgcatgagcttgcgccgaggcccatgctaaaggcgcttaagagtaagctggataagattaatcgtgctctcgtcaaaatcgtcctcaatctt

SEQ ID NO: 77557 - DNA, 380 bp, Arabidopsis thaliana landsberg
aggccctttactagacttcatagagaggggaaaatttatcaatgagacgattatcaaaacctcgttagactgactattcaaacataaaacattcaactccgtatgcgcaccacttcagaaactctatataacaccaccttctgatagctcgtttcctggcaccaaaggcatataaacctaaacatttcatattacatgtgtctctctagcatcaaatgacttcgatcgataactttcttctagccattcttttgagttccagaacttcaggagatcacatacttgtggcgggctctatgaagctcctgccgaacagaaacatgagcaatggatgtctcgattcagtcgcgtgtgctcagaccactctgaaaaaacgagta

SEQ ID NO: 77558 - DNA, 488 bp, Arabidopsis thaliana landsberg
agccccttacccttgaggatagattccctcggatacttacggttgaagctgttgtagcgcgtcatgtcttgccagtggctggaaaggctccacggtatagcatggatccattgtgccgtgtgtcttgaaggtgccggtgggcgaaaagggcgggatctggatttgaatccgcttgtcgtcatcctggcctttgtgctctcgcttcttgttctcgtgtcgggcgcgcgatgggccgttcgcgtacgagatggtgaaaggacactctgcgcggttctcctccgcaatggagcgcgatcgctttcgattgctcattgtagcgatttgaggcggttgggtatgactgcgttgaggagtagagagtcgaggacagaaagctacgggaagggcgaagaggaaggaaagaagaccaaggatagaagaagggggggggaatgggttagcgagcctgaaatacagttcacgaatacatagcgaggaacgcgtttgac

SEQ ID NO: 77559 - DNA, 635 bp, Arabidopsis thaliana landsberg
gagtcctttttttggactcagtaaaagagtccaagttttctttgaacaacaaaattttgttgaggtgtgtattcacttggttgggaacaaacaagtagatggcaaagatcattcgaacattggagcccaagtgttgagggcactaatattgtcgattacagaaacgaaatgatttggggaagctgcaagaaaaagtttagttaaatcttttatattccttaatcaaaatgtatcatgcatacactatatacaattcactaaagtatgatagttaaatacctaattaatatcatgatcaactcctaccggttcatctaactaatccagctcagcataaaaaccctcacgcgtcgctccaattaaggggagggcttaactagtgcccaacttactgggctaggttcgactccgtttttttattacattttccttttccatttctttaagactttaaccctgaaatctcgaagtgcaacgcaccactaattttttataaatattaacataacatttcatgagtcctaaacaagagtctctcttggtctttataaatacatggatccatgtacataaaaacaacaagtcatcttttttttctatctgaagtaatcagagaatcagaaacacttgagaga

SEQ ID NO: 77560 - DNA, 503 bp, Arabidopsis thaliana landsberg
caggtgaatcgccttcttatcatatcccatattcaggatacgttgtttggcttcatcgatcattactttccagccggagaggaagaatttggcgggctttttaccgttttcggtgagtgcttcgtatacaggatgtacatatcccttattggcgccttcgggtatctgttcttccctcgaatagcaggggtggaaatggaagccgggctcctgcgcttccagttgtttcagttcatccacatataacccatcgccgaaagtacggcagccgaagatcaggtgaatattgcggtgcggcagctgatgcgcatgcagaaaatgggccatggcacggaaaggcgctatgccggtgccggtacagatcaggtacaggtcttcttctatcgtttccggtaaaatgaattttccctgcgggccgcgaagcaaaagttctgaacctacactcactttactaaaaagggtattgtgtgcccagccccgcctcgagcaatacgatcaccagc

SEQ ID NO: 77561 - DNA, 416 bp, Arabidopsis thaliana landsberg
cggaaaaagcacaagtataactaaatttatgacaaaaaatgattttataaattttataattcttgtaaaatatggggaaactgggggatctattaccatacaatactactaaccaataataagcaatgcaatcgtgtatcaaatatagaatattgtttacgatgattattaagaaagcaaagagatatatgaagtgtttaagctaatttctgaatgaatgtgggcgtggaacataatttcaattttgattaattataaaaaggaatgggtgacacgttgaaccaacttatacgaaggactggctgtcatctatatgccaatattgtgtgaccactatacgcctacaccattggataaaatagataccttttactggcaactatacggcgtaatctaagaatgaacttacttgtccg

SEQ ID NO: 77562 - DNA, 599 bp, Arabidopsis thaliana landsberg
  unsure (1)..(599): unsure at all n locations
taaatttatgtacattctttcactgctcaaacatttcaaacaagttatatttctcatcctaaatcttactatctaatgtatggctttgaataaatcaaaagaatcagaatgggaccatatctcttgtagtgataaacttcaagaagcttataatcattgaaatctttatattggaaatattttttttataaaaagacactttgagttattccttttttgtttgcggggttacttatgtatgaatgtaatgttggaccccaaaaaatgggcctaatttcgcttttttctccaatctttatttactagacaatttaatatatggtaacatattgacctatagttattttgcatggtatccctatgattacaaatttgctgggaaaatatataattctttttaggtttgacgtaatatacatcctactatagttttttaaaaacatattaaaagggaccgtacatagagatagggaaagagaggatcctcactattgcctgtaaagtcccttttattcagattgcttcgttccttttctttcggtctactcaaaaaaaaaaatatggctcaaaagaaaaaatctncacctcaattttttttt

SEQ ID NO: 77563 - DNA, 357 bp, Arabidopsis thaliana landsberg
tgccgggcggaacggagtgaccgggtcttgcgggggctgccatggtttctgcgcggtctcaggcggggggtatataacggggacgcatgagcttagccctaagagccaatggtcatcttgaaacttcggatccatagagactgctcgcgttgtgcacgttgctgcatggaccataggctgtcgcctggagacctgttgccgttctgcgcacgaccgaccgagagcggcacttgggcctccggatcaccaaggtccgtcggatgggcacgctacaccagacagcatgcgtcgctctaggatgcgctgaacgctacctacgggtgagcggcttccatggtggtcgggacgttgcacata

SEQ ID NO: 77564 - DNA, 556 bp, Arabidopsis thaliana landsberg
taccttttttcatgatgctttttctaggtttgcctatttttcctctatatttggggggtcttttgaattggatggaagtttataaaaactttaaacatttatttcaagagtagtctgttgtatttaaagtttagttaaaagagtattcaacgttgtatctggtcatctggcactttaattacttaaatttataaaatatgaaccacaggtttttaatcacgggaagcagtatcgactgaacaactactacaaaattctacaagtgttgtcgtgtgttgattgaaaagtgtttttgaaattcgttttctaaaatgaaattgcacgagctctgattaaaataaaggtttcttttggtcaatagttctcacttaacgcaagaagaacaaatattagttgtcttcacgtgatcttccgacagattcaaagttttaattagttgggacatcccccaactgtaataatatctttttctccatcatcatcgtttctttttcggtacacgtggcagccacgttgaccactcgatagccacgtgatcatcgtcaactggttctgc

SEQ ID NO: 77565 - DNA, 521 bp, Arabidopsis thaliana landsberg
  unsure (1)..(521): unsure at all n locations
ccaatgccctgaccttttcttcgatgggagccggagtaatttcccgggaattgcccggggtgtacttcgcctcaaaatcaaaaaactcttttccgctaatgatctccgtgaccggtagggtcgtcagttttccccccgcacgaaacaaaccgcaggtcagctcgcggcccctgatgtattcttcgaccaatacttggccgtcctcccggaaggctcggcggatcgcttctcccaaggcctcggagggtgcctcgacttttgatacgccaagactggatcccccttcggcgggtttgacgaagactggaaatttcagttcgcgggtcagggtgctttctgaaaaaggctggtcttgaaacagatggatggaccgggacaccttgactacgtgcaaggcggcgactaccttattgcaaaaagctttattgaaggtgannnnnnnnnnnnnnnnnnnnnnncccgagaccgggatcttcaacatggtaaaatatcccttgcatttaccggcttccccggtgtgc

SEQ ID NO: 77566 - DNA, 645 bp, Arabidopsis thaliana landsberg
ctgccgataaagcacttctcagtctcggagatcaaagtgaaagcgcctatccgctcgcttatctgccttcttgtcgtcgcggccctatccgggtgcgcgcagttgcaggcgcttcggtccgacgggccgcagcaatcggcgtccgcaactcagacaccgaccccggtcgtcgacttcacgatcccgcccgacgcgctcggcgcacgcgatcctcatctcaccgcgatcctcgggaaggttggcgcggtcgcctcgaaacaatcgcagcccacgacgatccgcgtcgccgcgctggcacaggacttcccgtacctgaaccaggcgatcaagcgcggcatcgcaccctcgcgcgccgcgaccatccgactcgaagaccttgccgtaggcagctgtcagccctaccggatccggctcggacctaccgaatagcttatggagacgaccatgtttcgctacatcgcgctccggttggccggatgcctgtgcctcgcaacagcactgccgattcatgcccagacgagtccgcacggcggtgcatcgccgctgtcaaccaaggcagcagcggaagctgcgggcccgaacgaaatgttttcgccgctgccggctctggcttcgttgccccctttgttcgcacagcaactggaa

SEQ ID NO: 77567 - DNA, 413 bp, Arabidopsis thaliana landsberg
ggactgtgggtcgtaccaagtgtgaaacccagtggagctattcatggtcccatagggcaccactcctatgcgtatgataacatgctataaatctgcttgcacagctgcatccacgtacagagaaatacatgacatgctcctcatataggtgattggaggatgtacatgccgatgcgataggtatatgacaagaggctcgggataacgtgctacttcaaccttacacacgaggaaggaacaatatcacagcgttccctgggcccagctcagcttcactagtgacgaacttgcttgctctgaaacccttatggtgactagcgctcgctgcagcggaaggaaccagtcaaagattggagaagcatactctgtcaggcgtcagttatagcgtcatcagagcctcttcatatgaacgt

SEQ ID NO: 77568 - DNA, 112 bp, Arabidopsis thaliana landsberg
ggaaccagacaaaaaagataagctcggcgcaggagccgctctggccctaggtccgatgtagaataagaccgagtggatttgtgacttggctcacacatgcgtcggtgtctag

SEQ ID NO: 77569 - DNA, 553 bp, Arabidopsis thaliana landsberg
gacgtgtatgaaatactctcagataagatccatacttgtttcgaacattcactgaactccgttgtaatctcgctgcacagcttctgataaagtgcttcagcaccagactccacatactctgagaatccactgataattgaattcgaaaacatagtcagctcagattaatagaggaagatctcagtaacaaaaacatggaaatctacgaatataaaaaacatctccctctctatccttcacactatttgcctcaatttcaacattcaccaacaaagtctaactctcaggcaatggatcaattggaacttaacaaaaccgcaacaaataaactgactctttgagagatttccaatgaatcaatcgaaccttttgagattggcgtaagcctgagctcggcgctgctgaatctccaacagactccgaagcaggaccagggtttgagaggcgacgccggagcccaccgtcggactagtagacccgacaccggaaccgccggattcgttctcaatatctccggagagggaatctctgagggaaaccttcttctggaaat

SEQ ID NO: 77570 - DNA, 618 bp, Arabidopsis thaliana landsberg
  unsure (1)..(618): unsure at all n locations
ttaaatcttttacgtataaatcattactgttttattgataaagtaagctcattctttcgcacgacatcaagattttatacgatatagagtttttggtaccacgatcgcaacgtataataagatagtactgtaactaacagtcacgtgatggaatttgaaattagttaaactctaaccaattaactatacgtacattttacacgtggtaaaacaaaactaaagcaagaagattcaattgtttcttttcttcacgcttgtgacactttataacccaatagtccttgtctttatagtttgattacttttgtccgttagtgttcaccttaattatggcgtttgtaaatttgcggagatggaaaagagtgaagtatctaatcttgacctacatgaaaatcatcaatccactataataaaatcctctagaccacacttaattagtcaaaatctaagtttaataagtgacatagttatgtttaaactaataaatattaatatatttgtcaattaatgtctatatatcaagaaaatattatggtcctaaatattaatntatagattttgtattggatatatatntaatagtatttctttattagaatcatttcagtatgttctatg

SEQ ID NO: 77571 - DNA, 545 bp, Arabidopsis thaliana landsberg
gaccgcattggatttcggtttaattgctgcgctgcaccaacggtgatcttagcgtcgacacggctgctaagtttgcttttattcgttctttgtcttgggcatccctcagacacgggactctgcagaagtcatttaacataatattatacaccacagatagcggcaaagacaagacaaagacatccatcaattaattgacatctgcaacccacacacacgccttggctcctggtatcgaaccgggaatcggcttggatacaaaaagcaagcaaagcaaagcaaagcaaagctaagcatgcaatcaactccaatctcatatcaagcaacccaacacagccatcattcgccaccgttcgcggccgaaccacccgcaagcatctcgtcgccaactctaaacgagcgcgctgctggaaatccctgccggcctggccgtcaacctgccttgcccagcagctcttgtgccttgtgcgagtcggtaccttggccgataccttgggcactcgtaccgccaccgtcaccctgcgtgcgactatgcacactcccag

SEQ ID NO: 77572 - DNA, 467 bp, Arabidopsis thaliana landsberg
agtttgatgtatcttatttattttgtttatgtcgtctttttttcttggggttgttggaagggaatctccttttgttgttcgtacaaagaactagtggaattttttatttttttttttgggaagtgttcagagatttgtgaactaattaagatttattcggaatacagtatgtttattttccatcattggctactctaaaacatatttcttctcgcataacattatattgattttaataagacagattaaacaagaactatggttaattcactaaaaatatagtctctatctctgattatttctattctaaagtgatctagagtttcaacaaatataattgtcttgaacggcttaaagtaatctatagctattgaacgcctgtttacaccctttttttgtctcaacggtttttaaaaatagttgtatcaacataggaaaatggcatttaacgacattggaccatttta

SEQ ID NO: 77573 - DNA, 407 bp, Arabidopsis thaliana landsberg
atctcgagctagcgggtttcggccaacacatccggccttttcgcaagtacgctagaagcgacgcaaggcaacctcgaacggttcgttctcgcgaactttgacgctgggcatggaatctccaaatggtaaactggcccactaacctcgggcgagccgggaattataccgagaccgaataccaattttcaaaacccgagtagggcgaggaatcttcctgcgacgaaacgggcgtcgcgatctaccagaagggcaagggtttgctggcccacacgctgtacagccagatcaagctgcacgccgattacggcggagaggagccggagctggccagccgcgaccacgtgcgcaaactgttgccgctggagcgcgaaacgctgaaagaagccggcatgggcatccatgacatc

SEQ ID NO: 77574 - DNA, 599 bp, Arabidopsis thaliana landsberg
tgccgatccggctgtactccagatgctgcgcgagttcttccggggtaacgaacttttcccactgatgggtgccgcgcggcagccagcgcagcacatattccgcgccgacgatcgccagcgcgaaactcttccaggtgcggttgagcgtcgataccaccatcagaccgccgggcttgagcacgctggcgcagcgggcgaggaacgcaccgacatcgacgacgtgctcgaccacttccatcgccagcacgatgtcgaagcgctcgcgttggtccatctcttccagagtggtgcagcgatagtcgatcgcgacatgtgatttatcggcgtgcagcttcgcggccgcgatgttgctttccgacggatcgacgccgatgacctgcgcgccgagccgcgccaacggttcgcacaacaagcctgcgccgcagccgatatcgagcacgcgcaggccttcaaggcaggtcaggctgcgcgcgttgcggtcgaacttgcggcaggcggcgtcgcggatgaacgcgagccgcagcggattgatcttgtgcagcggcgccatcttgccgcgcggatcccaccactcggccgacagcttcgagaacttcgcg

SEQ ID NO: 77575 - DNA, 146 bp, Arabidopsis thaliana landsberg
attaaccttaaaagtattacattttttgctttcttttaatatgctttattgctttattttaattttgatttattcttaaatcttattattccttggcatcattgttaatattctcggctactcaacttgaataagtaacttctgtt

SEQ ID NO: 77576 - DNA, 504 bp, Arabidopsis thaliana landsberg
gccttgacgagcgtaatggtccacctcgcgtccctgcgtatccaccaacacgtagtgacgaagggacgggatcgtccggtagtaggcaaacttgtctccacggtcccgcccccgggttgaaggcgaaagaacctcgaacatcaccagcggagtggtaagaacatcttcttcttcgtcctcaaactcggcgctatcatcgcagaagacgactacgtcggggtacgtgtaggactccgtcgcctgcgccttgaccttcatgtcggtgacgatggcttcgcaatgccccgcggccagacgaacattcagagcaacgtcgattgagcttacgattcggttgtgccgccgagtcgccccggccatcatcacgatctcgccatcgagcagttccgcccgcccttccgtgcgcgcgcgctcctgccgaagatactcctgaggagtgacgggcatgcatgctggcttcgccatgaatccattgtagcgtcagccccagcttccaccgagtca

SEQ ID NO: 77577 - DNA, 510 bp, Arabidopsis thaliana landsberg
agggtttaaaagccaaccaaggataaaactaaatatgtatgtataaatagatttattagttgggaatagggggtaaacttcttaatacttatcattttcatcggaataatccaatagactattgatatccatttatcgtgatgattaaaatcatttcctaactatacataattagttggaaataagctacctcatatttttgctgaatatcaatttcataagtgaattaaatataattttcttgatattacatcccccgaacatattttgtatcgtaacaacacatagatatgtttttttgctgaatactattgttcaaatggacattccaagatacataacaattaagactttaaatctaatttaaattaaaaatgtctcagcaaaacatattaaaattgttatgagcttctctgactttccatgtgatgatatgtgtcactaacatttaatgttggtatgatttaaggttttgggtaatcatagatggtgaaacactcgaatatgtta

SEQ ID NO: 77578 - DNA, 263 bp, Arabidopsis thaliana landsberg
tgctaatccgccttaacaaactgcttaaagttccaaccacacatgacgctagaacaagcgaaggcccctaaccggaagagtgcgctaaccgtatttgacaatcaaagtagccttacaggtgggaacaagtatggcacgtgcaaacttaggactagagacctcactcccatctgcaaccatcgaagccttttgattgcgataaactgagagcgagtgtcagaagcagagcagcgaccgtttctcgctacagattaccgccggaa

SEQ ID NO: 77579 - DNA, 229 bp, Arabidopsis thaliana landsberg
tcaccctctaacaaagatgcatcttaatattcataaactattctctttctacttacatagtaacaccataaaaacaatgaaactgctccgtagaggaccttggtttgagcctctagatcgtcttctcttacctaaaatgataatctgttccaagataggttcttgctatttgctcaaatatgttttggtcttttgaatgttagctcagcaaggagctcacatgattagc

SEQ ID NO: 77580 - DNA, 583 bp, Arabidopsis thaliana landsberg
  unsure (1)..(583): unsure at all n locations
acaagataagaaaccgagttttttacagagcttaaggaaacgtaaactgcatggaatcaagaatcgagagcaaaagcaagaggtgatctcaagccatggtgttgaggataatggaaagtttgttaaagctgagccagaagagtatggtgatgacatcggtgatcaatgtggaggtgtgtttgattatggtgatgagcttcacatagcnnnnnnnnnnnnnnnnnggcaaggggaggatgaaattgaaatggatagtgaaggaatttggaagggtttcgtgttgaatgaggaggagatgtgtgatttagtggaacattttatataataaactaatgtattatgagaggttttttttgtttttttgcttttttttnnnnnnnnnnnnnnnnnncattgtatacaatttgggccaaactaaaagcccaacaaaatatttggccttggcatttgttaacaaattgactaattcggccacaccttccactccattgattgttcaaagacgtctatcaacattttatttctcctgagcactaactataaagtatttacatgtttacacaaatttatttgtgccatttta

SEQ ID NO: 77581 - DNA, 573 bp, Arabidopsis thaliana landsberg
  unsure (1)..(573): unsure at all n locations
accttacgtgatatttttagttttttttttagatcttatgaaagcatttgatttctgtttttttttagagactgacatttgattaagatagctcaatctcattgcgttaataatcaaagataaagggatatccacagatagatacgttaaatattggatattgacctgatttaattttcatggatctgataacaataatgcaaataaaaagtgaatatctaaatctatatgtttttgcacatcacattttggtaatccgtaaacgtttttaatgtaaatataaaaggaaaggacactatattcttttccaaaagaatttatgataagtaatggagtatcaattacgtaatttgcataattattttctaaattccacaactactttatgataagtaatgtatcataactatatatngtataatttgaaaagnaataggtaatctaagtaaataactaaacaaaaaatggtttaagtaaaaataacaactaaagaaaaacatgagatgagtgttgtaacaaccataagactcatgaataccacacangacagttaanaaaagagagtttatgtcg

SEQ ID NO: 77582 - DNA, 523 bp, Arabidopsis thaliana landsberg
tcatagtaaccgtggagaaacaaccagaaagacacagaatatacctcataaagggaggaaaaatttacaatgagcactagagcaataatacgggaaaaaagaagaaaaaccacgaaagaagagccctgcgcggaaagcgcatggaaccagaagaagaggcacaactgtcaagaccgcaagcaagttgaccccggggatgcgatgcagacaaagctgcgggcacgcatgcaaaagggaggaggtgaaaaaaagaggggtataaaagcgaaaagcttgagattgaagctggcgaagggggacaagtgacgacaccaacgcatagaaagcgagtgagaagcaaaccggagcgtgcgaatggatccctagactgcttgcacaggaatgtgaggaccatgacactggcctcgacgcttaaagaagaaaggtgcattggtgtgaaccaacttccgagtacgtgggtcaggccggacacccaaattgtgaccgctgaggaccgacaaaccaggggcaagacgaccaagaa

SEQ ID NO: 77583 - DNA, 648 bp, Arabidopsis thaliana landsberg
gtggcgtaatggaaagcaaaggatgctgatcggtcaaattctgatactatattactggatgtaaaacagaggtaccggcactggagtacacaagaccgcaccatagccaacaacaaagatccaccgcaatacatttataggagaatgtttttttccggcgcgaacggtcaatctatagctcaagtcctcagctaaaggtcaaaattcaattactccttcaaaattattatgtctagcacctaattaagctacatgtatataactatatatgttaaattcgtttcttttttttatcaagtcccttttgtaatatacgagtataatagaagagaaataccacgaatcttctattacgaaaatatttcatcggaatctttctacagatataagaatatactaattttaaaacatcataatttagcggcagccgaatgataaataatcacaatacatcatgtggcttaagaatatatataattgagtatatatagtactatgtatatgtgtaatatgatgacacctttaaataataatgtatagtaagttgtatatatgaatccaggactgaattctgtgatatatagaaatttcaactatatggcggaatatacatacatttataaatagtaactattcttagcaaactaa

SEQ ID NO: 77584 - DNA, 547 bp, Arabidopsis thaliana landsberg
aataggtcttcgttttggttattataagtctttgatagagtttctctaaattacattagctcctatttcttttctttttttggtttttaatgcgcttaatagaataattcggctcaagaaaacaaacattttgatgcaattttaattgaaacaaaaaaaagaggaattttgtagatttaaattttatcaaagattataccttttgcagacaaattatctgcagtagttcaaaaacattacgtagtttcaataaatttaaagccaaaactattatatcaaaaacatgctactagtaaagctttattttgtttgctagtttcaataaacatatcaaaactatttttcatcatcaaaatattttgtaaacaatttattagttattcaatgagtactcgatagagacatgaaagcagctgaaaaaaacgaatcgttgtcgtactgatcttcgttttattgagcctgaattaggtacacctctattttctatctaacacatacgggtaattattttctcattaactgtgacgacaaaaacaagttcaaacat

SEQ ID NO: 77585 - DNA, 594 bp, Arabidopsis thaliana landsberg
tctgacataaagcggacactgttcatgtccgtcaacaggcttggaaggcagtcaggtctcttagtcggttgggcaggaaacggtctctggttacctgggagataaattctccattctccgcctgtaaagtagcgtgcgtattagatatgtggctgttgccctggtcaccattaacgtgtgcacggggcagcaagaccaatgccatgggaattggaggaatcgagagttcgacatgatgcgcccatcccctctcccactcacaagcacaccacaaccccttttcgcgtgcccgtgtcgaagtcgtgtcttccaacctcgttgcatgcagtcaagttggtcggcgctgattcgtccctatttctcgatattgccctcctgcagcccagcatccccaccaccttcgcaagcttctctgtcactggtcggatgcagctttggtgtaaagtgcccgtttcgtttcacgcgtccggacaccacacttccttccccacctccgaaattcacgcgaatctgcaccggagactctctgcccacggtgtgagtgcgtgtgcctgtgccccttgacacagcttttggagcagtcgcatcaatacc

SEQ ID NO: 77586 - DNA, 496 bp, Arabidopsis thaliana landsberg
atatttaaatcagatatatcggatttaagaacattacatcacatttttttatattattacaaacttataatatttaacccgtaaaacagggcagaacgattggttttttaaaaattataaatgtacaattgtaaatctttttaaaatcgtaattgcaattgtaagtctgagattagttttttacatactcataatattgagaattgttatgaaaacatttatgttttcttacatccatttcaattctcaataaccctttatttttattgaggtgtcacatgtacacaacacccttaatagaccttctttcgaacacatgcccaatgaacaaacgcccagcccaccatgattttttcttctccttctccgatacaccaaggatggtttgtaaacacaaaacacatcaatcaccagagtataccttccagtagcaaatagaaaaactcccaaagattcactccatcaaccataattttcctatattggtaagtgttcc

SEQ ID NO: 77587 - DNA, 558 bp, Arabidopsis thaliana landsberg
  unsure (1)..(558): unsure at all n locations
tgcgtgattgccgacgctctttggtacttcactcacgatttaaccgattaattcattttcccgaggattgttctccgaaccgttaacctctcagctttcgtcgctttctcaaagtttcatgttttacgagagaaagggtatctttctttacaaggtacacttttgttgacttttatatatctctagtttgcttcatctttgttgacttttcttgctcttctccatatggcagagactaaggcagactcaccggttccggagcttccgtatcttagaatgaaggatcttccatggttccagacagaacatccaagatcaggggataagttacagataggtgtgatgaagtcactaaagtcttcctcaggaatcatattcaacgccattgaagatcttgaaacagatcagcttgatgaagcccgcatagaattcccagttccactcttctgtattggaccctttcacaggtacgtttcagcttcatccagtagcttacttgcacacgacatgactngtctctcctggttaganccagcagcaacacattccgtaatctac

SEQ ID NO: 77588 - DNA, 116 bp, Arabidopsis thaliana landsberg
cgacagctacggctgggtgctgtatcgcctcggtcgcaacgacgaagcgctcgtgcagctgcgccgcgcgttctcgctgcagaaggacccggagatcgccgcgcacctgggcgaag

SEQ ID NO: 77589 - DNA, 588 bp, Arabidopsis thaliana landsberg
  unsure (1)..(588): unsure at all n locations
gaacggtatagccgaaggtcgttgcgtttctttctcgtttatattcttctttcttttttgtttttttctttcaattcctttttttctttggtgtttggaatctaatcgacgcacgaacagagcaatctcaagctcttattcttccccacaattgaatctgattctgagatcctcttaccttctgtttgatctctctgtttcctggtgagtctcctttcagctcgaattcgaatttggcaattcgatattaacaagtttagttttttttttgctcaatgattcttcttttgattggttgcagacgaaggagatattgtagagaaagaaaggggttctcatgattctcgtgttttgagtctctttccagtataaattaaaacttacacttgtctttctttttctttttggtggaaatctacgtagatctgttccttttttctcataaaacttttgggtttaaatttctgtacaaataaaatatttgtaagaagaaaaaaacgttcttttaaacaagactcgaaagggtcagacccagaagtctcatcttttacctttnatcttggtcagctttgaaaggctcatcttttt

SEQ ID NO: 77590 - DNA, 523 bp, Arabidopsis thaliana landsberg
ctagtataagggacaaagccagaggaagaagatgatatccatagctcaattggtctaaacccttccgtagtttagctctttcttcaatctctcatggtttcttcattacatttcgatctctctgttcttaaaacatttcggaccaaaagaggaaagctgcagccacagttgcaggtgaagaacatagaacactgtcccttctctctctctcttctttatctgtttgaaatacctaaaaattggttctttatctgtttctttcgttgatgagttcgaaatacctaaaattttgttctgtttttgagttactatgttgcagaaagttttaacctttgagggtttggtttagtttttatgtctactcttttctgggttcttcttgaagattcagctaaaagaaaagaaaaaaatttgttttcaagaaagttctttgtttccttcaaattttgatttttttttttctgaaaaaatgttctcggttaggtttaaatcgaaatttctagtttggttagtttcttttaag

SEQ ID NO: 77591 - DNA, 512 bp, Arabidopsis thaliana landsberg
gattcccacatcatacacaagttaacactctctgttgttggtttcaagaaaggaccaagggaagatatgtagaggatgagaagatcaaagtgaaacaaagagtttccaagagaagagagattgattagttttgattataaagatgaaagagagagtggcaaagagagagagaagagagagggagatattatccccacatgggatgcttcgagaattggagctttctctgaattgtctattttctcagagagattttcaaaaccaaagtctctcatatatctaacagcctgtgatgtaatgggcttaaaactctctgcttcttcaattatcataatttttttgaaatttagtgatataaattttgcccattcttatcatataattcaatctgtcttttttagattttacattaaacattattagtttactgacattgcagtatgctttttagtgaagatatgagttggttaagtagagacaaaaataaatcttatataagatttgggagggac

SEQ ID NO: 77592 - DNA, 713 bp, Arabidopsis thaliana landsberg
atttgcccaagatcttgttttgaagattagacttatgaatataatttttatttgttaaatagtatagatgcttgcatcattgcccacttcttgtattccttcatttggcaactaactattctcccagtttaatttaataagtaattaacattcattaaacatggtcaagataggctttttctttctttttcacagtaattagacaaataagatttggtttaggtggaagacattgagataaattacaagaaagcttcaattcatgctccatcatcaattctctctgcgagcaactttaattgatgggaaatttcaaaaatctacaatgataattacataaaaacacatcaataaaaagaatatccagtagactattaactttgttagagaacaagggacgacgattcgtttgatttcgttcttgttgcaatatgctcttgagtgaacgttttgatacaaaatgtcatctgctcgcttaaatttatgatggatatatgcgttattcaaatacatagtgaaatttaatatcattatgggatcaaaatattatacttaaccttccatgttgattatattttttggcctaaagttggttagcccttaatttcttcaatatcttttcctttggactttttggattatttaagaatccaaattaattattggatattttaaccaatccttttaaatggtttcttctttttaaaggcctt

SEQ ID NO: 77593 - DNA, 471 bp, Arabidopsis thaliana landsberg
ccccctgaacactcgctttgactacacccgttccctggggccggtgctcagttctgttctttaccgccctgagaagccggcgcattgggggttgggggggcgcggacggccgagtccatgccccgccgttcgagtacgacccgcagacgttcgacccgccgggcgatctggtggaggtcggcccggagggcaccgtcatcagctggacgtggacggagcacccgcgagaagggcagccgctggaccgccccttcggctgggcgctgatccggctcgacggcgcggacacgaccatgctccacgcggtcgacgccggttccgccagcgccctgcgcaccgggctgcgcgtccgcccccgctgggccgccgagcccgtcggccacatccgcgacatcgaatgcttcgaaccggccaccgaggagcccggtgggccggaggcctcctcggggggttggggtgcgaataagcccc

SEQ ID NO: 77594 - DNA, 201 bp, Arabidopsis thaliana landsberg
ctaaaccaaaacaatttcttcttttcttccgaagaaggagcatatatggcttggggccacttacacaagacataagctgggcgaacacggacatgccgaccaaaaaaatgacccacttagaaaagggaaagacactacagaaatcattattaaaaatgagaccccggcaccccgggccataggcaaccggcaacagcggac

SEQ ID NO: 77595 - DNA, 116 bp, Arabidopsis thaliana landsberg
aacaagcccacatggagagcgcaacacaagggagagaggcatgctggactcgggaaggctgaccagcccccggggggaatggaaagactctcgaccacagggggaccaccgtgcga

SEQ ID NO: 77596 - DNA, 328 bp, Arabidopsis thaliana landsberg
gaagcttgaacatttgctatccacaggatatataaaggattgattgcgtatatttgcgatgggggatgtgtgagagatatatatgatactgacggaagcaatgctatatcaacctctgagcctcttgacgatcttgggtgcgcttccatccttgcttacctcaaatcgagtccttatatggatctgccaatgccatgaaggatattgattacacgcaatctttatctcttacaggggaactaaggccccgtgagggccagcaagacatcagcaggtgccatgaaagataaaacacgcgctctccttttctggagagccgccttacgga

SEQ ID NO: 77597 - DNA, 464 bp, Arabidopsis thaliana landsberg
aaaactttataagtctttttctgtgttgcattttccttgtcgttattactagcaagagatcatagtgttcagatgaaaacccaacacagttatatatttccagacatttttctgaaactttcataatcattattggtagatgcatatgtgtaaagattttataaatttcagagttagatattttaaactttttttgtggattaacaaatatgcatggattgttttaaccaaatatcatgattggttgtcactaattgtaatcgatttatatcaaaatttattttaccaaaattctatgtataagatatattttaccaaaattctctgtataagagatattgtatatttatgctttttaagaaatgattacaatattttgtttctcctatctgtcctaattaacatatcatattctccaattttaggtatgttttaatttgcttataaagatgattctttttaca

SEQ ID NO: 77598 - DNA, 105 bp, Arabidopsis thaliana landsberg
tgaaaactgcgtcacagatgattgttgctgatgagtctccaatagtcttaactttatccatcaccaaacccttggaacgtgatgcaccactccaaaaaatagtct

SEQ ID NO: 77599 - DNA, 152 bp, Arabidopsis thaliana landsberg
aatctgttcaagaccttgatttgggtgttgatgatgtcccaactgctctatctccggagtttgcttcccaagcggcgtcagtgaaccggttctcttcgattgttacaacggcgaatcctaggaagcaaacatctcgcgtgcttttaatttgg

SEQ ID NO: 77600 - DNA, 525 bp, Arabidopsis thaliana landsberg
caaaacacactttcattttaaactttaaacccaaaaaaacaaacctaagggtaatgggcttttactaaaacagatcaaaaatcaaatgttctgatcttctaacttcttaccaaatcgagcaataccgttaacccaactaattatccaccttctatatacattgcacacaaacatcatttcaaaagtgattgccattcttattaatcaaatgataactgtttccactatattctttcccatctttctccataaatacactaaccttttcaagatctaaatcaccttcttccaatcaatatatacttcctaaatgttaaaccctaacaattgattcccttccaccttaaatatgggggtagtcgaatgatctttatctccaaaaccatattcaactccataaactaaaaccataacattttattagtaaccaaacattaataccacacctttaatctcaattataaacatactttcatttttttacagacatatctaataataacatattatacaacccacttttat

SEQ ID NO: 77601 - DNA, 550 bp, Arabidopsis thaliana landsberg
attacatatacacacatctctttgcaccatattgattgatatcttcattagtttgttcttatttggtttatggcttctgaaataggtgggtcttaaattgttggtttatgattcttttcttctttcgattttttttttgcttactctgttcttcaactacttttgtcaacaaaatctgtttgtgaattattcttcctcgttatactgtatatccgggaattgatttcgttttgcattacaataataataaattcgaggacaatttttttttttttagtcattgctaatataactaggtccaaagggcctctcaaacgcgaagaaagattatttatttatagattccgaagtatgattgggccaggccatttcattgttgccaacccttaaacaatcaagcccaggcccgctagactaaagcgtttatttggtttcaatattattgctaattaaattaactggttagttacaataaactggtggcttgattctctgtattttgaatgtgtagaaattaatgaagaaaagctttacctatttttggttcttc

SEQ ID NO: 77602 - DNA, 132 bp, Arabidopsis thaliana landsberg
gacatccctttctatcatggcgcacgccggaccgtggcacggcgtccctcgtcaggcggctctgagccatcgacgctctgtgagttcttcgcagcatctgcaggctaccgtagaacaacgctggtcggcaag

SEQ ID NO: 77603 - DNA, 498 bp, Arabidopsis thaliana landsberg
  unsure (1)..(498): unsure at all n locations
gcatcggctcgttaagtatccggacttgcatatctctatattttttggtctgacatacgaatctttaagggtgtcgtgtttcttccgnctcacaggaggcacattccactgatgggaccttgtcagctgggaatcaggcattttgctcactaaattattgtcttcatatcctctcggctccggtttcgctttcaacttgtatgaatcgtttgacatgaactgaggagacctgctttcccccgcatcagtccgctatggagtactttcccttgcataaggatcagagatcatgtactgctttgcaggaagctacttttgatagacaggtatatcataatcaggcatatgcttatttacttgttgatgaggcctccgatcgatctacaactgagcactaagcttatatattagctctagagccatatctttaccgaaccgagcagctaacattttgtcaacaaactccttcttatcagaatttggctgtttatgtataga

SEQ ID NO: 77604 - DNA, 575 bp, Arabidopsis thaliana landsberg
taccgcacatgggatcacatggacctttctatatttcgtttatttttactatacaatactcttgactttgggatatagattttaaaaaatgttggaatatagcatacatttagatccctacatgcattattcattttttctatatatccactactcgggctaatttaatactactatttttatataatctgtctctacaacgtggtagaacagcttcattaatacgttacttgaagattcactaattatttatacatgtacactttaataattacggcaaaaaggtaacgttaattccacgtcgagcatcttaatattactagctattagtcagatagataacttttccttcattcgtaaagtcacccgtaaaaattacgatgcttaacgtgaaacgttgaaatatgaattaattatttatccaacatataatccgatagatgtcgttttcgtgtcagtacacatttagtctacgatataaccaaaaaaagaaagacataaagaacgattttttaatatacaaaatagatagtcgaaaatagattaattaacgagactttgattagctagcttga

SEQ ID NO: 77605 - DNA, 349 bp, Arabidopsis thaliana landsberg
ggataatgactttataatggatacatgactcaattaacagttgaccagatttacttgatcctgccctcctaaggcctggccggcttgatcgtcttcttttgtgcgactttccttccccaccagaacgattagagattcttacagttctttctagaaaggttagtactctcagttacatcatttctgctaatcatttttgtcctcaagtctcatgtaaagtatgtatgctacatatctgaacgaccattaactagaatcttctatggctaagcgattttcatcggattctgacattcaattgatggcctccctagacattatgtagataagatttatctatatatattac

SEQ ID NO: 77606 - DNA, 382 bp, Arabidopsis thaliana landsberg
gctccagtttcgggtaaagaggaccggttcgactgttctgaagctccaagggaacaagacttttgatttatggagctgggcaccgaaagaggactgatgttgaatagcaacctaccttgcccctgttactgggtgggcatgattgtggggtctcagtttggacatcggggtacttgtagtatttcccagagtaagataggaaatttggatttctaccaggtagcggatttgtagacctggtataatcttattcagatgagccatgtgtggctatgtctatatacatcatggagtctcacgatcgggggttgcttccggtaaatatggacatgaaagtttatgaacatcacgactttatttgaccttttgccaaatcaatcct

SEQ ID NO: 77607 - DNA, 373 bp, Arabidopsis thaliana landsberg
  unsure (1)..(373): unsure at all n locations
caaagggacctttctatactttataattcttaatatagataaagacatatagggggctgggaagtatataaatgaatgacgtatcataacaccaatattgancctaacaaaaaacaaaccagacgaaacatcaacgctaataaatacaaactaatatgctggagagatggactgacaatcactctcattcaaccaaaaaacaaaacaccatgcaataatgactcagatgccaccacaactacttatttcattgaacttaggaactaactccatgacatcaacctataatacagatacatgcttcacaatagctaccttaacaaataaacccgagccagacttactcacctccataacttcctgcacaccgatc

SEQ ID NO: 77608 - DNA, 574 bp, Arabidopsis thaliana landsberg
ggggctggcggatctgacgcggcgaaaacgcgcggtgcgcgtttttcgatcatcgcctcgctcgcgtgggaccgttgcgtgtacggcacgtttttcccaacgatgatgggcgtcgcgccggaggatgcggcggtgtttgccgaagagcgcggggcgaacatcatcgcgctgaattgcggcaccgggatggacatggcggcagcggcgcgcgtgggccggacgtatcgcgaaagctgttcgctgcccgtgatggtgcagccgaacgcggggttgccggtgctcgagaatctcaaggtcgtttacaagcagacgcccgcggacatggcgcgtcacgtgcccgaagtgctggcggcgggggtggcgatcatcggttcctgctgcgggagcacgccggagcacacgcgcgcgatccgcgcggtggtggacgcgtttcagaagcgataaccacgaaaggacatgaatcgacacgaatagccgctgtggacagggacccaggaaattctattcgtgttcatgcgggttcattcgtgggtattatggttttaccgattgcgaacttgatggaagaatgcct

SEQ ID NO: 77609 - DNA, 571 bp, Arabidopsis thaliana landsberg
  unsure (1)..(571): unsure at all n locations
aaactactttccaagctcaaggatgtaagaaatgaaatagctcatgctgattggctagaggcttcagannnnnnnnnnnnnnnnnnnnnnnnnnnnnnnnnnnnnnnnnnnnnnnnnnnnntaagaaagaaaatgcccccgtctttcttagaggagagaattgaggagctggagagcacaatagataaaatggatacctttttagagcattgggataacatgcgtgcttatggaaagattctcaccgaggaagattatgagagggaagtgtagagcaggagtctaaataagggttccaataacgtcccagacggccaggtttgtttaatatgtaaagcggtgatctaatagtcttatggcagggctatttcgtctgacggctagcaaccccgaagcgtaccagcactatattgatactatcgagcgaggcttctcgttagaatcaataagtcatttcctaagcgagaagcagatttttacattgcgagaactacatggagataagccgattcgtgcttggggtgccattccgggatcgggtaatattcgtacttgggaaaagatggatata

SEQ ID NO: 77610 - DNA, 535 bp, Arabidopsis thaliana landsberg
  unsure (1)..(535): unsure at all n locations
tggcacaggcaacggatgcggatgtagtttgtttgcaagaaattaattcaacacccgatcaaattttagacattgttagtttagaacagctgggctataaacattattggtttccggctgagaaaaaaggctatagtggaactgctattttatcgaaaatagaaccaaaccatgtagaatatggttgcggaattgaggaatatgacaaagaaggcagagtaatcagagcagattttgatgacttctccatcatcagtgcctattttccgtcagggagcagcggcgatcaccgccagatttttaaatacaaatttttggatgatttttcggattacatcgcaaaactaaaaattgatttcccaaaactgattatttctggagattacaatatctgccacaaggccatcgatatccataacccaaaatcaaacgcaaattcatcaggctttntgcccgaagaacgggcttggatggacactcttatccatctcggctttatcgatactttcaggcactttaatccagaacctcacca

SEQ ID NO: 77611 - DNA, 583 bp, Arabidopsis thaliana landsberg
  unsure (1)..(583): unsure at all n locations
tgnnnnnnnnnnnnnnnnnnnnnnnccgatattctaattctcgatagtattaggcacctttcgattcgttataggccgtatttttattacgctaccccttaacacgatcgacttttaactagaagggctaagttcgtagagcagtacttagttaaaagtagataaagtaagagccagaactactaaggtaagagagacgagagccagaaacatcgctaaaagaaaggctagcgataactacactagtaataagcgagtatatataataagcctagccgaaatagctagctaggagcggatagaatcggagcttagctcagagctcgataaggataatataagagatctagaacgatagcttagtaatagcattatattatctctcgcggagtaagataaggacttttaattatcactaaaaagaccatagaagaggaaatagctatatagcgaggacctatctcttagtattcgcctagctaggggacataagatacctagtaggaaatcttctcgaataaccgctataaatcaatataccgctattacacacactaaggaccttaaatatattaaatacgtg

SEQ ID NO: 77612 - DNA, 687 bp, Arabidopsis thaliana landsberg
cttgatgtttgagaatgaaatataaataatttgggcgagaaaagtatctagcttagatacgagataaaatctcatcttagatgcaagataagatccctgcttaggtgtgagataatagcttgggttagatgtgatgtgagatcgcaacttaaatttcaacaagctgattccatttttctgtgatgagaggactcaaacctgtgttgagagttgaattataagtttgtgaagtgggaactatagagaatactaattcacttatttgtggaaagtgaactcaatacaattggagatagctgaaatctacttacgtgaagagagaaatcaacactttcatgttagtgaactggattcacttctctgtggagagtacactcaagatcatttgagaaagctaaaatccatttctatgaagagagaactcaatagagagtgaacttaacaccattttgagagagctaatccacttttgtgtacagagagctcaatacttaattatcaacgaaattaattcacttctctgtggagggtgaattcaacactatttgagagaacgggaatcaacttttggtgacgagaaaactcaacccttaaatttctagaaattaattcacttattttttggagagtgaatttctaccccatcttactcaagctggaattctcacttacgttaaagagagaacc

SEQ ID NO: 77613 - DNA, 602 bp, Arabidopsis thaliana landsberg
  unsure (1)..(602): unsure at all n locations
ggcattcattcgtcggcaaaatcaaattgatatagtactatgttaggtatatccttcggattcgtttcaaagtaggggaatactgaatattcaatgtcgttagcggattcaactcccacagggttggcctccgcgttccgccttcatccgtgggctttgtccacggctatccatattaatgccttcaggcatctaaggcattgaaccaaaattaactatcttttacttccatattgccacagacaatctacaaaccattttttatggtcaaagaatttgatcaggggggtaaagtcgcaaccgacggcgagccggtctgtctcttccgggctgtatttttgtgaaacttccatatagatgggttcattttccttaaacnnnnnnnnnnnnnnnnnnnnnnnnnnnnnnnnnnnntttgccatgctgatgagatatacttttgcaggcgcctgtatgaggatcataagtaggataatgatcgaattgtnnnnnnnnnnnnnnnnnnnnnnnnnnnnnnnnnnnnnnnnnnnnnnnnttcaggttaaacgctttggtcacgccctgcttgccattgtangcattgcgtatgatggatggatttt

SEQ ID NO: 77614 - DNA, 326 bp, Arabidopsis thaliana landsberg
  unsure (1)..(326): unsure at all n locations
cgtttccttgttatatagattactattaatgtttttgattttccttcgcnngaagctntatggcttgtgtttgtccgaaactaaaaagggaatgcttcgtgcaaactataacattggggctttctttatatgttacatatctttggcggattccacacttcacttctatatctgcctggttgtaataaacgagttagtttggcttttgctaattgctgtgttttgtgaatatataccttaattagaaatgcctaacgtctgtctttttttttgccgtctaaacatttttattagaaacatagaataaaatagtactacaaaaacag

SEQ ID NO: 77615 - DNA, 599 bp, Arabidopsis thaliana landsberg
  unsure (1)..(599): unsure at all n locations
gcaccacgcaatgcatctctttctgcttgccgtacaaccactgaagtccgtgttgatttcctaatgactttctcaccttccatatcttcttgtgcttcattctcttctttttcttcttgttccttgtttcccaattcttcacctggcttctcatctccaggaatatattctagttgtgaaactaccttcgtcttctttttnnnnnnnnnnnnnnnnnnnnnnnnnnnnnnnnnnnnnnnnnnnnntggcagatccctacaacaatatgcaaaattgtaacaaaattaaaacagacacacataatagccatcataagacaagctttgaaaaaattcaaacctcaattctttttcatttacagcgactgcatcaggctcaggctcctaatcccaaacaaaaggcaaaagaaagaaattaaaaagaatggaaatataagcaaaaaccttgatgaataagtactcaatacataagcaagacataaatacatcgtcattgaagtcactgtcaaactcatcagncacctcacgttctgcttcatattcatcatcatgttcttcctgcagataacanaagtnaagagatacataaatgtcagcaaa

SEQ ID NO: 77616 - DNA, 420 bp, Arabidopsis thaliana landsberg
atggcttaccagtatccgtcagatttgatctcggtgtatttatcgaacgatggaggatcgggcttgactttcggggctcttattgaagctgcttagttctctaaacagtggttgccccattgcaagaagaaaaatgatcaagatcgggctgctgatgcacagttcttctcggagcaacacactctaagcgagcaatccccaatccttaaggaacccatctcgtatcagcaaaggtgctttttttgtgaccaattaggttttggatgtacgtcggtccttgcttctttacccaacacagcatcatgcccatacgttggtcaacacctctaagtatcttgagcctgaccgaactaattaaatttaagaaactacatgcatactggacactgctatgtaagatctttactttagaactctatt

SEQ ID NO: 77617 - DNA, 556 bp, Arabidopsis thaliana landsberg
  unsure (1)..(556): unsure at all n locations
tgagtaaagcaccatatagagtaaattgaaccttgaccatctctgcagggtatgctcttgctgaaagaagcaaagaacttttgaacatccgctgcagggaagtgtacacgaatatatcgttggagcgagagcctgctcctaaacaccttatttttccgcaatatttcagtatctaaaccgggaagatacttaggaggatataagtatctatccacgaagtagcctttaccgctaattctcggtccaaccttccaatgccaagtatctccaggattaggccaattcnnnnnnnnnnnnnnnnnnnnnnnnnnngattccaatggacttactggtctcagcagaaggtgaggcgattcacctatgttactttgatcaatatccatggagtccatgttataagacctgcactcaatcacaaaaccaatggaagcagcttcaataagaacaacatgaaggaacattaatcaaatatgctagatacactactgatatagctcagttcctatacacacaagagaaaggctcagctaccaaactaactttcaatttcttaatc

SEQ ID NO: 77618 - DNA, 627 bp, Arabidopsis thaliana landsberg
  unsure (1)..(627): unsure at all n locations
tttatacattccacttcatctctttttcaaccttaagattttggaatgatgagacaaaaaatctcctggtatctgcagaagtcagaggagatgctgcaatgctaacttagccattaacgttgttgtcatggcattttacttgatatgaacaagaggccacaagatggcccaagtaggattaaccaagtcatatattcactttaactcaaactttattccaaatctgttcagtgcaaagatttgtagctgtgcacattgttacatacctgaagtggcaaacggtgcttttctaaaatgtagaatgcaaaaaatccatatgaacgagatgacttttcatataaggtaagcaaacaagacaatcctagatgtaaacataaacgctgtaacattgccaagtgcaaatcatcttctacatatcctaccggattctaacctctttggttccaaaatctattggnnnnnnnnnnnnnnnnnnnnnnnnnnnnnnnnnnnnnnnnnnnnnnnnnnnnnnnnnnnnnnnnnnaatgttaaaactcaacaaatctcaagaacacactacttccttttgaagaatgctaagctcaatgntacaaaattgagtatggatgataggatgatatacatctt

SEQ ID NO: 77619 - DNA, 541 bp, Arabidopsis thaliana landsberg
tcgagggtctggctattaagcctggcggtacctatgttgatttaacttttggcggcggcggccattcgcgcgagatattaaagcatttaaataaggacggaaggttgctggcattcgatcaggatgctgatgcgcagcagaataagatcgacgatgagcgctttattttcatcgatcaaaatttccgttaccttaaaaatttcgcccgtttgcatgatgctatccctgttgatggcatactggccgatctgggtgtttcatcgtaccagtttgaccaggctgaacgggggttttctatccgctttgatgcagagttggatatgcggatgaaccgccagtcggagctgacggccaggcaggtgataaatacctacagtgaagctgaactgcaccgcatttttggcgtttatggcgaaatacaaaacgcacagtcgctggcaaacactattgttaccgcaaggctcaattcgccgatagtaaccgtggccgatttgaagaatgccatcagtaaccgcatcccgaaaggaaaagaaaacaaata

SEQ ID NO: 77620 - DNA, 573 bp, Arabidopsis thaliana landsberg
aaaccatatacactattaaacattataacaaaaattcaatttttttcttaaaacattataaatttttaattgggggaaaggaatcacatttttaatacttaactaatatttaagaactaaaattatactaattaattaaaatatgtatatagcatgccatctgtttgatttctatctttcagtgacacgattacattacgagaggacacatgctcattgtttataagaaaatagaagttaaattttgaatacaaattggtattattagtccaattcctatccaagtagaagtggccaatgatctgaactttttttttatataattttatttatatttaggttttctggacataaagctgatgtgaaacgatcaatcgaacagatgtgtatctttaaagatccttttgtcacttttacgtaatccctaatagttggaccatcggaccacggctttcgttaaatgttttactaactaatggaattctgattttcttgatcacttttaaacataaataatattcatgatatatacatcttaatcaacgcgtttggtcaaatttggtcgacaccaaa

SEQ ID NO: 77621 - DNA, 511 bp, Arabidopsis thaliana landsberg
ttcggtattgtatacaaaagaagtgaaaggcgaaccattgaagttcatgttgatctggctggcgctgctcacattgggcaggttggcttcgaaggcgaacaatggaacttcaaccgttgatccatcagtagccggattggtaatggtcaccaccggtactttgggtgcatcataattaatggtgatctgctggtcggccgaaccgcattcattggctgcgtggaccgtaaatacattcggtccgttgatcagcaatgcattgatggtaataatacctccgctcaatgtgaaagcgaccgggctgccgttttgtgtcacagttacctgcgaagcgagaataatatggctcactgttgcggtcagcgtataattgcccaccgctacttttgagttattcagcgcggcatcaactgtaatgaatggtttttcgcatggaggagcaacagttgcatgaataatggcgtcgttgatcgaagcgctaacagcaggagtagccgcagacaccacaacg

SEQ ID NO: 77622 - DNA, 601 bp, Arabidopsis thaliana landsberg
attacttggagattcgaagattgagaggagactctcttctaacgcatcctcgcaacgactcgaagatgctgagagcctccaggaaaccacaaagaaaccagaagaagaaaaaaggaaagatctttgacgggattataagttggcagaggaagaggaggaagatggaaaattttgtcgtgcagattttttatccgatctaaacggaatcgccacaaatcgcaattaatttttacaaccccggttttgttcggtttaggatatgtgtgtacctctgtatttctgttggtgtgacaaaaaaaaaaagaaccgaacaggtgtgagcgcaaatcaattccgtctttcacttttcttaaaccggagataaccggactttaatgtcactttgttaaaacatttgttgctgcattatgtttttaggaggaatatgctcaaatatccaattcttatttcctactcatgaaatcgtgtagatctttgaaataaaatatccaaaaaaaaaatttgtcaaaggaaataaccaaatttccaacatcttttcatatgcaaatctttgcctatcttttgtcaccatttttttttttttttttacatttatacacct

SEQ ID NO: 77623 - DNA, 359 bp, Arabidopsis thaliana landsberg
aaacccgttacaaggcttcatcgatgcttgaatatactaacccccaggttttagttttttcaccaatctcatatacgtttgggtcggctattaatgctattatcaatctacaacactttaccataaaagcatgacaaacatcatcgcatagaagggctcacgctacaaattctcatgccgtgaaacgaataatcaccatcagtcgaaaacagcggctctccacatgaccctaccaaccgatcgcctatgaaaaactgaccctactcatatctctaagaaccatatgactgaattacctaagacgctcgtgcccctcataaatcacagtgcctcccctcgatagccaacgaacacttggc

SEQ ID NO: 77624 - DNA, 362 bp, Arabidopsis thaliana landsberg
  unsure (1)..(362): unsure at all n locations
atcacatnnttttagtgctgtgtgcgatagagctcnntttttnntctttctgttgagtnncaaattctagacctttacatannnttcagatgananntattattagcgtacctanntttaagncgttgcttcttctattttccaacctagnagaatagcaanagnatttaattcattagcnnattttccctttaggcaagaattttatcagggtaacctttttagaaagagttataggaaaagggatgtaatcannacatccaccctggttctctnntaccatcatttaagaggtaggattattcccagcaaaacagaggtcactagagttttagtcataggcttttctaccttcctcttag

SEQ ID NO: 77625 - DNA, 606 bp, Arabidopsis thaliana landsberg
gatgataatatggaaatatttctcgtgcttaattaccactcttttattaaattttaatatatgtttaaatatagcgaatgggaaataagaattggcgctgcctaaacatttatgctttatctttttccaaatgatgtttctaatcaattaatgttattacaaccaataactataaaaagaatctctattgggtggcaaaacaaaacaagatttctatttctaccccaaaaaaaattccaaaagtatttacatgaggaaacgaggcacaaccggttcatagttaatgatcagaaatataaaaaaaatacctttgagtatttttctaatatctgtaattaatatctttgagtcgatcaacaataatttttaaaattgatctgaaaagaaaaaattgtttatatctttatcgactatgtaagattgtataaatggccgacacaatattcatttaagctgtgtggaatccgtcatatatatttttggatatatacagacagacacaaggaaaatatttagactaatggtttctaggggaacatccaccctgagcacctttttaattcctaataaatgcaatttattgtaccaaatttttttttttttttt

SEQ ID NO: 77626 - DNA, 473 bp, Arabidopsis thaliana landsberg
ctatccggataaaaatttctggtgtttagataaatacgggaattcgaatatatttgaattcaaagatacccgatttttaaagatatttaacggttttgaatttctatacccgaaccaatccaaactcgatgagactcgaaccaaagcctaaccaatattttagttttaccctcatagctcttaaacttctctacgtaaaaggaaccgtacctgatcggattttaaccgagcccgacccacaataccgttccaataatcttttcttttgacatacctttgaagctttcaccttctgttgctctttcaaaaccaaagcctattgggatgaccaatttgatcccaaacatgaacacaattccacttataagtcactacacacccaaatttgaatgcttttatatttttctacactcccaaatttactctgggaaggtccaattaaatcgagaaagctatgtagatgctccttgtgt

SEQ ID NO: 77627 - DNA, 396 bp, Arabidopsis thaliana landsberg
cgaatttaaatttatattatgttttattttttgtaattatttttcttttttgcctttgctgcactaactaaggaaattttagtttctaccgttaacacttattttgaatgagtcagattatacatatcttaaaaaaattatttagttttatataattatttttgtaggtgtaatatatatttatatatattaaaacgctgcgatgcaaaaaaaaaaagaaacgcaatattgttttgattagaatatttttatgcgctgcatattttatgtcttataatctctataatatggaaacattcaaactatgtttttaagtataaacagctcaactaatgctcctacattctctaattttatgatatattatgaagacgctagcacgttagataatacacc

SEQ ID NO: 77628 - DNA, 692 bp, Arabidopsis thaliana landsberg
tagttacatcttgggtttaacgctaatggattgaccacccatcacatttactgctactcctattcaacaacatgcatcatgaaatttcatattaattatttgtttggtataaacaaaacatcaacctttcattttccatcacacaatagtgtcgcaacattttaacaaatccaaataatttattgaaaccatataatgttacagccacctatttatatgtctaaatactgatagccatatcttaaaatttgaattttttttctcaagctaaaaattatacacgaatcttaggaatcatcactcatgactcatatatagctcagttcatatatataaatctttttttgggttaaatattaagaacattcaaatagaccttgtaacgaattgaagcaaaatcttaaactcgaaacatgcgtaaatattagattcacataaatcggtcccaagcaagcaggtaactaagcgtgcttacttagtgcttacaccattgatatcctctcttttttctttatagctttttttgccgggaaagtgattgaaactttgtctcctcgttttgaaagttgaaacctttaaacctgtttttctcttttgccaaattccgacctaagaaaaaaagaagaagcatatgggattgcttcaaaaaccagaaaccccccggatgaaatcaagtgtttgaaaacggcccc

SEQ ID NO: 77629 - DNA, 520 bp, Arabidopsis thaliana landsberg
  unsure (1)..(520): unsure at all n locations
tgatttgatttcaagaccattgtcccggtcgtcaaatttgatactttcaaaattaacctcatgacttccgatagcagctgtacctaaagccttttttaaatattccctgtgcgcaatttcatgaaactggatgtcctgaaaataagctttttccgcagcgctaaaacccgctggtggattggatgccacctggatataaaatgccgcttccagttgctccagtgcataagcataattcaatacaccaaaatcatctttaaaatctaatacaacaccatcatattcaggaaaccccctgtctctttttttacatcctgctgcgataagtgcaatcccggctgcaccggcccctgcatactgcagaaaggaacggcgctgcaattgagcattaaaaacgctntgctcttcttgcgtgttttgttcttgtaagtttttcatagtttttaattgttttggtattggtcatgaagcttgcttacgcaggtttcatagtttttatngttttcttagtgggcatgaa

SEQ ID NO: 77630 - DNA, 589 bp, Arabidopsis thaliana landsberg
  unsure (1)..(589): unsure at all n locations
aacctgcaacaagcattcaatctatatgtaagtatcaatattttacatgtttttatgagttttgttttaattgatatatatttatatgtagggccaccgaaatgcattgctctatgtaggccagggtattacgaacgttttgaatgcttccatgattgtataacggaagggtatgatgatgggagttgtgttccagggcctacaacagcaaaatgtggcataatcacaaaaacaacaaataaaatttgttactcctttgctttcgaatgaatttgttaaaaatagaataattcttgcgtttacccctagcgaaatatgtatataataaatcaaaaacataatcaagaattatcaaaaaaaaagaaaatcaaaaatcttacatgtgcctacaaaaaaaaaaaaagaacatcaaaatcctatgtgtcaagagagatttccattctttatataagtggaaagtatcttttagtatatgagagtaaatgcacaaaaattaaggaataatanatgttctcttattatacanttcaacccatagagaaagatactacttagtttaattaaaaatatgaatttatataaatcatca

SEQ ID NO: 77631 - DNA, 463 bp, Arabidopsis thaliana landsberg
  unsure (1)..(463): unsure at all n locations
gagggggactaggaggtcttgatagctaacatagttgtctcatttactgtcatttactcttatggctggggtgtgtggtctttctncaggactgtattacgggcatcaaggaaaacaaaatttacgaatgaaaaatcgcaaaaaatacatgttcttgttcaattgaagagagacggaaacagatggtagaacagaagcaaaaaataaggaggatggacatagttattgaatttaaagggattttgatgtccatatcaaagacatagtttcatctttagcagttacaccgatcccagttgccataacattattctctgcttccatacccattagtatatcaagaaatgattcgggaccgtttaaacaagacatagaacaaaaattcaacttaggaaacttgagggatatgtaaccttggcaacgcaagccacataaatcgcaaattaatcgactctggctactg

SEQ ID NO: 77632 - DNA, 511 bp, Arabidopsis thaliana landsberg
  unsure (1)..(511): unsure at all n locations
cgcgatttcaacaagggccacgtcatcatccgcaggcagcggttcccgatcgtgggccgcgtgtgcatggannnnnnnnnnnnnnnnntggagtggggcaccgcctacaatggggacgnnnnnnnnnnnnnnnnncgcgatggagatgaaacgatcaccgcacaggaggtggcggagtgggcgggcacgattccgtatgaggtgctgacgaacctgcacgcgcgggtgccgcgggtgtatgtggcgtgagcgggggcgttgcagatcggggaggaaagacctggggagcgatgcgtggaagttgcatctgctcggaagggtgttcattctggcgggaaatgcaccgtttttaccgtctcctcttcatgttgctgcctttctgcctgggcgcctgcagcagcaccttgaatgtaaaggaccccgtgaaggcgtacaagagcaccagggtctttcagacgaaggatggcttgttcgtgggcggggattgggactacattgacattgcacgggc

SEQ ID NO: 77633 - DNA, 571 bp, Arabidopsis thaliana landsberg
tgttgatcctgaaggttgcagtcggcattggtgattcccctcccgggtggccgcaatctaatttggtattttatataccttttctattgacaatacgcaatgcagccgtggcgccgctgtgccagtgctgccgtgagccgatgaaaagggtccccacaacaagggcatgtcgtcctcactcccagactcactcccagatgatgcctccctgatttccccagtccgccagccgtggagcgtgggtttgctccagcgcatggcgttgaaccttgaaggtcggtgtcagagcgttgttgtcgatagttcagggcgctttggtcactaccagggcgtccatctgttcgtgtggattgagttgggcgttgacctgctgcagaagcgtcgccagctcactggtcagacgctggcgggtggcgttttcgtcgccggccagcgcagtacgctcctcggcgctcaaatcgaccagcgcgacggattgcgggaacccttcgcccatcacgcacccctgcacgatgcccgaagcggcgaccagcttcgttttatgggcgccgggcagacgtacatgcctttt

SEQ ID NO: 77634 - DNA, 405 bp, Arabidopsis thaliana landsberg
cctaaggaatatgaaagaccttaccgactattaagagagctctcgggtgtcatgattactctatgtgtaactactagatggggagtgcagacttactagtgtctatcctatagagctccaatgaccattactatatttacatctatttttgaaaatggataactaattaactaacaataccacgtaagcacataacatctccgtagcagggtttcaatggattaccttgcgaatgatagaagaggtgcccttcgctgcgcctttgtcagctgcgagaaacttccaagttaagaccatctttagtctttaagcgaggtcgttgtctagcttattctggacgtgacttacttatggaccgcagtccttcttgtaggtgagacttgtattatgcatatcacagttgtg

SEQ ID NO: 77635 - DNA, 451 bp, Arabidopsis thaliana landsberg
caaaaatgctactgaacaacaaaagccttttggttatatgcactttctccaaactgtattcgggggacttgtatgggggtcaatctcaacatgcattctcaaggatttactgcctatgctaaatccttgacttaatcatcgatcaagacaacgcttgaaggtccatccggggaagacataatagatcttatgatggacctttctctgacactacctgcacgcttaagctactcacagccttaccttccccatcatatgaggcctcttgtgtactgtttgagaggaagcgatgaacatgtgagcatggagctacgcacccttgaatgctggggggatagtctaaatcctgattttatggaaccacatgctgtacctgaaatgactgacgtgatcttagcattactgtcacacttgaagcccgtgacataacctaggggagagaaagcattac

SEQ ID NO: 77636 - DNA, 460 bp, Arabidopsis thaliana landsberg
gatggattcggcttgtcgtcattaaactacagcattcccaccgtaccatacgaaggggcagtgacggcccttaatggagctgggtgtttttgggtgcccaagaatatgccgatcatcttgcagaaggtgggcgggtctgccaacggctggatattctggcacgctgatacactcgtgtactctggctacttggaagaagacttagtagatggtcctgctgtagtagtcaattcatttggtcagcagatatgttgggtctatgcaccgctcactcgacctagtttttttctgccagcgggcactcatgtaacttatcaagcatcgcgttctagctcatttcagtccggcctgtcaactgtcactgattcccctggccctaatatcaccaacttgtatactcaacgtgtccgttacgaaatagtttcgccaatatctgcgaacagacagaagaataatgact

SEQ ID NO: 77637 - DNA, 379 bp, Arabidopsis thaliana landsberg
ggagtcatgagttttgaaaagaaatggattttctcttttattaccactgtgatcttatggattggctgcatgttaaaaactgcctttttagatataagtcatcagtaaataagaatgatagctagttagattctatatctatatgttaattgtatattacaatgatttacgtattaattatataacattgcatgtgtaaattacaaaattcttttattaaagattcactaatcatattaaaaatgacattttagtattattaatacacaattgttttaaacacatgcattgattgaatgaatgaaatacacacatactgaattaatactctttacaaatatagcatgcatcttttaacatattttgcagagagaagtga

SEQ ID NO: 77638 - DNA, 313 bp, Arabidopsis thaliana landsberg
aaagagatttgataattggagaggtacttagggttgaaacataattagggtaaaattggggaaaaccctccagagattctatagcagcgggaaagaaaatactagaggcggtgatgaatttatttttcttttctaatgatttaaattttattattaaaaataaattgcatcgtttaataatagaatgatacaaaacataagtatttagcatcaatttctaaagtgatgcgatcccttactacattttttaattattgtgtcatttttacaaatgatggtaaataatttgaggttaaatacttagtttttggag

SEQ ID NO: 77639 - DNA, 533 bp, Arabidopsis thaliana landsberg
tcctgcaattactaatagcttattaaaatgttcctgctttttttatctgaggtctcgcatgatatatgattggtgacattttaatccacgcatgttgtaagatgtgataagcctagtgaagcgcttttgaagaaacatacactctttatagaatggtagtagcaaaacctcaactttgttcttaataattgacggctttgctttgcaagctacttttgaaactctttttctattgttaaggagatgattccttttctttcacctttatttttcttgatgctcagcagtattttgccaagtgtggtataataggtttcaactttgcgtcacacataccactaacttttggattcacttgattgcagttagatctattaggagactctggtgttggtaaaagacgtattgaccttctatatggacgtggtcactttgacgctccatctcaggtaagtaaagccttgttatctacttgactttattgaccatatgacagctttttagaacaccatgctctgatgtgagtgaatatt

SEQ ID NO: 77640 - DNA, 340 bp, Arabidopsis thaliana landsberg
  unsure (1)..(340): unsure at all n locations
aaacaccagagccggaataggagaatggactgcgagccccgcacacacacctcccctccccacaccccgaaggcncggcnggggagggaaaagaggaagaggccgcggaccgcgcccaagaagaaagggacgggagcgcaccagacgacgacgacgaagaagacgaagaggaagagggggaaggagacgaagacgaggaggacgaggaggaagacgaagcgaaagggacaggggacccgcacaccaaagaggcccncaaggaaaacccaaacccccgaaaccgccacgccacgggcccagacaccgaaaccagaaaaacccgcggggcgagccgcaggcc

SEQ ID NO: 77641 - DNA, 359 bp, Arabidopsis thaliana landsberg
  unsure (1)..(359): unsure at all n locations
ctgtcccaacggttaatcaaaaaccccattgggtaagacacacggacaattttgaagggaggacacaccnaaccccagaccaggggncaaaaaaagacgcaacgcngaggcagacccaaaaaaaaacgagagacaaggaaaagagagnaacacccacaggaacgcccnncagggcaacgacgcagaccgaaccacacccacgaacngcggaagaagcaacaccagcgggacccacggacgggaaggcacaggcgacaaaagcaaaagcgaggcacccagggccagagcncgaagaggaacngagagngggaaacggagagcaccgaccaacnagaaagagaacgaccgccggngagaag

SEQ ID NO: 77642 - DNA, 335 bp, Arabidopsis thaliana landsberg
  unsure (1)..(335): unsure at all n locations
cacgttgaggacgcggccgctgccatcgcgcacctgctggcgttgagttttccgcaggcgctgnacatcggcggggacggcgacgccgttgccgatcgacgtgctctacgaccaccttgcggcgctggccggcgcaccccgacccgccgaggggccggcgccaacgggcatcggcagcaagcgacttagcaacacgcgcctgcgcgccagcggctgggcgctgcggtggccggacgcgcgtgacggctacgccgcgctgctggcgggtgagtcgagcgtggcctgatcgcggcagcgccgcgatgtccgcgccatgtcgcgctgcggcgtgccgc

SEQ ID NO: 77643 - DNA, 412 bp, Arabidopsis thaliana landsberg
  unsure (1)..(412): unsure at all n locations
tctgtgaatggctttttccgcatacactttnnccttcagaaaattgagcnccgacatccnnngttaccggtcgtcaattctgcttttaacccgaactcnntccgtttcaagaaaccgnntatgtgagaattttcaatctcatacccggctnnnnnnnnnnnnnnnnnnnnnnnnnnnnnnnnnnnnnnnnnnnnnnnnnnnnnnnnnnnnnnnnnnnnnnnnnnnnnnnnnnnnnnnnnnnnnnnnnnnnnnnnnnnnnnnnnnnnnnnnnnnnnnnnnnnnnnnnnnnnnnnnnnnnnnnnnnnnnnnnnnnnnnnnnnnnnnnnnnnnnnnnnnnnnnnnnnnnnnnnnnnnnnnnnnnnnnnnnnnnnnnnnnnnnnnnnnnnnnnnnnnnnnnnnnnnnnnnnnnnnn

SEQ ID NO: 77644 - DNA, 274 bp, Arabidopsis thaliana landsberg
  unsure (1)..(274): unsure at all n locations
cggaaacgccccgaccaaatagaagaagcagaagcaggtaaccacccccccccgtgaaaaagggccccggggcacgacaagaagagacaaccaaantaccaaaacccggccaagaacanagggaaggaaagagacnacangnaagacgaaaaaaaaaaaaaagagagagcattcatgacaaaaaaagagagaaggggccgagggaagaggtaagagggagagagaagaaaaaaaaccaaatggttgcagtagcgcgcacgcaagaacgaaaaaa

SEQ ID NO: 77645 - DNA, 306 bp, Arabidopsis thaliana landsberg
aattaattgaattaaaggataacaacggctatagtttcatatttatattgtgacagagctgaagaggtgtgagaggccgatgcgacgaggatggaaatgaagtcgacgaagccgatgaatatatgaaatcaggtactcgtcggcgagagctcgaagaacaactgatgggggaaaaatacaaattccttccaacttttgagtttctgcaaatatcacttttttgtctaagtgttgggaaatattattttgttatggcgcttaattaatttttggtctaagtgttaaacggaaaactgtctttttagc

SEQ ID NO: 77646 - DNA, 584 bp, Arabidopsis thaliana landsberg
catcgacggttttagttcatgttctttgagttttaaaatactctttttcaaaattgaaagagaattgttgttggcactggccctcttacctttctttttctttagatatcttcagagaagaaagaatggggttatatgttcatcaacgaaacccaaatacaaatcctcaggacaacaatctagaaataaaaactcatttgaaaaaaatgattcttgatttgggttttccttgttttgttcctcctcgaaccagctctcgtgaggacaacaaagcttggcttctggctgaaacagagccgaagcttattgactcagaacaacattcgttgcagtcttcgtttaggtttagtctttgctcacagttggagctggagaagattaaaaaggagaaaccttcgttgtcttatcggaattttccagtgtctgaaggatcagagacggttctgctagtgaatctggagaatgagacaggagaattgacaggtgagatgaattggtcgagaggcctctcactggagaagagtatttctcccgtggccgattcttgatccgattcagtaccgcgaactctcactgcacgcgca

SEQ ID NO: 77647 - DNA, 251 bp, Arabidopsis thaliana landsberg
ttttttgaataaacaaagagaaaccctcccctgtagggaaccaataaaaagctaaagcgcactctagacgatcgactatcaacaaaggactgacccaaggcgacgtagaattcataagtggtgacacaatcgcatatgaccgagagaagaaacacactaacacattaaaacactaaaaactcaaacaaggccaaccaaaaagccttagaccaacaaagcgaaggaaagaagcctacaaacccaccacaaaa

SEQ ID NO: 77648 - DNA, 466 bp, Arabidopsis thaliana landsberg
aaactacacagttaataataccatctatgctttagaaaatgtttattctattacatgatattttagcatgtatacgttaaaggttataatactaaattaactaattatccctaatcaaatttataccagggggtagtccagattgtcccctagtaaaattaaaagaactaagtattagcttttaatttttttcttcttttttttaaaaaacagttttgattttgactatacacaatttctatgttgatataaaactttcataattatgaactttggtggatgatgtatatcccccttaattagaactttcatatatatagcaccagttcgatcgagacttttgctctcgatctatatatttccatccaaaattgaaggcttaaacctatttacacacaccacgcataattatactgtgaaacatcaaacatgtatatacacaaaagttgggtttatcggtttatga

SEQ ID NO: 77649 - DNA, 450 bp, Arabidopsis thaliana landsberg
  unsure (1)..(450): unsure at all n locations
nnnnnnnnnnnnnnnnnnnnnnnnnnnnnnnnnnnnnnnnnnnnnnnnnnnnnnnnnnnnnnnnnnnnnnnnnnnnnnnnnnnnnnnnnnnnnnnnnnnnnnnnnnnnnnnnnnnnnnnnnnnnnnnnnnnnnnnnnnnnnnnnnnnnnnnnnnnnnnnnnnnnnnnnnnnnnnnnnnacagtggactaaaagatatggagtgataaagttttaaccacaaaaaaaatggttaaacatatatgagggctgcaacactaggacattcagagcgcatggccttttacatggtcatagcttccaccatcacaacattatggggttaagttaaaatcatgtgcattagacatatagttatcgcttaaccgtacacctgcaataacgcctattatatcctcttttgcagacttgccgatccattcaccttgactctgattaatgctgtaatgaaa

SEQ ID NO: 77650 - DNA, 422 bp, Arabidopsis thaliana landsberg
taagcacacaatcactctactaaatttccttttcattcttttccccaatttgcattgcagctggagataagtcttaatttacatcacctcctttgaaacaaaaccatcaattttttttcgatcgctaccggcatttggcaagttatgttttcttgatagaaaaccttagcttttctctactgtctagtcaataagttttgattcagattttttttacttgctcgtcttgtttccaacacttgtgtatgtcttcagctattctctatgcatccattgatgctccactaatcccacgttttgtgaatcctaccgcgtatagcccacattcccctttccattcctcagggaactcttgttttggaaatccattttttttactaaacatcttattttcctgaaaaaatatttgttttccaaaaacc

SEQ ID NO: 77651 - DNA, 481 bp, Arabidopsis thaliana landsberg
cgggctcgacgaccagcacggccccgatcacgatgtcggcgtcgaggcacatctcctcaatggcgtgttcggaggaggcgatggtctcgagctcgccccggaagtgatgatcgaattcgcgcaggcggtccaggttccggtcgagcacgaacacctcggagtgcatacccaccgccatggtggccgcggccatgccgaccactcccgctccgagaatgaccacccgggcggcgcggactcccggtgccccgcagaccaggacaccgcgccccccgcccgggcgcatcaggtggtgggctcccatcatcggggccatgcggccggccacctcgctcatgggaatcagcaggggcagcgagccgtcggccagccgtaccgtctcgtaggcgatagccgcgttaccaccggcgatcacggcctcggtgcactccttggaggcggccagatgctagtaggtgaagagggtctgtcccgatcgggc

SEQ ID NO: 77652 - DNA, 571 bp, Arabidopsis thaliana landsberg
aaagtttgtttaataaaaggttaacccattaaaggtttatgcaactttaatatgacttgcataaatcccatcgatgagagagatatgtactcttaaacttataaataaattttcttttctgccgaggaaatagtaaagaattctaatagcatgtctgcagattaaaacaatgtcttccttgttatatatttttctcgtactatttttttcgagctagcgagcacatcgaaaagaagtactattcgtgccattctttatatttggttaaggttattagcgatcactgaaatgtgtctctgccaattaattttaaactatttagacacgagaaaaaaaaaataccaacatgattattttactctaatatagaagttgaattgatgaatataatacttccaaagaagggtattttctttctacataatacaagatacgagatgccttcgtgacttcgtctgtaattctgtatacaaaaatagattgcataggtttttcttagtgtgtgagatatattcataggtatacatttcattatcactttatactgcattcaaccttataagtaatttat

SEQ ID NO: 77653 - DNA, 530 bp, Arabidopsis thaliana landsberg
  unsure (1)..(530): unsure at all n locations
cgggatagttctctacttccgtggtgatggtcagttgcccgccgggctgtatgctttggtacaatacggnnnnnnnnnnnnnnnnnnnnnnnnnnnnnnnnnnnnnnnnnnnnnnnnnnnncgagcctatgatcagtacatgcaccctttctgatgcttcatttgccatactatgtatcttttcttttttagacggacaaatgtatcactcccttgcactggatatgtttgccgttgttcacaattttacttatttggggataatcatgaggatatggtacaacaaacccctcttttccgggaggggtttgctnnnnnnnnnnnnnnnnnnnnnnnnnnnnnnnnnnnnnnnnnnnnnnnnnnnnnnnnnnnnnnnnnnnncaggcgtttgatggccctttccttgatctggcggatacgctctttggtaagatcgtatntcatgcctatctgctcaatggttacaccattctcgccatccaggccaaagtatgcgttcacgatctcggcttcgcgcggtgagagtgatt

SEQ ID NO: 77654 - DNA, 561 bp, Arabidopsis thaliana landsberg
  unsure (1)..(561): unsure at all n locations
ctgtctaccagcacgcttccgaaagaatagatccaaccgaaaatgggaacgcgggaaaaacttttcttgggaatgggcttattagctctcggcatgaacggtgtgctcacgggcacatccatcaggctgctatggttgcataccaccacgtagttggtatgcgatgaaaaattttctttgccccgcactaccaacgggcacccgatcaggtgcaggtatacaaacatacataccctcgatactttcctgtgccatacagacctggcaggatcatcgaggaaaaagcagggaatatacaacacaaaagccatgagcatggtacacaggaacagcagcaaagcccaaagcgccnnnnnnnnnnnnnnnnnnnnnnnnnnnnngttaccggatggagaatgctcttctggcatgttcttactgcggataacggttccagtcaatagcgccgagggtttgtttgcgcaccagatcattggtcttgctgaaatgcctgcagccgaaaaatcctttgtcggcgctgaaaggagagggatgctccgctattaacacatgatgccgggt

SEQ ID NO: 77655 - DNA, 576 bp, Arabidopsis thaliana landsberg
  unsure (1)..(576): unsure at all n locations
aagtggcggaagctgctgtcgctggcgccaatttcgctcacctgaatcatgtctaactggcacatttcctccttcacagctcttgggaacgctctgttttgcctcatcagcgacacttggctgagattagtgatggagccacttctcgcttgtctcgcgcaatcattcctaggcgtggtgcgtcgtggcattttgcacgcgaaatgcaattgacccaatgtgtttcctgtttcctctgaacaggcgctcagagtgctggcgtgggcgttgaccagtattctgactcgggcttgttcgctttgtgggcaacttgtgctcctggacactcggctggtgtggctgatgcgctggtcaatgaagcggccaagctgtcaggtcctctaagcgcctagatttcactgctcacccagttctgattgcgttagcgcccttgaataacaccgagctgcgcgcagccaagaacgccgccaaagcctcgctctttgcccaagactcgctggcttctcgtctcgcgttcgctgcanaatcggtacttccgactctcgtttctgtaaatcagtcacgattgatattttt

SEQ ID NO: 77656 - DNA, 598 bp, Arabidopsis thaliana landsberg
  unsure (1)..(598): unsure at all n locations
nnnnnnnnnnnnnnnnnnnnnnnnnnnnnnnnnnnnnnnnnnnnnnnnnnnnnnnnnnnnnnnnnnnnnnnnnnnnnnnnnnnnnnnnnnnnnnnnnnnnnnnnnnnnnnnnnnnnnnnnnnnnnnnnnnnnnnnnnnnnnnnnnnnnnnnnnnnnnnnnnnnnnnnnnnnnnnnnnnnnnnnnnnnnnnnnnnnnnnnnnnnnnnnnnnnnnnnnnnnnnnnnnnnnnnnnnnnnnnnnnnnnnnnnnnnnnnnnnnnnnnnnnnnnnnnnnnnnnnnnnnnnnnnnnnnnnnnnnnnnnnnnnnnnnnnnnnnnntgcccaaccagtcccagtgggcaccttctgacgaaaggtgggcacccacggagcacagtaccgtagaacattgggccccccgcttcncgtcttnntataaaannagcaaggggacccactacgtggagggtcannaaaacccacggaacctatgtgggaagtcggggccttcgtcnncccggtcatatatntggcnaatcaaaccaaaacaaaggcaatagtggggcccccgtagcacttgaccctctcttttttatttgggattccaatataataagggg

SEQ ID NO: 77657 - DNA, 537 bp, Arabidopsis thaliana landsberg
cgcgcggcgacaaggtctatgccatcaccaatttctcgcgcgagatatgggcggagtgcctgatccgcttccggttggtgcagtccttcgacggcgtcgtcgtctcggctcatgaacggctcctcaagcccgacccggcgatcttcagcgtgctgctgaaccgctacggcctcgccgccgaggactgcatcttcatcgacgacagcgcgaagaacatcgcggcggccgaggatgtcggcatgcaagccgtgcatttcgtcgagccgatcgacctgcgttccgcattgcgggagcgcggcctggcgctctgagcgccgtccagcgtcgtcgggaggacaggatgaacgacaagccagcgagggggcgcggcatcgccggcggcctcaccaattacggcgaccccgcattcgccgcctatctgcgccgctccttcgcgcgctcgatgggctattccgacgaggcgctggcgcgaccgatcgtcggcatcgccaacacctatagcggcttcaacaactgccaccggcatttttccgaact

SEQ ID NO: 77658 - DNA, 599 bp, Arabidopsis thaliana landsberg
  unsure (1)..(599): unsure at all n locations
tcgacacattcggcgtaaaggcgtcaccttgccgaatcacgacctcctggttcttttcagtgtaggcggagtttgtttgttggaagcgcatgtatgtgttggcgcgaagtgtaggttccacagtgaagtcagcctgaacccacttccctgcgagagcgaggtttccttgagatcctgcagtaaattgcagtgtcgctgcattattggacgcgctggtaatcatcaagttatcgaagactgcaataccatcggtaaccactgcagtcactgtacctcctgcttgcccagtggtggccgttgcagtgatgacgacgcccgtgacaagtgtcttgtcggcatcaccgcaagaatcgacaacttgcagtacgatggatggcatagcgacgttgagaacggcggtggaagaagatgcggagccatcaacgtatgaaagcccgggcacgaacatgaggtcgtacgctgccataggagaaactgtgacagctccggacttaagttgtttccctgccacgagcaaactgcccgaaggaccgccatctgcagtaaacaccagcgtgcanggatcaatcagacaggacgcanatgtcagcttgtcaacg

SEQ ID NO: 77659 - DNA, 261 bp, Arabidopsis thaliana landsberg
tggtctattaaaatctatcggggtcgcggaatgcacaaccaaaagtggaaatcttctaccgggtccaagatttcttcggcctaaccgaggaacgatcgtggctttggcgaccagatgctgaaatctacgaccgggtccgcctattggaccaccaggactgacgttccttccacctgcacaatcactgggcgattaaagtctatcgggtcccaggaatggtctacctgggtttgatataaacttacacgtgcctgactcatt

SEQ ID NO: 77660 - DNA, 596 bp, Arabidopsis thaliana landsberg
cttgaataataaaaccaacgtgaagaaacgattcttcaaattgggattctatatatgattattatttacaaaaccttaaaacttccgaagattttacgaatgcatatttcaaccataatactctattaatctgaaataccaaaagtgttataaaaatcagaaaatccgtagactaatataaacacacccaaaggttttgtcctattgaatataatgattattaacttattatggattctccactaaataataatttatttattttcttatattagagagtcttgattgatgctttattaagatttggtaattaatcagaataaaggcacaaagcaaaatatatcaaacttatataaagttgtctacaacaaattctccaaacaagacaaccctttaacaatttagaaaaaaaaaaaaaaagataaatcgaattttcaaaaagaaaagagaaacatcaatgtgctcaatacaagtagacaacgtatcaacgacaaaaaaaaaaaaaaaagtagacaacgtatcaactagctatttagcttaggtgaagcttaatccagaagatgtagcaggcaacaacttacgacatgagtcacgac

SEQ ID NO: 77661 - DNA, 481 bp, Arabidopsis thaliana landsberg
  unsure (1)..(481): unsure at all n locations
catccgccggccgtacaggtatgtcccgatcggccgctcgatgncgttgatgtgacgaagtacctcatcagtcgggtccgtccactcgaaggcgccatctgcctcttcgacatagccgtccgccgaggcgatggtggagtagatcaggttgcccatgctctggcagacgtggttcgtacgccggaatcatcggtcggtgtcctagccggtacgtcggtgtcctagccggtacgtcggtgtcatagccggtacacggtgggccgggtggtgtagacgcggccgctgggggtggtccagcgcatgatccctggttcaggctgctggagggcccatccgggtgcttgtttgactctatgatgccttcggcatggagggccgaaattgcactcgcaggtcggtccgtccggccaggccacggtatggtcgaggtcgttgtgaacggcccgggcgccgcaggtcggggccgtgcaagtggcggtgc

SEQ ID NO: 77662 - DNA, 127 bp, Arabidopsis thaliana landsberg
atgtcctacgacagcttaacactcttacaggatacagattctaaagcttggctagctgctgcgcgagtgacacatatctttctgggtctcgacgggcataatcgaagctacacgtgacagctcacac

SEQ ID NO: 77663 - DNA, 583 bp, Arabidopsis thaliana landsberg
atccatgtgacatactgtatatatatttttgtttatatgtgactactctgcatagcctgcattaggcaagtaaacaaggaaacacaattctatgagtgcaatttcaggagtgtactgattcattacttttgatttcagtttagtttcttatattaccaacttctgacagtaatatgattcaacattatttcggatggtagtacctttggcagtttatggttttaaattctgtgaatattttttattgaaatatcctattctcatagcactgtaatagctgcaaaatgtagatgtggtgcttctcctagatatttcaatttcatactactagcatctgtctaacagggactgctttggttgacttaatcttgtaaatgacagacttctggaggatgccagtatgagacgttcttatgatggtctactatggactttgaggtatgtttatgatgctagttcaggtgtttactatgctaaatttgcagcaatttccttcatatatttgctaatattagttgctggtgaggtgtttgatacaaaaaatatgtaaatttatatgaggtttctagggatctttgtatac

SEQ ID NO: 77664 - DNA, 571 bp, Arabidopsis thaliana landsberg
aaatgagacgacaagaaaagtaaaataataatcaacgatttttctcctttaattcacctattatacaaaaagtgggttttagagaacatgcttttattttatgtgactttctaatttatcaaatgaaagtaacaagtggtgtcacttgtgtcacataattttcacgaaatgtatggttttcctctctaccatatttatttacgtgaagtcgtgaacatctaatttgtcaaaatagattaaaattttcgtcatatgaactgattacatgttattaattagtacgtactctaaacattagtacatctcttcacaaaaaataccataattttatgttttaaagtacattaaataaaatagaatataccgtcacatttcatttaaagggtaaagtaaaaattagtgtcagacattattaacaatatggcaaatagaccaaaaacgtgccaaaaaaacaggcaagtgggtcattgtcaatttgtcatggcaataagtaacgaatgaaagatctcagccgttaatagccagttagcgaatccgacggctattgatccgtacattcctaaagctcatg

SEQ ID NO: 77665 - DNA, 174 bp, Arabidopsis thaliana landsberg
aaaccgctataagtctcgcgcataagcaccaaccatattcgcttctaaatcaataggcttgtcaatctacacacactactaacactaaatctactaacgaaacaccataactcatgtcatgaataaaccacacactacgtaaatcatatgttaacgcgcaatcgaacaccaaaa

SEQ ID NO: 77666 - DNA, 565 bp, Arabidopsis thaliana landsberg
  unsure (1)..(565): unsure at all n locations
agtgactcctttcgacgggaaatgggcacctttgcgtctgctttcggaaggtgtcgctacttctgctcgtagggggcgacgatgaccgcgcgcgcgatcgcgtgcatgaacaggttgaagcccaggtaggccgggctggcgtcctcggccagctccagcnnnnnnnnnnnnnnnnnnnncaccgcaacgtagtagcggtgcgccccgtgaccggccggcggcgcggcacccacatagcggcgcatcccggcgtcgttgaccagggtcagcgcatccccgggcagcaggctgccatccccgacaccctcgggcagctcggtgcaggtggccggcaggttggccaccgcccagtgccagaagcccgacgcggtgggcgcgtccgggtcatagacggtgaccgcgaagctgcgggtctcctcgggaaagcccgaccagctcagctgcgggctggcgtcctcaccaccggcacccatgattccgctgacctgggctttgcccagcggctggccgtcggtcagcgacgtggaggtgagcgtgaacagtcgcagcttgggcagcgcggcgt

SEQ ID NO: 77667 - DNA, 497 bp, Arabidopsis thaliana landsberg
gtggaagatatttaattcagtatgatgcttaaaaaaactcattacgttagctatgttttgttgaatattacatggcataaacgtatgggtgtgcacttagagcgagccggtgattataggtttgttttttttggtaaaaaattattgagagattattgattataggttttgaagctatcgatctgagctagagattaaggaacgaatccctctatgaacatttaaaccttgttctttttgcttattaactgagagattaggatcctaaaatctatacaacactagagatcattatccaaaagattttacttagtcccatttgcggtcacatttaattccctaaaagcatgaaaattctatcccatttgttttttccactagacttgggactcaaagcgtaatttataactatcttacgttagagagcattatttacgaccattatttaggctgaactcattatagacatcgatcaagctctagtgttaaatacattt

SEQ ID NO: 77668 - DNA, 133 bp, Arabidopsis thaliana landsberg
cggcggaagaacacacaaaaacaagagggaaacagagaacgggagcaaacacgaccaaacgaggaaacggaacgccaacaacggagcccagactaccccccagaaaccgaaaagccagaaccccaagggcgac

SEQ ID NO: 77669 - DNA, 696 bp, Arabidopsis thaliana landsberg
tttttcaccttaaaattcttttttatgatagaatctccggtaactgaaaaaacgcacatcacacttccagcctggcttacgattttaagaatcatccttgggattgttcttttttggaaagctattgtttttatccgtgataccagcttattacaaactatgatagaaaatacaggtatcggtctgtcttcaaaaaatgccagcactctttcatttatagtagcctatctgacgttgctttgtggattgtttatccttagcggattatttactagaacatcatcgattgttcagattcccattttaattgttgccatattttttgtgaattcaaaaaatatcggccaaagcggttttgaattatttgtatcagtaattgtgctggtcttattgattgtgtttgctatcaaaggaagtggtactctttctgcagatgaattttttagaacctattataaagcgggaacggaggatggaaatacaaaaagatttttcaaacaagattagtttcccctgccttatatcaaccgattttcgatagctactcgtaccaatgaggcagtattattggcattcaattttggtagcaggttttttcggtgggagtcaacagttagcggactgataaataatttttccgctttctgggtattggtaagcccttcggcaataagggttaaaatttctttttctctc

SEQ ID NO: 77670 - DNA, 525 bp, Arabidopsis thaliana landsberg
  unsure (1)..(525): unsure at all n locations
acacccaggacgtcgatcagatcgtggagatcgtgcgcttcctggcgctggcctacggcggtatcaacctgggggacagggccgcgccacgctgcttcgaggtggagcgtcggctccgcgatctgctggacattccggtgttccacgacgaccagcacggcaccgcgatcgtggtgctggccgcgctgaccaactctttgcgcgtggtgaacaagaaacccgagaactgccgggtggtggtctccggggtcggcgccgccggacgggccatcatccaactgctcacccagcagggcttttccgacatcgtgggctgcgaccggcacggcgccgtccgccctgacaatccgaacctggacgagttccggcggtggatcgccgacaacaccaacccgcgcggcgcccgcggcaccctggccgagatgatcgccgacccgacgtgtcatcgggtgtcccccnncccaacctgctcaccggcgcggacatcgncaccatggccgacgacgcgatcgtgttcgcgctggc

SEQ ID NO: 77671 - DNA, 585 bp, Arabidopsis thaliana landsberg
ttatttattaaaattaattttaaataattattatttaattttcaaaacaaaacattttttaaagtggaacctaataagtactaactatttagcaagagattgagaggattgcagtcctgtcacattttgttgccatctctctaacatgtctttggaccctttaatccattacctaacctcatctctatattaacactagttttcttggtctaattctgagttgggtttgttcgaatcttgagattttcgtgactagacgacgtcgttttacggagcttctcagaccacaagttttgttaattggccatattgtagattggaaacattctagctaggttcaagtgtttattactctataagcttcgaattatagagtatgcattattgcagatcatagaatttccaaaatttactcttatgtgttgctgcgtggattgtctgtcctgatttttttttataataatacaaagattcaaatcatttatattttgattaacgtatgatgaaaaccaaacaatcttaaaacttgacatttttcttcaaatgatagaaaaaaaactggacagggagaaattacagtagtct

SEQ ID NO: 77672 - DNA, 468 bp, Arabidopsis thaliana landsberg
  unsure (1)..(468): unsure at all n locations
ctgcaccatgctgaacaatccattcggaaacattgattatcctttacccgcagataacatggttttcagaggggacagttcaaccagaagcaaaggcttggatgagccactgatgaacccaatagacaacattcaagagtatgtaggaaaagcttctacnnnnnnnnnnnnnnnnnnnnngtcaggaaagccagagaaagacaaccagcatgatgtattcgatgacataatgaatgagatgatgaaacaggtaacgcggatgttctcttgattggattaaaagcttttggagtacgtacaaaaagaaagagaatgtgttcgttgacgaagagaataacggaatggtgccagcggctactagatttggcttagattcatttactccaccttagctagtcatctctttctctaccagttgcattaagtttatccacttgagaccattttcattgtgatggtttaaatctc

SEQ ID NO: 77673 - DNA, 530 bp, Arabidopsis thaliana landsberg
  unsure (1)..(530): unsure at all n locations
gagagcgcaggtttgatagtccggatcaggtatcattaggattttcgcgacacgcaggaaaagattgaaaaccnnnnnnnnnnnnnnnnnnnnnnnnnnnnnnnnnnnnnnnnnnnnnnnnnnnnnnnnnnnnnnnnnnnaggccccgcatttatttaccgcgataacaacacacggtacatcgctgtaaaattttctaaccgtggccgcgacctgggcagtaccattgctgaggcacaacggaaggtcgccaaactggttaagctggatcagggttattcaacggcttgggccggagagtttgaaaaccagacgagggcatcaaaaacattggcgcatgtggtgccgatctgtttgctggtaatattcctcatcctgtttatcactttcggaaatgttaaagacgcctcccttgttattctgaacgttccctttgcacttatcggcggcattttagcgctgcacattactggcatcaacttcagcatctctgccgggatcggttttattgcgctgttttgcgtctgcat

SEQ ID NO: 77674 - DNA, 566 bp, Arabidopsis thaliana landsberg
  unsure (1)..(566): unsure at all n locations
tcataaaaggagaaaaatgggtttgtttatggtttaagtgacggagtgttaacattcataatcttttttgtacttcagatttgcttgcatgaactatatttgtagagtaaacctgcaaaaaaaataaaaaagagagcaccagatttttccattctacatacaaaaacaaagcaagcaagcataaaccatgttccttactttgaacacatctcagaggattccaaaaacgcaaatcatcagatttagtcataatcacgcatcaagattgaattggcacatatcctactaaaagagcaaaaagatttgctgttgttggcacatttgaaggaagaaaaacagttgatgccatttgacatatacctcttaccaactcattggacgggactaatagtgtctgctatgtcagtttactgtatacgtaatagagcagaaggcagcggacaaggcagaaaccagccttacgttggtacaaatgttccacatgcggatacaaagcatcgcctcaactaaacaacangaagcgtgaaaaactgacaaatcatattaaattttaccaataactgata

SEQ ID NO: 77675 - DNA, 597 bp, Arabidopsis thaliana landsberg
  unsure (1)..(597): unsure at all n locations
acatatatngcaaatagtatgcataatttcgattgtctttttcatggtgtaacttaagtttgtcggtcctaaagaatttcaaagtgcaaacgcaaactatcacatgaggatagaacatttaattcatcaatggattctaaagtaaaatcaaaaaagagcttgaataatcagaaagatgacacactatattattaattatcataccgtaaaagaaaaaaagtgatcgaaaaagtttagatagatcgtcggaaccacacaaaatgaccggaaaagttgagaagtcgaattttctaatttgacacattatatcataccctaaaggcctaaactataaatgatattgaaactttactcattacctactcattgaaagctgatattacatttttataaatgtgcatatgatatcaaaacaaattgacgtactagtatttgatctaacgagtgttcaacttatactacatgtattaagatcaaaagaatgtgttgtaaaaatcacacactgaaaagctaattaagagtatattaaatcttatgagaatgaaagaaggacccatctaactttggcaggtgaaactcgcacctaatataactaat

SEQ ID NO: 77676 - DNA, 613 bp, Arabidopsis thaliana landsberg
  unsure (1)..(613): unsure at all n locations
atattccttttcaccccagttggaatatcacttgtgactaatataatttgttcttttgtttaaagtattgatgtgtttaaagtgttttcttaacatggggtttaatgataaattttggatttataaaaaggggacaagaattttctatatgatttggtttggattaggcaagatccatgactttatgggatcactttctcgtccaatcaaaagagagattcctaaaaaatagatacttgaataattaccacttaataatggctatttttttagaagagagaatacaaaggataaattatagtcttaaacaaatttaaaactacataatccatttttgtttctcatttttttttctaaattgtttctcattaaacgcatgtaaaaacaatatacctattgtaaaattaacctatgggctaattaaaaaaaaaagaaaaagatattggtatttaaataaaaataaaaataaaagaggacgaccatgtgtgcaataagaaagttgtagaaagacccaaaaactttccccgagggcccaaaatcgaggttaagcttttttacacgtcacatcgattacaattnttttaaaagtcaggggtcaaaacataaaaaacta

SEQ ID NO: 77677 - DNA, 219 bp, Arabidopsis thaliana landsberg
ccgcaaatgcgccttgaacatggatgcgatcgatcgaactaagagcttttcctttacatggcaacaaaaaaacggggcgggggtgtgggcaaggttggttggagaccaaggccggcaaaatgaccggtggtgcatacacgcaaagtccaaccatcggcaatgtatcttgagcgtattctgtcccttgtcaaagtatacgtcgactttgccggtcgagcc

SEQ ID NO: 77678 - DNA, 214 bp, Arabidopsis thaliana landsberg
gggccttttttcttcattttcatcttattgcatatatttttttataattaatacatcaaaatgcctaattttgagtagttgaattgcatagtggttgattgtttctagttctacagggatattacttttattacaacatggtctatgaaaaagatgatttaccttttggaaatgatcaacaaatcaatgaatccaaactttctaagatataagt

SEQ ID NO: 77679 - DNA, 324 bp, Arabidopsis thaliana landsberg
cactccagtactaaatctcgatttttcctttttactgactagcgtccccatacgaagggggacggggttcatcgaccctgttaacagacaaaatcaactatgacttcggacaaaccgccaacaacgaaatatctttttttcttgtcaacaaaatccgtttctgttgactattcggaacgtctataaacaccaagctagatgtatcttaaacttccgatacataaacgaccgcctgagaaaggaattatctatccatatacatcacctactgatcatgatgatggatacccgttattacacaacccatctttttaaaatacactg

SEQ ID NO: 77680 - DNA, 615 bp, Arabidopsis thaliana landsberg
tatatatctataaaattgagcggaaccaccctaagagaatacggtatgacagagagactagccttgcggctctcgtgcttgcattatgccgagctaaagcggattgtactgaaacgtacttgctttcttcccttccctcctgaaggaatcaaatttgctttgtgctttaccccagagaagagtcaactgatggaaaggctctacgtccgaagcaacaatacacctatgtgcacatcctcgctacaagatatgaccccacgtcttgagacaaggactgaaggaaacgtccactgggaagaattttcagagagagacgcattgccgatgaatgacactcacccttccctctgcatgcctgaactaatgaaggtgctaatggctttaaaaggtctacgcagcaaagacgcttgtaatcagccaccaaggtcctaacaacgactgaactaattgagaggcctgctacacatgtgtctatttgggccaaaacttagtctgatgggctaagcccaaataaaatatattttaccagaatgaaccctgccacgtgtctctcaaacagatataatttatttaggacagcggcatacacaacccctacagtctagcctgaggcac

SEQ ID NO: 77681 - DNA, 327 bp, Arabidopsis thaliana landsberg
catgtatccacatgtatcagggcacgggtacaaaggagtgtctgccggtccagaggaagacctcttatggactgcatctttggcgtgaccttacagatggtgccggtgctttgcacgtcagcggcggttcttgattatgatacagcccttgctggtacttccctcaacccataagaaaacggactatatttcgatcatgtagctgacgcccaaacgttacaaaagggcgaattgacgaagattgtgccggcagttacgtgtctgcgagagatgacgaatcgagtgaggagcatcgatggcaaagaccatttgtcacaccgggtctag

SEQ ID NO: 77682 - DNA, 587 bp, Arabidopsis thaliana landsberg
ggatttggagaccagtctcaagattttatcattgttactacttcataatccaaatttgtctaaacatagtcaactcttatttaattgtttatacgaataaaatactattaacatcgaattcaaactatcaagacctttgaatatggacgatatgagtcaaagtcaaccatcttcccacccgtaaaattatcacaagaaaaagacatttgtaagagtatctttctcttcttcggatttgaatgaaaaatgaaatagagtgttgtctaataactaattagatggtcttcttcgacaaattaaaaccggaagagtttaggttaggtataaacaagttgtggaattgtgaaaaaaaaaaaaaaaaaagaagttgtggaattgtgacctaaataacacggccctttagtttgtttcctcaccggtgacaaattcgtaaccacgcttttcagtgtaccaattttaccaggacaatatatatgaccattttaatttttaacaattaaagtgcattctcttaagagcttattcttgcataattgaatatgatgctcacggtcacgggtttcttagggataacgtacatgaaatct

SEQ ID NO: 77683 - DNA, 567 bp, Arabidopsis thaliana landsberg
  unsure (1)..(567): unsure at all n locations
ctagcagatgaaatgggtctgggaaagactttgcaggctttttttttcctatatatcttttcatttcttagggggggagaatcctacccccctttcattggagaagatttctattgtcacttgtgagcagatgtctttgacattgttacacatatatcatataattagtctaacaagtannnnnnnnnnnnnnnnnnnnnnnnnnnnnnnnnaggagaattgcttgtatcatctttttacatcaatctcattttacatccattatctgtgaaggcaattgctgtgacaacatgcgttcaggaatcttggccggttctgattattgcaccatcttcattacgtttacattgggcaacagtaagcttacgatatttgaaatctacttggacattgtttatgacactggagatgattcataatgctgctttcttgcagatgattcaccaatggctgcatgtgcctccgtcagacatagttgtatgtagcttagttcttgtatattacttgtagctagaacatatctattctatattattttcgctctcatctaattatcttttataggta

SEQ ID NO: 77684 - DNA, 290 bp, Arabidopsis thaliana landsberg
atgcgcagtctggctgcatagacgtaacgcttagtgaaacagcagcacatatcatagacgtgatggcatcagtatgatccgataatgtcagacctgatcggatgaaagaacaaaaatgttgccttgccggtggagggcgtcactttagcctaaagcgtgtacctggcagtcatgttagtgatgacgtttctgcatgtgtcacaccaaagcatgtgtgtcttgttacctttgttgtcaacaccgtgtactccagagtggagatgtgtgactctcctattgcaagagcgact

SEQ ID NO: 77685 - DNA, 177 bp, Arabidopsis thaliana landsberg
tcgaacatagtgaaatgactaactatggggcatgatatgcactagcttggcagcatgagaaccacgacgtactttatacgtatatgtacttacagcgagaatcaaaagcagagtacaaccactgattttggtcccacggctcacattgacgggactaaccgggctggagccattgac

SEQ ID NO: 77686 - DNA, 378 bp, Arabidopsis thaliana landsberg
  unsure (1)..(378): unsure at all n locations
cggcccgggacacattaacgggaaaggccaaaacaaccccaaaggcgggacgacacggccancaaaccgcaacnanaaaaacncaaangggagnagggaaancaacaacangaaacccanggccnggggacggggaaaaaagaaaaaaaaaaggacagaaggaaaggcncacggcgccccangaacgacgacaancacgggcattgaccgaaaacngggaaacggaccccccaacggnagagaatatgagagacatgatctctttgttcaaaaaaaaaaaagacatggtcttatatgcattgtttaattggtttgaaggatcttgttttagcttttctgaagaagagggtaaaacagtcttgagaattcagtataagt

SEQ ID NO: 77687 - DNA, 508 bp, Arabidopsis thaliana landsberg
gcgacgctcgcctgcctgttcctgcttggggtttgggcaacgtgcaccatcttggggcggcccggtccggtccctgttacgttgactggctgacattgctgagggagatcgccctgacggtggggcatggtcagacgtgatatcttggtacgggagatgcgacgcacaacgtcggtgcgatctgagggcctgggcgtgggcggctacatcgggctcgcgggcctttgggcggcgccggtcagcggcgtattcatgaacctcgcgcgatcctttggccccgcgctcgtaagcggccactggagcagctattgggtctacgtgctcattccgattgacggtgcgttgatcgcggcgggcttaccatatgtctagcggtggcgcggttgggacccgatctacagggcgggtggttcggatgtgctcgacccgggcagtgaggaggagcacaaccgactctcgcacgcgatcgacagaggctaggcggatccgccgtaaagcgcgggcgcct

SEQ ID NO: 77688 - DNA, 610 bp, Arabidopsis thaliana landsberg
  unsure (1)..(610): unsure at all n locations
ttatcgaacaactttgatgtttttgatgtaattacctatttttctgttctgtttctcttcaaattaagaggctgggtttacaaaactgtaacacagaacattaaacctaacttgtagatgaacacaacgaagacaaatcattaaaccaaagctgctttatggtaaaaataataatcccagcttctaaacatatatcattggattctagtttctttaaacttagattatacatgtttagtcaccaagattaaagaaataagaaatctaatcgagcagtgagaatatttttggggctttggaaatgtttatattatcttttgttgttaccaactgtgactttggtcccccataccttaaacaagtaaatctacccaactgtgctaatttgtctccactatcacttataataatctatgaaccttggaactagagtaatattttaaaatggtatagataggttcattgaatttaggtttttcctttgtgcaccaacaatntttacattcatacctaatggtcttgatgcangatgattattaagtcaagaatttatcaaatacttanacctagttgcctcgatgatgatgatgatattgatgagacaaacatc

SEQ ID NO: 77689 - DNA, 114 bp, Arabidopsis thaliana landsberg
ttgcttgacaccacgaaattttttttggcaaatacagccagcgaatcaggggggcgggaggtttgggatctggaaccaccacaagtaaaccaaccaatgggagtccataaccac

SEQ ID NO: 77690 - DNA, 278 bp, Arabidopsis thaliana landsberg
  unsure (1)..(278): unsure at all n locations
atagtggacccctttttcatcataagacaaactagctcatactactaagtaaatattttccatatatagtataatattcatctacattcgatctttggtatctgaaattaccaaaagtaaaccaacctttgtgaatccaaaacctttttcttgtatattcaaagatgtattggaataatgcatatatatccgacatgtttactgaaaacagacattcaataaacccttttttttacctcggtgaataatgtnttgtagcttcatcgccgattaaattt

SEQ ID NO: 77691 - DNA, 492 bp, Arabidopsis thaliana landsberg
gggcttgttttctttgattccctcagcttgcttgtcgtgccacaaactgtcgaatcgtgcttcggtgccaaaggcaacgaaagcagtaattcatcttcgatcaatgcacttaccgacatctgcgcttctgcaaccagataatcgatttcgtcattctcgtcttcgccgtctggtatctccgcctcatcgcgcacgagggcgaatacggcttccttatccagatcaaattccagagccccaaggcaacgctgacagaccagcatcaatcggccggtaatgagcaatttcaaccctggtctgcggtgctcgtccagataaccggtcagctgatactcgagcgtaccgtctggcgtgctcaggaaatccgccagccgcaaaaactgcgaaaccgcgattgtatcatgaatttcaagcgcttttctcgcaaaatcgaggctgtcgatcatggcgccgctggcaggtaatgcagtcataaggcgcgcatgatataat

SEQ ID NO: 77692 - DNA, 712 bp, Arabidopsis thaliana landsberg
  unsure (1)..(712): unsure at all n locations
aagggatggtcaaagcagccctcgggacatcagcctggttggaatctatctatatttttaataaattgttcatttttcagtttgtaactcgaatctcactgaaagatacaggcctccaaacacacggagtttctaccatgggccttgccctaagctcgaaccctgggacacaaagataattccatgaaattcttgggttcagggaccatcagatgagtcctaaacagagatatttttgggaacagagtgctaaaacacattatatgtactgtaacagggtagcgtatgaagtaagtggaaagggggcctcactcagcctgagtaagtggagtactgaacagacattgtgaaggaggcaacgttgcccctggatctcacaaaatgaagagatgttctccagtacaatttttctctcttcttccaacactccataactgccccctccttctcttcctcattccactatgcctctgcatgcctacttttaaagctttgtttctgaagaaaaaggatctattcaaaatgctgacaatccccgttaaatggctctataagaggtcccaggttgtcagaactgcttcacgtccttgagcttggagatcaacctgctatttatccagctgaaatccctncacctnctcacagactcccgcttgcatcttaaatttgcgtcatttgttctgactcacgcagctggttgaataatagcact

SEQ ID NO: 77693 - DNA, 561 bp, Arabidopsis thaliana landsberg
gtcctccggtgtgatgcgggtgcggatgctggattgtcggtgtttagggcaccgacacgcagacgctgtgcgcagggttgccggcgcggaaggccttgagcgagccgctgtgcatcacgcggcccatcagcggccggccgatgatctcctcggccatacgcgaggcctcgatgagcttttccaggtcgatcccggtctcgatgcccagttcatggcacagaaacaccatgtcctccgtgcacacgttgcccgaggtctggcgcgccttgtggccagcgaaggggcagccgcccaagccggcgaccgaggcgtcgaacaaggtgacgcccatcgacagcgcggcgtagacgttggcgccgcccaggccgcgggtatcgtgcaggtgcaggccgatcctggctttcggcgccaactcgcgcaccgcgccgatgcggcgcttgacctcctcggggctggcccagcccatggtgtcggccaggtacagcggcggaatctgcagcttgcgcgcgcggaacaagccgcggcgtgcttgaaggcatcggtcacggtttccagcgacac

SEQ ID NO: 77694 - DNA, 556 bp, Arabidopsis thaliana landsberg
  unsure (1)..(556): unsure at all n locations
taactgncattatttcaaaaacgtagggacacaatttaattataattgttgtttggctcataagatgttgggtggagatctgtataagtaagaaaagagaaactcttttgagtaaaggatccaaaataaatttcttctacatgatcatttctcactatgtaacaccagaatgagccaaaaaacgctcttcacatgtctttgtttggtagtggaaaaagaattttggttaaacagtgtggttggggtcaaaaatcaatcacgggctgaatatattgcaatcacacatacatacacatacattatcatcaaaaagaacaatagagagagcgagtgaggattagccacaatgtatcttcctctcctctatcttctgcttctggcttcttgcttgacacatcaagctttaggccgtggtcgtggccggccatcaccggaaggaagcttggatccttcttctcgcatcaccgtagtcggagttgtctactgtgacacgtgttctatcaacactttctcaagacaaagctatttcttacaggtcagagcttttacatgaact

SEQ ID NO: 77695 - DNA, 601 bp, Arabidopsis thaliana landsberg
  unsure (1)..(601): unsure at all n locations
ggggttaacgctggccagcccgagcctggtttgccgggaagcgcgaccagtgttgttaaggtttgatgctaggcgtctttggcatcctggtactctgcatgccacgcggtctggatggcctcgagtattccttcgttggacttcgatggatcgccgacgaagccggggagctgggtgacccacttatggaggtcggtgaagcggacggagtaggggtcggtgtcggggaacatctcctgcagttgaattccaatctccagggtgtcggtccaatgtagttcgcgcggcatctgcggtacctccgatgtttagtttacttcgagatgcggcgcggaaagagcagtggaggggactgccnnnnnnnnnnnnnnnnnnnnnnnnnngacacaagcacaagctccgaagacagtctccgccccctcccaggcacagcgccgcaagtccacgcgccgccggctgattgccgcgacgcgaaatctgcgcgagctgggctcgattgcgtcggctgtgatggggacgtcgcatccgtacatggcgcatattgtgccgatgcggcgatnnnnnnnnnnnnnnnnnnnnnnnnnnnagttcgatgatgtgt

SEQ ID NO: 77696 - DNA, 591 bp, Arabidopsis thaliana landsberg
aagacagaacacaaaatttcttagaaagtgttaacagttggatttgattttggatgtattttgattagtaagactaaggttttctaaaataatcaagaaaaagaaagcagcctaaaatctaagatatatttgtatattaagtatgtattatatagatgctgtggtggcaatcatttttaacaattatgatcgacgatatgtgtgaacatgcttactgtgtatttgatatcttatttaacttgttttggttcataactggtttactgtgtatataatatacttaacttcaaggtttggtgggttcattaattaaatttaatattcttcttttgttttttccctaatgagttggaatattgaaatccccatgaaattggatataaaggatgtgatgtcaactaaactatctatgtctctttcaaaaatgtacttttacatttctatatcacctgttttacgttaatattgtatatgatcacacgtcttcaaactcttcctcttacccattaaccatattatattctattcatataaaattcacaaaatctcaaactttgttttcttatatccatgtcgaatccaaagtaaatt

SEQ ID NO: 77697 - DNA, 585 bp, Arabidopsis thaliana landsberg
  unsure (1)..(585): unsure at all n locations
tcttctcactgtgctgctggtaataacacgtaaataacacgtaataaatcaagtgaaataaagcgctaccatgctacacttgtgctatcctgtcgtgtcatgtatttttcttaagtacttgtaatattactcgtaatatttgtgttctacttacattttcactcacatttttatttgagtgttgcacattaaacgctttcatgttacgtttattgttccatcattgtaagtcattgttttactgcctttaaaaaatagaaatgttttcgtatgtctcacctaaattttataaattgttaatgcaagttaaatgcaatggtcaggcacttcaaaacgactgtcatcgtctttagccaaagtacgataatacgtggagcagtgcaaaaaagaaggaacctcgtggatactgatgagaaccatgttcaaagtgaaacacgtttgcaaaagggtacggtagcaaaaacaaatgtgaatcggttacaactaactcgttcacatagtggcgtttccaaattttacactacgcactctntgttggcgttgcagtaaaaacacttgtttgatttgttatataagctcaacgat

SEQ ID NO: 77698 - DNA, 534 bp, Arabidopsis thaliana landsberg
caggtcctcttcgccaacggcggcatcgcctgaccgtttcgtgaggacggcggtgcggtcccgccactgggcgagcggggtgtcagacggtggccgccgcgagcgcgcagcacgccgccgcgagcgccaggaaggcaccggggaaggcgatgttgtgcaggacccgggtgcggatgtgcaccgcgacggccccggcgtagaagagcaccagaccggccgccgccgcgacgtccaggtgccacaggcccaggagtccggcgagcagcccgagggctccggcggccttgagcgcggcgagcaccgggacccagggcggccgcacaccgacctcggccgcgttggcgcggacgaaccgcgcccccgcgaggtcggcggcggcgacaccggcgttggcggcgatggtcagggcggcgatgacggcatacgtgagggacatggctcgggcaaccgttcgggctcggtggacgggtcggcgcgacgggcggaccggaggggcgcgggccctgtcccgtcggcgtgtccagcgtcgtgcgc

SEQ ID NO: 77699 - DNA, 651 bp, Arabidopsis thaliana landsberg
  unsure (1)..(651): unsure at all n locations
tctgaaaaaaaaacagattgcgtggggaggagcgagcagagtcggttcacgtgaaagcacagagacataaatctttctttcacagcctaaaacccctaaaaatgtctaatctctcttcttcttctccgtttctctttagattatctcaaccatacagccataaatccatcggaagaggaggaagataatgcaagaatcagtcgctgagtctgaatctgaaggggaagagttgcacaataagctcaagcnnnnnnnnnnnnnnnnnnnnnnnnnnggtttccaccgttcctgttctcttcttcttcttcactcttcttttgatttctggtaagttcaccaaacaattccacttttcagttcaaattcccccaaattgacgaattttacatatttcaaataaaaaattgtttttttggtctccttttgagttaacacttggctaaatattacttcttttgtttcgaatccaaatctagacaaaacccatttagtgaattcttaaaccttagttagaaatcattgccaagtttcgattnttaactagctttctatgtgcagcgaattcgtcgtctntatctcacaacataaggttcaggaacaagacanagatcccttcgtggtttcaacatcggcacagatgtctctatcttc

SEQ ID NO: 77700 - DNA, 545 bp, Arabidopsis thaliana landsberg
  unsure (1)..(545): unsure at all n locations
tggaggatcccttccggcgagatatacctccgtaatgtttcatagttgctgtttaattgttaatttccgtggcaaacggctggggatgcgcatagtcccatttcttctctcgggcattgttaccgccgggctggtggttgccttgaatacccaactaccggtaggctcgggtaaaaccccgcggctgggctatttccnnnnnnnnnnnnnnnnnnnnnnnnnnnatgcagagccggtaaatatggatttcaacggcgaagtaaaactggctggcctcacaggcaaggccgatgtatattttgatgaccgccttgttccgcatatttatgcagataatgataaggatgcttactatgtgcagggtttcctgcatgcaaagttccgtttatggcagatggaatttcagacacatgtggcggccggcagactgagcgagatcgtaggggaagaaagggtttctacagacaggtttttccgcaggctgggaatggtatacggtgcggaacagaacctggccagtgcagaaaagaaccccgagctgaaag

SEQ ID NO: 77701 - DNA, 501 bp, Arabidopsis thaliana landsberg
aggggggtgtcgacttccggccgcacactaccgtcactgatctgctgcgggatttctcgggcggggtgatgggtgtacgggcggggacgatgagccaggcgccgcggcggattcagcgacgctacgcgcgcctggcctcgatctcgtcgaagccgggggtctactacccgccgctgcgtgccgcgatggatcaccgcctcacgaagctcgagcagcgtcatgcccggccgatcgagatcctggcgcgtcgcggggtgatcatctgcgccggcggcttcatcgccaacaccgagtggcgcaagcgctacgcaccggagttcaacggcggactgccgttgggcaccagcggcgacgacggcagcggtatcgcgctggcgcagagcgccggagcggtgactgaccggatggacaacgtctcggcgtggcgattcatcaccccaccgagtgcgttcatctcctcgatcgtggtcgacgacagggcgcccgggtgatcgacgagac

SEQ ID NO: 77702 - DNA, 415 bp, Arabidopsis thaliana landsberg
  unsure (1)..(415): unsure at all n locations
catcgtcgcccggctcgaaaaacgcttttgtgcggggaggcgcttatgaaaaccatcgtggacatccagaagctggacaaatcctacggcgatttnnnnnnnnnnnnnnnnnnnnnnnnnnnnnnnnnnnnnnnnnnnnnnnnnnnnnnnnnnnnnnnnnnnnnnnnnnnnnnnnnnnnnnnnnnnnnnnnnnnnnnnnnnnnnnnnnnnnnnnnnnnnnnnnnnnnnnnnnnnnnnnnnnnnnnnnnnnnnnnnnnnnnnnnnnnnnnnnnnnnnnnnnnnnnnnnnnnnnnnnnnnnnnnnnnnnnnnnnnnnnnnnnnnnnnnnnnnnnnnnnnnnnnnnnnnnnnnnnnnnnnnnnnnnnnnnnnnnnnnnnnnccgcctgacgaagcggcgcgcaaggcgagggacctgc

SEQ ID NO: 77703 - DNA, 168 bp, Arabidopsis thaliana landsberg
accaaaaaaaaagagcagaccgcggccggggcagaggcaggaacacagccgttaccaacaaaagccaaaggacacggagacgaaacgcacgaggaacccacacggaccagagaacgggtactgaatgaaggcccggaaacagagacacgccatgtggcgctggggaaa

SEQ ID NO: 77704 - DNA, 508 bp, Arabidopsis thaliana landsberg
aagtttagaaagagtagcaaatactattaactgatatatttttcacgggcagacagacctgtggtatgtatttgaacatcggtgtcaagaacagtagagaacatccaatgatgattcctgttataagccctgataggccagtcttagcttcactttcattattcacagctgacctagaaaaggatcctaaattttgcattcaggacattcacagattatgttaattaactttgaaatatatttacgaaatgtataacagattatatccatagcgtcaattattgatagcttttatcattctcaagttaacgtacctgtagctgggtacgcagaaaataatgaccccaatatatttgcaacaccaagaccaaacaactgtccagtgaaggtaaaaacagttgagctttcaataaaaacggtaaaaagaaccggaatattgtctatagcaattcggcttctagtcaagcacagtacctctgaatttgaatccaactcatatctgtttttt

SEQ ID NO: 77705 - DNA, 357 bp, Arabidopsis thaliana landsberg
ggtcgtagagaatgtttcatagtttttcatgttaaactttctacactttttccttcattttcatgatttttattttttagagggtgaaaaattcttatgaaaaattcataatagaaatggtcttagaaattagaaacattaagaaagtaacaaaatagaaaaataatacttatgaaactgcggacgataataatgatggtacgatggtcaatgacattgtcacgtgaccacatttagtgatgattagcttattcattttgggtggtttgcttattctttttaacctgatctatttaaatcactggtatctcttttcctaataaagacattatcgtctctttttttgggactcaaaga

SEQ ID NO: 77706 - DNA, 339 bp, Arabidopsis thaliana landsberg
cggacaagcagggccccaaataaccgccacccattaaaaagcagcaaacacgggcccccccaaaggggataccggaaacccaccgaccgagcaaacacccgcgcagagaaaaacacaccaaacgacaagcactccaccacaaaacggcaacagagccataacaaacagggcctcaactacaacggcaaacgcaaagaaaaagagagaaagagacaagaccaaaaccaaaacccaacaagcgaacctgagccccaccaagaaacgagctacgggggcgaacgacaacaaagcgactccaaatggcaatcagaagaacccacctacccgcaaaagaacagg

SEQ ID NO: 77707 - DNA, 538 bp, Arabidopsis thaliana landsberg
  unsure (1)..(538): unsure at all n locations
cgcccccgatcgagctggatatcacccaggtgttcnnnnnnnnnnnnnnnnnnnnnnnnnnnnnnnnnnnnnnnnnnnnnnnnnnnnnnnnnnnnnnnnnnnnnnnnnnnnnnnncaaaagacccgtgatggccgatgcaaactatgacccgcaaaaattgctggtgatcaagggaacgaacatcttcggtggcatcgacatcaaaagctattaatcaaccaacaacctgaaccgactttgttatgaactggtatatcgcaaannnnnnnnnnnnnnnnnnnnnnnnnnnnnnnnnnnnnnnnnnnnnnnnnnnnnnnnnnnnnnnnnnnnnnnnnnnnnnnnnnnnnnnnnnnnnnnnnnnnnnnnnacgtgcaatcggtatccatgaagaagattcttttttgaatgaccagcaaaacaaggtcaagtgggagttcatcgatgtggctgaaatacttccgataaaaagtctcgatgatggaagtgaattgtattcgcagatccacgaggcagatgaagcgaaatcttatatccaca

SEQ ID NO: 77708 - DNA, 409 bp, Arabidopsis thaliana landsberg
  unsure (1)..(409): unsure at all n locations
gcgctagaatttggaccttgggattcccgttgggcaatttgacgtcgaagatgcgggcagaggcggctgaaggggggntgagggactttaggaagcggtgacgcaaggcttccaaggagacgcgccggcagcaactcatcgaggcgaccatcgattcgctcgccaagcgcggctattccgacaccacgctcgccgatgtcgcggacggggccggcctttcgcgcggcatcgtcaactttcattttgagagcaaggaaaacctgctgatcgccacgctgcaattcatggccgaggaatatgcggaccattggaatgcggcgctggagaaggcgggggccggcgcagcgggccgcctgtgggcgctcgtccatgccgatttcgaccgcaagatctgcacccggcgcaagct

SEQ ID NO: 77709 - DNA, 574 bp, Arabidopsis thaliana landsberg
  unsure (1)..(574): unsure at all n locations
ttaatcgttgggaaaaatgctgaacatacagaatcttatcgatgatctcgcggatgggtgcaagcccaaaagcgctttccgcctcggcatcgagcatgaacaattcgctttcaatatcgcgaccggcgcgcccctgccttatgacggcgagccgggcatccggcaattgcttgaggccttcgccgcttcttatgagggctgggagccttaccttgaaaacggccgccccatagcgctcagcaaaaaaacgccgaacnnnnnnnnnnnnnnnnnnnnnnnnnnnnnnnnnnnnnnnnnnnnnnnnnnnnnnnnnnnnnnnnnnnnnnnnnnnnnnnnnnnnnnnnnnnnnnnnnnnnnnnnnnnnnnnnnnnnnnnnnnnnnnnnnnnnnnnnnnnnnnnnnnnnnnnnnnnnnnnnncccgcgctggacgcgcgaggaaatcaactggatgccgaaagagcgctacgcgatcatgaaagcctatatgccgcgcgtcggcatgcgcgggctcgacatgatgctgcgcacctgcggcnnnnnnnnnnnnnnnnnnttcgacagcgaggccgacatg

SEQ ID NO: 77710 - DNA, 440 bp, Arabidopsis thaliana landsberg
ctacagtcacaacttaccctgtcttggttggaaagtcgcgacttcaaggcacagatggctcaagcagttacaggggacaacactacaaaggttctccctgttatcatgaaatggccaaaataactcatttgtcagttaaagctaagagttgctgtgttggttttgaattacaggaacattggacgcgattctgaaaatgattcgatatgaagggctttacgggtcttataaagggatgagcacaaagattgtgcagagcgctatagctgctgcggctctgttcatgatcaaggaagagcttgtcaagggagcttagctgttgctctcaaacgctacctctagctaagtcaagtccaagccttcttgaatgaacgctagtagttagaaataaataaaaatagattaaatttccaatagttttcttgattaattattacact

SEQ ID NO: 77711 - DNA, 366 bp, Arabidopsis thaliana landsberg
  unsure (1)..(366): unsure at all n locations
nnnnnnnnnnnnnnnnnnnnnnnnnnnnnnnnnnnnnnnnnnnnnnnnnnnnnnnnnnnnnnnnnnnnnnnnnnnnnnnnnnnnnnnnnnnnnnnnnnnnnnnnnnnnnnnnnnnnnnnnnnnnnnnnnnnnnnnnnnnnnnnnnnnnnnnnnnnnnnnnnnnnnnnnnnnnnnnnnnnnnnnnnnnnnnnnnnnnnnnnnnnnnnnnnnnnaagaaatcgtaaaatactagataccttgcattacaaaaactaaacatgggctcaagagtctatatactaatactattgacccagaacaaagataaaaacattatgaccccatacagtctgaagcatcaacaaagagctgatctaactaaatcca

SEQ ID NO: 77712 - DNA, 586 bp, Arabidopsis thaliana landsberg
agaagttcgaacgacaaacaaagagcttcaagcgggatcacaagacattgtatgcatattatctcatgtcatgtcatacctgtgtactttttatgtggtcggatcgtgaatgagacgatcacatactctatatatacaagaacacctctaaaacagatggtgagagttaaaatgatcacacatacaatattaagaaaaataaataaagaaagtgcaatacgtgtcggcggatttatattgaatgtgagactgatctaatagattgaagctaatttctatcgattttttattaatctttttggagaatactacatgcaaagtcatttctaaatatcctgcatgatcaagtaaaactaacctttcaagaattctctactcattcaaaacagaaagccaaacataagaaagaggtacacatgaaaattaaggaaaaaagacttgcgtaaaaaaataatgaatcttcaagcttagcctaataatcaggttaggctttaaaatgtcgcggtcatatactactagttggcgactgaaaagaacaaagttgccataaatctgacgacttattctactgtattcttatcatctc

SEQ ID NO: 77713 - DNA, 474 bp, Arabidopsis thaliana landsberg
  unsure (1)..(474): unsure at all n locations
ccaaaagattgatgattatgttgtgctcataacacccatttatcatttttaactaaaagaaaactttttggggggatagtgacgctctgacttctaatattactatcaataatgactgactacgtnnnnnnnnnnnnnnnnnnnaggagccctctacgtcttcgcatatgatgaaccaagatctcattgaatctgtactatccataatactgacctaagtcatgtacttctgtacctcctgtctattctactcccaaatgaaaagttgttaatgtcaatggagaacctactttgccgatcgaaagaccctggagaatacctacagctaaccccaattaaacgaggtcaccattagtgcaactccgaccataacatattcgccagatccaagaagtactacggcaagttaagggagtacaaatggatattgattgtgttacaacagtattatctacattgacaagggcaacacca

SEQ ID NO: 77714 - DNA, 533 bp, Arabidopsis thaliana landsberg
acgctgatgcgccagcggcggtaaccgggcacgaaactcttcgcgttacggatgatgtccatgtcggccggcccggggggcacgttctgcgaggccagccacgcctcctgcaccttcacgcggcgcttgaaatcgttccagtcgtgcgatgacggattccacatgtgctcggcaatggccagcaggcgcggatagatgaacgccatgccattgaccggcatcgcaaactcgccccacagcggcgcatcgccacccagaacggtcttgggatgagccaaaagctccgggttgcccagcgtgttggcgcggaacaaatcctgcagcgtgcgcacgctgatgggcgccgccgaatgatccagataaaacgccccggccagaatcatgcgattgccgttggcggccgccttcttgacgaaatccggtccgtgccaagtttcaacaatggcgttcgagctcaagtggccctgcataatttcgtcccagccgaccagtgtcttgccatgcttgtcgagataaacctcgatctggtggac

SEQ ID NO: 77715 - DNA, 487 bp, Arabidopsis thaliana landsberg
  unsure (1)..(487): unsure at all n locations
ctttggatttttacttgtgtagcggaacgagagcttcagatcttgggcatttgattctgaattgaacagaaaaatgggcgaaatttacgattttgagttgagaaatggaagcaagagacgaaattgaagaaagaaatgagaagtaaacaaaccctaagnnnnnnnnnnnnnnnnnnnnnnnnnnnnnnnnnnnnngacgaagctttggctctccttcgttaatgtcgttttcttgagagaaatttatatccactgaaatcaaatttaataattctggtttggttttttttattcacacccaaatctaacgttattaagttattaactatttgactttggtaacttgcttaacacaaatgcatacaattaattttttggtaatttactgacatcttagtccaacttaaaattttggaaagcaaactaaggtattgtttttgatattgctttaataataaatatagagcttatattcaaaataggcatt

SEQ ID NO: 77716 - DNA, 442 bp, Arabidopsis thaliana landsberg
ctaagatcatgtgaatattaattacaactgttgggattttggtttttattgatttcgacaaccatatgtcgcacgaccggggatacgggagattctttgcttatatgggctgttttaatacttcaatgctaggattagttactaggtcgtaatttgatccacgttaattctttttgggaatcaggaggaaggtgtgcctatttattaataggcttacggttcacacgacctattgcaacgaatgcttgccacagagcttgtgcaactaatcgtgttggggacattgcacaatcattaggactgataagtctctattggataactggcagactagaatctgaggatctagctcgcaatattcaataaactactccttaataagagaggacaatctcttcttccttactatgagtgcactattataacgtgttagggctaatgc

SEQ ID NO: 77717 - DNA, 546 bp, Arabidopsis thaliana landsberg
cgaaagtttctttgtttttttctacaatcaatttgaaagtttctacgatgcttcctatagtttccaaaagattaatatgggatgaaacaagggaacgactatggtcgtcttttggatgtagacgaactttgggtcatatcttattttatacgctatctaattaaataattggtaggttaacttagggtttaaatataatatcaatagcaaaatttagggttcaatattttaatccccaaaaattaagggtttaatgtgagtgtagcgaaaatttagtgccagcatccaacgagaaaaattaggatagttttctttaaaaaatgaaacaataacatagattattgtacccatcgtctaatgatgcagcgatgattgacgtacgtgtatattgttactgtgatgttgcccatgtacttcttaggaaacagtaaggttgcaattttcccgtcacattaaagttttagactgtccaacattaaaacattatcaaattatttgacatgaacatttcatataaaccaaaatatatttacgaaagcattcacc

SEQ ID NO: 77718 - DNA, 609 bp, Arabidopsis thaliana landsberg
  unsure (1)..(609): unsure at all n locations
taatcctaataaaaaatgagagacgtgtagctacgagtggaccattttttattgtaatatattttcaaactatgtgttggagaaatgaaagtcaaccgtaaaaggtcggtgtagcagctagcacccccacgcgatgtcgtcgactccacattttgagtaaatgttctcttctgtaatattttaatttcaaagtagaaaaatcaaatttagaagtcagtttttagtcattgtatttttaattttagtcattgtattttaacttaagttacctcttcacattcatatcctacactttctacataaaaaagcatcaacgataaatccatatttctaatgttcaaaatatctaagataatttcatcaatatttaaacactaccctagtcgaaatagttactcaataattttgtatattaacatgccaaccggtttttataattatatgtttagactgtagtcactagatacgtggtttaccatcaccgggtgagattctttttcttttcnnnnnnnnnnnnnnnnnnnnnnnnataaaaatcagtatatattatattgtctcaactcaaccaacataaaaggacaaccatgtacatactatagtacacattac

SEQ ID NO: 77719 - DNA, 416 bp, Arabidopsis thaliana landsberg
caaaattgaaaccgagttctgaggtttggttttagtttcaacttttcagttatccacacacatacacacagacgctggcctgaatttggtgacgttagtcttcttccttccttctcactctttgtttcgccgtgaaaatgagctctgatagatagaagcgacagagagaaacttgaagcagacgtcgtctttcttcaaatccttcgcgggaaatcccagggaagctgctgcaatggcgatggttcaatcttcatcttacagagtatgtgaatgaaaatttgattactatgaatccatctctgctctgttgactctttgttttgtgtgctgggaaaagtgatagtctttctaatcaagttcgattcctagaacacatttgtcgacgaattgggtcttattatcaatgcattggcaat

SEQ ID NO: 77720 - DNA, 614 bp, Arabidopsis thaliana landsberg
  unsure (1)..(614): unsure at all n locations
ctgccattgcccttttaattatataattaaattggatttttataaaactatctaaatcttttgtaattttcaaatttattaccttggtaatcgggagcgatccaaaaataaatgtaaattgaagaatagcaccaaaaattgataaaattataataatttcgtaatttaaccaaattatcaccataatcactttggtaatttctaaaaattactttaacttcgataacataattactaacatacaaattaaaatcaaattttgtaaagagtatcaatcttccattacaactttagacttcaaccattaccatacaaccaaatgaaactgaactatttgtatataaaaattattctatgttggttccaatataaataaaatatctagtttacattctttctgtgtttcttctaattatatagatttagttctataaaaatacaaaacctctaagtaattttcaaatttattatatttttacccaaaacaaccctaaaataaatgcaaattgaagcgtggcactgaaaataaaataaaaatatcttaccatatntaaaacacataaccagattcagtgaattaacagatacggatggtcaagtcgacaagacaaaca

SEQ ID NO: 77721 - DNA, 332 bp, Arabidopsis thaliana landsberg
taattttcctgccaaattacccataaattcaaactttcatattcaatgttttctgtatatttttgaattggggggtcaacactgccaaaaacatatgaaagagtggagaagaattcaatccatacacaattacacaaccttagatttatatatatagtaatgaaactttttttttttttttacaatgcataatgttagaaagaaaaaaacatatgaaattcatgtaaaaggagcaaaatttatattgaggaagtgtgatattttatgggaatctctaaattaataatatagaggagtatggccgtctagaaacagcgcaatgcgccatgcca

SEQ ID NO: 77722 - DNA, 536 bp, Arabidopsis thaliana landsberg
ccaacgggatcgaatagcatctatactatacatttcaaattgattgcagaaggcatcaaacatgaggggtcgagctctatttcctagagccatccaatacatgccgcacagagcacatgcgagctcaggccaaactcgcacaccaaaaatgtctgagaacagagctatgtcgctcatagaggagaagaaaataccacgagaagcgagactggtaagtcggagcagagcaccgaggagatacacagccatggattcctatcaggatcttcccggtcttctggtcgctgctatgaatgattcttatctttgcttcaccatcttcgtctctctgaatatcgacgctctgtgccaagtttctcttctgtacaccatttccgtctgtcaccggagctatcatctgccctctaatatctccgtcggcatcaccagatctcgcattcattggctgtctctctctagctcttcgcactcaggatctcactagttgctaacttgttacgtgagagactgtttgagaattcggtttttgctctcaa

SEQ ID NO: 77723 - DNA, 123 bp, Arabidopsis thaliana landsberg
caactcataaatggccgaattccgtatgtatcatatagactactggatagcactctcaatattgacccctacaattagtactcatttggaacttggcctcctgtgtcaatggtaaacttctca

SEQ ID NO: 77724 - DNA, 343 bp, Arabidopsis thaliana landsberg
accccattcccacaataaacatctattacctttttcactatttatctttttatctgcacgcctacacattattgatgaagttgacccatacaaaatacttttaccacaaccaaaccagatatctattcttaattttcgaattattacttatacccttacaattcctattatcacatactatgccttctactgcatctcttgatcaacatcaacaataaaaaatgctattctagcatattctatataaaccagactttatatatccacatataaacatcctatatataagcaataaccccctttcacattttccaaaattctaagaatactccattttataaca

SEQ ID NO: 77725 - DNA, 606 bp, Arabidopsis thaliana landsberg
  unsure (1)..(606): unsure at all n locations
catcgaagctcttcacatcttgcaatgggggttaactacttcgttggcgggttcgccttgcagtaatccatgaaagccgggcgcttctccaagggaaagtgcgcatcaatgcgagcataacgatgtggcccgtattccttctccaaccgttcgagcagtttgnnnnnnnnnnnnnnnnnataagcgagcatctccaggagcatcaggccggataaaattccgtcccgttcgggaacgtggcccgggtatccgatcccgccgctctcctcgaaaccgagcaaaaccccacccttcaacatctcggcgcaaataaatttgaaaccaacgccggtctcggtcatgggcaggccgtgggtctcgcagattttatccaccatcgaagtggtggtgagtgctttgacaacgcggcctttgccttttcgatttttgataaaatgctccagcaacaaacaaatcagattatgggttgtaagagcgttgccacggccatccatgccgcccacgcggtccgcatcaccgtcggtgacaaggcacaaatcgtgaggatgttttttcaggtagggcggcggctttaacgtaatttttcgcaatcggtttcgggttgat

SEQ ID NO: 77726 - DNA, 535 bp, Arabidopsis thaliana landsberg
ctgagtgtacatatatatacaaataataatacggatttacgagattaatttagtgaagtcgcggtcgaaggagcttaggggggtggctagaccatttcgttcaaatcaatcccactttctttcatcaagataacaaagattcacaaacatccttaccaaatgatgcaaccaaatgaccaaccaaatgataaaaactacctaaggcctatcatcaagtttttataagttctattcatcacttaatatcacaaccattgccgttatggtgcattcgagaggatacaaccaaatgaccaatacacatgtatttttaactgcttgtaagttgtaactcctatcacatattcgcatgattttaaaacaaaaatattgatttactctggtattattattattattatattttgtatacttatttggcttgatagtagatatttttcttatatatataagatatcagtttatatatcgttggactgtatttagacctctcttctttattgtacaaactatatactattaatgtttatctacc

SEQ ID NO: 77727 - DNA, 539 bp, Arabidopsis thaliana landsberg
  unsure (1)..(539): unsure at all n locations
aaagggtccttgaaagtgaaagcgggctgatttgtattagcatttttgtaccctcaaaaaaannnnnnnnnnnnnnnnnnnnnnnnnnnnnnnnnnnnnnnnnnnnnnnnnnnnnnnnnnnnnnnnnnngaacaggattttaagtcctgcgtgtctaccagttccaccaccagggctcctatcaaaaaaaacaggtcaaaaaaaatcccggccggaaaccggacgggacctcnnnnnnnnnnnnnnnnnnnnnnnnnnnnnnnnnnnnnnnnnnnnnnnnnnnnnnnnnnnnnnnnnnnnnnnnnnnnnnnnnnnnnnnnnnnnnnnnnnnaccagtcggccatcccgaccttggtccccacaactttgtggggatgctctaccaaatgagctacttccgcttgttctatccgcccaaactttaataaggcagatccaactttgctttgcgatgtgtaagaactaaaattgggagtgcaaaaatagccaactgcagttcctggcaaaatttttcagcttattttttgtgctcgtaatca

SEQ ID NO: 77728 - DNA, 581 bp, Arabidopsis thaliana landsberg
ggaaaacaagcatacgcagaaccaagacagaactatagaaaacttgttagaatatataggcaagtcaatgaaagatcattaggaaaagagaatcaaaacctttagattgactattttatccctctttcaatgtttgcatttaaaatcgaatggtgattattgcataaaagcttggagcttcacttgcgtgcttaaaggataatcttagattccttgctatataatcaagtataggataagggagaaatttctctaaagattctagaggatacgccattaatacacatttattattctgaacaccaagaaaaaataaacaagcaatcaaaaattccactatagtgacaagaacagaactttctttagaaaattgtaatctagcacatggaagagagtaagtagaaacttacaatttgagattgataattctatcatcgtcttcttcaatcttgctatagttgcaagatgctgaagacaacgaagaagattctgaagccgtggtggataccacgggccatatgctaacatacgctgttctgtcccatgaatctcctcgttctctatcacccttcaaaatcttt

SEQ ID NO: 77729 - DNA, 498 bp, Arabidopsis thaliana landsberg
  unsure (1)..(498): unsure at all n locations
ctatcatcgatcagactgtatccactcttgcacgcaccattgactaatccaaaggtttggtttggcataaaataaacatcttctttttaaaaaaacttttaaaagcaatggacgacaatttcacccaatactctaaatttagaatttacaaactggttatatatacacagattcaaccaaaaaaaagggtggaatgtatgggctaacaaatagacatgacattccaatgtacaaaccatcaacatctaacatgagctggttaaataatatgttttggagcttttaaatggatctactcaagtttgtggttccttttgtgaccttgggtttgcaatgtggtatctctaatattggcanctagtgtaaaatgaaaagaaccatggtttatgaaatagggccaacacttgacacattttcttttattgtctttgtattaaatacatctgtatttaagaacacactagttatattgtgttttaacaaaaaactataggttag

SEQ ID NO: 77730 - DNA, 515 bp, Arabidopsis thaliana landsberg
cgaacatgcccaatatgaagtgttcggtgcttttgccattgtccatccgatcaattcttacagagcggatgacgccgtcactgtcggggggggtgttgatatagcccagcccgcgcgcagcggtgtccagtggtgcaatgggccgtattactcggttgttcggtccaatgagcaagggcaggacaacgtggccctgccgggtgatggcccgggccagtttttggtcgtcgccgggataggccgggttgcggtcggtaaaggcaatgtccaggccaacggctttggccgatcgcaggcgcccgagcagcgccgcatgggtctgtcggcgccagggccagtagccaagctgctttatgctggcatcgtcgatggccacgatgacaatgtcggggtcggcgggccggcccgtggccgttgtcagcagattgtcgtagaacgtgtagtctagccgcgcaagccccacgctgtggccgacacgtcccagcaccacggtaagcgccgacagcaccagcgtg

SEQ ID NO: 77731 - DNA, 567 bp, Arabidopsis thaliana landsberg
gattagtaagctgttctagttggtattagacgtatctagacatccgtatgccattttctacaaccaattattcagttaggtttggattgacaattctgttttcattttcgtattaacttttaattttcaacttctcgttaaatgtataaattttacccatccctaaaacatgcactttgttaataacatcaaattaaaaatctagtctatcatctttcttatacatttttttgctatcataggcaaacttatcttttagaaattagtttcttatacatagaattttatttctagaattccatatttttccaggaaaaaaataatgaaaagcttagggaacaagaaaggatgattgattcgaagaaacgtgtggaagcagaacaagcagtgttgcatgataagttacgaatgcagcaggaattgattgcactggtggtaaattcataatatttcatgtttatatagctttacacttgtatttcactatattcaactgtatcaaacaaacaatcaatctatcatgttccttctgttttaatgctgatacgaaccaactaccttttagaa

SEQ ID NO: 77732 - DNA, 457 bp, Arabidopsis thaliana landsberg
  unsure (1)..(457): unsure at all n locations
ataagagaagtgattatatatctaaactttgaatcaggtaaatgagttgctaagacattcagcgatgccattagtttctggtcttttaacagatcttcgaagccatggtactttgctacataaacctgagcactagtttattagttttattccttgttaggtttaactacanaggttgatttttttcggtgcagcgcaaatttccagtgtcttttggtcattgaacactgaccttcaccaagagaaggtcacaaatgcgcttgaatatatatccacaatgaaagcgaacttagaacctttgtgtccatcttcagatgggcaaaggaatgctttagaaaaccttttttcggttcatcagatttcggtaagggacggtttcatggtccggtttaagcttagaagggaacgtgtgagagaatgggtaaagtttttctcttgctctgctctctatgcccta

SEQ ID NO: 77733 - DNA, 127 bp, Arabidopsis thaliana landsberg
aagtgtgaaaaatacacactcacataaatctttaccgttttgatttttgaaacccccaacacatctatataggcgttgggtctgtttatgacttggcatgcgacatgaaattaatgacaagctaacg

SEQ ID NO: 77734 - DNA, 479 bp, Arabidopsis thaliana landsberg
atgttccaacatctattattgcgaatcaaacttataacttttcctgtaccagagaccacacctatgcatcatcggggggagggcgatgtacaacacaaggtttcagctttccctaaacaaatgataatgctgatggaaatgcttgacccatatcttgacatcaagataaccactgtacagatacccatcactgacattgatattcttgatgaataatggaacatacattttgcataatattaaagggtctatctagataagggattcgatgggacagtcatggacgatgcaaacatctactgagctgaaccagtatcattataactaccaaatagatacttgaaggaaagagttgcagtgtaccaatcaataattgttacatgcgaacggtaaggtgtcgaacccggatttgaaagagaggcttaagattttcaatgctatgttccatgagattcacaatacagcactgcactgggatt

SEQ ID NO: 77735 - DNA, 464 bp, Arabidopsis thaliana landsberg
  unsure (1)..(464): unsure at all n locations
gctgagtattgtctgttttcgaagttttctttgcgtgctacagaaggggnttggaaactaaggggagagaaaattgagtcgtcacagacaaggacggggacgtgaggtgccttggggagaacagagggggtcacaggaagaggagagaagccctgataatgaagacagcatgcgatgcaaccttgccgcatgccactgccatgtgtgcaggccgagatagcagctcgtgtgaatgcaaccgaagcccacagggatgttttcggcttctggcatgaatcgtgtgtacctacagactatgtaactatcccctgagaatgaatcaggttgttctccacttgccatgtatcactggtccagtctgcggcattcgaaaccatgacaagcgttcctcaaggatggaccctagtcttgtagatccttcatccatcttaagtcgtatacccttggcggtgatagtcatagct

SEQ ID NO: 77736 - DNA, 567 bp, Arabidopsis thaliana landsberg
catcgcaaagacagcagccagtgttccacctccgaagtaccgataccgaattcgatctttccgaatgcgccgtgggtagaagggtgcgggtcaccacaaacgatggtcatacccggcagcgtgataccgttttccggtcctaccacgtgcacaataccgttgcgagcgtggcccaatccccagtgtgaaatgccgtatttcgcagcattcgcttcgagggctttcaattggttagctgaaagcgggtcagccacgggaagatgctggttgatggtaggagtgttgtgatccgccgttgcgaaagtgcgctcgggatacatcacgccaatgcctctggtttcgagtcctaggaaagcaacagggcttgttacttcgtggataaaatggcggtcgatgaagaacacatcgggaccgtcctcgattttacggacaacgtgggcatcccacactttgtcgaaaagggtactcgcttgattactcattttgattaaaattagaatttcgcctcgccgttcaagcttcaaagaaagagctgatactcaacgcctttctcaaaaggagaaccga

SEQ ID NO: 77737 - DNA, 414 bp, Arabidopsis thaliana landsberg
aaatgtgactagggacactaggagaggtgctttttttttaatccaattgctagaactcaccggatggagtgcatgagcatttattgacaacagagtgttctcggacatgacagagagtctggatacaagacaagaggatggctacgcacactggagatgattgatttagacatggaccaaaacccacttctgtaaggttgttgatggaacccatgatggcctagtatggttaagaaactatgggcccgcgaacaaccgcttggatggttagcgcaagggctatattagcggtgggcctatcgaatacgaaggggatagataacgcttccgttctgctggatggaaattgggtgagttagactgagtagaatccactagttacagatttaatgtatgtacagagaagtattgtat

SEQ ID NO: 77738 - DNA, 606 bp, Arabidopsis thaliana landsberg
acatcctatttgacacacgtagatagttatatagctactgaactatcatggtttattataggtaaaatgagtaaaggcattagcaattttacctttgtaatttaattaaagattcataatcatttcatatcttgatatgtaggagtgtgggactcttaagtcttaacttcatcaaatcctaacaataccaatactgaattttatagttatatagtctctaacacactcttgtatttgctcaaagaatgttcaaactatttagataaattgaaaacaaaatatttagctttattcccttagaaagtttttagtagaaggaaatgttaaatttttaaaaagaggggcaatggagaattatgtagaaggagaagctgagtgggggaaataagagaagttagagaaggtggtgctctcgaattaggattccaacagaggtaagtgggatgcccaaatttgcgaaccatcttgcttcttactttctttgtctacttttcataaaaattattattctcgagttatcttgttttaatcacgtcagtgaaaccttattgtttctcttagttgatttctattaggctttattacatgatgtttggctattaatat

SEQ ID NO: 77739 - DNA, 123 bp, Arabidopsis thaliana landsberg
caactacatatttaatgagaaggcctcttgactgagcttttccccatagatagcttctaccccatgagatttggagcatagtcgtctgaggacctaccaaagagaaacctgctccaagtctta

SEQ ID NO: 77740 - DNA, 450 bp, Arabidopsis thaliana landsberg
tatttattctctacagatttttgtttggaaaatcttttttatcactgttataggcgtgtttttatggggattccgtagagaaaaaacaagtacctgacaaatatattaactagtcattaattgtacagagaaattgatttgttttatcaaattaaataaatcatatggcagaaattgacagaccagaggaatacaacaggaaaaatattaaggaaaatgactttttttggtaaggacaaagactttgaagatgtgaaaaggagaggagcaaaaaacaaatgagttagtgggaagaaaaatggttaatggagcacaactaacactcgtccacagaatattatgagataaatccaattgattcgaccgattatagtacactccacattctattactatcagcttgactactttctttctggcccttctttaattaatcgataccttattttc

SEQ ID NO: 77741 - DNA, 593 bp, Arabidopsis thaliana landsberg
tatcactacatgatctacaccctgcatttgaccctgcatttggaatttcttattaacgagaataatgcatatataacgagcatacactgtaatgcacaaatctacaagatcttcacccaattcgcatttttaagttaatacatagatgatccacaacaattcatcctagacatcacaattgatactatagtttagtgccattaatcgtctaactcaacaaagcttccattctgttcccgtgtgatgatccacacttgttcttcctagacctcacattgacactatacattggtgccatctacaaagcttccattctgttccggttaactacgttcatcgatgatgattcacacttgttcttctagagaacacatcgatactatacgatgatgctattaaccacctcagcctaactttaaaatgcttccatagattttaagaagagccataccactgaagaaggtgatggttcatgaaacttagccggtggattctcactcccaaatttactccaatctggattatctttctctgcctccgcgagaactttcctctctaatccgaaatccgactgaaaactactccgatgaata

SEQ ID NO: 77742 - DNA, 172 bp, Arabidopsis thaliana landsberg
tacgaatgctttgtgaacgcgttgcagcccttttgtcccggtttactatttaaggtccaccgacgctccgtgaaatacaaccaaaggggatccatttatgacccatactcaacccaagcctgaatagagatgggccatgacaactaactggactaggggcggacgcgctcac

SEQ ID NO: 77743 - DNA, 263 bp, Arabidopsis thaliana landsberg
gggaaaacaggatggaacacctaacaacgtattttaacagattattaactacgacaacaccggggacattttggggtgatgtacggatctttccgtgacagcctataaaaatcatgaatatgtctagagtctaaaagagaacatgtctaaaaatggtacttagatcggctagggcataagccagtgaggaatacataacgccactggtattgcaattcgaatcggaatatgtactcaaatacttgctatggaaaggactaggg

SEQ ID NO: 77744 - DNA, 559 bp, Arabidopsis thaliana landsberg
  unsure (1)..(559): unsure at all n locations
caagaagatgcaaatgtgtttgcagatgggaaactttagaggcagtgtaatgagttgctgtatcaaaccacttgttcaattacatgacaaaagtcccgttgttcttctccattgtttcgacaggtattttaatttttttactgacagcataattatttttctgaactcactgtgtctaaattttacttttgtcggaatttcttttgggcttttagttcttgtcttgaatggagacgtacttatcctctgcttgaacaagcttgtcttgagacttgggctattgatgttcttggttggggattctcagatcttggtaagattttacattttacacaaattaaacaaggttcttgataattcgattttagtacatatgaatgtgtgattgtttcttttcacaacttaatgatactgtagagaaacttccaccatgtgatgcagcatctaagcgacatcatttattcgaggtcagtactgtttattaattatactataagaaaacangcgaataacaacgaanaactgtgtcactaaatgaatgaacacagtcgttcttttg

SEQ ID NO: 77745 - DNA, 378 bp, Arabidopsis thaliana landsberg
cagtctccaataaaaaaattaaactcatcatatttgttaaatgttgaaccaaaacggttaggttgggtggagggatattgtcgtagacttatcatgattacgtcagttgatactattgaagaagcaatgataaaacgttttttttttgttttggtgtgaccaatctcaagaattttattatcaaggacgaggttgattctttggtcgtttctgactaccacacgcgcgtggtttcaccttctagatctcttatgtcagttaagtcaaaattttgtccccctcttgtggttggttggttgggttggggggggcattaaaaaaatcaagttattttcactcgacaacggttatattcacaagcttttacttacaaaaaat

SEQ ID NO: 77746 - DNA, 148 bp, Arabidopsis thaliana landsberg
acattgatatggtgcacaagcatacgtgtctgcttaaataatactgaagtcatgttgatttcgtttttgtccctagcttcacgaggtcggagcggccagtgttaatttaaaatcgcttagtagaagttgcacaaagatcctccttatt

SEQ ID NO: 77747 - DNA, 300 bp, Arabidopsis thaliana landsberg
tataccttacctacctaatacccacatattacctttccttcacttttaactcatatttcttcttctcattcaaaaccaaaataatctctatatatatttttatattctaacactcaaaactcatcactaccattcctaaatttttccttcttttcatcacttacacctttaaccacacatccaactttcaccctctcaataattaccttcacacatctacttccacctaatacttccattcactttttccctcctcaattctcctccaaactatcatctccattttactactacataccc

SEQ ID NO: 77748 - DNA, 167 bp, Arabidopsis thaliana landsberg
  unsure (1)..(167): unsure at all n locations
gtggccatataaagcaacagaaacagttactacatcgtttattaaccttatagnacttaaagaatatgtatgaaaatgttaaacagacacaaaatgaagaagtatctgattcctaagaatagttatgctaaggttgcgtactatacttaaatgaatattcttgtgaa

SEQ ID NO: 77749 - DNA, 531 bp, Arabidopsis thaliana landsberg
aagtattccaacataattcagatttctgttaaattctgtttgactcaaaaaaattcatacaaatattgttctattttttacttttcgtgtattgtcttctttgagatgttcacactttatgataatgacacccaattatatacacataattgacattgtgaacaactacaaaacaaatcctgccaacgtactagtcaaataaagaaaatcgtaactaatgtttggtcaaatcactaatagatttttcaaatgatatgttttgtttttgtcattacagtttcatataagatagacactatcaaacaaatcctctaaattcacattaaaaagtgtacatccactcatataggaacgttcaagtctacataaaataaatatggatataagcctgatttataacagaactacactatttttttttttatagttttggcatccttgtatgatacatcaaaataatcttccgtttctcaaaacgttgatagttggttataaaactttgagagaccaaaaaaaataaaaagatgaaac

SEQ ID NO: 77750 - DNA, 128 bp, Arabidopsis thaliana landsberg
aaaccaaaaacctgttatttgccttctttagtaactcattatcaatctttttcattcctgtaccagtgcaaaacccaaaggggaaacgaaccaacctgaatgtactcgcaatcaatgttttataaact

SEQ ID NO: 77751 - DNA, 377 bp, Arabidopsis thaliana landsberg
ccggctggttggagccggtgccaacccacgactgcaccgcttcgcccagtccgtgctgctgcaacatgccaaccaggccctggacaccgccagccttctggatcagctcacccgccaccgaaagcagtgaaccaccgcccgctgcgttgccttgcgctccgccaatcaaatcattgagaaaggacatcgccatactccatgtgggtcattgaaatgagtcgaaccgtccgaccccgggcgccacgctcgtgacgactccccggatggccgcctccacgacggcagcgatggcatggccatggctttcggacggaccggcaccggcttagcacaagcgcgacggcgttgcgctcggaatattcccaaattctgccatg

SEQ ID NO: 77752 - DNA, 496 bp, Arabidopsis thaliana landsberg
  unsure (1)..(496): unsure at all n locations
ccttatgtgctgggactgtgagtctcagggtttggtgatttcttgcctctgttctgtgtcttctgagtgagcgggtaatttttgaggatagccccaactcacaccttcctagccaaatctcttcctgcatcccagggcctactcctgtgtacggacactcaatgactgtcaaatataaattcagtctttccagaatattcattctctcattctctctctctctctctctctctctctctnnnnnnnnnnnnnnnnnnnnnnnnnnnnnnnnnnnnnnnnnnnnnnnnnnnnnnnnnnnnnnnnnnnnnnnnnnnnnnnnnnnnnnnnnnnnnnnnnnnnnnnnnnnnnnnnnnnnnnnnnnnnnnnnnnnnnnnnnnnnnnnnnnnnnnnnnnnnnnnnnnnnnnnnnnnnnnnnnnnnnnnnnnnnnnnnnnnnnnnnnnnnnnnnnnnnnnnnnnnnnnnnnnnnnnnnnnnnnnnnnnnnnnnnnnnnnnnnn

SEQ ID NO: 77753 - DNA, 416 bp, Arabidopsis thaliana landsberg
gcctgccgaaactgtcaaccatcatgccgctcgcgatcccgccgacgacgattgccaggatcgtaatggtgctcaacaggctgatctgggacgcgttgattccgtacgccttttccagcgacggtcctaccgatgagacatcgacctgctcgaatacctcgaacattcccccgaggaccaccaggatgatgagctatgtaatgggctcgggtgagaccgaaactgttcactatctcccccagggaatctggccccctggctgtgctcattcgtttgcgatgaggacataatatgccccgctttcttccgtatttgaatgaccgaatttatcttcatataatgtgcggtcttgttaaaatcgtctgcacatacccacgcctaccgtttttagcgaatccttgtcgtgcatctgactg

SEQ ID NO: 77754 - DNA, 571 bp, Arabidopsis thaliana landsberg
  unsure (1)..(571): unsure at all n locations
gacgacgtccaaggagttgagcttgcgatgtggtggcttgcgctaggtgtttgacgggagacggcattcagcgtgtgtgtttgaataggagatgaaggtcaatccagtattctgcattcggtgtgagtgaagtggttagccccctgtagtctcagtaatagctcttgttgctgctaatccatgagtagcgcgaggcatcccgacatggaacgttggacgagatcttgagttgaggaggtgtttgatcgatgcgggcgggatccaatcttgtcttgtcatgagccacccagggcgttacattctattacatggctagactcgaaaggggatttatcgcgatgcggagaaggaccattggaagctggcatctgacttccatgaaacttggaactcgttgtcggaattggattccacttgcatcacatccatgtacaagccggcccnnnnnnnnnnnnnnnnnnnnnnnnnnnnnnnnnnnnnnnnnnnnnnnnnnnnnnnnnnnnnnnnnnnnnnnnnnnnnnnnnnnnnnnnnnnnnnnnnnnnatttttctcgagtcatgagcaactgact

SEQ ID NO: 77755 - DNA, 585 bp, Arabidopsis thaliana landsberg
caaattgggtataaaaaattgtttggtgactaagaaagcaaatatactgaaagctacatatacatctactagtacaagtgcatgtaaacacaaccacacttggaaaaaaaaacagaatctatgtagattgatgatttgcatgttatatattcaataaaataaaacaagccaaaatgggaagactaaagttgccaaataacaagtacattgtaatcttcttcttcgctacctgctcactaaatagcataatctagggggcttataagagaagaagattttcaaaaacaaaagaccacagcaatatatttatagaccaaaaaaaaaaaaaaaaaaaagatcttaggttttgtcagtgatccgataccttagaatttgaagactgatttctgtttgagtaatccaccaaatcccgactgagaagaaggagaataaaagtgagaatgttgggaatataagaaaaggaagagtgatggcgtgaggcacattttttaaaatgagtctttattggatatttttgggggctccattacccaagagaaagcaaaaagagatgtgaaatgttaaagaaaaacggaaaatgaattt

SEQ ID NO: 77756 - DNA, 445 bp, Arabidopsis thaliana landsberg
gcgcccgcgcgcgatggggcgcgggcggagcggatggccagctctcgcaagaatgatgtgtctgcccacaatcagccggccgcaaccatatgtccacatgttgttgcgcacgcgatgaatgcggcgtaggatgcgcatcaacgtgctaacacgttattacattaagtatcatgaaacgtcgcagcatcgaacccgaaatcgcttccgaaagcgccgaagaaagcttgtgccgcgccatgttggcgctggacaagctgtccgacatgcgtgccttcttgcgtgatttgtgcacgccggccgagatggaggcgctgatcgaccgttggcgcgtggttccgcatgtgctcgaaggcgtgccgtaccgcgacattcacgagctcaccggcgtgtccatcaccaccatcggtcgtgtggcgcgatttttgaacgatggcaacggcggcta

SEQ ID NO: 77757 - DNA, 261 bp, Arabidopsis thaliana landsberg
accaacctgaaactgagatagaggatgaagtgttattggataatcgaaaaggatagagtatgtgggagcaaaacaaactaaatttttagaccagtatcaccaaaagagggatggatcaaaagccaatggaaatatgggtcttaagagctgtgtaattcgacttagagccataaggtggatgtctccaagcatctatattcgaagagactcaacttatgatgacttgaataagacatccatactttgtttaaaggggatgat

SEQ ID NO: 77758 - DNA, 506 bp, Arabidopsis thaliana landsberg
  unsure (1)..(506): unsure at all n locations
tacacattgaattattagtttttgtttattcgtttatttatttatttagcaattcaattcagtcgttggaaagtgttcttatgactgaccctttttaactttttgattcaatttccttaaaatattagtttttattttgggttatatggtaaattacacattgccgtctcgtcctaataatcctcttttctgttcccatttgtgttgttgtgctttgcttccttcctttttcctcattctctcttcttctccttcttccttctcctccaccacaaagcggtaggtttctctcttcaacaatcggtgagtctctttcgttttcattaagaatcttcataaagttttgatttttattgttcttagatcgatttatgttctgcatctggttggttttggttttgattttgatctttgtgtcttttctgggttctattgggttttcaaagctcgatcgaatagataagatcggntggtgggttttttgaaaatagattttttttgaaatt

SEQ ID NO: 77759 - DNA, 442 bp, Arabidopsis thaliana landsberg
catcccgaaggctatcaactagggctttcataagcataatgcttctctcggggggccatgggctctctcaaggcaatctctccgaagccctctctctctaaaatcttggagatcctccttgacctagcagatttcgttagtcgatgtagttcctttaattgtcgattcattccttgctcttccaatagagtagcagatgctcttgcaaaagactccgttgttgtattctccaacattatgattaatacaatgcggcttgacaaaaaaaaaactaaacatttattagattttataaattatgatttaacactaaatttttgttatttttatattaaaattcgagcaaattgatcaaaataaacaaatgttaatattgatatataatataagcttgataacactgtattttacctagtttaagcatggatctatcattctttag

SEQ ID NO: 77760 - DNA, 533 bp, Arabidopsis thaliana landsberg
  unsure (1)..(533): unsure at all n locations
ccaccacgtagaatttttcgaagcgggccttcggcacaaagctgcgtatgttcacggtattggtgctgtcgatgatgtacacgtagttcctgtcctgtatttcgaagacggatttctgcggcagcaccagcgctttttctacgctcctggaaagacatactttgcctgtggctttatgtttcagcaggtgggaagggttgggaaagcgtgccctgaatgcaatggagcctgtgttctgctcaaattnnnnnnnnnnnnnnnnnnnnnngccgctgtatgggtattcctgtccgtcagacaataacagcatcacctctttatctgcctgttcatgacgctgtttctccctcaggtaatcgaggtattcattttcagaaatattgaaatagggcnnnnnnnnnnnnnnnnnnnnnnnnnnnnnnnnnnnnnnnnnnnnnnnnnngcaggctgcctgtcttcaatggtatcctgtccagcacgccgtcaaacgtgcacgcacctgngcatacgacagtttggtattggcatgtgag

SEQ ID NO: 77761 - DNA, 175 bp, Arabidopsis thaliana landsberg
taaagactgggaagcactttgcatttctaacacttcacgggggcgcgccccgccaaggaccaagtaacatcgttgccgtgcgtacatgatgctgcagaatactatggccttgcggcaagaaaattcttatcgatattctcgatacatatgggcaccggccgccacatcagcaggc

SEQ ID NO: 77762 - DNA, 152 bp, Arabidopsis thaliana landsberg
ctccccctccatgagcgaaactagcataacgaaacgaagggaaaaccgtatagaggacacgaccactgagcgagaacacttaccagaagggagacacgagggctccagagacacaacattgaggaaagcatgatgacataaagcgagacact

SEQ ID NO: 77763 - DNA, 500 bp, Arabidopsis thaliana landsberg
aaccgcaggcaatgccacacagtttcctgcagcatgagaagtctattcccttcacaggcaaatcagacagccatgcgctcgttttcataaaactgctggccgataccctgaagaagaaaataatgatcgttgatggaaaaacagggtcttatcctttcagggtcatgcattcacagcctactgattcgatgctctccatcatgatgcatcgcagcgataatttttttgctgagcaatccctgcttatggtaagcaatgaacggctgggttatatgagtgatgcaaagatgatagacacgctgcttaagagtgactacctggatatgccgcagaaacccaagtgggtggatggcagcgggctgagcaggtacaacctggtttcgccccgtgattatgtgtggctgctcacaaaaatgaagaatgaatttgcctggcaacgtattaccgccatacttcctacaggcggcacaggtacactgtcgagcctctataacaatatg

SEQ ID NO: 77764 - DNA, 334 bp, Arabidopsis thaliana landsberg
gccgtagcctggtccgcgtccacggcatcccctggcggaggggagatcggggacgggcccggttggagactttggccagaaccatgaacgccgccatgggcctggagagggatgtcctgtccttcgtcgacgacggacggccggtcaccttcgccagccacctggaggcctcctccgacaccgaccggatgctcggcgtgggcggtcgtgaggtcgcggtcgacgtgcccgccgccgtcagccgggtgcccatgcgcgccctcgccgcgctggacttccccgacatggtctccgtgctcgggatgtccttctggatggcgctggcatctaggga

SEQ ID NO: 77765 - DNA, 507 bp, Arabidopsis thaliana landsberg
  unsure (1)..(507): unsure at all n locations
gcaccctggaaggtcgcgtcatcagcagcaagatggacaagaccgtgacggtgttgatcgagcgccttacgcagcatccgctgctgggcaagatcgtgcgccgttccacgaagctgcatgcgcaggatgacatcggcgtccacgaaggtgacttcgtgcgcatcgccgagtgccgcccactgtcgaaaaccaagcatcaccgtgtggtcgaagtgatcacgcgtgctgaagcgtaatcggaggattgagccatgatccagatgcaaagcacgctggcggccgccgacaacagtggtgccaaacagttgatgtgcatcaaggtgttgggcggttcgcaccgccgctacgccgtgattggcgatgtcatcaaggtgacggtcaaggacgnnnnnnnnnnnnnnnnnnnnnngaagggcgaggtctataatgccggcgtcgcgcgtacccgcaggggcgtgcggtgttctgacggatccgtgatccgctttgatgacaatggccgccgtg

SEQ ID NO: 77766 - DNA, 369 bp, Arabidopsis thaliana landsberg
acactgacatacatgcattaaagcatagatatatacatatgagaagggtaattgatggagatgacactcagataatgtacgaaaccgaatgctgttatagatgctacacatactaacatgccagaagccatgactttaccattgatattgagatagtgaacgtatgcaatgacaatacatatacgtggctcatgaacaggctcaatgacgcggtataagctgatccgctttggtggatcattttacacaagcactcatagggatatcaactattacgagctgtgagcaatatccaaaaccccgaactgtattcaagagaattaacgaatgtaattcatggcttaagttccatgctatctctgcaatgga

SEQ ID NO: 77767 - DNA, 610 bp, Arabidopsis thaliana landsberg
  unsure (1)..(610): unsure at all n locations
tctttcgtagaaattgctatattttgaaaagaatacaaaaaaaaaaaaaaacgagagaagaaaaaagagtaaatgggcccaatcttaagacaataaaaggtaaattgcacgttgtgttgcattcaaccccctctgacaacatcattttttttaactttctctcactctccattgcttccactcttccagacatccactcgcttctcgttggtcgtgactctcacgcttcgatgattgagctctctcttcgtttccatttaattgcagttgtgttggggttcgatttttaatgaatcgaccaagtccaagtgtgtgttgtgcctctttctttgaaaccaataccaatggtcaaagatccctaccatcgatttatttcatcactgtcctcaatattaattgccactaactatttgtacggatgtgaattatgagagtgcctttgtctctaaggaacggtaaaaacatttttgctcacttttagagaatttaatgcanaagatgtaatgaaactggcaaatgttttagaaaattgntttgagtagatggtaggattaattagttagccataaaactagttgacgtctcacgtatcatctaaattatacatatg

SEQ ID NO: 77768 - DNA, 353 bp, Arabidopsis thaliana landsberg
aatgagacaggcaagcgtcaaacaacagaaatttacattttgctgctgacacccacacaaatgagctctgggactgatcctatctcgcactcaaaattgcataccacaccttggattccactagctcactatccaactgcgcgccagcggactacgctctttggacaacatgacgtggagcatttttaaaatcgttggcgttatacacctagacgtttttcctacttgtagataaaatcctcatatatactcgaatcctcccttgctatatgatttgataccgacgcagaaaatcttggtatggaatatatactatttatgagacatgctgattggtgaaaacagcaacaaag

SEQ ID NO: 77769 - DNA, 575 bp, Arabidopsis thaliana landsberg
ttaactcgtggagggagtgacattggattagttctgaagttttctaaagtgtatttttgttttttaaacattttagtttataattatataaataaatacatactatctttcttagaatcttttttttaatataaatattacatgtgaaaaatctacctaaatggctattcattgttttaacaataactattttttctccattgacatgtaatatgcgtttaaattggttgaaacaaagatactaacacaaactatagttgagaagtcattgaaattttttaagcttccatcttgtaattatcaatttcatttttcacacatctaaaatacttaatatcaatataaaattcattattgctcccgctattccaaaatacttgatttatatcatttattatttatttaaacacaattcaaccaatattaacaaactacaatctatgtattgttaaagaaaccctttatcaaaagttaaaataaataaaatttgtatagaaagatgagaatttcacttaattgaaaaagagaattattttaaacataatttttataaaaacaaaccagaggagtttatg

SEQ ID NO: 77770 - DNA, 304 bp, Arabidopsis thaliana landsberg
gatttatgaggagatcccggtttccccgggtgttgttatcatggactacagatgcttatcgtagatgaatccacagaaattcacacgcaagacaaacgagactattgctacagctcatgagctagcggtgaatgcatgacatgctcaattcactcctttgcatatagctggtgctacgatcactgatcccaccgggatattacctcaagcaatcactaatgccggtgtcgagaactcagctcagtcggtggaaaaagtgatcaatcgaccctttgagaagctttctttacaatgttctgcacct

SEQ ID NO: 77771 - DNA, 597 bp, Arabidopsis thaliana landsberg
  unsure (1)..(597): unsure at all n locations
aaatcaaacttatttgaaattttcaacgcagttaaatcaattgaatttttgtttatccaactactagttgcgtttttaagttacagcacattcatgttttctaaaaaattcgcaacaatatttcttctaaaaggtcaaagtcatttccaacatgtatatcaacaaattgatacacggatttcggttttatttcaaatttgtgtaatatacaactaaatttaaaagaaatcatttagaaagaaatattgaaaggataaatgtatatgatgtacttccaaaaatatataatgtatatgatgtgttagttaccaacaaaaatttgtgaaaaatgtagaacatattcatgcaatagatgacatattatgttgtataccactttcatcttaaatattttacgtttcttttttccaaaaataatgtatgtttacattttgagtgcaaaatttttgcaaagaaatttagttctatatgtcattttcaatttgatgttctaattaatgtttctttttgttaaactcatagcttttgtngcgaaattccccggcaaagattactactgttttgaaaaccagatttttaaaagagaaaacatatggt

SEQ ID NO: 77772 - DNA, 601 bp, Arabidopsis thaliana landsberg
  unsure (1)..(601): unsure at all n locations
attggctaacgtgtaacagaaagaagcgcgtctataactttagagaatgttgaacttctttggcgtcctctgtgtttatattctctatctatcctccagttacccactaacacttttattttgtgtactttttctgcgtcactttcagataacgaatctttgatatcttcagcaattgtgaattgattttgaaaagaaaagtattatctataaggacaaaagagaagaagaagaagcaaattgnnnnnnnnnnnnnnnnnnnnnnnnnnnnaacacagagtcacagagagctagctgtcttttatgattgggccagctctaaaatgctcctctcatatgactgtcttgtaagtagaagacaagaccaatcacaaaaccccacaacgttcacaatgccacgtcatgtgcaatcttattctacctaaaaagagactctctcaactcatacattattaccaccactaatctagctatctatctccatgaaggattataattgaagcaaacctaaatgtgtaaacggaattagaactaaagtatntataatccaattgattttatatggttaaacaaacanagacctatgtttactgagtcgatc

SEQ ID NO: 77773 - DNA, 392 bp, Arabidopsis thaliana landsberg
agcattcacggatccagtccattagcttgggagtgtggtcctcgacactaaaaccaccaatagtctcccatgtgtggaaccaagggtagtaggagatgagaaccgagtccaccatcgaaacgttgtcgtttccaccgaagtagaccatatctccaagctctatttctaatactttcaatatctctatgaactcttgttgcgcttcttctaggtcttcgcccctctttgaccacgttcttcttccagcgtcaaaaacctggttatatataagaatatgaatcacaatgaaatcgaacttttagtctcctttcgttgaactttttatatacacaccataacatttaatattacgaagtatgtaggagattgtatttgtgattcttaagtatcgt

SEQ ID NO: 77774 - DNA, 484 bp, Arabidopsis thaliana landsberg
  unsure (1)..(484): unsure at all n locations
aaacgatcttgtgcgaagcgaactgctcggtttaaaaggaacttttatttgggatggcataaataatgcccgtgaaaaagcccggatcgggatttatattgtgtttgttgaggtgttcgatttaaagggaacggtaaaacaatataaaaaaacctgtgtgcttggaggaaaactttaatacctgctccccctcatttgtgtaaaatgtagaaattgttattgttttaataacaatccactgtcgcggaaagcgtatttttccttaattttgtgccttgccactgtttnnnnnnnnnnnnnnnnnnnnnnnnnnnnnaacgtgagtggcagtaaaatatttaatcaaaacaatacaatgaaaaaaattacttacacctttttgttttttctgtttctaaacgtatgtgtttttgcgcaagcggtattgccaacttcgtggagttttgccacaacaacgcttcctaccggatggtcagcatctgat

SEQ ID NO: 77775 - DNA, 210 bp, Arabidopsis thaliana landsberg
taaagatcggggaagccctgtgcgtacctgcaatgacctgcccgtagtctccggccgcgcggtgtaaagacgttcacggggacatgtgggtcatatgatggcaacaggctatgtaccggcaccgctaggccgctaagaactcatgatatgccacgcaggttacgcccatgcttttcgttcacttcggcggtgtgtttcaacatctgctgg

SEQ ID NO: 77776 - DNA, 479 bp, Arabidopsis thaliana landsberg
ttggagatatctaccacaaaattttaggtatgttctttttgctgttttatattttccatggcgtattcttcttgagtacaatgacgttgtttcttgttttacaaaattttgctgacagatatggaaagggcaattattagggacttgctgtcacacacacttttgttctcggctcacctgctgaaggcagttaactttgttgcagaacttgattggtaatcaatattcaagagctacggatatcccatatcatttctagtctctcctcttgaagaaaagcaacacattttcacgtacctattatctaattagctacttatgagaaatgactaatgacttatccattcttcttggcttttctagcattttatcgttggcttgtgtagcccatcagaataactacgtaaggcctgtcctgacagtaaaatcattgcttgatattcgaaaatggagggtgaagttgactctatcagctgcac

SEQ ID NO: 77777 - DNA, 369 bp, Arabidopsis thaliana landsberg
  unsure (1)..(369): unsure at all n locations
aaatccggtactacagttctccgacctnnnnnnnnnnnnnnnnnnnnnnnnnnnnnnnnnnnnnnnnnnnnnnnnnnnnnnnnnnnnnnnnnnnnnnnnnnnnnnnnnnnnnnnnnnnnnnnnnnnnnnnnnnnnnnnnnnnnnnnnnnnnnnnnnnnnnnnnnnnnnnnnnnnnnnnnnnnnnnnnnnnnnnnnnnnnnnnnnnnnnnnnnnnnnnnnnnnnnnnnnnnnnnnnnnnnnnnnnnnnnnnnnnnnnnnnnnnnnnnnnnnnnnnnnnnnnnnnnnnnnnnnnnnnncagaacaatatactaaaaggatgtaagactaggtcctgctacttttgatgggaacggaatctactgggatctc

SEQ ID NO: 77778 - DNA, 276 bp, Arabidopsis thaliana landsberg
accaaaatgaccgaagcgcagcctacagggataaaaaagaaagcctttttgacattatcgagaagacgacacctgatggccgaacacggaacacaggcccaatgacgcaaaaagcaaaaaaagggtccgaaaatatctaccaagcaatgatacatgtacgggcaaaatggacgttgacaaaacacctgacctggggcgtgataatgggcaaaggaaaagggggatgcaccgcaccctcgacgaatattaaccccaacatgaccaaaacactcatat

SEQ ID NO: 77779 - DNA, 213 bp, Arabidopsis thaliana landsberg
taacaataaatatataaaaaaaaaatccaacattctcaaacattaactaaaccataccatatttcagaaatacacctcaaagattaactctcccattattcagattttcactactaataccaaccattaaaaccataaaaaacaaacctaaacaacttaaaaacttgaaacctgactcttaaaaaaatttacaacactaataaataacctttc

SEQ ID NO: 77780 - DNA, 486 bp, Arabidopsis thaliana landsberg
gccggattcgaacccctcgaaggtcaggaagcggccgctcaggaggtgctcaaccgcgtgttttcgctttgccacccggccagcggttgcggcgccgtctaccaggggtctgagcgccggaccggatgccagctatccttcacccgcgacggctctcaggaacgccggccgccggaagacgaccagcgcgaagaagccgagaccgtcgcccgccgcgacattgccggcctcgaggtgccggaggggggctcagcgacccactatcacaccgactatgaccatccttaacgggccccgacgctgaagaagaacggcgttgacggaaagcacatcttccaccgctgatcgcgaaaacgcggctcgtaggcctcaagaccgatcgaaaacgccggatagccgggcaggcggctgaacaagccgacgaacagcggcgggaggaggcggaagggcaggatcagcagccaggccagggcgttgctgacccct

SEQ ID NO: 77781 - DNA, 340 bp, Arabidopsis thaliana landsberg
gtaggcttttcataccacctatccaccacaatatgcccattcattgaactgtttttacaccctctgctagcacttcttccagatcgtgcttcgaataatagatgaattggaaacgctcgctagttagagccacacctttgactcttccttccttctaccattttctgggcatattcctaatcagatgcttcataggttgacaagcaggactgaggactctctcaattaagcttaacttatttctttcacatgacatgtcctccggcatatccggcatgtcaaagggctcatccttttccttcagtgacattttcatcagcgctctatccatagcccgacg

SEQ ID NO: 77782 - DNA, 548 bp, Arabidopsis thaliana landsberg
  unsure (1)..(548): unsure at all n locations
agaatgctgcctgaagcgatcagatgcagcagccggaaaatatttatggtattttaaaatgtgaaagatggacagtggaatgccgacgctgatgctcggaaatgacagctttttagtagatacggtgaatgacctgctgcggttggaagccggtacttctcaggcgattcattttgcggacatggaggataagggcacacattatgcattgaggtattatcctcaaacaaaaaatctggtatcctatgacaaagattcgcccttcctggatctgaaaatccgtccgctcaaagagattgatcccaaagggatatccaggcgctacggaatttccttgaaggagatggaaaacaaaaccgattatgacatcattgtccgggatgcgcttgttaaaaagcggctggaaggcaacctgccgactattgacatggaaggatatacnttctacgtggatttgcggatgcagtcgctcaggccgcataacgattntacaacacaggggatcactttcgaagcactgaaaaactattatacacccgacggcagcg

SEQ ID NO: 77783 - DNA, 460 bp, Arabidopsis thaliana landsberg
ttaataacgaaagtattggataaatggaaatgtgtttcctatataacgttttaaatcataacgagacgaaaattgtctaccgttaacaacaaagatgttcttgcaagataagataagctgtttttttattgcacaaatatatctataaattctagataaaatataaatccttacccattgagatttgcataatactattcagagtgatttttttccctttcgttaaagactactagtgagagcgttaatctagtgattcaccaattaatttaactatacttaaaaatattacagtttttatgaaacatgctagaagaaacatatataatcctgcaattatattattccatgcgtacacatgtagagccaaaaacggagaaaaatgttgtatataaacacaagtggaaaccattcatgtttattgtaagcagctgcagtggactcttccacttctgtattc

SEQ ID NO: 77784 - DNA, 394 bp, Arabidopsis thaliana landsberg
ttcacgctgccctgctgcattatagtttccgcgtgtctttaatgtttcctgttgcataatataactcccacggtccggtaagtattttaccaccgttacccaaaacgcctttaccagccaattttccgtcttcaaaatagtagcggttggaaccccggctctttttgaatacatcagttcccggctttcgcggatggggtcgaagtaacttgctgcatcattcacaaatgtttccagctcttttttattctttttgttgtactcctggattaccggaatgttcacgttcgagaacgaatggtaaatcattgcttcgaacttgccggtggcatatacctttttaaaatagggcaggtaatactgtatccaaaaatcggtgtctggttctttatac

SEQ ID NO: 77785 - DNA, 482 bp, Arabidopsis thaliana landsberg
  unsure (1)..(482): unsure at all n locations
aagaaagacgatatttggtgtcatgcatggnaaaggagtattggaccagattgtcatctgctttcagagtgcacgttggatagaggaattataaatttataatcatgcatgttgtacaatattactacaaattatccaaatattgtagttaaaagatattttgttgttttggagaatatatagttttgaaatgaagataatggatatgttgttatataattaattacgaacgcacaactcaaaatgtctcgctatgttttaattaacttgcaatctatttcaatttgcaattatatattaaaaaaaactctttattatactcatttcaaaatcgtttcagttacaaatccctcatgtcactcaaaaataagtactctctcaggaagcttaactagataattctcccttcatagatcaagtggcttcaaactaattgaactccatacttnaggtttatagtaagcacaactataggagcatgt

SEQ ID NO: 77786 - DNA, 478 bp, Arabidopsis thaliana landsberg
ctcgtgtcccggctggtgaccgtgctgggcgatttgatcaccttcagcaccgcgttcgcgtcctacgggcgcggggagaatcacgggccggctagcgagggcgagcccggcgacagcgggcccggcgatggtgacggcgggatctccggcagcgagccgcttcccggcgacggggcccgaataacgaactcccggtagccagcgccggccgggcggcgaataccccggtacgcaaaaccctggacacgcgagaaccccgcggtgcctctccggcggccgcggggttctcgcgtaagaaagcccggctactcggctacgcggacgacggcgaccaggccgacgcccttgatcgggaacgctcgctgcagacaccggaacggtgccgtgccgacccggttcaccgagcccatcatgcttccgcccggctggaacagacggccagactgtgcggagagctcttcgatcggtgacgaggaca

SEQ ID NO: 77787 - DNA, 464 bp, Arabidopsis thaliana landsberg
  unsure (1)..(464): unsure at all n locations
ctttgtccaaccaatattcattttgttgttgtggtcaaaagtcaaaaccaatagggatgggaaacgaaaagataatgaaactttaccatatgaaaatacaaacagctctgtagaatatataattaagggtaactgcatttctgctgagatagtattagataaatatcgttgaaaggtaacggaattttaaattcatagttattgacctttgactccaaaaatcttatcaaacttggaaactttgatagaacaatacgtcacaaacattatcgaaattcagtaaatacaaaatggttattattaacaccacaatgtctcaaagattaaatgtgtaatttatttataaagtagtacataaaatatggatcttagacctcttctatacgatgtcaacttcaacgatttctttttattttttttcattttcattgcaccttgaaatacttatanaaaggtttcacgag

SEQ ID NO: 77788 - DNA, 572 bp, Arabidopsis thaliana landsberg
  unsure (1)..(572): unsure at all n locations
actcataccgaccgntttttctatctttcacactcatttttctattcagcccactgttattatctttaccgtttctcacatccattctttgcctcttccttctaaactttagtgttatgatctttgtattgttcatcaaacacaaattatatacagactcacatgttattcttttctttatgagtcttctctatttttatgtttacaaatcttttactattatatcatcattcatgtagatcttgaccctataatcttaatataaaacttgaaacaaaacataccgagagatgtcctaatctgagagacatagactaagtctttggacttgtaaacttaatataaaactctttttttttttttgtcattgtcaaaaaaaaaaagactaagtctttggacttggtcatagcttcataatttttaatctacttaacaattttgaattagagaagaaagtgtcttcctgaagattagaaacacactttgaaatcattgagtttccgattagtagaaatctatgatttcagaggttattttcaaatagagctaacatgaatgaatgaaacttgcaa

SEQ ID NO: 77789 - DNA, 390 bp, Arabidopsis thaliana landsberg
  unsure (1)..(390): unsure at all n locations
gattttattaggataacaaacacaaaacaaattttcaagttctagaanacacgcactccaccatcgccggtgttaaaataaaaatcgtccaccccaattcaataattaaactaacatcccccttactaaatattcactcttaaagctacataaagctgccatacaacttaataactacttacttatgaactataaatagcaagtacagccactcaaattaaatgaacctctttggcaaaaaaatagatgcacaagacaacattcactcctacaatgaattctattacaacaagaattaccgataatacaccgattacttattaaagacaaactactnnnnnnnnnnnnnnnnnnnnnnnnnnnnnnnnnnnnnnnnnnnnnnnnntttat

SEQ ID NO: 77790 - DNA, 230 bp, Arabidopsis thaliana landsberg
actggcacttttgttatttagtcttatgaactctattttgttcttataagtatattatatatagcacatgaaactatattagatctcataaatttgaagtagatttttgtttcttgctgttcccagcactctagatccatacgaatgccatcttcacccaaacatgctaagggtatcccgagggtgaatattctgcccgcccggacggaccggaccgtgccttctgggcc

SEQ ID NO: 77791 - DNA, 611 bp, Arabidopsis thaliana landsberg
  unsure (1)..(611): unsure at all n locations
gaccgcgcccaagcacgagaggctcaccacgatcgtggcgatgccggacccgaccgtcccggtctgcgccgccgacctcggctccttcgggggcgtgagctgggacgacgcgctggccggccagagcgccgagcgcgacttcggtccgcgcagccccgacgacctctacatcgtctacaccggcggcaccaccggcttcccgaagggcgtgatgtggcgccacgaggacttctggcgggtgctcggcggcggcatcgacttcatgacgggcgagcgactcgacgagtacgaccagtccaagaaggccgtcaccgacgagaacccgatggtgatgttcccgctcagcccgctaatgcacggcggcgcccaggcggcgatgctgatgcacctcttcgccggccagctcaccgtgctcgcgccgaagttcgaccccgannnnnnnnnnnnnnnnnnnnnnnnnnnnnnnnnnnnnnnnnnnnnnnnnnnnnnnnnnnnnnnnnnnnnnnnnnnnnnnnnnnnnnacgaggcgggcggctacgacgcgagcagcctggtggtcgtggccagcagcgcggtgatcttcagccgttcggtgaaggagcgctggatgg

SEQ ID NO: 77792 - DNA, 365 bp, Arabidopsis thaliana landsberg
taaatgaaatgaaacatcgccaaaaggattttccatacaagaaacaaggtttaaatttggggttaagcgagattatatacccggtcgcctcctcactataaccataatctatcatggaatctaagtcagatgtgacatgatatatttcaaacgcatcacccaacctgaggtcaaacaactgggaaaaccactgcccatgaacctgctatactcttcatacctaccgtggtcactatcatgaagcatgccaaaaatatacataattattcaggatcaagtacactttttatgatcttcatgctaaaaaatctgatacatgtacctaataatgtgatgaaatctaaataatgctgtgttgctgaaat

SEQ ID NO: 77793 - DNA, 514 bp, Arabidopsis thaliana landsberg
  unsure (1)..(514): unsure at all n locations
tccgtaccccatgctccgagacggcacctacagcgaataagacgggcgcctcctgttcgccgccgccgcccaggccgcagcgctcgccgcgtggaccgcgtacgacgcgggcgcggcgaaagcagccgaaacctacttcgggcgcgccctcgagctggcgagcgctgccggggactccgcgttcaccggggaggagctcgccgcccgctcgcaccgggcgatccacctcggcagcccggcccgcgccgtcgagctggcgcgcgcggcccgccacgccggggcagggctctcgctcctggccgccgatgcgtgggaactggaggccaacgggcacgctctcggcggcgaccgggccgcctgcgcggccgcgctcgaggtgtgcgagcgcgagttcggccgcgccgagaccgacgccccggcatggctcggctacttcgacgaggcctacctcgccgcgcgcatggcccatacgctncgcgatctcagcgactggcatggcgcgctagagcacgcc

SEQ ID NO: 77794 - DNA, 567 bp, Arabidopsis thaliana landsberg
ttttgtgataacggctctgcatcgtggtttgccgaattatcaaatgctggcaactcaataatttagattcttgatgacgacggaccattagactttctgcataattttcacattccagatattgacatcctcgttgactctcaatttcaatttcaatttcaaactactagtactgtaaaactatatattttagatccaatcgtccaagtgttaactttatttgacgttacatttatgatcaatgtcctatatataataatgtatatgcagacatttacatatggtgggtattttatatattaacaaaaacagttattataccaatattccaaagcgtatttttgatgaaacatgcaaaattaatattatataaacatatatcattaaaaatatttttaactcaaaattagaaattaaaatttagtgttaaatgggataggaagggcttcattgtgtgggctactaattaattaacttaggcccacgaataacctctacaaaaagtaggcttttcttcaattatgccttagtaacgaaaacgttttcaatgttgacagtattcacatg

SEQ ID NO: 77795 - DNA, 517 bp, Arabidopsis thaliana landsberg
  unsure (1)..(517): unsure at all n locations
gagggggagggcggacttgcgacattccacggatttttactttcttgaagggcaccgctnncactgggggggaggtgnnnnnnnnnnnnnnnnnnnnnnnnnnnnnnnnnnnnnnnnnnnnnnnnnnnnnnnnnnnnnnnnnnnnnnnnnnnnnnnnnnnnnnnnnnnnnnnnnnnnnnnnnnnnnnnnnnnnnnnnnnnnnnnnnnnnnnnnnnnnnnnnnnnnnnnnnnnnnnnnnnnnnnnnnnnnnnnnnnnnnnnnnnnnnnnnnnnnnnnnnnnnnnnnnnnnnnnnnnnnnnnnnnnnnnnnnnnnnnnnnnnnnnnnnnnnnnnnnnnnnnnnnnnnnnnnnnnnnnnnnnnnnnnnnnnnnnnnnnnnnnnnnnnnnnnnnnnnnnnnnnnnnnnnnnnnnnnnnnnnnnnnnnnnnnnnnnnnnnnnnnnnnnnnnnnnnnnnnnnnnnnnnnnnnnnnnnnnnnnnnnnnnnnnnnnnnnnnnnnatccatatttataagtaaaac

SEQ ID NO: 77796 - DNA, 623 bp, Arabidopsis thaliana landsberg
cactagatttgttaattggattattgaaattgtaatgaaatgacgagtggttgatgaattaagggatattaatgttatttaataaataaataaataaaatcatcacaggcgtatcggatctgtgactaaaatcaattattggctctgttatactgttactaatcaatatcaaagaatagatttatgccttcttgccattctcagtgccactgaaaaagttttttcctatctaatttatttttgttccaaatattaattcaaaccataaaatatgtatatgtacatatgcagtggacatttaatgatcgaaggagccattgattgaacacaattaggaacaccatgcatcttatctacaatttccaatatcttcttgtaatactcaaagtcaaaagattggatctacaatctgacgaaagaaataaagaaacgcttacacagtctttttttcatttcaccaacatgttttattatctcacatttgaatctaaatagtaacacaacaatatcagcacaaaccaattacatatttttcgtattataatatatttttttcatatcgattacaatcttaacgtcgttttataaaataaattcgggtttttttttgtaaaggttttaaa

SEQ ID NO: 77797 - DNA, 554 bp, Arabidopsis thaliana landsberg
aggggaaagtggtgatggattggacatatacattatgacctattaatgttttactactaagtactgagataagctagtttgcaagagctgagacacagaacaacactaattaggcagtgtgtgtcacacagaccagagaggcagagatgaatcagcaacaaatcttttgtcttgtaaaaagaggagacagagtcagacaatgaagtcatcaccaaatctataaacacatgcattaatgcttttacgtgtccgtatcacactcgtgtttcccactaaatgctcactcatttattgaaccatcgtctaattaatgcttttgataacttaaatgcatggaggagtgtccttcgcccaatatttcaaaaaggagagagctcactcaattctcttgacgcacgagttttggacctaataatcgctgacctcatcagcaacaaagaaaaacagctacactacaaagacttttcttttaccaatccaacatcaaataatgatggcttcttgtttctcttttattagatatccaagaattcgtaaataaaaaagaacaaacc

SEQ ID NO: 77798 - DNA, 596 bp, Arabidopsis thaliana landsberg
  unsure (1)..(596): unsure at all n locations
caaattcacaatgtacacatcagattactctaacaaaagactggttcataaagcttgaatcattcgagggtgcaaaggcgatgatgggtaatgagcatttcctcttcaatcaaatgcatttgtaaggtgaagttcactaatcatcactatttgaaaattattgtcacaaatgttaagaatggctctaatataggcaaaaaacacaaatatatgtggagattttggaagttcatgatatttgagttaaaaccttttcataatatcacaaagagtataacaagctactagaataaaattggcaaaataagatatacactcttgaaagatatatataatctgttaaagagtaatgggtcaaatacatgagggtgtcatcggtaggtaacttggtataagtttctatggatgtatgataaggattatagtggatcaccttacctcaatgtaatatttttgtagcatagttcgaaaatggtaccataaacctactacatcttcaccaagctatcatgttcattctataaaattctttatgttttctttggtagaactattaattctttatgttgtttgacaagntgccgatataaaatctc

SEQ ID NO: 77799 - DNA, 343 bp, Arabidopsis thaliana landsberg
ttctcggcacactaaaaaaaaaccatgggcgttattgttggctcaatactaatgggcctaagtactacagtaaaccgattaatcggtattatgtagctttgtgtgaatcttttttagtcaaagtctgacttgagcaggcagtaggaggaagggcatgttgatttttttttttgtgaatcgcatctcgacactgaagaggtccgatacctttcttcttatttatctaccatgcgatgtttttctccttgcggtacttatttgggataacgatccttcgtcatcatatgtgacttataaccaccatttttattttctcgctttcttgtcgctccattcatgaatg

SEQ ID NO: 77800 - DNA, 604 bp, Arabidopsis thaliana landsberg
  unsure (1)..(604): unsure at all n locations
caaacattgaacattttttctttttttttttttaagattttttctttctaaatgataaataatgcaagggaatatatcttagtgtaaccacccataaaagtaatatttagtttttgtaatatgtaaaattgaaatataataaagtaatacttaatttttcataaattattttataactttttattatgttgatgatattccatgttataaaacaattaatcaatgtttttatatccaacccggaccgtacaatactaccggttaacccacaattcggacatttcttctatttgggtttagtgttaacatttgacaatcttaaaacccaaaaagtcccataaaaatcgtctttgacacacgatctggtgaaccaaccaagtatcgaatcatgagaatcatatatatgaaagttgtccaattttttccatctttccgatacatcaatactagagagagtgacaatgtcataacaacatattaattacactaattatntaatttaatgtatttaagaatttaaaattattcattaattcgttcttatataaaatttgacatggtttaacttaatcattaaataattttagttaattagtacaaagta

SEQ ID NO: 77801 - DNA, 533 bp, Arabidopsis thaliana landsberg
ccccggcgaccgcactcgcgcgcaccgcggggtcgtgggcgttgttgaagactaccgccaccaggagggcaaagaccagcatgctggtcagccgctccctcgaccgcagctccagccggaggtccttcccggcgatcgcgaggatctggaccgcgaatgcgcccacgcctacaccgacccggcgacccgcgcggtgtagagccgctcgaaccccgccacgtccagggcggccctcggctcgtcggagacccaccgccccgccacctggaccgctacccggtccgccatctccagcccctgcgagaggttgtgcgtcacgagcaccacggtgcgccgaccgtccttcaggcgctccagcactcgtcgcaacatgccggcggcgtgcgcgtccagcccggtgtacggctcgtcgagcaggacgatctcggggtcgtgcagtaacgtccgcgcaagcgccagccgctgctgcatccctcgcgagaagccccgcacctgatcgtccgcccgctccgcgaggccgacctcggtcagca

SEQ ID NO: 77802 - DNA, 570 bp, Arabidopsis thaliana landsberg
ctcgagtattcaccaaattagatgtagacggagagctttcacttttaagacagtaactttatctttaatttatcaggatgtatgcgaaaatggcaagcatgaaaccaagaataatgccttccttttgtgccaacattctcttcgcatatgcctgtaaatcgaccaaccacaatgtctgccctatgtttcttctcgccgccttcagtcctgggaggccatctatactttccacgtttgtttcgttgtgatattgttgcaacttattcgcgttaacacgcttctccagcgagatgtccatagtgggccgttcctcaaagacgactagttcattaagtttgctgtcaatatcccctttgaagacgtcttcgaaaggaaccttgttgctctcctctggcgcgtagatacccttcttaattcgcggcacaccaaacccacagcttgtctgaacctcccacacatccgcaagaatgacagcccttgcaccatcaaacgtttggcgcttgttccttgcaattctgctgactaggccgggaaagctttgttcgttccattcgacaacgcgagatgaac

SEQ ID NO: 77803 - DNA, 580 bp, Arabidopsis thaliana landsberg
ttttcttacacacattaaattttgttttttagtgttcaacgtgaaaaatgtgttttgtatttagtgagagtctcggtccttcttttgaaaatacttttgaagaatagagtatgtattttccaatagtgaagtaattcaaaattatcaaaaccattaagtttatggtgaaaaatattttgtaacccaaaaaaatgaattgtactgaaatttaaatttagattagatggtttggttcgagcttgtgatctttaatttcatatgattgttagttttaagttagtgaacgctattttttttgttcgtctggttagaactatgtatgtgtaaataaatgtttattaatttaattaagttcttggcccaaaacctatgagaattaattagttgataaattacatgtgtcaaataggttatagttagtttctaaaatatttagtcaaagattttttttttgacatctatcaaataggttataaattatatgtgttttaattttattggttaaagtaaatgatcatttaagttatattattgaataaatatatactaaatattactagtgttggttaaaaactatgga

SEQ ID NO: 77804 - DNA, 479 bp, Arabidopsis thaliana landsberg
  unsure (1)..(479): unsure at all n locations
gatccggaattgcgtgccggccgtaggtttttccacaagggttatggttccgccgtgggcgagcaccagctcgggggcgatcgtcaggccgagacctgtgccgccggagcgggcagagccgcggaaggccgtaaaaaggttctgacgcgccttcagcggcatgccgggaccggtatcgtcgacgataatactcacgacgctgccgacacgctggccggagacagtgattcgcttgatcccatccattccaagctcgcccggcatcatcagcgcctgcagcgcattgcggagaggttgtggatgacacggaagagctgcnnnnnnnnnnnnnnnnnnnnnnnnnnnnnnnnnnnntgctcgacgaactcgacgccgctgcnnnnnnnnnnnnnnnnnnnnnnnnnncatcctgggtggactcgtatagaccgatgcggcggcggcgcggcgcctattcgctcgctggccgtaaagacact

SEQ ID NO: 77805 - DNA, 535 bp, Arabidopsis thaliana landsberg
  unsure (1)..(535): unsure at all n locations
ccaacattttttcttttgctttatttctttttccgttgactgtattgagtacaaattcgtcttactctctccactactttttacttaactttttttttcttccaagtttattgtttattctcagttacattcactttagacacacaatccaccaacataaataggcagtgatataagttaatatcatagaaaacaatcagaaaataattcagaagagaaaacacaacaaaaaaaagaaagaaaaagaaagaaagaagaagagatgagtgagcttctctactctctccccacttgggatatccataaccttggatcactcttcaagcccgattttaatcttggtaatatatacattaatatatagacacaaacatattttgtgttttttcaatcgtaaaatattgatacatatacgcatatgtaatatatgaatcgacgcgcatgtatttatttacangttattcaagaactttcttattaaagtgtaatatgtttgcagatacatgtggtttcatgaatagatcgccggaacata

SEQ ID NO: 77806 - DNA, 552 bp, Arabidopsis thaliana landsberg
aagggcggtcatcgccaagcaaacgccggaaccatggcgaaaacaggctcgggcagctgcaggccccagatgcggatcggcgcggcgaacacgatggtcgccagcacgcacagcagcatcggcacgcccagccaacggcccggattgagggcgcggccgccgctcatgctcatcgcggcgctccggtgggcgcgggcgtggcgttggtcgccggcctgggcgccggcggcggcggcgcgggaggcttgatctggaccaccggcggtgaggtcggcttggccgaggccggctgcgacgcggccgacttggggggcgcggcgctcggcgtcgcggcaggcttcggggcggccggcttgggggcggcgggcttgggagccgccggcgtcggggtcgacaggatcgaggtctgcggatcctcggtcgagaccggcggcagggtcctggcttccagctgcttctcatcggcaagctgggagaagtccttgaacagcaggatccggatgtagtcgatcgacgactgggtcgcgaacagcaccacgcgccagcgcccgt

SEQ ID NO: 77807 - DNA, 421 bp, Arabidopsis thaliana landsberg
agctcttcataaagtcgccgtcgtcgtcttcttatttctctctcttcctgctctagccgctttctgaactttgagggacaaagcgtttggaactgactttgttccaatctgcttgactgcttatggatctcacagtcagtcctgtgtgctgaatgatctccgccttgcactgctgtaccagatgactagggcacagcaccaatgcgcacgtagtaagggaagtcgctctgtccatcttgagatatctagaacggggattggggaatggaaacgttcccgccaggatctctgggttgggacgcccaagactagccagaacgtgtgcctccagagcctgagatgtccgcagtccctatcaatgcgaagctatccccaccagggagcgaattgtgcacccaccactctggaacacgagctgggc

SEQ ID NO: 77808 - DNA, 484 bp, Arabidopsis thaliana landsberg
gacggaaccatgctgttcgactgcggtaatgataaatgtattcatttttccggcatcagctgccaggagctggtatgcctggatacctggaaccatgcaggctataccgagaacagtttttataccgaacctttccgtgaagtgttgctgaaagggcatgatacacctgtaaaaacagttgttcccaaaaagaccacccatacgcttcgtgtaaaaacacctttgcttcccaaggggcaaacagtatgcctgctgggcagttgcggtgtactgcatacatgggatgaaagcgatccgctgctgatgaagcgtgataaagacagcgatacctacgagatatcactggacctctctggtgaagactttcccatcgcatacaaatacggtgtatatgataccgcatagaaaacatttctccggtatgagaacggcaacaaccgcgcattgtatgataccggtaaagagaaccgccagtcactggtgc

SEQ ID NO: 77809 - DNA, 207 bp, Arabidopsis thaliana landsberg
  unsure (1)..(207): unsure at all n locations
ccggggcacggagcagaagaggaaccgaggacatggcggaacgngaagtgggttttgataaaaccaaagaagcccgagagaacggagaaaagacagggccataccggaacacacaacactccccacgaaggagacaaaaagaggaacgcagacacgaagacggaagcgagaaccaaacccaccaacgcaacggaagaaaccacccca

SEQ ID NO: 77810 - DNA, 540 bp, Arabidopsis thaliana landsberg
caatgataatatcagtatatggttgtcatggtcaaacgtcatttgaggatgaggacagatcaccattggggcgagttgtgtgcaaagaaaaccgtaggattcggctttagagaagaagatgctcgagtgtatgacagcttctttatatcaacagcttcctaattctagggtctgacttagaagcatgggccttcgtttgtatttttgggcctgaatacgatcgttatatatttcgcccattatgaaggttagatttttatctctacgattgtagtgaatggatgggccagtatatgtgacatacatgggcctgattgcaagtcgattgcttactattgcctttgagaggggtaaccagattgttgaaacatgtacaaattctgtgaaacatataataacgatgtttattgataccaaatcttgtaaggtatacacactttaaaaaaataatagactatctaattcgattcaataagcgaactgtactatatatctcccacgctttgcatcctattatcaggggtcttgatgatgagcatt

SEQ ID NO: 77811 - DNA, 454 bp, Arabidopsis thaliana landsberg
aaaaagtaatgaagatttgaaaattccgaggttaaaggaaagcttcctgcttttacaggaatcgcatacatttcccagacttgtcgagagtgaggacactcacaatctattttttgtagtcactttttaaaaaatataggcagcctattataactattcatgcttatggatatatttcgcgaggagtgatgacaaaagactctggatcggatttgaactacgcattgcctttggtcgagtacgggatgaggcacagcggtatctaaatatcgggtagctacgaatccgcctcgtcccctatgtggagaaggcgactttattaggatcccgagagggctcgctgactctatcttggttccagatgagagacagcgctcttgttgggatcaatacacaaccggttacacaatatagtgcgaccagaaaagaatctcatgcatttttacaaaatatg

SEQ ID NO: 77812 - DNA, 556 bp, Arabidopsis thaliana landsberg
  unsure (1)..(556): unsure at all n locations
tctccaaaagcgttcaactttgccgtttgtttgagggctttaggttttgcatatagcggcgcttgataccgggttccatcagcatccgttcaaaggggtggttacgcttgttctgactgtttgccgggccaaactcggggccattatcagcaatgatctcttcgaactgaatgccgaacttttccctgatcatgcgcatgcagcgcagggctgcaaacatggtggttaaggcactaatgtcttcgatcacctctgcaaaagctacccgtgagtaatcatcaataacacaaagcaaataaagtttacggtgttctccccgaatgatactcttgctcagatgatggcaatcaatatgacctaactgtgccatacgttctttaatgatctttcgtttaacttccttatctgccggctttaagcgattcttaccgtagcgcttaagatgttatatacccctgaaggagatggcttanagttatttgattttcgcttaagctcatcagctatttcgaacttattgcatccacgtgagcgcatggtaagcaccagatgctca

SEQ ID NO: 77813 - DNA, 534 bp, Arabidopsis thaliana landsberg
cagatctccgggctcgggccgcggtgacgtcgatcgcgtgccgtagcccggcgtctttctccgcttgggcgagcaccgccgcagcggggtaagcgccgtggcggactttggcgagctgcccggagcggacgagagcgcggatctgccgttcggtcagaccggccgcccgccactcggtcgtgctgcccaccctgatcttgcgcagagcatccgaaatagcgctctcagtcacacttcattttgactatcgggcgtcattggcgcactcggatcgagcttatccgtcttggtcgcatccgagggcgaaaaacatacgccttcctgaccgaaatgccgatgatgccggttgcctttacgccctcagatcccgtgtcctccggaccggacggggactgggacgccccgtggtctgattacagcacgaagcggtgagggtgggatgtcacgacggtgggggtgaacgtgacgacggggccgccgtcggtggacgtgaagatccacgccgaaacggacattgaccatccgtgcgaacgc

SEQ ID NO: 77814 - DNA, 542 bp, Arabidopsis thaliana landsberg
cacgtatacatttgacgatgcaggctattacaatattttttttataataaccgaccagaataattggcgggatggaatattgaaaaataattacttgttagcggataaacctttaccgggattttccgcagtaccaacaataggatgcacgccgttgactgttttgtttactgacacaagtaccagtttatccggcgcgaagatcaccaatcgagtatggaattttggtaatgctatcgcaacaacaactaataaaacgatatctaacacatattctttgcagggagattattcggtatctttaaaggttacggattctttaggttgtgttgattctatttacaaaccacagttcattcatgcatcaaagccagcggcttcattttcaactattgcattcgggtgcgccggaactagtgtgccttttagcaacggttctcaaagagcatcaaagtatttctgggactttggtgatggagatacttccagtctttttcagccatcacacgcatattccgctgccggtaaatatgtggtcaccc

SEQ ID NO: 77815 - DNA, 545 bp, Arabidopsis thaliana landsberg
aattgctggtctctaacaaacctaaaaccaaaattatttgcatctttatccacttcttcacggttcttttctcttttctttatctgcttattttatcttgtttctttttcctcgttttaaaacaagtttagcatgttatcagattcagttttacttttctcaactttaattatgattcgtttttgttgccatgtgtacttttctatatatatttaaaattttgcttacactttttttagcgagtatcctttacttttcaaatattgaatctcatgtcatggtgcgatgtttttaacacttttgggagaaataaccaatttatgtacgtttatacaatagattgatttaatttcacatacctatatacgttaacacatatggaatttaaaataatcatgtactatatatataaaagttacgctgtttacctctctaataatagactaatcaaaataaacttttagagcaagagatagttttcacaaaaacctttatacttatccccgacgacattacatattttgcattggcatatgaaaatgaaa

SEQ ID NO: 77816 - DNA, 559 bp, Arabidopsis thaliana landsberg
  unsure (1)..(559): unsure at all n locations
gaactgctagaagnnnnnnnnnnnnnnnnnnnnnnnnnnnnnnnnnnnnnnnnnnnnnnnnnnnnnnnnnnnnnnnnnnnnnnnnnnnccaatctggttcaaaatatatcaaacactattggtatttaaatcaaaacgtatgccatctgatatatcgtccatgattgtatcaagaaaaatttctacagatttaatgtttttataaaaatcaaatcatggaaatacatcggtttgttttaaaatatatccatccaatatcttaacataggttggatattgaaattttacggctatatatgtatggcgacacgccacattcaaacagacattaaacgtcgtaatagatatacgttggaggccctaccaaatactcatatcgtgagcatactaattctaattatgtcattaaaaccacaatccgaaaaggtagattatgatgagaaaatgaatagctgatataaagaattgagcgttttattttatataatcatgaccacataagaccacacatcgcttatagtcgctcgaaaattcttcaaaccttatgttctgcagttta

SEQ ID NO: 77817 - DNA, 561 bp, Arabidopsis thaliana landsberg
ccggacctattacacattgttgatatatctaagcgggaacagcacaaaatcaaaatccaagagcagttcatgcaagactaacgattcttcttcggctgagcctttagtaggtggagaaaccgttttttatggttcaaggaacagtattgtagctgaggtaattaactctcaaatagtttgtttgtcttagtttcatattttatggatctcatcaactaaaacttgcttattatcgcaggtagctccagtggaaggtatggctctctttcacatccatggagacaagtgcatgttgcacgaagggaggaatgtctccaaaggcgtcaagtatgtgttccgttctgatgttggttttgcatgaagaagacattcatcttctctgcattttgtgtttctcacattaactactttcatacacattaagaaccatcgattaagcttgtgtagatcactatttacctgaatcaagcccatgttcccgctggttcagcatttataacaagccatgagttcatggctcattcattattagtgaccagtaagtgaaaatgctgatgaatt

SEQ ID NO: 77818 - DNA, 476 bp, Arabidopsis thaliana landsberg
  unsure (1)..(476): unsure at all n locations
cggagcagcaactgcttattaccagaacatttaatctgcgggtggatttgctctataggctttttcgacgcttgaactgctagggcagtggatgggcacccaggtgcttgaattagaaaaccaacccttgggtaaatatcaatttgaaaccagggacggggaaggttaagtcgtatttcaggccataggcactatccatggcgtgacacccaataaacagatcatccgaacctttgagatgctaaatacaccttttgcaccgcaattagaattcctggattttgcttccataaatgaaaacgaaagcgaacttnnnnnnnnnnnnnnnnnnnnnnnnnnnnnnnnnnnnnnnnnnnnnnnnnnnnnnnnnnnnnnnnnnnnnnnnnnnnnnnnnnncgacagactagaaacgctgatgataaaacaactggatcaataaaaagtcatcttttttgcccacacattttatacaaaaa

SEQ ID NO: 77819 - DNA, 580 bp, Arabidopsis thaliana landsberg
  unsure (1)..(580): unsure at all n locations
agctggctgtaccgatagacgctnnnnnnnnnnnnnnnnnnnnnnnnnnngggagagcggtccccgtggcggcgttacttcaagggcatgtatcaatgttaaagcatttcatcgtacttcctgaatgtggcaagcgtttgtcgcttacatcgcgcttgcttcgattcgtccattgcaacaagattgccagccgtgtacagcagtacgtcagcgactgctctctccatacacgtacgttagtatggatcatgatgcgcggcctcagtcatgatcttttcaataaacacacatcgatccaggcaaacgacaagtaccggtactaggtttactacgtgtgacgcatctaccaggttgtgaggaactaagcccctttgcattcactggcatagcagctgcaagacaccgttaagtagcctgttactagccgtggtactacccagctaggtggtaggttgatgtagtagttgcagcgtgtcatgaactactctgttactagccgcaatactacccagctaggtagtacttctcacatagtagtcgcaacgtgtcattgtagcctgttactagcccgcatactacc

SEQ ID NO: 77820 - DNA, 354 bp, Arabidopsis thaliana landsberg
tttaaccactagggtgtgtttttaatctggttcaagttttttctataagtttttggatttcttggtttataaaatatattaactaaatttaacttgaaacggctaggtttagcataacttaggcttaggaatggattttttttatattgactttaaggctagatactaaactctatatttaaagaaattagaacagcaaccacaaaatgtgaatattttctcttatcctggttgcgggaatctaagaatgaaaaggccaaccaaaattggattcgggtctgatttgaatgtctgtgtggtagcttcaccacactgaacacaactttatacgttttatggaaattatacaatctc

SEQ ID NO: 77821 - DNA, 554 bp, Arabidopsis thaliana landsberg
caacttccccccttatccctcattgaaattaaaattttaattccttcacactttttttaattcttttatcttaattataatcctgtttctcaaaaagttcatagtagcgttgtggttcaatatgtattttctgaaaaaagaaaaacaaaggtcactactaacgtacgttttatctaaaccacgaaaacaaaacaattaagaagagatgcaattcaacactctcactaatgtaggccttgttggtgctgccaagatctaaaatgtaaggtctcacctgcttccccaatagaagagacatgtatatacacaatgatattagtattaacctaaactccttattctcattagatgcatggtcaagaaaattactattctctagagaactacacaacagaatttaccggtactgaataagatctgcaaagagcgtgtttagtagaaatgtcggcgatcttttatttctcacgtccaaagaaatatcagctctggtaatgaagacattgtgggattatcttttgacatcaatccatcttatagaaaagtttcagatcatg

SEQ ID NO: 77822 - DNA, 472 bp, Arabidopsis thaliana landsberg
  unsure (1)..(472): unsure at all n locations
nnnnnnnnnnnnnnnnnnnnnnnnnnnnnnnnnnnnnnnnnnnnnnnnnnnnnnnnnnnnnnnnnnnnnnnnnnnnnnnnnnnnnnnnnnnnnnnnnnnnnnnnnnnnnnnnnnnnnnnnnnnnnnnnnnnnnnnnnnnnnnnnnnnnnnnnnnnnnnnnnnnnnnnnnnnnnnnnnnnnnnnnnnnnnnnnnnnnnnnnnnnnnnnnnnnnnnnnnnnnnnnnnnnnnnnnnnnnnnnnnnnnnnnnnnnnnnnnnnnnnnnnnnnnnnnnnnnnnnnnnnnnnnnnnnnnnnnnnnnnnnnnnnnnnnnnnnnnnnnnnnnnnnnnnnnnnnnnnnnaaccaagggttaacccttaaaaattttaatttgcggggaaaaatttttttgggnaaaattttnccccaaaaaaacccccaaagaaaaccccccaaaattttttttttttggggggggcccccccctttttttt

SEQ ID NO: 77823 - DNA, 450 bp, Arabidopsis thaliana landsberg
aatggcaagagaaaaggaaaagcttattaacatacatgcaaacaattatattcaaatcacatgaggtttgatttcattctaactttttccattttaagaaataatatatttcgctggcatttatcctttataggtttttccaaatttgacaacaattcaaaaaagaaaatgactatacggctgaagacaatcgacatctcaaactcaaaacgaccaagacctttacatgcacttatgcactcgtccaaaaactcgtgccattgtgaatgaaaacacacgtatcactatgtgttttgtcaataaaatcactctttcaaatataataaacatttttcaatatttcttcttctataaatgttccgaatattgagttatagcatttatcgagttaggactggttatgaaaaaatgaatcacatatagatattactctaatatgtaaaatcaaaa

SEQ ID NO: 77824 - DNA, 296 bp, Arabidopsis thaliana landsberg
  unsure (1)..(296): unsure at all n locations
atgacgctcgatggcggatccttggacacgatgttgggctcacgccaactggcagggtaaaagcttcattcnnnnnnnnnnnnnnnnnnnnaacatagggccgaccaacctacgttnnnnnnnnnnnnnnnnnnnnnnnnnnnnnnnnnnnnnncgaccatactaggccaaatgaggcgacatacggcttctatccagaaaactgacctagtacgcaagctctacttgccatagatgttgataggagtaatcaacccgatgagcgacgcatgcccgtaccaggtccttaagaggtg

SEQ ID NO: 77825 - DNA, 444 bp, Arabidopsis thaliana landsberg
  unsure (1)..(444): unsure at all n locations
cccgactcgctgatggcacaaaacggccaggctcagctccaatctttcgctgacgtttagctttgacgaggagggccaaacggacgggaccagcgagacctgcggcttgcattgcaagggcgaattctatcgcgtgcccaaccacgacgaaaggcgcatcggaggcgcgtcgatcttcttgaccaccaagacgcccagcttttggggctgcgcgaatgataacgaccannnnnnnnnnnnnnnnnnnnnnnnnnnnnnnnnnnnnnnnnnatgagccttggggtgacaacgtccacagcccactgggtcaccctcttgtacaaaggcgatgacacgcatgccgtcttgactccttacacctacacgaccgacaacaagatgaccactgataccgtgccgatcacctcggatggcctgaccgactgcttttaaccgcaagacgac

SEQ ID NO: 77826 - DNA, 449 bp, Arabidopsis thaliana landsberg
aaccggcattagcttggggagagttgcgctgtatcggggccactactcttgatgagtatcgtgaattttttgttttagacaaagctcttgaaagacgttttcagacggtgtttgtggatgaacccacggtggaatgacaccatcacgattttgcggggcttaaaaaacaaatacgaagtgcaccacggtgttcgcatgaccgacgacgctttgatttccgcggcgaaattatccaaccgctacatcaccaatcgcttcttgccggacaaggccattgacttgatcgatgaagcggcggccaaactcggtatcgagatcaatagcgttcccgccgaagtcgacgagatcaagcgcaagatcatgcaattgcagattgagcgttacgccgttcacaaagagcgcaaggatgacccgtgcatcaaggacattgattaaactttagaagggtt

SEQ ID NO: 77827 - DNA, 571 bp, Arabidopsis thaliana landsberg
cattcacgcgcgcatcccaacacgcatctggtcatgcacggatcgtcgtcggtgccgcaggaatggctcatgatcatcaacgaatacggcggcgacatcggcgagacctacggcgtaccggtggaggagatcgtgcagggcatccgccacggcgtgcgcaaggtcaatatcgacaccgatctgcgcatggcaaccaccggcgccattcgtcgcttcctgggccaggacgagcacagacgcgagtttgacccgcgcaaattcctgcaggcaaccatgctcgccatgaaggatatctgcaaggcacgctacgaagctttcggctcagccgggcaggccggtaaaataagcgtggtctcggtcgagcgcatggccgagcgctacaagcgcggcgagctggacgctattgtccgctgaaaactcttttcaaaatcatgtgcttatggcatgattcgcgcgcgccggacgctaacaaaggctaggacaaggaaaaaaccaacgtgagtcaaccattgctacaaagcagcatcttcagcctgcccctgatcagccagggcaaggtgcgcgacatcta

SEQ ID NO: 77828 - DNA, 563 bp, Arabidopsis thaliana landsberg
  unsure (1)..(563): unsure at all n locations
accgttgcgggacgttttacaagcctccgcccccggcgccgaaccctatattaaggtgggcgaccaagtggagtccggccaggttgtctgcattgtggaagcgatgaagctaatgaatgagattgagtcggatgtggctggagaagtggtaaaacgcatggtcgcgagcggacagcccgtggaatacggtcagtctctttttgctattcgcccgcgctaagctgtgacctgcgcgcgggtcttttgattcgtaaactccccagagttcaacaccttcactgagttgaggtttatgttccgaaaagttcttatcgctaaccgcggcgaannnnnnnnnnnnnnnnnnnnnnnnnncaaggaaatgggcattcgtacagtcgcgatctacagcgaggcagatcgaaattctcttcacgtacgctttgccgacgaagccatctgcattgggccaccgcgctccgcggacagctacctgaacgttcctgccgtaatcagcgctgcggaaattgctgatgtggatgccatacatgccggctacggcttgttaagcgagaatgcgaatt

SEQ ID NO: 77829 - DNA, 531 bp, Arabidopsis thaliana landsberg
aggtagaacacaaaaaatgtcgagctttaattaccgattgagaaaaattgaacatataaattaaagatgaccaagaattttaacatttgtttaggttcatctaagaatttttagaatgaatgaattaacgaccacaaattaaaatcagtgtagatagtatcagagtcagcttttgggaatacacctcctcccaaagggtagtaaactagaggcacaatgaaaccaactccaagtactaaaccactagagtaccacacctttggatgggatggttattattaaagaggtaaaattgatattacaatagtaaaaattaaactagtgtaaagaagagggaatggtaatatcaatgctactcattctatactaaattaataacctcttatctaaatgtgattcccatcttgtttccttaataggaagtttttattatctttcagataatctaacgaaatatccttgcatgaactaggtggtcttcaaaacaggtagtatacatgaaaaaatccaagattatagataggaaaacat

SEQ ID NO: 77830 - DNA, 574 bp, Arabidopsis thaliana landsberg
  unsure (1)..(574): unsure at all n locations
tttccatcgccgagggcccggacgtcgagacggactactacaacttcacggcgctgaacttccccgagggccatccggtccgcgagatgcacgacacgttcttcttccccgccgacgagagcggcgagcgcaaggtgctgcgcacgcacacctcgcccgtgcaggtgcgcaccatggaggcgcagaagccgccgatccgcatcatcatccccggcaagacctaccggcaggacagtgacgcgacgcattnnnnnnnnnnnnnnnnnnnnnnnnnnnnnnnnnnnnnnnnnnnnnnnnnnnnnnnnnnnnnnnnnnnnnnnnnnnnnnnnnnnnnnnnnnnnnnnnnngaggtcgacagcgtcaccatgcgcttccgcccgtccttctttcccttcaccgagccgtccttcgaggtcgacatccagtgcgaccgctcgtccggcccgatcgtcaagttcggcgagggcaccgactggatggaaatccttggctgcggcatggtccatccgaacgtgctgcgcgccggcgggctggatcccgacgaatatcaaggctttgcctggggcatgggcct

SEQ ID NO: 77831 - DNA, 617 bp, Arabidopsis thaliana landsberg
  unsure (1)..(617): unsure at all n locations
gcttctttcagcgttttgttggtgatgagcttggtattgatcaggtaacggtaaattttagagaagttattgctcaatccgtcagccttcacgttctcttcgagccaaaccacacaatcgttttggttaccgcgttggtaaacggcattgaaaacctcggtcttgttggcaaactggtgcaggctcaatcccgatttctccaatcgcatctgcacttcttcccacttgagcagtttttgcgatttgccatcctgcgtgaaataatggtcgtcttcataagccgactcataacggtaatactcgaggtcgccatcggtattgcgtttgacgaggatactgtaaaccgatagacgtttacggatctcgaaaacgatataactctggttatgggtggggaaatagtggtgaacagtttccttatcgccacgcctgttacccgagaagctcatttttgtcccgtcaatgatgaannnnnnnnnnnnnnnnnnnnnnnnnnnnnnnnnnnnaacgttgttggggccgaccagttgcagcgaatcacagttgtcaaggcgggatctcgctttaccgtacaccttgctgttgaggatcatgatgcgacttancatattttcagt

SEQ ID NO: 77832 - DNA, 305 bp, Arabidopsis thaliana landsberg
  unsure (1)..(305): unsure at all n locations
cttatatttnnnnnnnnnnnnnnnnnnnnnnnnnnnnnnnnnnnnntctgcggttctacgaatccggctaccgaatatagaatcattgccccttttttgcatcgcatgctgtgaggattatgtgggcaagaaaaaaatcaaagcactgctggatcaatgaactctcatgctcgcgcctcgaggcccatcgcaatgagggtaaatcatatgtctaaacacaccatcgcgtgtggaccacacatctttgtgccggctacgccgcatgtgggccaaagaatagattagaccagcgcgaagctgaaaaa

SEQ ID NO: 77833 - DNA, 593 bp, Arabidopsis thaliana landsberg
agggagccgacgccattccaggccgagcgcagcctccgcacctaccgcaccaacatggccaggttcctccctttcattaacatcctgccgacgacgacctcggaggagctccgtcgcgagagcccgttcttgtggctcgctatagtgtgcgttgcgtgcagttccgcgcggcaacagacagtgctggcggactcgataaaacagattgttgctaggaagatggtggtcgagagcgagaagagcctcgacaccctgctcggtatcttggtgttcatgggttggtgagtgtttgttacctgggatcacaggctagcattctctaacatttgcccttgacggactttccccccaaaaagggcacatctcttcccaaaccagaggccgtttctatgcctcttttcgagcatggccatgtcgttggtacacgacctcagcctcaacaggctccacgctgagccgtcaatccttctttgttttaccacggcctcattctccaagccgagcagcgtctcgaaagagcgcactatggaggagcgacgtgcggtcctcagttgcttcctggtggtgtcatagtctgtccttgccccatatgc

SEQ ID NO: 77834 - DNA, 536 bp, Arabidopsis thaliana landsberg
cctgggaaaaatggccatcaaaagcaaaaaaccatttggtgtaagtgattccgaaaacaccccgctaacaatcacttgtcctgaacaagttaaactagcaattctaccatatggtctgacttttcctaactcttcaaattctatccaggtcattttccaggtccgcagcatagccgaagcaaaacaggcaaaggcaagcggcgcagcgggcatcatcgcgaaaggcaatgaaggagccggtctggtgagcaacgattcgtccttcatcttgtttcaacgtataatgcgggaggttagcgatattccggtttgggtgcaaggcgggataggcgtccacaatgcagcggcgattacggcccttggcgggcgcggcgtggtgctcgacagccagttgcttcctttccccgaatgttctgctccgacttcgcttaaaacgatcagtgagaaactgaacggcaacgaaacccgcgtgatcgacggctttcgcgtactcgtgaggccaaacttacccgcattggccgcgcagcctgctcgcg

SEQ ID NO: 77835 - DNA, 440 bp, Arabidopsis thaliana landsberg
  unsure (1)..(440): unsure at all n locations
cacgccggcctgtccctcttcactcagcagtgcgaggcccgatgccttgccgtcaggccctggtgcgacccggcaggggctggtactacaatagtcggcttatccgacacgcgacagggaaaaaatgggacgaacccgcctcgaggccttcagcgacggcgtgctggccatcatcatcaccatcatggnnnnnnnnnnnnnnnnnnnnnnnnnnnnnnnnnnnnnnnnnnngctggaagtgctgcccgtattcctgagctatgtcctcagcttcgtctacgtcggcgtctactggaccaaccatcaccacatgctgcacatggccgaaaaagtcagtggcggcgtgctgtggagcaacctgcatttgctgttctggctgtcgctgctgccctttacgacccgctggaatggcgagaaccattttggcgggccgaccatgt

SEQ ID NO: 77836 - DNA, 161 bp, Arabidopsis thaliana landsberg
aaaaaaaagaaggccaagagaagcacaagaacaacaaagaaacggaagaaaaccgggggcaagagaacggaacaataaagacaaagccatagggtgaacaacggaccataattacaaaacaaaaaaagaagaagaggcaaaaaatggatgaacaaaaagga

SEQ ID NO: 77837 - DNA, 520 bp, Arabidopsis thaliana landsberg
  unsure (1)..(520): unsure at all n locations
ctgaggcannnnnnnnnnnnnnnnnnnnnnnnnnnnnnnnnnnnnnnnnnnnnnnnnnnnnnnnnnnnccttcctgatgacccgaaaggtgttgcccttgtcgtggctgacaagattcttgacgttttccagcaggaacgcggtcgggcgcttctcggcgatgatccgcgccacgtcgaaaaacagagttccctgcgtttcgtcggcgaagccatgggcgcgccccagcgcgttcttcttgctcacgccggcgatgctgaaaggctggcaggggaagccggccaggagtacgtcgtggtcgggtatgtcgcgcgcatcaaccttggtgatgtcgccttctagcgcatgcgccgcctcgggaaaattggccagataggttttctgcgcgtaggggttccactcgctggtgaatacacatcgcccgccgtgagtctcgaaggccatgcggatgccgccgatgccagcgaacaagtcgataaaagcgtaatcgcagactacttgtgcattgagattttccaaa

SEQ ID NO: 77838 - DNA, 561 bp, Arabidopsis thaliana landsberg
  unsure (1)..(561): unsure at all n locations
ccccctccaagacggataatgccaataagaaatttccggttttggtgttagagaatatcaaggtaaacaactggttttggtagataatatcagaagaaacagtgagcttaaagcaggacaagacccctcaactttggtttcagatatgacccatggagaagaaaacagcggtgtgcgttttaataaatacaaattgggcgcccaggatgatccaaattacagaagtaccagctggatgatctaccggttgacgatgatttattacgctaaagcagaggcggaaatgcgcctaaatggcaataaggcgacacaagatgcgnnnnnnnnnnnnnnnnnagtccgaaagcgtgattttgatccgaaggtctggccttctaagaaatatacaactgccaactttacaatggattctttgctggcggaaagagggcgtgagtttatttttgaaggataccgcagacaggatctaatccgggttggcaaattcacaacaggtacctggtgggatcataagccactcaatgataaaaataaattactgtttgcaatcccgattgagca

SEQ ID NO: 77839 - DNA, 507 bp, Arabidopsis thaliana landsberg
cggcgtggccgatggtccgtttgaactggcggtcgatgcgcccgcgctcaatatttcgcccgcgtccgccaccggcgaggcgctgaccggccgcgtgcgcatcagcggcctggacgccagcttcggcctgaacggcatcagcggcaatgccggcgaactggacatcaaggaagccaaactggacagcacgtccaagaagggcgaacgggtggtgaagctgaattttgcgtcgccgctcagcctgaatctcttgatgcgcagcggcgccatgtccgcgctgcgtggcgacgtaaacatcaccgatccgggcctgcccaagggcagcctccagatcccggtgattggcagcctgacggtggacctgctcaaggatcaggccaccagcaagatcaacgcggtgctggaaggcggcaagttcgacctgagcgccgacatcaccaaactgtccgacacgccgcagatgaatgttgcgctggccgtggacacgctggacctggacaagctggt

SEQ ID NO: 77840 - DNA, 539 bp, Arabidopsis thaliana landsberg
  unsure (1)..(539): unsure at all n locations
caccaagtttttcaggtttactacattatggaatcttttatatgatttttctattggaaaatgagtgtttttgttggatttttttgcattgtactgatctgtgctatccatttcctttgttttccaggctggtctctcgcaagaatctccatctgtagatggtttgcaagaatatgcaagcacagtgattgagaaaagtattgagagcttatatgcatgcggaggttgattactacattatgtgttcctattatttgaaggttcatgcagttatcatatagctaggatacctcctattcatatcagaattttgagttaatatagctaggacacctcttattaatattagaattttaaattgaaatagatatgatacctgtttgttctatgtgcttttaagattcacattacttcagaattttggtttgcttttaataccaaaatgctacgagttgacccaatgaaatacacttaatcattttcttatttgatcatatngtctctacagngcatgaaagagacgtgagatcaactttatt

SEQ ID NO: 77841 - DNA, 571 bp, Arabidopsis thaliana landsberg
  unsure (1)..(571): unsure at all n locations
gcgccggcgcgcgccagacgtgcagcacctgctcttctccttttacggggccgggccggcgcatcagcaacacttgggcctccgcgcccagcgtcgccggcagcacggcctgcgcggacggcgcgcggtcgtcgtccaacaggcccagcacgtcgagccaagtcggctgctgctgctcgcgccagccgcgcgcgacgagtgcgccgcgcagggcatcgagcgggccggccacctgcaggtccagcggccagcgccgcccgctgctgcgctcgttgcgccgcgcgggcaacacgcgccagccttcgccgtcccaccacgacgacgcggcgatcgtccgcgtcggcgccggcgattcgaaacgcaccagcaacggtgccgcggcatgccccgcatgccacgcgccggcgatcgcnnnnnnnnnnnnnnnnnnnnnnnnnnnngggcgcatgtcgagcggccgcgacacatggctccggtaggcgatgcccagtgccagcagccacgagatgccgagcaggacgccgccgacgatgtcgctcagccagtgcgcgccgagatacaggcgcgcgaa

SEQ ID NO: 77842 - DNA, 384 bp, Arabidopsis thaliana landsberg
cgcaagtcgacttttttgacctctaccaggacagcggggtacctttcgagccttgacgttgtggaccgcttcctgcacaacacgggcgtccagctgatggtcgacatcatgaacgcgccctgggtgatgacgttggggatgtacttgatcggcgacggcgtccatgacttccacggtgccaacacctcgttgttcggctggatcggtttgggggatctcggtgacggtgggttcctgttccgtgactgcggcgaccgcgccgccggcgtagccgtgatcaacgactgcgcgggctgtgacggaggcgatgctggatcgttcagcaacggcagtgccggcgggcagggcgccacgggctatctaggcgccgacgaacaatgatcg

SEQ ID NO: 77843 - DNA, 551 bp, Arabidopsis thaliana landsberg
tttcatcagagccatcttcttctttcttaccagccacgtcatccttattggcatccttcttatcaacagaagtatcaagaatgttaattgttggaaatacttcgtcttccttagcaaaggtcatctcttcaagtccatacgggtcaatgctacccagtggtggatcgtcctacaataaacagcatcattagttaggttattaaaaaagttcttactttctcttccaaaagatgctccttagggaaaaaccaaaaccagtaaagagaaaataatacaatgagtaggctagttaggtttcctggtagtcaattttgataaacacagataaaaatattggagatagtcaaattaattgagaatttcttcagaaaaggtaaagccatgagccaccaagcaagatgacacacacaaatgattccactcacgacttggaagtcaggtggacacctgaatcctcactaaaatagtagaaactgggaaagaatggttgatttggtggacaaaacaaagccttacctgaggaacccatactctacgagctctgtcccatt

SEQ ID NO: 77844 - DNA, 200 bp, Arabidopsis thaliana landsberg
  unsure (1)..(200): unsure at all n locations
aaggaagaaaacaaaagnncggcaacaccagcancnncgacnaccgaggaagaagacaagaaaggcaaaacacganacagcacaagaccggaggagaagcaagcacnagggacagaagagagaggaaaancaaagggcagaaaaaccaaaacagaagagganaagacagcaaccacgngggaggaagaagaagaagaagc

SEQ ID NO: 77845 - DNA, 397 bp, Arabidopsis thaliana landsberg
ccgtggccgaggcggcgctcggccggatcgagaggcacaatcccatgctcggggccttcaccgatgtcacggcgcggcgggcgatcgatgcggccgagctggtcgacggcaagatcgccaacgggctcgaccccgggccgctggcgggcgtgccctatgcggtgaagaacctctacgacatcaaggacgtggtgacgcgggcgggctcgaagatcaaccgcgacaacccggcggcgcgacgcgatgcgacgctggtggggaagctcgatgccgccggcggcgtgctggtgggcgcgctcaacatggacgaatacgcctacggcttcgtcggcgagaacgtgcatgacgggccctcgcgcaacccgcatgcgctcgaccacatgacaggcggctcgtc

SEQ ID NO: 77846 - DNA, 585 bp, Arabidopsis thaliana landsberg
aaaaaaagcaaaatatcataaactccgcgttgagatcattacgtcagagattgggcaataatatattgtatccaagaaataaagacgaggataatctgaagatcggaaccaccattgaaccagaaatgtggtggacaaagaacccaagtgaggacgaaaatacgaccaaatggtacatcaatggccatgcgtggaggaataaccatcaccatagtgaacgaaaccatcaaaaaaagagccatgagagcccatggagatgaataaacagtacatcgcatgtgttttagaaagacacatagagccacgatgatgatgatcgacaaagaatctaaaggggcgaggttggttataaacaatgaccacttgcattttgagacgtacattactttatttacgataagaatgatataaaaatcctaaattgaaatacaaatacatcgaacctatctatgatttaatcctgtttttaaatgttatgaaactacggctaacatctgcgatatagacatgatacgtgcagcatattcagattacacaatgaaactctcactcgcaaataacgtattataaggtaaagaatgagtg

SEQ ID NO: 77847 - DNA, 394 bp, Arabidopsis thaliana landsberg
  unsure (1)..(394): unsure at all n locations
aagaagaaaggatgtgagcttctaaccncgaggagccnacanccggggagagttanataagcncnnggcccaccccagccacnaagagcncgnnnnccagcannnggaaaaccagnnncnacaanncggncaggaaggggganagnnggagaacggnacngccccccnangnnngngaaggagaaccgcagcggaagncaacaaangaggaagncaangnncnanaggaacacacnancccaanacngggaacgaannnaccanngcggaaacaangancnngangaaaacaangangaaaacgaagaagaagnngngagagnagaggcnaacgncgngagagaggccaaccangnngaaggganggaggcggnnaagggagagaaagaagggc

SEQ ID NO: 77848 - DNA, 482 bp, Arabidopsis thaliana landsberg
actggggttggttgattacataatacgctagctggtggcgtcttctgctgaacagagatcgcgctcgctgagtggagacagcccgttttatccccggtacgattggctgaaccgaaaaccgacaacctaaacccatcacctatcccaccatagatcctgaggctctcagggggaaattggtagtttggcagtggtagtttaggaccctgtcgacgatccgaacccacccccggacccgtcccgcattttcactggccagccctataacccctaactggtagtttggcccagactaccaaggtaatacttggtaggtgatgataatgtctcattgactgaagctccttctatcaagctcacttggagaacagcatgttcctccgccacaagaaatggccattgcgggactcagggttaccaattaccatagaatagaataataggtagaagatttgttaaccatatccgtactcttagccaca

SEQ ID NO: 77849 - DNA, 372 bp, Arabidopsis thaliana landsberg
  unsure (1)..(372): unsure at all n locations
aaagcnaagaaccaggagcaaatgagggatgaaacacaaggccgccgccgaaaagccaaacacgcggggacaagaacacaaacgnncaanaggacaaccccacgccaagnaaagagaaaaagaaaaccggcgagcggggcggaaaccgcccaggaacccccgaccaggacnggaaaacggcgaggggaaaaaancggacccgaggaacccgcgagaaaagcccaccggggccgaggaaccgacgagaaaagagnaccgggaccgaggaacgggcgaccaggagaggaaaccgccgagaaaaanacagcgggaccgaggaaccgccgaccaggacgaggaaacggcgaccggggccgaggaacngccaaccag

SEQ ID NO: 77850 - DNA, 564 bp, Arabidopsis thaliana landsberg
aacttctattccattttcatgagctttattggccattctaatgaagagaatccccactggcataagaaagcccatgtaaacccataagagaatgccatgaagctttatgctatttatcatttgatgactcaactgccatataaatttaagataatataaatatgtgtaaatttagagtagtaaaaatcgtattatgtaatatataaaggacgaaaaaagagtaatatgaaagcttttattattggaaacaagataccatacagaaggaagaagtaataccttatcttgttctagggatcctttagacttgagattgcttggtgaatggatatcaatggtgacttcaagagatgagcaaatgacacattgtggagtagaagtaagatagaagagaatagaaatcataacagtccagagagatttagagattttcattctgatctcaatctcaatagctaattaaccacacacacacgaagagtctcagagcacacaatccactctagagattgccctttggatctatctttcgtctctgtctctaaatcagttcaatatcaattc

SEQ ID NO: 77851 - DNA, 620 bp, Arabidopsis thaliana landsberg
ttttctattttttaaatctaaaaactaaaattgtaaaaatatcgattttgaatatttttttttttttttttttttttgtttgcataaaacccattatttttgatccacgtgagacacgttggtggagactagttcttttgcatggtcaaatcgtttagctgtttcaaagaattaaaaaataattaagtaaaaaagtctttttgatttatatattacgaccactattaaaaaagtaatgaatgaaaaaccataaagaaccctaaaaaaaaggtctttaataaaacgcaacaaacgaaaaaactgaagctcttgaaatttcctctcttcttcttttgcttgagctttaggttttgagagcaaagaaaaacgaagacgcgtcaaaggtgaaagtcaataatcatttctctgattccgattttcttctccattgatgcttctgattatttattccttctgggtttcgtttcaaccttgtgaaatttttgtcggctgcttctaatttcttcaatttctctcccaaatttcgtcttttttaagttatctatttcatgggtttatgtgggtctttaaaaccctaacttaatcatgtttgtgagtgtaaaagtttgatctttttgcct

SEQ ID NO: 77852 - DNA, 609 bp, Arabidopsis thaliana landsberg
  unsure (1)..(609): unsure at all n locations
atctctgttccttgtttttgtctgtgattcttcttaatgaaaacaaaaactgtaaaaataaaatatttacttctggtgattggttccttttattcttggtctttacagtgttttcttctaatttcatggtttcttgtctctctcttttttatcgagaaaaaaactacatctatctctgtaacactgtatgtatatacttcagactctgttttaatctctgtttttttttacctctctggtttctgaaactttgtaatagaagaaactagaacaacaacattttttacttcactgtttcaaagttttgatttttatttttaataatattaacccaaaacaccatcatcatggttttgttttctggattttctccatttaatgcaatctgacattttcttataattattttttgtttgtacttatttttctttcatcctcatgattttgcaggtagaataaggccaaggaagggatcagttttaagttttgtttcattctttttgtagtggagaaaaagagtntttgaaaatcaaaacaacaaaaaatgccgattaggcaaatgaaagatagctctgagactcacttangtatcaaaccccacctttaaag

SEQ ID NO: 77853 - DNA, 398 bp, Arabidopsis thaliana landsberg
  unsure (1)..(398): unsure at all n locations
cagagatacaggacacgaccaggagagaggccatcaacccgaacccacccgaccgcaagccctccctcgcaccaggcgacagagaggaccaccggcaggatccgcaccaacacacaccgcggacgagcccagagacccagcagggggaccgacagaagcaccgaaccgagccgaagcaccaaaagagcnggcgcagcccccacccaacccgaaggagaaacagggcgaccagaagaacgacagcgacaaacacaagagcgccaggaacgccaaaacaacacaaacccgccgcggncgaggggcccccagcgggcgacgaagcagaccgcccgcacccaccaccggcgccaagcaagaggacgagccccccaccggaccgagaagagcccacagacaga

SEQ ID NO: 77854 - DNA, 526 bp, Arabidopsis thaliana landsberg
  unsure (1)..(526): unsure at all n locations
caaccccaagttcttttccgacagcgttttcttctgtcttttgctctttgtggtttactccttcttccggtttggatttcccgagctagtaaagaagggatccagtagcagaagctgaagctaaacccaatcatagagaaagctctctgaacaaaaggttcagtttttctctctttcttcaaaactgaaatcttgtttgtgtgattcattcactaataagtcgtcattctttcttctccttctgatttctgtgtactttttctctgtcagacattttctgggtttgttttaattaaaaagaaatggccgattcgaccaaagtaaggctagttcgttgcccannnnnnnnnnnnnnnnnnnnnnnnnnnnnnnnnnnnnnnnnnnnnnnnnnnnnnnnnnnnnnnnnnnnnnnnnnnnnnnncttctcttaacgtttttgagtttcaaccagagatgcccaattttgtaggatttgatgattggtgcttttgagggaatcaatgcacagaatctttttttttagttc

SEQ ID NO: 77855 - DNA, 460 bp, Arabidopsis thaliana landsberg
tgccgcctgcaagctcggcggccagcccgatcgccgccgccgccaccaccatcgcccgccactccgtccttcgcatccgtgtcgccatatcggcctccgcccgccgttatgcgccagcccccacgccccggcaagccggccgcgggcgctttctttcccccgccccccctactaccatccctttccaactagaaggagcaggaaacacccgacccatggacgaccgcaccaccaccaccgcccatccctacgccaactccgaagccgccttcctcaaggcccgccaggtcatgcccggcggcgtctccagccctgtccgcgccttcaaggccgtcggcggcacccccctgttcatcaaggaaggcgaaggcgccatcctcaaggacgtcgacggcaacacctacgtggactacgtcgccagctacggcccgatgatcgtcgggcacgccaacgagcaggt

SEQ ID NO: 77856 - DNA, 487 bp, Arabidopsis thaliana landsberg
cactggtggggcggcaatctgtggggggcaaaacagtaccctgtgcggctctcgattgttaaccgtctcgtctactccgcgcacgagtacccgcccagcgtcttcatgcagccgtggttctctaccggcgactaccccaacgacttgccgggcgtgtggcacgacaactggggctatttgctcggcgaaggcaccgcgcccgtttggctcggcgaattcggcacaaagctccaaaccgacgcggacaaacgctggctgaatacgctcgcgagctacatcacgcagcagtccatgaatttcgcttactggtgctggaacccggactcgggcgacacgggcggcatactgcaagacgatcggacctcggtgaacacggccaaacaggcggtgatcacgccgctgctcgcgccgacaattccttgacgcgcgcatcctcccgagctgactgaccgttgttcagcgcacctggaccgtgatgaccggggtg

SEQ ID NO: 77857 - DNA, 474 bp, Arabidopsis thaliana landsberg
ccaaccgggattagctaagattgaaaacataattacaaattgagatgaatagattcaaagaacaaaaaagataaattataaaaataattaaagataaaattttctaatatctgaacaactttttgaattttttttttaacaaaaaaaaatctgaaaaggaaaattcttaattgttagtaaatgttttatcatatagtaccactagttgattttaaaatcccattatttgtttgttatatacttatataataaacataaattgatttgacatattataactatttcataaagacataaaaaataacttcacatatcatttggtaataaaatctataatcagaatctatttatgagattaagagaaaacaaattcaaaaaaagcagattccttttttttaacccaaaagctttttatattttccttacttgttcattggtaaccaaattaaaagatttgtaaagaaaaaggcaatt

SEQ ID NO: 77858 - DNA, 366 bp, Arabidopsis thaliana landsberg
cacttatttaataatcaatgattgaaaaaattttcgttcttgatgcaatgctgctcgaattttgatatggggaatttaacaagcaaaaaaagcttacgactcgaactctattttggtcattcaagttgattcctatgtatacttgcttatacaatgaagaataaaagttgtttgtagatgatgatcacacactgtcgtttgaattttgatatctgaaatctaaaaagtacataaagcttagaacttgaactcacatttagcaaattgaacctaatgatgcgtaatacttaacgcattttattcgcttgacttgaattaggaacaacttgtttccctttttatgctgctattgagataaaattgttt

SEQ ID NO: 77859 - DNA, 122 bp, Arabidopsis thaliana landsberg
gcagggggggggaaagccacactgtgtttaaatataaaccatgtaactatgcacacgataaaaataaataatcatgaacggggaatctgtaagcttacataagcggaaatacaatgggtgta

SEQ ID NO: 77860 - DNA, 552 bp, Arabidopsis thaliana landsberg
tatctgtttaaacattcatattggatgggaataaatgaatgactaacgtatgtgtcagaaaaacttttaattatcaattgatagttaggatttaggacaatacataatgaatgtttttccgttacatatcaccttacgtttggacaccacctcttaacttattatgtttaatttatattccaactaaaaatattcattacaaattttagcataaacatcaaatactaaaaataaagaaaatgaaaaagcttgattaataatttttttttggtattgtttgattaataaatatgtactttaattaataagactatggtgacatgtcccagtcctatggctcattaacagttttatacttttgaggaggcaagacgtggaaaccgctcttcttctccaccaaaaacttcttcttccttcgatgtctctctcatctgttacatatcacaatcttttgctttaaattgagatccttcttcaaagccgtatctctttctctagtgtaattctcctctgaaattcaaccttagttggtctctctcgttctgggtttct

SEQ ID NO: 77861 - DNA, 465 bp, Arabidopsis thaliana landsberg
gggttgctatataatgagatacaccaaccatccaataatggatgttacttgatcgaaccacagatacgcaatacttgagggatcctataccagaacccatgcgcgataacgacagtcttactgtaactggttagccaggagctttacgctcacacattcttccagcatgccggccatttcgggtgatcgcacttcgacctgatgctatcagtgtaggtgagaaccatgcggcatacagggtatgaagagcattactgccgatacaattctgattcccatgagacgatattccatatcgtctagctctacggtgataacgaaaactggatctgtacgtgttatagcagctggagctaatcctgaaattccatgtgtactgcagatccggacgtgatagtgtctcttcatccagctacttgtaatgggatggactaagaccgcgtgtatatacataggattactggt

SEQ ID NO: 77862 - DNA, 610 bp, Arabidopsis thaliana landsberg
  unsure (1)..(610): unsure at all n locations
atgccctttcacttcacagctcgactctttatgatctcgtgccaatctttctctgtttttttttaaacgaaacttatatggtgtggaccgtaccatttatccgatacgccaaaaactatagttacctgtcttctacgtttttaactaaattcacgcatttgacaaaagaaaaaaaaaatcacgcacatttgatgtatattataagtatgatcacacacgtagtcactaagtgggaataaattttaaaaagaaagtggtaataaattatatattatatacatacttgaataatcggagaaatcgacgaaagtatgttgatatgattgaaatgatattaaataaatactaatttttctgcatgatatcagatataataataccatttaaaaaatcataagcatcatgttttctatattcttagccgcagaaacctagccaaattatctagtgttaatccatcagttgatacgtttctatattaatctcgcagttaaaaaaaaatcctntaacattctttttgaagtaaaatatatttttcatctatgtggctatcgtttctttgatttggattagttaatttttgtttatctttggattacgaaaataaagg

SEQ ID NO: 77863 - DNA, 447 bp, Arabidopsis thaliana landsberg
cgaaaaggcttcgcctttggtgacgaagccgtttgcattggtttcagcggccgagatttaaaggggaagggcgctcagggctttatgctgccggccattttcatcgaaattggccggatcgagccaggcttccagtcggtcgcgcacctgcggccattcctcgacaatcaccgaataccaagccgtatcgcggcggccttcgcgtgccacctgcgcattgcggaagacgccttcgaagctaaagcccagtcgcagggcggccaggctggacggcagattaagctggttgcacttccattcgtaccggcgataaccgggatcgaaggcgtgcttcatcatcaggtacattgcctctgtcgcaacggtggagcgttgcagggcgggtgaaaaggtgacgccgccaacctcgacactgccatgcgccaggatcgtaacgcatgaagctgg

SEQ ID NO: 77864 - DNA, 479 bp, Arabidopsis thaliana landsberg
ccaagaccagacgtcaaagtgtcagaaaccactctgtcttttatttcccaataaaaatccaaaaattatcagtttgggcaaattccaaagtcactttctcttttcttttgtttttcaactttaaaaattttaatatctgaatttcgaaacgagaccacaaaatcccgctcacgcagtcacgctcctcctatttcaacacacactctcttcgctgttgtagatcattctcattctctatattcgattttctgtgacaaaggtatcacatcattttacacgtctctcgtttggatcgatgtttatttatttttgttgttcgtaatttgaggttttttgtttgtagatctgtttttctctctgttcttatttttctaaatgtttgtggtttttttttctctctgttttgtttgtatgtttatgtttcagacaatgatttgatcacggaaacatataccgaattcagacaatgatttgatcat

SEQ ID NO: 77865 - DNA, 658 bp, Arabidopsis thaliana landsberg
tttaagtgccaataatgagtttgacctatgaaacaaaatgattgattttctttgacttcagaattcatgattaggcttgatttatctactaaaaatcgtcgagactgaaaattcatttacgaaattgatgctaccgagtcaatgttaagttatagtcaaccattttggccgtcaaagaaggcctcttcctcaattagtcgcgtatgttttaagcaaaaaacgattattactaatttactataaatatgaaattaaaaataaacttgtaccattttgggtttgacgctagtcaataagcaaaattaaatgattagaggatgaatttaacgattccatttattttcttccatctgtgtagacttaaagaaatacgttaaaccaatatatacacatagatataaaaattttttgatcaaaacacatagatatataaaaaacttgttttggttacagaaagtttcaaaagttattttaggtttcagttcaaaacttaagaaagagacaaggccacatgtcgcgtgaccatgaaacaatacatattggtgtcacttttagtttggtccattcattaatgcaatggtttgtaccgttcctaaaatcaaagctataaaccaattcgaacgggttcaaattaactccatatttcccattacctttg

SEQ ID NO: 77866 - DNA, 594 bp, Arabidopsis thaliana landsberg
ggcctttcaccgaagtgcccgcatttaccagttgcatgttatttggcgctgcagcagctaaatcctgtaactctgtggtcaaggcgtcgtagttgtgatagtcctcgtcggcgtcattttcgaccgtagattttagcggcgtttcttgcaagctgacagggtcaacaaaaccctgcgcgatgtcgatagcgttgagctcaacaagacgggcgcgctcatggttcgagagttgtgcgagattgtctgccgtgagatatcccaaggcaaagtctttgagatgagcgtgatcacggttgaaacccgtcgcttgcacccattgttgggtaagcatgtcgagtggaacccgaacgtaagcgagatcagctgcagcctcgatggattgttcgctggatgtggagcgcggtgtttgcccacatgccgtcattaaagctgcgcccattaagaaatgaaatcgattcatgccatgttcccctttttgagtaaccccactgcgatttccttaaccttaacaggttttacagccgtagcgttggacttctgcctgttcttttggtcttttcttttaagagccgtaacgacgacgtctgagaattt

SEQ ID NO: 77867 - DNA, 535 bp, Arabidopsis thaliana landsberg
  unsure (1)..(535): unsure at all n locations
tataccattaacgtcgccggctctaaagtgtttgcctttaggccaacccacagcgtttcaggaccttttctcagagncaccgaccgggaaagtcgcagcttgaacgtagtcagcatgaagcaacaacactgacacagnnnnnnnnnnnnnnnnnnnnnnnnnnnnnnnngatgcactgtctcttcccttggccattgatcgatcttaggtgaaagtttagagaaagagagagaaactatagagagtgatgaggatgaattggagagtaaatgtacaaagggtttttaaagaagaagaaaataaggcattcaatgtttttattttattaaattgggtgtctcaacaacccatgatatatgttcatttattatttttggccacattgtctatgtaaatattgattatagacttaacttcggtttcttttgtctcattatatattgaagatagagcttggttttgacattgttacatacttgtgaaactaagttgaattttggttctttgttttgaaaatgcttatatcaactaaata

SEQ ID NO: 77868 - DNA, 513 bp, Arabidopsis thaliana landsberg
gagtaatgcttggctcttttgagctgtagttagaaaaaggtaagcaaaaaaaaaaatcaaggaaaaaataataaagatataaatgaaaccaatataatgtaagccatccagttgtttaacataacttcaaaagaatttatttaagtttaaaatttgaatacttagttaataatgcagaaaaatatttgaagactggaatctcatggttgcgcgagttctacgtaggacagactgtggatctgaattactaaaactaatcgtagttattaaaaaaaaaaactaagcaaaattttatgttttataggttgagatggtttcatttttaatgtaagggggttattgcttctatgaatttagtttcatttgaaatagttaaattctacaattaatctactatgtaaaaatattgcaagtgtttgtcgccttacaatgaaaagaggaggagattggggaccaaagagtgaagtcgatctaaaaagtagaatccattcagaatcgaacatatcattctga

SEQ ID NO: 77869 - DNA, 283 bp, Arabidopsis thaliana landsberg
ggaggcagccagagcacggagggagcgaataccacaaagcccacggaacacacaacacaggaacagcaccgaagaaagccaaacccaccaaggccaggaaaggaaaggacaagaaagccaacaccacgggcagcagaatcagaggacaaagacgacaggaggagggaaagaaaagcgagacggcaagagagcggaaggagcccaaaactgacaggagtggagaaccaaggccgaagccaacccactcatagaaaggaacgggaggagccccgggaaacacacg

SEQ ID NO: 77870 - DNA, 285 bp, Arabidopsis thaliana landsberg
tgttcccgtgagctaatggagatgagccttgccagctacctatctgcgataccccgcgctgcaacacaaaaactaggactaaactctgtttagcaacgaataatggcaggagcgcctcttcgatatctgtacagatagaacatcctagtgagacagactggttacggggcctcaccgaccatagaataaaatagaaagattatgggatacttacatccttaccagctagttcttggagcccgtggctacaaacatgcctgtaccagatcccgatggagagtgcca

SEQ ID NO: 77871 - DNA, 409 bp, Arabidopsis thaliana landsberg
tgagcacacaagattctatctctctactactacagagaccgaagctctgtcaagggatcttaccattctttttgactatcacatggaatttgatcataacttgatagatttttctggatgcatgcggacctcactgcaaatcttcattaatatgcatattccgattcggaaacgcccatattgagtcaagcatgacattaagactcatgaaaaagcttattaaggcagaggagtaacagagatgcacctcccaaaattggcatccatctatagataatgaattgacgacacaatgtctctgacttcgatgatgaacacagaggaaagctgttgacaatcggtccgtgccacacaagggaaagagaaactactatgtttaagagttttacaagacagtgagttggagttt

SEQ ID NO: 77872 - DNA, 603 bp, Arabidopsis thaliana landsberg
cgtcaacgttaatctatggaagtgaataacaagatttttgtttccttaattttattttaatttattatttagtttaaatatgatatgacatagcaaatttttattggatattacaaagagaggtgaataaaagggttcactcctatgagtgaactcaaattttattctattaaataattcgtagttttatgtagctaatagccaatacttagtaaaaaatttaattcataactaaaatatagccacaaaattgttacatatagaattcgtggttaattaaaagccacgaaatatccacgttttatttttgtcactacttcgtagttaatgtgaaattagccacaaatgttcatagctagaacatagctataagaatttttttttaccattatttttaaggtgaccacgttcaccatgtttctaaattttaatattcacaattttattttttaaaatatttttaaggtagtttaatttttgctcaacgacaaatatatttatttaactcttatgtttaccaaaaaaagtttatttattttacaatttttaaaacaaaacaaaatgaacacaacgtgggaaatggttttggcatgtggcaattta

SEQ ID NO: 77873 - DNA, 464 bp, Arabidopsis thaliana landsberg
ctgcttctttctttagcttggatatgttcttaattttagatttatttttttttttgctttgggtttgacttgggcatattcgtattctgcttgaaaagataaatgtgattgaaattgtttagctctgatgtatgctagaaaaggttagcctctgctgcttgtttcgtcacataataaataattggaatcctgtaatctagcttatccatctcgtgagtctataactagaacctgcagccagccattttttgcttactctgttgctaaaggacttaagaaagatagtctctttgtttcccttcagcatgtccagtaacatcacttctcatgtttctctctttttagtaaaagctcattatatagattatggttgctttctgcaaattatcattttctgcgagccacagacttttgttacttcttcagtcatttttatcgccttttgtcttttcaggggtctaatg

SEQ ID NO: 77874 - DNA, 435 bp, Arabidopsis thaliana landsberg
gcccggacctggagctgctcagcaggctcctaccgctgggcgaccgcgaccggcgtcggggaccgccctgcctgcggctagccggggcactgcgcggcgggccggatgcggtcaggctcgggatcgcatggccgggggagcacgccgacgacctcgccgagatcgactgcgttaccgacaccgcccccggcgcgccggctgtgcgcgtggagtccctggccatcgacgacgtcaccgcgctggccgacaggttccccgggcgggaccccgtcgaggtcctccggcaggcgaaggttaccctgcacgacgaggacggtgccgtcagcccgtcgatcccgctgctgaagtggatcgccttcgaggcccgcgaccgcgaccggctgtacttcttcgccgacggtcgctggatcaccaaggacgccggctacggggacc

SEQ ID NO: 77875 - DNA, 405 bp, Arabidopsis thaliana landsberg
aaaaccgattcccacatccaccatccatattgagtctctctatctaattttagatattacctgatatcatctcaaagcaaataatagtattctatgtcatatattgagtctaaatagtcatatttatctccttttacacatgaaaaacaatcaacatttttaataaaatcgattctttaacctcacactcaacaacgacaatatttatctttcaaatattcccctgcttttccctattgattatcattaacatttccttgcttatttctatcttttggcctaatgaattcttaaagatgaatcccataatactgcccgtatggtgaaacaacactctttccatttggcactcactaaaaaacattgctcgctattccttgctcttttcatttcaaaaaacaaccc

SEQ ID NO: 77876 - DNA, 529 bp, Arabidopsis thaliana landsberg
aatcaaagtcatcatcagattggtccaattttagctttaataaactcaactaatttactttcatctcgttatcgtatatgaagcaactctggactttcttcttcttgtctttcctttgtagtggattgttcagaagaacacattctgagaaaccaaaagttgtgaaaatcggttctatattcagttttgattcagttattggcaaagttgctaagatcgctattgatgaagcagtaaaagatgtgaattcaaatccagacattctcagcggaacaaagttttctgtttcgatgcaaaactctaactgcagcggttttatgggcatggttgaaggtttaaccctgtgagatctctttagttagtgtttaggatgttatcaatattgactcatttgtttgtttgcttgttcgtttgttgcagcattgaggtttatggagaaagatatagttgggattataggaccacaatgttctgtagtagctcatatgatatctcatatggctaacgaacttcgtgtaccgcttctttc

SEQ ID NO: 77877 - DNA, 495 bp, Arabidopsis thaliana landsberg
tgctctgggaaggcttgctccatagatcatgtcatcgcagtagattaaatgagaagcaatttacttgtctatcaacttaaagagacacgaaaacatttttaagaaactacatgtaataaaaaaactctcacgtatgcacatggtggtatttatttcatatcaataagctacggtatcttggtttcaatgataaagaagacgcattgaatggttgtgtggtttttgtttcttaaatccggaccagccatcccttttttgttagtactagcgatggatactattcaatgaaaggggtaattgtcctaaaagacgccacacaaagtacgttcactttaccacttctcttcatcttcattccaatttacaaatttcaccaaactcatgttaaaagacttttgacatatagacacaattagtcgggtagacttgattgtatcatataactaatactaacgtgtttcttaacctgcttcccttttaacatttaggacaacc

SEQ ID NO: 77878 - DNA, 580 bp, Arabidopsis thaliana landsberg
cggtagaaccgttgcgagcattcgcatttgccagtccaactgacgcgaagtactattcgtaatctctctcacaacagtcgtcgggggcgcagatacttgttcctccgattcgtcgaggactcctttttttgggtacgccgcgacacgaacgatcagtgcggcggtcctgccatctttgagagcatatatctgcggatcagtttccggatccttacttatgttcaagatttccattccaaccgaaccaaggtaatcagcaacgatcttcgtgccgaacgcgtgcatttcttctggagtaagtacttggtccccgtagatgcgtgtaatcgcttgtgggacggcccatccttcaaactcttccaggctcatatctgggtctccttccccaaaattaaaatgtgtgccgctcgctgagtaggagccaaggcagcaggatactggagtcacctctaagttgtacgagaacgcaaattcttccgttcgattatcgaaggcgaggagcctccacggataaagataaccaccatctcgccgtgtgtactttgccaagacgatccgggaagtcgagagagaaaaactc

SEQ ID NO: 77879 - DNA, 216 bp, Arabidopsis thaliana landsberg
cttgtcgcgtagcgtgaggcactgctgctgtgggccactatacctgaactagcagatacttgactgtcaggagcctacgtgggccgggctcccgaggatcactgtttactcgtttgatgatgcctttgaaccggcttagacgtaccaagatccatgaacgaccgactgatttaatgcagacccgcttctatgctataacgcgcgagaataaaaagt

SEQ ID NO: 77880 - DNA, 574 bp, Arabidopsis thaliana landsberg
attatttagctgactgtactcttctttatattattgttttaacttgttcgatgcgatgcgatgcaggtcgtcatttatttcataaataaaaaaatagccaaatgaacagttgatattcattatgaaccacaaaaaatggtacgatgtagcaattgtataattttctaatcgaaacaaagttgatagaactatttacatcattatttatgaatgatgaggtcggaagagacaaaacatgcataaactttgtgtctcggttttcttataaggtttttaatgtttcaatttacaatgatgtcaaacattagggtcccaaactgaataagtgtaaatatgtgtgacctttttctaatattttactctctaattaattatatggtcgtgcatgatcttatttattttctacttaagtaagataacaaacgtttgtacataatgataagatgaaaaaaatgttatagaattatgagtgcgctaaattttctttaccgtatgtatgtataatggtggtcctaaaactttaaacgggtttaggttgtggcctgaaatgaacgtgtaaccactattacaaaat

SEQ ID NO: 77881 - DNA, 299 bp, Arabidopsis thaliana landsberg
aacatcgtttgtatcgttaatgtctttgcatttcactatggcactctataacatatcataggtctgtccattattttattcatccctggcgcaacaactcagagatcctcgcacggtcggtcttattgtctttaacgcactcttactaaaagaaatctgttatcattgttattggaactttggactcttcaatgcgcgacgtaaaatacttataactctacttccatacagtgtaattctcataattatctcctattctatgactattgcacactatagagagcactagcgatatccag

SEQ ID NO: 77882 - DNA, 524 bp, Arabidopsis thaliana landsberg
ccgcacagcaatcgcatcctgatcggtgtgcatatcgagaaggaatatgattatgctggtcaacggttcgtcgcgcttgtggaatgtaagtggcatcaccctgacggggggcctgtcgggcatcaagatcaagagtgaatcactgcagaccctgatggctggtggtatcgcgttcgatacgccacggcctgatgtgccgctcaaacgccacattccacgcttccgcctgcatgacagccaggaggcggtcaaccgcgcaggaacgttgattaccattcgtgtggaccgtgccgacggcctcaagcctggcacggcgatacgcttccgcggcctggatgtgggtagcgtcgagagcgtcgacctgaccgatgacttgcaggcggtgttgctgcgggcgcgcattaccgaagcagcggaccgtatcgcccgcgtcggtacgcagttctgggtggtcaagccggcctttggcctggtgcgcacgcagaacctcgacaccttggtgggcgggcagtacctggaagtgc

SEQ ID NO: 77883 - DNA, 293 bp, Arabidopsis thaliana landsberg
aatgaagcaagataaacgctttcttttttattcttaaggttgcgtattacgtcctggagcattaggttggaagctacctgtgtagagcgacccttagaagatacctaccgagtgtacgtgatgtttgagagcaagcattacacagtctgcaacatcttactttgcgaggagagaacatactttctatctttatatcacacatgtgattctgatcccaataagaactgggtttcagaatgtgatgtggacataagataatagtccaatctttggtaatgaacacattagcatac

SEQ ID NO: 77884 - DNA, 565 bp, Arabidopsis thaliana landsberg
  unsure (1)..(565): unsure at all n locations
gcagcaagcatctgtgccatcctgatcgtatactgcacgcgatcgggtgaaagtttttccggcgcatgaacattatcttttactagcggtgttgtgaaaaccgccgtaaggaaagccattcatcgtaaagacnnnnnnnnnnnnnnnnnnnnnnnnnnnnnnnnnnnnnnnnnnnntttcctgttttcgcagttcgaggcttgcgacattcgacaggcgaaggccgataccaaacggctcaaccggcgatatgcgttgtttgatgacaggaatattttcctgcagttttgcaaagtgatcgggccaggtgtcgccagcgtgtatgttggtgcaataagtaagatgtcctcttgttgtttgcatggtcgctgttttagcggaaggctttcaaccattcgccagccttgtacaaagttgcggtatccagttggttcacctctgcgcctttgccaatggcgtcgagcagcatgatggtaagccttccgccaaggtgctcgcgaaattcgttgagtccttttatacggcgctgttctcgtcttttatctccatcaatgggtgtgagatg

SEQ ID NO: 77885 - DNA, 554 bp, Arabidopsis thaliana landsberg
ttatctgcaccagaaggttctctagcgcaggtttgttttcatttttcaccatattaacagggtcagcagtgccgtttgattagataatatgcctgcctataaaatgaagtttgacctccccccttccctctctgtttcatgctggctttgcagagtgtatccagtgagagaaagaccaatgccttgatggctagttttgtgaacgcaccaattggagagaacattgattggaggctatcagccacgatatccccttgtcatgctacggtaatctcttcatatattatatgtatactcttgaagcatggtcgtttacgatctgcgtaatatttacatactttaagattcgtccagagtatagcagcttctatttattatctagctggtggcattggttttctgaaaatgggggattgtcaattgtctggaccttagaaagtgttattggaaattaaatctcctgcttcccttttggaaattatgaagggagaacgctgtatgctgttaaatttctttgaaataagaatacttgtactctcatggcctatgctttt

SEQ ID NO: 77886 - DNA, 550 bp, Arabidopsis thaliana landsberg
tactttattaattaaatagaccgccatccatacaacttagtttaataagataacacctgagacagaaccgtgagtaaaggggtcagttactattttattccaattaatgttagcattgattctttcttcatctttaatcacatcagctaaatttttcagctctttgtctatgcctatttttggataaaaagttcgttgattaattaactcgttaatttgttcagtcacatcatatttagactgatacttatgctgttttactggccacgggactttgtcaatggagaacgaaaactttcgtgagaacttgtacactatgttttcacatataatcaatggctcattttgaactcgtagttcgtgtcgatagcagtaaacataaaagtaagagtgatcttgcttgatttggatgtattgatgtttttccaattgattgtcgcagtaagtcttttgccaatttctggtacgattaacatggtcgacacagagattacggtcgctgttaatgagaacgatgtcatgttctttttgtcgaggagtcaacaagtcg

SEQ ID NO: 77887 - DNA, 462 bp, Arabidopsis thaliana landsberg
  unsure (1)..(462): unsure at all n locations
caaaaagaagaaancanaaaagagaaaaaagaaagcgatttgttatgagaaaaatagaaaaccgaaaaatccggggaccagtaaaagaaagctcctcttcctaagcaataaaagcccaccacggaatggtataatcgaaaagacagaaaaccaaactaaaaaaaaaaagtaaaagagggggaatcccaaaacaaaaatatgcggaaaagaaagaaacgcaacgaaaagaggcgacaacgcccgggaaaggacaaaaagacccaaagacctaacccaaacggggctataaagggagagagccagggatctccacacccgggaaacccaaccacttcgtgtccaacgcccacctttaaaaagacaactgcaacacccaaccaaaaaaaaaaacacaatacctttccctcacaaaagagatacggagacaacaaaagaagctcgagaccaacctctttaacgagg

SEQ ID NO: 77888 - DNA, 583 bp, Arabidopsis thaliana landsberg
gcccgctgttgtggtattctgctgggagctgctgcggaaacttctttatgcattgtttgtgccgcatgccatgggtgcctggcgcacagccataagcagctttgcacagtatttcctggaactcatcttcctggtgcacgaagctgttatgaatacggatgccgtgatacggaccgcatggcgcatgttcattaccaaaaagaaattactggaatggaaccccttcagcaaccagcgtaatgatgatatggtgggcagggcctacacatccatgtggtttgtacctgccgtggcggccggcatttttgtatacttgaccatcagccaccccatgcgtttgttttccgccatgccggtgctgatactctggtcactcgcgccgttcttctcctggtgggtgagcctgccggtaagcaaacccaaagcgctgctgacagagcaggacaaacggttcctgcagatactgtcaagaaaaatatggcacttctttgaacatttgtgggagaagaagataactgtctgccaccggataattaccaggaacagcccgcagagcgcatcgcccacagaacatcacctacca

SEQ ID NO: 77889 - DNA, 561 bp, Arabidopsis thaliana landsberg
tttctcctgaagaaggtcattattatgattcctccaacattttattggatccttacgcaattttagttgtttaaattgaagcttttttctagcagctgaactacagtctcatagattatctcttttgttactttggtttggtaggcaattataagcagagatgagtttggagttttgggacctgatgataattgttggcctcaaatggcgtgtatggtacccactcgtgaggaagaggtaccaatgatatttataaagctctagtaatagctattggaggatataaagatattctttagcgagtgattttattgacctttgttactcttcagtttgattgggaaggggatatgcatctgaagcttccacagaaagatcttgttatatatgaaatgcatgtgcgaggttttacaaggcatgagtctagtaaaattgaattccctggcacataccagggtgttgcagagaagcttgaccatttgaaggtacttgctcttgaatatatacagttgagaaaactttggactgtcattttggaacaagcctactaagtagtctcta

SEQ ID NO: 77890 - DNA, 573 bp, Arabidopsis thaliana landsberg
ctgcagccacgctcgtggccatagcttttatggtgcaaacatcaactgcttcaacaagcatcagcaacaaggacctcaccgcaatctgactgcatgctcatgtggctgtgcagcggtccctatggctacctgacatcagaaggcttttttggtcactccatattcaccacggcagaatgatgtaaatcgaactcttgttcatgtatgctatgtagccacttatgcgcctgagtgatataattcatgtacctcgtactgttctgctgtttggtatacatgccataacaagcactacagtagagacgcgccgtaatgggagtgggtgatactcctgcctgcaagcgcttctccacgccaagacaccgttggtcgcattgtgtcgtccacgtgcatggaatgagtgtgccacgttgaggctagtgatgcaaaggatttgcatgctggcgcgcaggggcacttgtgcccctttcatgcagctgcctgtgaagctgggtcacccgaacgctgacagtagctgcccatcttaaacttcagctcatgcgacacattgaggacacaccgttgcagcagctg

SEQ ID NO: 77891 - DNA, 553 bp, Arabidopsis thaliana landsberg
aaatatatatagttcaaattgtaactttatgaggtttaaattttttttctttttgtttcagattcaatgggttgtatttcttgaggaggatgagagggaagaagataatgttcgttggagattcactaagcacaaacatgtggcaatctcttgcttgtctaattcactcttgggttcctaacactcgttacactcttattcgccaaaagggtcttgcttcacttacctttgaggttcgttctttcattttatcttattaatttaaaactagggatattttcccactcaaacaagtagatatttattgagttatgatcttttcactagaaattgagtgaggattttttttagctttatagagtggaaagtgcggtaaaaagtcttgctttatatttaataacgcatagtgttaaggaaagggataaagtgtttttggctttgtctcatttgatttgatgtacagataatgccttgctatatagctttatcacttgtgttataaaaaatgtcttaggacaagagaatgagagagcattgtagagatgaacgtgat

SEQ ID NO: 77892 - DNA, 564 bp, Arabidopsis thaliana landsberg
  unsure (1)..(564): unsure at all n locations
tccttgnnnnnnnnnnnnnnnnnnnnnnnnnnnnnnnnnnntttacgccgccactgaccaaacttcgacggcgggctgcagcgggaaatcccgccgcggaagtgaagttgggactcgcgcttgctgccagcaaggacaaggtgaaagaggccgcggcgatcactttgttccgtaaagcctacgcgcagggagattccgatggcgcctggtggttggggaatgcttacgagacggggattggtgttccaaagaatctaaccaaggccaagcacttgatgcgtgcaggcataaacgggtcgggaagccgcatggtcgcttatgcgttgcagcttccaagttttgatcgtggtactggacggagcggctatacagaacgagcacactggcttcaccgtgcggnnnnnnnnnnnnnnnnnnnnnnnnnnnnnnnnnnnnnnnnnttcgaagcggcgggcacccaaggcatcccgaaaaacctcgctgcttcgcggcaatggtttctccgtgcagcccagacgggtatgttggcgccgaaatgatgcttggagaagcatgatccttggc

SEQ ID NO: 77893 - DNA, 208 bp, Arabidopsis thaliana landsberg
gaaagttgggtgaatctgcagaatcattgaagcagtttagaggacaagtctcagagatcactttgcaattagctcagctccgaagaacacttcattacataagaaatggaacaagtaatcacttttgatatatggttgttttaaagttattgctgatttgctttttttagtgtctcagtggtatggacaaagtcgatggttccttgat

SEQ ID NO: 77894 - DNA, 266 bp, Arabidopsis thaliana landsberg
tatactaacaaatcagaaatactatagaattacctcacagagatctttgtgattaaacaaaggattgattactttcttgggcatgttgtagatatcgagacaagttttatcgtaaacaagtactagttgttgtattagtagtggttttaggctattagtagaaataattaatgtttaattagatgtactatatatatattaataacggtattatacattctcttcaattgatatggtacctgctttcatacgacattgtgtttaaa

SEQ ID NO: 77895 - DNA, 174 bp, Arabidopsis thaliana landsberg
cttttattttacgccactacatttaaagatttgcctctatggttttaagaatgcatgcacattggtaaaataggtatctcataaaaatctaaaactaactcaagatctcaatgtaagtagaattaagtagtacgaaagctaagtatcctaatatggtgggtgtattggttgaaa

SEQ ID NO: 77896 - DNA, 465 bp, Arabidopsis thaliana landsberg
  unsure (1)..(465): unsure at all n locations
caaaaacggcctgagactaaaaagttaatttgcaattgcaatggtttttcttttttcaacgacgtttctatcttccggacggacccattttnnnnnnnnnnnnnnnnnnnnnnnnnnnnnnnnnnnnnnnnnnnnnnnnnnnnnnnnnnnnnnnnnnnnnnnnnnnnnnnnnnnnnnnnnnnnnnnnnnnnnnnnnnnnnnnnnnnnnnnnnnnnnnnnnnnnnnnnnnnnnnnnnnnnnnnnnnnnnnnnnnnnnnnnnnnnnnnnnnnnnnnnnnnnnnnnnnnnnnnnnnnnnnnnnnnnnnnnnnnnnnnnnnnnnnnnnnnnnnnnnnnnnnnnnnnnnnnnnnnnnnnnnnnnnnnnnnnnnnnnnnnnnnnnnnnnnnnnnnnnnnnnnnnnnnnnnnnnnnnnnnnnnnnnnnnnnnnnnnnnnnnnnnnnnnnnnnnnnnnnnnnnnnnnnnnnnc

SEQ ID NO: 77897 - DNA, 486 bp, Arabidopsis thaliana landsberg
  unsure (1)..(486): unsure at all n locations
gatataaaatagggaaatataaggaacataataaatttaaatgagaattgcaaaacatctgattgttaaaaacaaaaacatgtatatatatatgataaattgattagttaaaataattacttagttagtgtaccaaaataaatactagttaaaaccaaattatctaacaagttcggaaacactatgatcacgttttctactaatgagatgcaatcttacggcgtatcaggttgttctattctcttgagaatcaacaaaaaaactttttaggcagatcacaagtcataaattcataatattgtaattagagctttagctaaaaaataaattggaatttgagacgccggattaaattacaaaaactcataggatatgctacaaatatatatatgtatatnnnnnnnnnnnnnnnnnnnnnnntggcgacaatctaaagatgcgtatctattacaaaaattgatttctcattttggaacatgtatactc

SEQ ID NO: 77898 - DNA, 491 bp, Arabidopsis thaliana landsberg
  unsure (1)..(491): unsure at all n locations
ccgagggcaggctggtcatcaccatctgcgtgtgcccgcccatcagatcggtctgtgccggtgcgacgcccttgtacggtacatgcacgatgttgannnnnnnnnnnnnnnnnnnnnnnnnnnnnnnnnnnnnnnnnnnnnngccggtgccggtcgaaccgtaattgatctgccccggcttggccttggccagagcgatcagttcacggatnnnnnnnnnnnnnnnnnnnnnnnggaccacaaccagcagcgggccgcgcgccatcatgccgatgtaagcgaaatcggcgatcgggtcataggccattttcgtgcgcagcgcggcgttggcagtgaaggatgcctggacattgacgatggaataaccgtccgccggtgatttggcgacgttgtcggcgccgatcatgccgccggcgccgccgcggttgtcgatgacgatctgctggcccagcccgggggccatggcttgcgcagtgatgcgggtcagcacg

SEQ ID NO: 77899 - DNA, 560 bp, Arabidopsis thaliana landsberg
  unsure (1)..(560): unsure at all n locations
atattcagatttggaattggagtcaaacctggcgtagtgacttacgtattttttaaccaagtcaattnnnnnnnnnnnnnnnnnnnnnnnaaaaatattttctctttgaatgcctttttacatgcgactgtttgaaatgcttgtatatggtacattattggtttttccctactaaataaaaacataatccaagattggacgattctacataatcgaaaactcatattctaatatgtattaataaaaacaaaattgtttaaaaaatatttatttggaaacaaaatctaattttaaatttcgttaagttttacttaaataaataatagtaaaaaaaattaaagtgagaagatggaatttaataaaaataatattttatttaaaatctattttaaatgtttaacgtttgcaaaaataatcagacgataaattttgtatattttggtacgagaaaaataagtgtatagagaataataacctaactaaaatgtctatctatcaagaacagtaatacataaatcttaatattatatcttaaaaatatatacataatattaatatct

SEQ ID NO: 77900 - DNA, 515 bp, Arabidopsis thaliana landsberg
  unsure (1)..(515): unsure at all n locations
gaacctgtaaattgtttgctcctctcaatctgcctattcaaagtacacatgaaaaaagtagagggaaaggtatctgatgtaaactgtattttcacttgtaacatgtgaatgtattttcaattgatgtcaggtgccggggctaatggtggtgctgatgcttctgaagatcagaaggcacctatgaatgtcgcaaaggaatgtctcttggctgctctaagatcagatccaaagtctgcccatgcgtgggtgaatcttgctaattcatactatatgatgggtgatcacagaagctcgagcaannnnnnnnnnnnnnnnnnnnnnnnnnnnnnnnnnnnnnnnaggatgttcattgctttccttatattagacagaagggtctctattactnnnnnnnnnnnnnnnnnnnnnnnnnnnnnnnnnnnnnnnttggtgaacaacgtaatgcataattggtttgaggagtcctgcatatcctgcccattctttatattgtaacttgggatgattaggatgga

SEQ ID NO: 77901 - DNA, 628 bp, Arabidopsis thaliana landsberg
  unsure (1)..(628): unsure at all n locations
aaaatctcatgttctactgagtttaggctgcttgtcatgagctagtttagtgacgacaccatacataagtttaatttagtttctggagccgacaaactctcagtagacacggtggttttgccttggatttgagatgttgtttcactcagttgctactaatgaaaaagtatgagaaggatcccagaaaataaataaagagcatgcaaaattaaactcattactgttgagtttgaattctgtagcatgtgattgatgctacaatcagacggcatatgaaattattgccgattcgaagctgaaggaatgtttgtagcaacttaaacattttacaagaacttgaactgaagtgagaatcctagtccaagaatttatggagaatttttaaaaccttaaaactaaaaatattttaggaaaaagaaacagagtttaatcgtttagtatgaaggaatagagagaaaacctaattttatataatttctcatgtcctctcattcttttttctatgacatgcaatagtaaaaactactctatttataaattaacgtccaaatgataattagatnttgtagcgaaattgtgaactacgctaaatattaaatacaaatgttaaaaagaagggtagatgcat

SEQ ID NO: 77902 - DNA, 604 bp, Arabidopsis thaliana landsberg
gatagaaggaattaaaatggacttggccaaagctgaaagattttttttttttgaattatctatataactcaggaaactttataacttctttattaaatttttaattacgacaattattttcagaacattctattttttctttacaagaaataataggaacataatcttataggaacgtaatgtttttgcctttttggggtttgaggatgaccaagtcttatttagggtttctaaagatgtcttcgtcaagctttgaacgtctttaagctccaaattttcaataatgagaagcttaacacaagtcaacggacatcttctattgaaaaagacaacgaactttcaatacattaaacatagaccaaatcaaatatccaatgcattctaatcaacacgctccaatataaaaagaatacaaactttcaaataaaacctaaactttcaatggacaatgttaatcccaaacacatcaaggggatctaaagaatcaatctttttgtcaaactatttgtctttgcatgcatttcactgggaagaatctgaacctgagtaacatagaataccctcttatgataggatcactagcccgagatagagcgatgcacaa

SEQ ID NO: 77903 - DNA, 591 bp, Arabidopsis thaliana landsberg
  unsure (1)..(591): unsure at all n locations
ggaattgacctcataagccgtgatcggatcgagcaccacatcgccctggggtgactgactcgggctttccaggccgtcgaaatcggccgtacaggcggccggacaattgcgttcatccgccttgtaaacaatcttgccattacgatcctgcacctcgtcgatcaggtgcggtttcaccttgcggccgccattgacaaagatcgaataggcgttggtcagacggtacggattaacttcgccggcgccgagcaccatcgacatttccgacggcatcttgtcgagaacaccgaaattaacgataccctgggtcaccggcttgatgccgaccttttgcgccaggcgcaccgtcatcagattgcgcgacaattccagaccgcgccggatcggctgcataccgagatagtcatgttcatagttagacggcgtccacatcttgccgtcgccgcccatcatactgatagggccgtcatcaatgatcgagggcggcgtgaaatctttggacagggccacggcatatacgaacggcttgatcgaagaaccgggctgacgcanggcctgggtggcgcgattgaacttcgcagcgagtagctg

SEQ ID NO: 77904 - DNA, 498 bp, Arabidopsis thaliana landsberg
aaatgccagctcggctatactaaagtaaaggtaaaatcaaaatactaatttgattttttcataccgaaactacatattgtgtatagtacatattatacataagcgctaatggatggcatattcttaatgacatatagagataacgaaatctcatttgaaaacattatgcttatataacaaattggaactattatctaaaacctctctgcctacactaaacgtaaatggagcatggacattcaacgtttatttgggttaattatgaataagatttaaatatggacatagaaaaactcacacgacgtcgataactggttatagaccatgtcatattggcacaatggggtttatgtctatcccccattgctattagacagcgtttttcattcgtgcgatgcttatatacagcttcttacaatccatgaatacggattggacacgtgtatctatcgatctgtgacaatattatacgttcgggatattctagcctaatactgt

SEQ ID NO: 77905 - DNA, 592 bp, Arabidopsis thaliana landsberg
  unsure (1)..(592): unsure at all n locations
cggcctgcacgcgcgccttgatctggggccgcgcgacgcgccgttcttttaggccgtaggccacgttgcgggccacgttcaggtgcggccacagnnnnnnnnnnnnnnnnnnnnnnnnnnnnnnnnnnnnnnnnnnnnnnnngcccgaaatatctgccccgtcgatgagtatccgcccgcgcggcgtggggccgaagccggcgatggcccgcagcagcgtggtcttgcccgagcccgaagggcccaggaaggcgaagaactcgccgggctcgatggaaaggtcgatgcccttcaataccgtggtctcgccgaaggacagcgtcagttgttcgatgtcgatgcgcaccggggcgacgcgcggggccgccgcggctnnnnnnnnnnnnnnnnnnnnnnnnnnnnnnntggaagccgaagagcttgcaatgttcatagcggaagatttccaagcttggttcatgccattttgcgccgggcgccggcaacgagctggtgcgacaggaagggtgcgatgccgacgatgatgacggcgatgatgcccagcgcggcacccgcgccgngcccggatacggnctgcatgaacagatagatg

SEQ ID NO: 77906 - DNA, 623 bp, Arabidopsis thaliana landsberg
aggacataaccaaagttgacgcgactcggcctgcttaccactggaggcgggcagacactatcttcgaaggctgtggagttatacggaagctagattaaccactttacgaaagagaggatgtatgctggtctaccatgcaaggagagataggctccctgaggggtcgcccttcccgccctgctcctgtgttcagtctgagattgctgctgagccgcatgtctgctttgccagtattccactggccgggcgcggtccgtggctgtacgtgctcgacatgccagaggagaagctacagaggtttgagtatgacagtgcttccggaggtctgggggtaaagcattttgccatccctgtgtctgtcctcaagaacgagaccttccaggtcatggacttcgagaatgcgacagggcggagctggaagcactggtcgatcgtcctgcatccgcgggatgcacaggatggagagtggtcacaggtatggatctctcgctttggcgtggctcaggtcaagcagcacgctgatcttcgcggagaggtcgcggatatcgaaatgaccgacatcttcgatcctgagcaggactatatcatcgtggagaaccccgcgccgcacgatctgagtggag

SEQ ID NO: 77907 - DNA, 538 bp, Arabidopsis thaliana landsberg
ctgactaaaccgattatataaaaggtaattttctgatccttttaccggtcttgtcaaagatagcggaggttaatgccggcgcaaaaggaggaagcccgggctcacctacgccaccggcgttctcgtcgttgttcatgatataaacatccacgttgggcatctcatttatcctcggcattatataattgtaaaaattccgctgttcaaccagtccgtccttaaaggttatttcgtgcttggcagcagccccaaaggccattaagatggccccctctacctgggctttgatgatatcagggtttacataccacccacaatccaccactgcccaaacatgatctatgccgactttgccatctcctttcctggataccttaacgatctgacccactgttgtgccaaagcattctgttattgctgttccaaacccgtcacccttttttctccccttccaaccggagacctcctccatcctatcgataagcttttgctcccgatcctccttcagataagccctcctgaaatcaagaagatcatt

SEQ ID NO: 77908 - DNA, 512 bp, Arabidopsis thaliana landsberg
  unsure (1)..(512): unsure at all n locations
agctgcccggccggctattctcgcatgtgctggagaagcagatccgcatgatcaccatcgtcggcgcgacatcgggcgatacgggctccgccgccatcgaggcgttcaagttcaagcccaacgtcaatatcatcatcctgcacccgaataaccgcacctcggaaatccagcgccgccagatgacgtcggcgcaggcgccgaacgtcacaaacatcgcgctggaannnnnnnnnnnnnnnnnnnnnnnnnnnnnnnnnnnnnnnnnnnnngaccagaaaatgtgcgaagagctttcgctcaccgccgtgaattccatcaactgggcgcgcatcatggcgcagatcgtttattatgtgacacggcggttgcgctcggcgcgccggcgcgcaatgtttccttcaccgtgccgaccgggaannnnnnnnnnnnnnnnnnnnnnngggtggcgcgcgagatgggattgccaatccgccgcatcgtgacggcgacgaacgcgaacgacatcatcacgc

SEQ ID NO: 77909 - DNA, 545 bp, Arabidopsis thaliana landsberg
  unsure (1)..(545): unsure at all n locations
gcctgggctgggtttatcgtagggaggtcagtaattctgctagggcggcgattctgacagactggtgggccgcacctgcgggggctgatttgccttgaggacataccgtagcggtagggccaacccaggcacctattcagaatacagaaagggcaataaagcggggtagaaccagaacagcctcgacttttcgaggaccggaaatggaggcggtcccaccagccacaccccggcactcgatgttcccgctatggctgctcccttccgggcctgaccagatcgcatgcaagcatgctcgggtatcaatgcgggccttatggggcaagggtttcaggctgatgaggcaacaagagttctatcgttacgtacacccagcatgggtgctcaaatcttggggtgtagccagcactgtcacactttgctagaacactttggtgtcacacccatggcctacatcatcaagcgcggtgcgctctactacctaaacttcaagctgccgaagcatctctatccaggtgtaacactntgcgtgtgagcctgaacat

SEQ ID NO: 77910 - DNA, 623 bp, Arabidopsis thaliana landsberg
gcgccggtttttcagaggagccaacattctctaatggtaattaagaaaacatgattaattatgagtaaactttctttgtaattacgttataagttcaaaacatttttttgttttttatggtcatgattttatgcagatgaatctaccgaatccatctccaggagcaggaagattttatcaattcatagagcccccttcaaaccaaagatcttgcgtcgattctgtctctcagtttcttgaagaagaaaataaaaaggcaagattttttattgagatattattgccataatttgttttcagaaaaacgttacgttttctaatgtttttgatttgtttctttggtatctttccatagatattcactgctaagaagaggccatggccttttctcactgacaccacaaatcctagcgttagaccaaccacaacatcaacaatcataaggttcttttttaatgtttttgtgtttctttgactcgctcattttcttgatacacccaaaaaactaatcttgaatgtgtatgttttaggccggatgcgacacaaaaccggtcaatgggtataactccggttcaagagaccggtacaacaactagcaaccccatcgccattgattcacctac

SEQ ID NO: 77911 - DNA, 456 bp, Arabidopsis thaliana landsberg
gtgtataccttatgactgccagagagagaatgcaatttatgttaaccagcgacttaaaacatattgagcgtcattttactgccaacttcaaccaataaaacaacaccatcatatatacatctccaatcccaaacaattacatgaccataaactatatattgtgcataagcgactgaagcaagaataagtatatagttggaactttggctcaaagtacaccagaaacgaaacgtgcccaaaaaggtaggacactaaccctccacgtaatcatatcccactggtaagacgtggggactgtagtacatcgattcggtgagaatatacaccattacacatagatagttacaacgactgagctggtgcacgaacttaccatcggcagccaatacatgaccaaaaatgtaacaactcaaaacaattggcaccactgatgagattctcatttactgatttttt

SEQ ID NO: 77912 - DNA, 761 bp, Arabidopsis thaliana landsberg
taaattgatcatcacgtagctaaatttgaggactcacccagaagcaggaatcatgtccaaaactttcatcatgaatgcaaacgtaaatgcatcttcttgaagcttctcgaatctgcacgtccatcaaacaaaccgagctttcttggtcagtctaatcacagaaaatgacatgtattgcatcgttggaataaaagaaacacatacctcccagattttgagaaatgccctgcgccaagctcgcatttgaacagaagtacgttgttgtcggtcttcatttctctcagttttgccacccacttgccaggttcagagtacataactcttggatctgttggacagacagaatcaattcaaaaacatcgttacgtcagatacaagtctgagaaagcttaccatttaactcagcagttttatttatctatcaccaaaacagtatatagactaaaagaaagcttaccatttaacccagcagttacaagcatatttggataattctgcgccgttacctgtgttatattgtccatagatgcatcatcacagagaactttcataccatttatcgcagataatatgaaaagaacccaaacatatactcacattgtctacaggggaatatgacttcatatagaagtaaaattcttcctttctggggtcaccccactcctgaagccaaaaattagacaacttttaagcactgttttaattatcatacaaaatcaaactacagctacttcattcataaggaaatctatccatcctta

SEQ ID NO: 77913 - DNA, 611 bp, Arabidopsis thaliana landsberg
  unsure (1)..(611): unsure at all n locations
aaggtcctggcataggtacttactaacttaaaatgaaccctgtttgtaattctgttattgccgttgaacatgaaattatcatcatgcagtttaaatccttcaaatattccctcgtaatctttccgnnnnnnnnnnnnnnnnnnnnnnnnnatagatccgccaccctgtaatgaaatattgatatcgtttgtatagcctgttctgtaaagatccttaatattgcctggttgtggtgtataaggtcgcattacgctgtcataccacaaaatttcacgtccatccattttagggccgaaattataattggtaggataataagcttcctgtccgtttctcaggtaaaagccatctgcatccaccacaccgggagcatcccatgcagcaggaaaaccggagccaaattcgttctgaaatttctgcatcatccataaattatcaaccgaccggctcatattcaggtcaattcccaaccccgatttttttttcccgcctttcgttgtaattaaaataacaccgttagccccctgtgacccatacagaacagccgccttggctcccttaagcacttcaaggaggcaatgtcatccatatttaaatcattcatccattgc

SEQ ID NO: 77914 - DNA, 511 bp, Arabidopsis thaliana landsberg
aatcaaaacaatgtgttggctaaggattttcttgatgactttttgttggttggccagagagagaggagagtgcggcgttgtaaaccacaaggacggttatggtttgacgtttgttgatggtagaagcgagctgagtttcggagagaagctggttgaaatttgagaaatcatcgtgctcgtttaagatgttagtgatgttgaatgaatttgatgaagtgtagaggaatgtggaagcaaaaaagaagaagaagattgtaagtgaagaagacattgttgtgacttgtgaatcgcttgatgagtttatttaaaaaatttggtggcatttggcttttatattgaataggcatgaggaagagagtgtgtttctccaaactttgtgggaacttggtgttttgtcttggattaagagcacttgtaggtaccgattatattgctcaattcactttagagtaagccacttgttgcacatcgagttctatgcattagggatatacgagtaatctcatatagc

SEQ ID NO: 77915 - DNA, 486 bp, Arabidopsis thaliana landsberg
  unsure (1)..(486): unsure at all n locations
gccctatctccgccgatcaatccggtaagccttgctacagcttgcttttcaatgaggacaactactattatcagggtgggttttagtttcatctatgtttatttttgcgaatgtctgtattcccttatcgtttaaattttaaaattnnnnnnnnnnnnnnnnnnnnnnnnnnnnnnnnnnnnnnntgaacaacagatcatatttggccctgatcatatctatttcagctctgttcttattggtttgcgaagtgctgtaatccagggaattcaccaatcctacattataacgctgttctattactgaaaatgattctttgcgggcagcaaaagttttagaagttgattcaaaggtgctttgagcagctttcagatcagcaacagcctggtagataattttattcaggttatttttggccagctgttcgtctgtctcactttgcatcaggttgatcttggccctccttattgcagntctggtcctgaa

SEQ ID NO: 77916 - DNA, 552 bp, Arabidopsis thaliana landsberg
aggacagttgataaacgataggatatttcaatatgtataaagcaaagttagtaatacaagatcaatcatatatattggatcataataatgaaaattttgaaaattaaagtcctaaattatgccctaaagtataaatcctaaattatgatcaaaatataaggaagagactagactctagagagtgaaattttgatgttcatcagaaaaattgttggttttaaaaacaacattatattaaatctatatgagaaaaaaaaaacactcaaaatcaatgaacataatatttactttctcgattcgattaatctctttttatggagaaagaacgtttatgaaataaggattaatttaaacataaaattatttctaactaattttaagataaattatgagatccatactttttatttaaaacaattttttaataatattaacgccattgtataaactatccattgtaatattcatatatctccactaacttggtgcaaatattctaatcacacagatgattgatattcatagagctcaccattcatgagaatgacattc

SEQ ID NO: 77917 - DNA, 396 bp, Arabidopsis thaliana landsberg
cgccgctccgcctcaaggcgctgtggatgacacgccgcccgtttttttccgccgcgtcagacgctagcggccttcgctgggagcaggcgggccgcctttggcgcgaagtacgtcagcacgccagcggcgcctgcccgtttgaacgccagcaggctttcgagcaccgtcttgtcttcgtcgagccagcccttttcgaacgccccggcaagcatcgcgtattcgcccgacacttgataggcgaacgtcggaacctcgaacgtctccgagacgcggcgcacgacgtcgagatacggaaggcccggcttcaccatgaccatgtcggcgccttcttcgagatcgagagcgacctcgcgcaacgcttcgtctgtattgcccggatccatctgataggtgcgc

SEQ ID NO: 77918 - DNA, 530 bp, Arabidopsis thaliana landsberg
  unsure (1)..(530): unsure at all n locations
acagttccctttttaaagtcttaaggagtttaagcattttgttttacgtggattcacgctaatataattcccttgacaacttctctttagagactgcgaaaatcagataataactactttcttttagtgacaangaaagacaaaaccataaaatccaagannnnnnnnnnnnnnnnnnnnnnnnnnnnnnnnnnnnnnnnnnnnnnnnnnnnnnnnnnnnnnnnnnnnnnnnnnnnnnnnnnnnnnnnnnnnnnnnnnnnnnnnnnnnccctgttgtttagtagagagaaacaagacgacgactctcagttattattgcagaaaaatgtgtatataacgtaagaagcaagcgatacccgatgaacctgaagatttatttgaggtttgctgtctaaatggtttcctgtgtgacaaatgggaaacaattgataagaaaataatataagacttaaaagaaaatgggattggaatgaaagaaagacatacccattgagatttcttgaacgatggtcggaatgacaataccggat

SEQ ID NO: 77919 - DNA, 179 bp, Arabidopsis thaliana landsberg
  unsure (1)..(179): unsure at all n locations
aaaaagagncagaagaaaggggacgaacctttaatttancnaacacaaaccgagaganccacaggggggganccaaaggcanagagagacaaacggcccaacgggagcaagaancnccaggagcanncggaacacnncgccnccgagcggaagagccgcnnncaagaaggggccgacca

SEQ ID NO: 77920 - DNA, 600 bp, Arabidopsis thaliana landsberg
cttcggacgatagtgcagttggccaggtccggccccctggactacctgttgcaaaagcaactgtgcagtggtgggaattgcgacttcaagctctttgcacagcgccatgaaaggttcaggattgatttggtaccgatcattataggtggccacactcaatgccttgatctccagcgcgtatgagtggtcaacaccgcgagaagcagtccagtcaatcaactgtccagtgttgtctgcactaaactcgtccgatcgctttaaaatctgatagtccttgccctctcctgcgcttctaatattacccgccaagactccagagccttgtgtaatcgctgagatggctgaagagtccttcgctcgttcaccaaacagctgtggaggagagattgttccaccacagcatcgaacatgcagcacggcgactcgtcctgagcccttcataaagtgctcaatgtagtccctcaccgcacgtgtctcgggttcagaaaatccagttaaaccctggaatccgtgcttgtccttacgaccatccttgcccttcttgccaagccccagctttgtccgtcctcgccccagtttcgctcaagatcacaccatgcc

SEQ ID NO: 77921 - DNA, 568 bp, Arabidopsis thaliana landsberg
accccatcgaacgctatcgaggccagcaccaggacttatgccacttccatcgcaatgtagagattgtgcaggtcgggcgccggcggcgtctggccggctatgattaaggcgacacgatggtccaggacccggcagcatccagactgtttcgacgattaccagtaggccggcagcgatggcgagaagcctgggccacgccgttccgccacctggcggcgcaacgatcaggactgccgccaaaacccattcaactttattgaagatgtaaaacgtatatctgccaacatcaagcgcgacaggaagcgacagacttggcgccatgaatttgacgggagttgcaagaaacgcaactccgatcagcaagccgagccaaaatatagcgaccgtgaaatatgccgctgcccagcggcgcgccgcgagtgtttcagtgagcgccattgctctttccttaatttgctataagatgtatattatatactcgttataacactctgtcacaagaggagaataccatggctaacgaaccgaccagggactccgtcgcgccgcctatcccaaaagcacccaa

SEQ ID NO: 77922 - DNA, 643 bp, Arabidopsis thaliana landsberg
  unsure (1)..(643): unsure at all n locations
gataactgactagggtttcgaaattcctgaatgaatgaagatataactctgaatgaagataatttagagttaacaatgggctttactttaatgggcttacagtttttatgaatcaacctttcccatgcacaaatctgacgcggtcgacaaaccctaaaaaatgcaagcgccaaacctatatcggtttacaagtctacaagctatgaatttgaaaaataaaattctggaatccaccagaaactctataatccagtagaagagagaaaaactctatgcttcttaagaaaattattatgagatgtatttcttannnnnnnnnnnnnnnnnnnnnnnnnnagaaaaaagtaaacgaggaaataagaaaataaagaaaagtaaaattctatgaagaaatagtaaaacaatagaaattaacataataaagaagaaaaggaaataatgtattggatctatgcgagtgtccttagccaaccaagtaaaccaagaaggccaacatcaagtactcgtgatttcttctcaagccctaaaaatcaaaacacaaaagtgattgcttcttatgctcataataatcaacccattctatttaacatatngcananatatgggcatttctcaccaatatcagcagctacccgatgagcac

SEQ ID NO: 77923 - DNA, 604 bp, Arabidopsis thaliana landsberg
  unsure (1)..(604): unsure at all n locations
ctccccctcatcacctgctctcaccttatcctttcatggtcgtctggttcttagatccttaaagaggagaccctgggatggaaaacagaagaagtcgacataacctccctggaaagccaacctttaggagctggctccggcttagcagtagcagtatcgtgccctcagcggctgctggtggattgaactccgcttgcgcaagctatcatcaaccacattcgccatggcgaccaggacagatcctagcaacaccaacttcacagtatttattcgattaccattccccaggggtgactttgttgatccaccgcccgtatgtaccccagatcccctaagcttcggccaagcgccgggtactgacttcgtcaggtggaatggaatgcggcgaaagaccaagcattatgggacgttctgtcccggccttcaaagggagatatagactgtatgtccactaagtcttcaaatacgctggttacccgccctttttgccacatttctcatagctaatatcgcaacagggaaagccttgtatctataccccggcctnccgttactcccgctgcagatggcatagagctgacgttactcttacagggcggacact

SEQ ID NO: 77924 - DNA, 130 bp, Arabidopsis thaliana landsberg
aaaacccggtgtgagagagacatatataattctgtggaaagctgtattttttgaaaggcgcatgtacagtttggggggggaggggtcatatcttaagagacccaccctactatatggggagataaagcca

SEQ ID NO: 77925 - DNA, 541 bp, Arabidopsis thaliana landsberg
acaatactcgaacagctccggcatgtcctcggtcagcttcctaccacaacggtgttcgttcttccaagtgtccctggtcgatcttgtcttgacccatctggtcgatcagagtcatgatataggagtcaaggccacatatcgcagccacatggaggtctgagaatgagccaaggtactcgtcatcgattatcccctgagattcttccagacacatcttcaaccatctgttcctcgtagagtcatcagataagaaagactccaggtgctgggatattgggtttcctggaagaccattccattcggatctcgaaacatgaacgcaccaattatcgatggcatatactgcaaaggggaagttcaagttcatgagattttgattgaagcgttttgaatctggacttgtgcattgcaggcatccagattggagatacttgaggcagacctcgccaagttggctgtgggatgagatcgagtccaagacaggataagtagagtgcgctggtctcttggtccctgtgaggaacatcgtgagggagtggtg

SEQ ID NO: 77926 - DNA, 553 bp, Arabidopsis thaliana landsberg
tgggcaaccaaacttggatcaaaagggcaaattttttttaattaaaaacgtatatgcaaataatgatgaaaaggaacaaaaaaagataaatgtatattccacatcagcagcagcaagccaaaaatcattttttaaatgaaaatatttttaagaaaatgaagaagagaatatttcaagttgcatgagaaatagcctttttgtttcattttatttgatatgggactattttgtgtaaaataaccaaaaaaaatgtaatttgataagtgagaataacttgatggtttgttggaagatatgtaaaagattaaaagttgaatttgttatgttttcttatatttgagatatctaaaagagaattgtttcaacattaattagacctctatgatttggtttatttttcataggagtggtgtatagcatttaattaattcaatgaatgattttgatatgagttgaccaaaagaaaaagaagattaattggaaacatgatgttgtaatctaggtgttgatcagcctaagataacactaaacataacgaaagtgcaaaatttat

SEQ ID NO: 77927 - DNA, 623 bp, Arabidopsis thaliana landsberg
gcactctctttcaggattcgtagcaatgttagcgacactcattattcacatacaatacagctctcatcactggagatgcaccgtctctttttgatgaacatacatattcgtcagaccaaagcatatcgttatttaccaatgaatgaacgaacgtttgtattaccttactaactaacttcccaactaaacaaaagtctcacttgccttgtgtctattagttggtcaactgcttgagcgatcgagattgatcgagcgcttgattgacgaggtcagaattgtaggtagtattttgggagatgaacacgattgatgcagtcaggtcggggagaatgatggatatctttatcgccgtagaacgcaaagaaacgaatgcgcgtaccgaacgcatgctgctactctgctcacgactcgttcccaacagtatgcctcgcgtcattcgtctcatatcaactcttgagcctaatggcaaaagatccgaaaatgagttttttatgacgccatagcgtacagctggtcaaatcctcgaccaggaaggataattacgagaggggtgcctgggcgtggaaattgaagtaatggcgacctggaacacatagcggatacaagatgcgacacagtcagaa

SEQ ID NO: 77928 - DNA, 615 bp, Arabidopsis thaliana landsberg
aactcttctgcttctgaaccaaatccatattctctgttatttgtttttgttctttatttctttgtttctctctgcgaataatggaggtaagaaaatgtccaacaaaatcctcagtacttaaaagatgagaacaaaatcctccgtatcaaaaaaccctattttttaaatttaaatagtttgtattttattattacaattttggtttggatgtgagaaagaatccaaaaagaaagaaactcttaaagaatggaagttggtcgtgctgtcaactgtctaaccattcgcgcctttttttcctcgttttttttgcaaatgtgataaagacataagaagagcatttgatacttcttgatttgtctttttttttcttaagattttaaaacattttattggttcgaatatttaaattactgtactactgatgaaaagcatatattaatatgcacagctcgcattcaatgtatctttcaaatagcatctctagggaaactttatttgtaatataattttgatttgatcctcattgtttttgtccaactagcaattcttttattataataatacattgattggttagttattttatattgatgtatcacaaatatcgtaacgtat

SEQ ID NO: 77929 - DNA, 570 bp, Arabidopsis thaliana landsberg
  unsure (1)..(570): unsure at all n locations
tcagaagggccttgcataatggtatatatttcgctgtttatatgctgaatggccctattcaatgcttcgggccagggcagcacccggcatacatgtttttcataaaagttcggtatcagcaattccatatacttcggatnnnnnnnnnnnnnnnnnnnnnnnnnnnnnnnnnnnnnnnnnnnnnnnnnnnnnnnnnnnnnnnnnnnnnnnncctcttcggcatacttaccatacgcgggacagctgctcatcatattactgatgataaggcctttcaggttgtcctggtatttcagtgcatattccgtggccaggatacctccccagctatggccgagcaggtagaaattgtctttgttcattcccagcgcttttcttacctgctccacctcttccacaaaccgctccgtggtccagaggctgctgtctttgggctggtcgctgaaataggagccgagctgatcgtattcataaaactcgaatccctccttcggaaaaaagctctcaaaagattcgaagaactcatgcgtgccgccgggccctccatgcagcagcaatactttaatgcgc

SEQ ID NO: 77930 - DNA, 567 bp, Arabidopsis thaliana landsberg
  unsure (1)..(567): unsure at all n locations
gagagctgaaattatggttagttcgacctttttctttttgactttatagttaatttgacttgataggtgatatagacacatattgcctaacgtagcagtttatgaaaatatagagtaaacaaaatttttttagataaattagatgattgatttgcggaagtcacatatccactagtttgcccaataactaattaatcctattatataatgtatagtgttttttaaatttgtaaggattataaattattgcaattaatgaacatatctttgttggagatttagggcaacttctgttaccgattctatagttagttacaattaatagattattgcaacttctgttatctcaaccttgctcgatacaatggttggggtgatgttttctaagagaataacatggtcatgacacatgatcacgtcaaaataacagaagcgaggttaacataactaactatagaatcggtaactgtccctaaaaagtaaagttttgtggcttaatatattttattatctaacatttgaagttggttcaacacatattcaaaanaaaaaaaaaaaaaaaattga

SEQ ID NO: 77931 - DNA, 368 bp, Arabidopsis thaliana landsberg
acgcacgtgaacgaggtgatgattgcgagtcatgtttatgatttcgaaattaagaaaaaggtttatgagttgttgagaagatgggagagtgttacttttttctttaatgctatggcctcctcgcgttcaacttcctgcatgtcacgggaagacttattcggcatccataccagatagaacatcttaccgtggagaaacacggacgcaacataaaagagaatttctgcctgttaacgcatggtgtcaattttttctgctgctgcggctgaatgttattggataaatacaaaccaaagtagtgcccagtgctataaacacacatgctgttgtgtgaatgacatcggatcgcgagatattagcagatacct

SEQ ID NO: 77932 - DNA, 517 bp, Arabidopsis thaliana landsberg
  unsure (1)..(517): unsure at all n locations
atcttcatttccttgaagctgtttgcttttttttttaacagatcattatcaaaatttctgctgggaatggagttggacaaattttagggggaaagtaagtttctttagtcatttaaagtttcttggatgatttacaatgctgaaagattagttttcctagcttttggtttatgtatggagctgtagagctagtctgtcagttcctctttgggtttgtgtttttaatgtcattgggattctccactttgttgacatatcgagctgaaaatccaaatatttgtagggaaggcattttgtcaaccccagcggtttccgctgtaatcaggaaaagaaaggcaaactttttaatttatatcttcttacaaagttcaagatcgtttttttcattactcttgttgataattattctcacaggcaaatggaggattcattatgagtgcaagccnnnnnnnnnnnnnnnnnnnatatgactggggtatcaaggtgaagtatcagtaacgtgcccttacttactttt

SEQ ID NO: 77933 - DNA, 517 bp, Arabidopsis thaliana landsberg
  unsure (1)..(517): unsure at all n locations
gaaccaccatggcctnnnnnnnnnnnnnnnnnnnnncatcgacgactttaaaaccattcgccgcactgccgaaaccttgggggggaaggagggtgcggacgtgttgaccgccgtcgacgggttcgaggcgctggccaagatttccgatcttcgtcccgacatcattttcgtggacatcatgatgccgcggctggacggttatcaaacctgtgcgttgatcaagaacaaccatgcgttccgttcgacgccggtgatcatgctgtcctccaaggacggcctgttcgacaaggcgcggggacggatcgtgggttccgagcaatacctcaccaaacccttcacgcgtgacgaactgcttggcgcaatccggcagcacgtacacgccaccgtcaagtgacgcgccctcgcggcattgcgcaagagagaacatccatggcaaacattctcatcattgacgactcgcccaccgacgtgaagatctttttcggtgcgctggagcgcgccgggcacaaggtcagcg

SEQ ID NO: 77934 - DNA, 487 bp, Arabidopsis thaliana landsberg
ggtcccggcgcagcaggtgggcgcgcagctgcgcgatttggtttcggtcgcgccaggactgctcctcctgcttggtgcggtagcgaaacgcgctgccggggaacgagccgttctggtggaagtagcggtagacctcggcctcgaccagcactggaccctcgccggcggccaggtgggcgcgggcctcgctcatcgcgaggtggacggcgaggacgtccatgccgtcgacctgcaggctgcggatgccgaaccccggcccacgggcggacaggcgcggctcgccggtcgcctcctccacgctcgtcgagacggcgtagcggttgttctcgacgaacaggcacagcggcagccgccaggcgctggacaggttgaacgtctccagcgtggagccgatgttgatggcgccgtcgccgaagtaggtcaccgcgaccgcgccggtgccggcctgccggtgggcccacgcggacccggcggacagcgggacgcc

SEQ ID NO: 77935 - DNA, 492 bp, Arabidopsis thaliana landsberg
tcgtcatgaacccatgcttgttctacttctaacaaaactttcgttatgattttggctaactatgtacatgtttttattttattttttgaacaaagatgtacatgttttactaggtgaagtttattactagactatcatttcatcgcttctgaatttatttattagtgaaaatagaggttagatttagtgccaatatattgttcgatatcacattttgacttctctcgggtgtacactaaattacgtttaattcttcgtattacttttcttggctttaattttgtttacgagtaatttgtacttccaagttttgtaagatctttatataaaaagtagcgggaaaataaatacaaattacaaaaaggcttttttgagtttctaaaactatttgggagtcaaatatggtgctctttttaaacaacggggactttttgcatctacctatatgctttggtcttgggacacagagtattttctctttgccaaaaacaa

SEQ ID NO: 77936 - DNA, 420 bp, Arabidopsis thaliana landsberg
agaaaaaaaagtacaaggatggagctgtaactaaatagattattagagcagagtacagtattatttcagaagctgactatttttactaagatcaagttgcatgcgcttaggccttagagacattgcgttgaccagtacattataacctgtagatttttatcataaaaatacatgagggtaacgttaagaaaaataaaagcgtcgatttcatttcatttttctcattctgttatttcatttttttgtatttaactttgagtttgcgaaagtcaataaatatttcttcgttatacgacctacattttttgggcgacataacgaaatacttttttaacttcttattataggataacatttatttaactcttttttcgtcatcctataagattaattaaactactaacaaaaaacctaaataat

SEQ ID NO: 77937 - DNA, 586 bp, Arabidopsis thaliana landsberg
gccgcgatcgcgcaggagctcaagccggtgctgaccaagcacaatgtcgaagttgtggcgcgtggcggcggcgtggccaatcccatggtggtggagaagggtaaggccgagatcgctttcgccaatgttgcgacttcggtttgggctacccagggcgccgatatctatcacggcaaaaaagcgactcacatccgcgcgctgatcggcggcctgaattcggtttacgtgacaatgatagtgcgcaacgccttcatcgagaagaccggctttgacacgatggacaagattatgtcgtcgggaaagccgctgcgcatcgtgatgaagccgcaaggctccgcggttccgccggccgtcgatcttatcttatcggcctatggcctggaccgggcgaagatcaaggccaatggcggcgagattatccaggtggccacggcgcagatcccggacattatccgcgaagggcgtgccgacatcctgttcgacacggttctcaagggccacccgatgatcacggaagtggcgctgaccggcaatatccgcttcctcgatttgtcgggagaaggtcccgcaccaaattgggccgcca

SEQ ID NO: 77938 - DNA, 278 bp, Arabidopsis thaliana landsberg
  unsure (1)..(278): unsure at all n locations
gacccgacccccaaaaggagcaaggaaagangaagnagggcgggacgagancacncgagggangggggcaggcaagacccgcngcccaacgcncacgcggcagcaaaagaaggaagaggcagccacgggcccnnccgcccggcaagaagagcncacgcaccacaaagagaacacnanncggnccagaaccgacaggaagccgacagggcgacnaggcaagaaaccccccgggaagaacaacgaagaaccaccagccancagcnaaacaagaagcgaaa

SEQ ID NO: 77939 - DNA, 598 bp, Arabidopsis thaliana landsberg
taaggtatattccaaagaaactttgaccagaaaaaggaattcctataacagatattaagaagagacgataagagctaagaattactgaattattagaaaatattataaatagagaaaaaaacagaagaagaataaccaaaaaaagtaactagtctctattacaaagaaactttgaccagaaagaaaaaaagagcaattcctataacaaataagaagaagagacgataagagctaagaattagataactattagaaaaagattataaatagaggatagctattcattatttcttaagtacatgaaacacttgcaacaacaaaaaagttaaagatatgggtgctaaatggaattcaatgattataatggtgttggtggtgacaatggttatagcaatggaaaatgtcaatggagagacgagagctcaatgccatgaagattgcattacagggttgtgccaccacaggaacaattccgatcaagtgccttcagaattgttaccgtcgatgtcccggcggaaacctcgtcgtacattaggtcaccatttttcagaaggtaaaaaaaaaaacaatctaacaattttggaatatgtcaaagaaa

SEQ ID NO: 77940 - DNA, 595 bp, Arabidopsis thaliana landsberg
agaaacaaattataactcagatattttcacacatatataatttaagttttgtggtgacgttattttacacgagaaagctgaaccttgtatggaagtaattagctgctacctattactgattattcttcttcttctttcttccaatttcttgtcttcttttggtacaatttcttggctttctcttgtcaagttttcaccagtcacaagatttttgaggagccttgttttttccgagaatcttgtgtaagttcttgttggcatattttcctcatgatattttagctctatcatcatgaaaaattatacattttgtcccctctagttattgtttctaatctctttttttttgttactaacaaatccattaaatattgacgcaatagatttgtgcttttgtcagtaatcatattgagagattaatggagagtaatatgcaaaacttgttggagaaattgaggcctcttgtgggtgcaagggcttgggattattgtgttctttggagactaaacgaagaccaaaggttgatttgattcttctaataagtagttacgctttaaagagttttatctctatctatccatcctttcttctcttt

SEQ ID NO: 77941 - DNA, 575 bp, Arabidopsis thaliana landsberg
  unsure (1)..(575): unsure at all n locations
ctcacccatgtaagagccatgacgataatatctgagtgcatagccggtggcaaatgccttaaactagttagcaaattcactaaaacagatccacggccatcaacgtaggtctcatcttgatgctcattctctgaattgccaaactgttcatccgtatcacgttccactctctcatacttgattccattggcagtaccattatttaattttgaatgctcaaggcctttggactggagatcatccaacaaaggtgcagaatcttgtatgcgggtgggcttgttgcttgtaaaaggaatctctttagcaaaatagattgtgacaagagtacatatagtgagaaagacctgaaaaaatgatttacactcttaaaacatatagaacaatatattcagattttagactatgaaacaagaacaaaagccactgggtgcaataatataatttcactttcaaaatcacctcaaaaataatatagacatacaaacagaacgcattgatttgctcgtacagaccagcccattccattgctatttagaaagcttagtangatgcatgtgtcagaacattaaacatac

SEQ ID NO: 77942 - DNA, 127 bp, Arabidopsis thaliana landsberg
  unsure (1)..(127): unsure at all n locations
aagccgaccgaagcaaagacaaaagacanaaacccccgaagaccgggaagacacacgaaaccaaggacagagggangacagcgaacgcacagaaccgcgagggaccgaaggacnccaagagnggaag

SEQ ID NO: 77943 - DNA, 684 bp, Arabidopsis thaliana landsberg
tgatatattcgtcacaatgctgtgactttttatatacatattattttattattacatagtatttgtttctattttgaagaaatatttgtatcaaaaaaattacttcttgtgcagtaattaataaatagacggtttgaaattcacaaaattattattcctgcatttaataaaagtaaaaaaagtgtaacaacacatcactttcatggtcacaaagatcctaaaagttaatctcaaacctaaccatctcacgagtccaactataaaatcattgaatagcttcaccaaattcactgtgctctcttcttcaatggaacaacaattaaccttagtattgcttgatagcccaaaaggcgccaaaaatgtagaaacctttgaagccgcgtcttcttcttcttcttcttcttcttctgttccctcctcctctgatcaccgccatcgaaccttcgtcaaattcttcctttacttctctctcgtcgctctcgcttactatttcatcatctccagtttcgccgtgagatctcccatttctccaacattgccgcaatcttcttccggaaacggtaatctttctttcgctgttcattctccttcaatttcgaatttgatctttgataaagattcgagaatctttccaaatatggagactcagtgattgttgggttgggtttaaatttggaaatttcg

SEQ ID NO: 77944 - DNA, 325 bp, Arabidopsis thaliana landsberg
  unsure (1)..(325): unsure at all n locations
caaaccccgcagaccccggcgacccacccagagcaagacgcncaagcaanccgcacggancgagggccaagcnnccgagaancggacagccagaaagaacaccacgcacgganccgccaggaaccggacaaaaacgcagngnnaagnnccnnagggaancccaagacaccgcgcangngggaancanancaaaaaagnccaacgncacgncgagaggcnnnaaggaggaaccganacagaagaaanccggaaaccngcaagncncggggcaggggaaanccccaacgaacacagacagannnngcacanngcgggagagagcaaa

SEQ ID NO: 77945 - DNA, 570 bp, Arabidopsis thaliana landsberg
  unsure (1)..(570): unsure at all n locations
gaatcgcccattgaattggctaagattctcgacgacgtnctagcattgaagggatcgatcgaaccgtggcggcggtggtgctcgaaacccattttgagcgggggctcggagtttagccctatttcactaacagataagtgtgagtgaggtcttgctctccgcgtctcaaggcaatccttacttttgtgccgggcttcgctttggccagctgctggccaatttccattacgtcgagaggagtgcggatgggctgaccattcaccatttccaccacgtcgccgctctggataccaaagcggggaagcaggcagtttttcttgaagtggctcactttgattccattaaaaaagccggagggtaacgcccggaaggtgccaagctgggattggggatccttgatttccctttccacggccccgcggctcacttcgaagcgggtgcgtgaaacctggttcacgaggggcgcggatttcttggcttccgaggccagaggaagaatgagggcaagggctaggagcagggttttcatactttcatcttagcaggagcgcaggcgtcgaaaaagaaagg

SEQ ID NO: 77946 - DNA, 489 bp, Arabidopsis thaliana landsberg
ctggatttaaactataaacttaacgaaatatctatcctgatatgatcgattaatcatataaggaattaaaatgaagataatataattataaccacaaaaataaaagggtaacaaagattaagcaaccgaccttattttagtttatagatcaaggactggtttatagatgatcttcagatcaatggtttgaatccggtaggtcggattattattttagaagctttgttatttttaaagattttcttagcttagaaataatttggaaatgatcagagagaaagagaaagaagataatttaatgaggagctgagaaatggatgttggtttatataataatatatgagttggttgatacaggccaggtctgtgtatttctttcatttaactctttttatttttgatccaatatatatatatatatagggttgcttgcggaaagtttttttttttttctataaaacttcaactactattgtccattaattgata

SEQ ID NO: 77947 - DNA, 592 bp, Arabidopsis thaliana landsberg
  unsure (1)..(592): unsure at all n locations
ggactttgtagacattttgtttgatggtcttcttcggtgctcacattctttgtttttaagtgcttgatttggttgttaaggtcctttccgttgcgtgctctcagtgaatatgaagaaagatgaaaagattggtttgacggggagaaccatttacaccagatccctagcagcttcaattcctgcctcagttgaacaagaaacccctggtttgaggaggtcaagccgggggacaccatctacgaaggtaataactccagcttctgctactagaaagtcagagagactggctccctcacctgcttcagtttcaaaaaagtccggtggnnnnnnnnnnnnnnnnnnnnnnnnnnnnnnnnnnnnnnnnnnnnnnnnnnnnnnnnnnnnnnnnnnnnnnnnnnnnnnnnnnnnnnntaattctatcaggaaaggagatacttcaccggatattgagcagagaaaggatagtgttgaagagtcgacagataagatcaagcctataatgtcagcccgaagttacagggcattgtttagagggaagctcaaggaatctgaggcattagttgatgcttccccaaatgaagaggaactaagt

SEQ ID NO: 77948 - DNA, 565 bp, Arabidopsis thaliana landsberg
  unsure (1)..(565): unsure at all n locations
attctagcaggaaatattcacttgtctatgtnnnnnnnnnnnnnnnnnnnnnggatttgcaatgaaaacagcatgctgccattccatccatcctgaatttgctagatccaggaccacaatcaggactgcacaccgaagttggcacctaatgaaaagtagacatatgctgctaactggacttttatttacccttccataattacattatattagcgtgtggtattaagaaactaattttatatacactaacagagttagaagaattttacctagtgcattttaggaggacagatatcaatttgtggaaaaaatgaggaaaagttgactcgtctcccaactatttgaaattcaagaataatccatgaaagcctcctgtgtgaaaacactacagaggtttcacggtggttattctagttaattcttgtcacctgagcatataatgctgtgtaaaggcacagagaatcataattgagaaattatctctgtcaggctagtctgtcatcatatatgtgaagcatatattaaatatttttttaagatttaattatttattatatgaagtata

SEQ ID NO: 77949 - DNA, 497 bp, Arabidopsis thaliana landsberg
  unsure (1)..(497): unsure at all n locations
cgtgccatttctcttcctataaatatgcttctttctcttttctcttcactattctacactacggctctcttaaggctaagaaaccatctgtctctctctctctctctgtctnnnnnnnnnnnnnnnnnnnnnnnnnnnnnnnnnnnnnnnnnnnnnnnnnnnnnnnnnnnnnnnnnnnnnnnnnnnnnnnnnnnnnnnnnnnnnnnnnnnnnnnnnnnnnnnnnnnnnnnnnnnnnnnnnnnnnnnnnnnnnnnnnnnnnnnnnnnnnnnnnnnnnnnnnnnnnnnnnnnnnnnnnnnnnnnnnnnnnnnnnnnnnnnnnnnnnnnnnnnnnnnnnnnnnnnnnnnnnnnnnnnnnnnnnnnnnnnnnnnnnnnnnnnnnnnnnnnnnnnnnnnnnnnnnnnnnnnnnnnnnnnnnnnnnnnnnnnnnnnnnnnnnnnnnnnnnnnnnnnnnnnnnnnnnnnnnnnnnnnnnnnnnnnnnnnnnnnnnnnnnnnntt

SEQ ID NO: 77950 - DNA, 554 bp, Arabidopsis thaliana landsberg
  unsure (1)..(554): unsure at all n locations
cgcttgtttgcggtaaaccgtgtgccttcgagaaaattgagtatcaatgccggttgatcgcggaaggcttcacaagccttgcgtggcgtttcgatgtctttgcccttcaacgccggattctttgcgatctgctgcttggtgtgtcgcgccatgaacggatagtcgagcccccaccatgccaagcccagcaacggcacccaaatcaactcgcgcttcaggaagaacttgaagaatggcgctttgcggccgaacgctcccatcagcagcaggatgtcgttccagctctgatggttggcgcaaaccagatattgccctttgggatcgatctcggcgttcaggcgcacatcccatttgatgcgcatcaggatgttggtcaannnnnnnnnnnnnnnnnnnnnnngctgggcattccaggcgacgccgcgcgaaaccagactacgtgccggaccnnnnnnnnnnnnnnnnnnnnnnnnnnnnnnnnnnnnnaccggcacacaccagatcagtgtgttgatcagcagcagcagcgcagaaatgacgccgagcacgggagc

SEQ ID NO: 77951 - DNA, 632 bp, Arabidopsis thaliana landsberg
  unsure (1)..(632): unsure at all n locations
ctcttttacttcctggagttcgaatttgtactactcgccttcttctccaaactcattcagcctccaaaaaaaaaaaaaaatctagcaaactcgtctctctgggttttgtttcccctatggcttaatcaccactagattttcttcaacgaggggaaaaaaaatccagagatattggaaaaaaaaaagaagaaccttatctgtggcggttcgtcgcgaagcacgccgtttaagcgaattagctcaagtggggaagaaaaggcacagagagttttgtgtaagggagattaagccacgtagatttatttgtaaccagtaatccatagccacctggctaaccatatcatccatggccattgggtctgttggttcggttcgaatagataaaagttcggttttagttgaagagattgaactttgaaccgtatttataacggttcggtataattctgggaatggaattgcggttcagttttaccaaatattggttcaaattcgtttacaatttggctaatttttttgtttttgttttagtgcaattttgatgaaaattggcngagtcctaaatataaagaatcaaaatttgaaatacaatgaatgaatgaaccaataataataaccattggtttactcgg

SEQ ID NO: 77952 - DNA, 520 bp, Arabidopsis thaliana landsberg
  unsure (1)..(520): unsure at all n locations
ccaccgacggcacagagcgcaacagggacgaagttacaaattatccccagaacncaggaaggggcnncggggcaacaggaggcccaaacacccaggcccagcaaggaaagaagagagcaaacacgcggaaggaggccaaaaggaagagcgacaacaaggacgcaaagaagaagccgacaagcgaaggacagaccggcgnanaggaggaaaaggaccagcaagaggacgaaccaccaaaagaaccgaaagaagcaaacaacgcaaaaaccaggcaggaccaacagnggcaaagcagggaaccgaccaagcgaaaccaagaggcccgagaagncancagacgcacacaaggcaacacggggcacaaaggaacacaagggcgggacggggaccgacacaaagganangaaagccaaagcagnaagnncaacacaggcncgaccaaccgaaaccaccaacaacacgaagaagcccgcaacnagccccgaaagcacaagcccgaccaaacaacgcaaggcaagca

SEQ ID NO: 77953 - DNA, 148 bp, Arabidopsis thaliana landsberg
cacaccccccacgggggcaaccaaggaaaggaaaaccgggaaaaccccgagagcaaaaaagaaaacgaggcacgaaaacaaaaagccaactgacaaaaaaaaaacctgaaaaaaaccggccgaacgcaccagaaaacgaaaacaaaag

SEQ ID NO: 77954 - DNA, 477 bp, Arabidopsis thaliana landsberg
aagaagagggtgggaagtcgaatgaagaggctagtggcagcaaggaggacaagaaagatgacgatgctgataagatggatactgcgtagtggcgtccgtacgatatttgcatggcgggcgttgggcatgtaccaatagatatcacaataaaatgatgatccgcaaagatctgtgctaatctctttggtctgctgcttttattatcaatcccatatagatttcttctacattatgttcggttcaggccgctcccaggggccgctttgtcgttgccagtcgtttccaatcactggtagaggaccgacctctcgaattaggttttattgctcccagaccgaggatcacccctcaggcaactcttccatcttaggaggatggtgggattctacccgtctcccactgccatcggtatagtctcccatagccatcagctgcacaagagccctgtggtcacttccaatagcaacccaaccccag

SEQ ID NO: 77955 - DNA, 554 bp, Arabidopsis thaliana landsberg
  unsure (1)..(554): unsure at all n locations
cttcccctgtgtagtgtgcactcataaatacctatttatcattcgttaaacttgtcaacatttataaggaaaacatttctagtattatctatatggacttacagcaagagctgtgggtccaacatgagatgtcaagttctgtttttgaggtccaccggttcgatactcatggctaggagttatgagccagaaaccaaccgatggctgctctgtgcatatccatccgtggacagtaatgtctttgttttcacacgaatattggtacttatcgtcaacctaaaaccaggttaaagcaaagtttacaacttcttacacaagaaaacagtttctctctaataatcttgaagaggaagaaaaaatgaataaatttgacctctcctttgaactgagactctaaaggattaacaagtagaacagcttcagggtaagccagagnnnnnnnnnnnnnnnnnnnnnnnnnnnnnnnnnnnnnnatgaatctctgcctatcatccgttactgccatgtaatgaaaacctgaatcacagtttaaattataatcaaaagtcaaagat

SEQ ID NO: 77956 - DNA, 530 bp, Arabidopsis thaliana landsberg
tcagctggcgcggcgtcgggtctgtatccgatttcggtgttttcgatcgtggaagagctgatcgaagagggctgggtggtggagggcgggacgcatcggctgccgcgcgggcggaggccgacgctgctgtcgctgaacgaagacatcgtgatgctggcggtagacgtgcggccggagcaggcgacgattgcggtggtagatctgaacagccgattgctgtcgcaaaaggcgatcgtgctgccttccaacgtggagcgcgcgctgccggaactgattgcggcactggcacgaatgcgggagatgcatccgaccaagacgtttgagggcgtcgggctaagtatgccaggtcgtgtggatccgcggacgcagaagctgatcctggcgccgaatctgcactgggcaggacacgagattgcgcaggtgattgaggctgcgctgggcctcaaggtggagatggagaacgaggcgaatgcgtgcctgattgcggagatctggtcggggccgctggacggagtgagcaacgcagtgct

SEQ ID NO: 77957 - DNA, 531 bp, Arabidopsis thaliana landsberg
  unsure (1)..(531): unsure at all n locations
gcgcatacccagctgtgccccgacggggaatccggcttcgaattcattctggacgtgctcagctttcggggcggggatgccgtcacggtaaccggctgtgacgtgttggcggcggagggaggggagctcagagggttcaacggttgcatttttgtgcgcttgtgggagaggttgttcggctcgcggaggcgaggaaccgaagatatcgtcgagagannnnnaggccattatggggtcgactgaatttcgtgaggataatgttgatggagagtccggaatggcagtcgagaattgagaatctcactggactacaaaatttggaccgcgaaagtggatccgtggatcacctagaatccactgcccgactggattgtatacactgttagtagggtttagctgggtaaagccaggaaagtaaagtgggagaagcgcatctttcgaggccaagttgccttttttcgtgaagcctcaggagagtacaagccaaggcagttacttttgtctccaggcggctgtcagacatgcttacca

SEQ ID NO: 77958 - DNA, 217 bp, Arabidopsis thaliana landsberg
  unsure (1)..(217): unsure at all n locations
agaaggaaaaagaaccnagaaaannaagaaccaacaaaggagcagaaaacttacagaacncgagttacttgaacaagggaaacccgaaaagaggcaaagctccaggagcacggaaggggcgcagagccacagcgaaggagacgcttccgtgggtacaacgaacagaataatnaagaacaaggaaatcgcacctcccaaaaaaaaataaacacacagc

SEQ ID NO: 77959 - DNA, 384 bp, Arabidopsis thaliana landsberg
  unsure (1)..(384): unsure at all n locations
acggcacagacgactaacatgaggaagccggnaatgaatattttccaccacgaangcnngaagagcagacccagaaggagangacccgaggaagacaccacgcancnagccgcacacaacaccgggcagaccaaacagaagacgcaaagccgcacaagccaaggccgagccgaggacccgaacagagacggaggccgggaccggacccagagggaaccaacgggaagacgcaaaggcaagagggacagcaggacagaaacgcgcagagagggggccgagacagnaaacaagaaccacaagcactagaccccaaaccacagcaanccgcacaagaggcaccacacggcggggaagagcaaacacggcaaaggcggcacagccagc

SEQ ID NO: 77960 - DNA, 245 bp, Arabidopsis thaliana landsberg
  unsure (1)..(245): unsure at all n locations
gaaaccccaaaaaggccacaaaagcaggaagagcaaacgaaaacgcaaccaaaaaagacacacaacacaacccacaagaaaggccgacaaaaacaaaaggcagacaaagaanagaaaacgaacaacgcgccggacaagcacacacgacgaacaacagacgcggaaccccaaacaaacgcagcaagcgccacaaagagaaagaaaaacaagacaacggaaaancaacaaggcgcaaagcaaaaaag

SEQ ID NO: 77961 - DNA, 593 bp, Arabidopsis thaliana landsberg
ttatagaaacacatatggcatggatatgtcaataacaatataaaaattatatccatatttaaaaaaaaaaaaatagtttgatttaagaaaaattacaaaataagctattcaagtactaactcactttctagagagagattagaaggcagtgactagaggggtgactagaagaagaaaaaaaactagtactgtattcacaattataactatcgtgtgtttatgatttttgaaaatatttattggactagatacatgtttataatattggaaacctatgtaatctttttaccgtctttgtcaacggcaagctatttccgtttggttaaaatgtcttggagacattttgaagccctttccaaaccttgatcgtccctacaacgtttatgaaatgtgaaacgtctataaaatggagtatctttttagcttagttaatttattcattgtcgattggttttacttcttttaagtttgaagcaatatctgttaaaaacatctacacctaacaaaatctaaagaatcagaaaaacaataattaaatttttataaaagataagatttttgaaatgacctgggaaagacagtcttctcctttt

SEQ ID NO: 77962 - DNA, 527 bp, Arabidopsis thaliana landsberg
  unsure (1)..(527): unsure at all n locations
acacatacctcagttgcatctgctttctcgttgttttcggttagccctgtcattaacaaaggcatggcgacttgttacacaaatgatttcaataataacagccttccgcagggcgctgccatggatataggcgcatttgaatatactgcttccatgcagggattacaggacataccgcttaccgcaaacggacacgcgctcatannnntcgctgctgcatcgcatacttccgcaacacagcagtatgcggcgcaggaattaagccgctacctgcgacagatcaccggcgctgcattccctgtttcccttgcaaggaaaaaggccgggcctgccatccgtttcctcaccagcaaaacaatgcctccagagggttacagcatatccatcaataaacatgatctgctgctcacagcaggttctgatcgcgcactattgtttgctgtatatgacctgctgcgccgtctnnnnnnnnnnnnnnnnnnnnnnnnnnnnnnnnnnnnnnnnnnnnnnnnnnnnnatgtaccccg

SEQ ID NO: 77963 - DNA, 590 bp, Arabidopsis thaliana landsberg
  unsure (1)..(590): unsure at all n locations
aatacgagggaactgttttatatcaatgaattgtacaccatcattttgaaaatctgacattcgcccgtctttaatgaatttgtaaatgtattgagccgtaacaccctcacctgctgnnnnnnnnnnnnnnnnnnnnnggttattcaagtcaacggtatttttaactcctttcataaatcaaaagtaattcatttagtttaaagttgaaagttttaaactaaaatattttttaaaatacttcatagattagatttatctaaatatattgtactggtcagaatgttttatgaaaaatataaaaagcccaaataattccaattaacccaattccaattttggttattgccttgttcagccattgttcatctttataaactatatgttttaccgaaatcgcaatagaaacagaagaaaggaaaatgattccaacgaaaagcccaaaggtttcgagattcatggaacaacaggcgattgggtaggtataactgttaatataatattggctgcatttactttgtgggctatatctctttctaggacgctattaaaagagctgataccgctaacgaaatatctaaaaatgctttgaa

SEQ ID NO: 77964 - DNA, 599 bp, Arabidopsis thaliana landsberg
ctttccggcgaacaccccgcctttgatcgtggtgtccccgccgctttgcatgctggcgactttgcctgcgtcgacatggctgttggtgcagctgacgtcgctgccgtcggcatgccctcttgcggcgctggcgttggcggtgataccgatgccggtgttgctgccaaggctgccgaccacgccgatgccggcgctgttgctgctgttgttgccgtgctgttcggccgtgttgcgggctgcctgcagcaggagggcaccttcggcgtcgagcgcggcatcgtgaccggcgctgatgcggctgccggtgaccgtgatgccgctgtccttgccggcgccggccgcgctgatgcgaacgtcgttgccggcgacgatggtgctggcgacggcgatggtgccgctgctggcctggctgctgtcgctcttgctgctgcacagcgtcagggcgaggctaatgccggccgggttcttggggtcggccttggccagatcaagtggattgcagtaataatcggggaaatgcttaccgaaacggcttgccacccaaatctggaagaaaaagaatggcagcttttcagctatcactttaaaaaatttgccct

SEQ ID NO: 77965 - DNA, 128 bp, Arabidopsis thaliana landsberg
caacacgacggtcctgacaacattaataaaacatgaatgtctaacttcaaaacaatgagtagacaggaaatgtagccctcttaaactcaagcatggcttttatttcttgtaagtcgcagcgtacatat

SEQ ID NO: 77966 - DNA, 650 bp, Arabidopsis thaliana landsberg
ttttccaatgtttatgatactcaatttctatcatatcttgtgaagaaataatcagatcttgaattatttcatattacggtgctttttgacttgacaagtatgatttattgtatatagttgaccagatctaattatatatgtaaaaaaatgtatatataaaattcataattcttttttatatatattatttttctttttagttagtcgttttataatatttacaatatgaattaataggtttatttgaaaacactgaagaaaaatgacaaaacaaaacgtgccgaaagttctttttttcttttttgtttatacagttctctgggtaattaagttttttaataaagggtttgcaattatgtgtattcaagttttcttgtgggatcgatatgaaagttttgacctaacttttcgtataaattaaacaagcgcatttaagtatgcacctttattgacgactacataacccattaatgtaatttatgaatgctatagatagattgtaatttctgattttacgtacacgtcaaagttctggcaaaaaagccattaatgcgtcaccatgtcactggtttccccaaaaaatgtttgtctttggattaaacagtttctattgaaaatatccagtctttaacgtcctatccatatttatt

SEQ ID NO: 77967 - DNA, 586 bp, Arabidopsis thaliana landsberg
  unsure (1)..(586): unsure at all n locations
ttgctgttttcgctgagtcgccctccaggcttcgggcaaggcgccgggtacatccgcatattcgtncttctctaaatccagaaaaccaagaccagaacgagccgtcgaaaattcgaatcagacatggcggctgcacggcgtgggcagtcgtccgatcggcgacggcatgggcaattgcggatcgctgcgacgcgattgcagcgtcgtggactggcaatggaaacaatcacgtgcgtgcgcatatgagcacgcaccagacggcggaacgacatgggatgcctcgcatttcgacaggaatggatgcgttgacggacgtcaacggcgagccacaagcggggcacggtgccccggtcgaaacgcgggtgttacagcctcaatctctgcgttcgaagatagaggtcctttccatgcagaggacgatcgccaaactcgtcccagcttcgttccgtgggctggacgggcagcgcgaccgccagcacggcgggcagcagaatcggcagcagagcctgcggtgccggactcggcagcttgaccgatgtaacgagaagaccgacctgatcgccaatgcaacagacagatggacgac

SEQ ID NO: 77968 - DNA, 612 bp, Arabidopsis thaliana landsberg
  unsure (1)..(612): unsure at all n locations
tatgatgttgtagttactataggatcaattagttttgcaaagtagacatgatcttgtcatataaaaggaatttggtataagttatttcccgtaaaaaagtgaaattttctggtcaaagttagaaaaaaccatacatttttctatataaacacgttgaccaattttttatattaaaataaatagctaataaacaatgtcattaaacaagttttcacgatttaatgagttgtatattgccccttgaatcaatgtgtactgttttttatatctctgttaagctgtagttaattttcaattattctttttactattttattatacggttaaaatctttcttacaattatatgtataaaaaactctttccgtttagattatattgtaaaatcaaccaatgctaatattgttttctcttataatacaatttgtatggtattgagagatcaaattatcgttggttttgataactgggtgtattttttttttacaatttagactctcttctaatttgtcaaggaatttgttgtggataaggaattaggaattacgaataattttttttgtatttaatgagattttagaggattacattagttaaaacatacanactctaa

SEQ ID NO: 77969 - DNA, 103 bp, Arabidopsis thaliana landsberg
cggcgagcagcgccgcctttccggcaactgcgccgttacagcgtatagccgagcgtcgaccacggtcaacgcgagccggtcaagtcggatgctgcacgcacgc

SEQ ID NO: 77970 - DNA, 399 bp, Arabidopsis thaliana landsberg
acatccatgaatctttggtggctctagcacaagcaaaagtggatgaaaaggatactgtgagaaagagaggctgacgacccacaccactatgagctaattccatatcacctactctattgacaagcttacctgatgccactgctttatcttactgaactcgtggaaacccaaaatgaatctacagatctgatgcaagacctaatccctaccatgctacgaataatgggggagagggatctacagccaccaacatcggactgctaaaaggtgacattggatagacaccacataaatcgcgggctatccggatcctggtacttctctgagatggaatagagaccgaccaagctgcttatggatgctacgacgatcaacatcgacacagctgtgctatcgaac

SEQ ID NO: 77971 - DNA, 298 bp, Arabidopsis thaliana landsberg
tctcgaaatcttctcactctcgagaaacctgaacccttagtttatccgaaatctagggtttgtaacttgttccatgagttcgatgattaggataatttgtgtcagtttataaattaggttttgttactttcgatttttcggagatattgctgcctacggttgatttgatagctatgagaattcaagctgcgaagtgaattttaaaattgagaatcttgtatagtttcactaattattgttttgattcgtatatcaatgaaataatgtgaaatggttagagaatggattttgatttgaa

SEQ ID NO: 77972 - DNA, 609 bp, Arabidopsis thaliana landsberg
  unsure (1)..(609): unsure at all n locations
cagcatcaatgcgatcggcgcggtgaagcttgacgnnnnnnnnnnnnnnnnnnnnnnntcatcggaaagcggaagacagaactccggtggttcgagccttctggtggatcacagcagcatccgcaattcgcggcacgatgcgatctcggtgcactggggcggcggtggcgaaacaatcagcaactcaannnnnnnnnnnnnnnnnnnnnnnngcatgcccgccaatgcgcgcgcggcgatcgacctgacggtcggggacggctcgcatattttcaacaatagcgtgagcaattcgggctatatcggcatccggtttttccgcaacgcggcagtctcgaataacacggtcgataccgcctgcgtcgtactcaccgattgcggcgggctgttcacctccgcgcccgacaagctcgcgctcaacacgcacatcgagggcaacacggtaaagaatgtcggggcagcgcanacactggcctgggcgatctacctgggcgactacgcaaacggcgccactgtcaccaacaacgtcgtcgcccgcaacggcaacgggatgaacattcttgatggcttcaacaacagcatcagcggcaataccttctccgacagcac

SEQ ID NO: 77973 - DNA, 563 bp, Arabidopsis thaliana landsberg
  unsure (1)..(563): unsure at all n locations
ccgaaccggattttgtggcgcgggagcgggacttcggtttccccgttcccgcttgcggctcccccacaggttcatcgtcaacgccggaaagcgccgccatgacgacagcattggccagcgggataaattgcaggcttggcaggtcgtcaaagtacgacttcatcagcgcgccggcggccgagacatcagccccgccaccgatcaggccnnnnngnnnnnnnnnnnnnnnnnnnnnnnnnnnnnnnnnnnnnnnnnnnnnnnnnnnnnnnnnnnnnnnnnnnnnnnnnnnnnnnnnnnnnnnnnnnnnnnnnnnnnnnccgatcggcagtttgaaaacgcggtcatcgcccccgaaattgagggtgattgcagtcgaacggctcattaggaaccgccgacgttggcgccataagttcgagcaatggcgccggacgaattgagcgtaatcgtggcttcaaccttagcgccacgatcaccggtgagttcaaattgcgtgcagtggtaatagccttcatatgtgatgacgttggctggcatatcgtcatcaacaatgacttgggaat

SEQ ID NO: 77974 - DNA, 222 bp, Arabidopsis thaliana landsberg
aaaatcgtctttatcttgtggtagccagcagtaatgatattgctcatactctattttgcacgctccatcaaatataacaagactggtatgctgattatttggctgattctgcttctaaatttgtcagtgtaagtacaaaatttgattatgttatacctcatatatcttgcattttcaagttttttcatttttcattttatttaaaaaagcacatatttgttg

SEQ ID NO: 77975 - DNA, 526 bp, Arabidopsis thaliana landsberg
gaagatctaatgaattttgaaacaatcacaaattaatccgtttatatttagtatgaattcgtgcattacgctaatgacattgattatcttgacttattagctgtttctaaaatatagtctggtttcaaatggattgatatatcatataaatgcaaaaccaaactatatatttttacggtcgtggttgacgaaacgttgactaagttgttcccatcattagagctaaggtttatgctcatgtcggagtgtggcttggtgaggaacagatgtgaaactggaaactataacaaaaagttgaaactttatgtcttaatgatgagtttctgttaccaatcaaagaaggtagtagcattgggttttgtctacctcgagaaatgaagttaactttgtgaaacaatgtaccttttaacgcttttctttgtacttttttgggtgtgatttatatggttttgggaagtcatactaattttagattctataagtcgttatggaaatttcacggctgcaaaatatatatacatacatt

SEQ ID NO: 77976 - DNA, 471 bp, Arabidopsis thaliana landsberg
tcttggccatgtccgggctcctctcgtttgcctgtacctgaatcgtaactccatgacgttcagacgtctagacgtttcgacgtctaatttaggggcattcagggaaagcggaaggcccgcgctgcggacggcagtgcgggccttcgtgcggggagctggctagtcgtctacggggcgtccccatgacgtccacgaccgtccggtgcggttttcgaggccaatgcgtatccgctcgttctgggcggtcaggcgcatgcccttgtcatggcggccccggaggaaggcgttctccgccctggtgtccaggcgctcgagccggtcggggtcgcttttgcctttgctgaacagtcccattggtgttcctttttcatgttgcctgtacccggatcgtagcctcatgacgtcctgacgtctagacgtcacgacgtctaatttcaggacatgcggagaaaggggaaggcccctactgtt

SEQ ID NO: 77977 - DNA, 335 bp, Arabidopsis thaliana landsberg
gtcggggagtcggtttgcatgagggcagccataaagttaaccaattggtattgtatttatgactggaggcgcggcgcaagctgcgcggacgatgacatcgttcaatcaacagcgtcgcatccctttatctcgtcattccggggccgcccgcgctgtttgcgggcggaacccggaatcggttttcgcagcacgcacaccgattccgggttcgcctgcgatgaatccgcagtcgccccggaatgacgacaattccgagtgattcagtcgggtcgctcaatgtttggtgtcgtgcgaataaacccgtccgttcttcaccacgaactcgatctttgtag

SEQ ID NO: 77978 - DNA, 420 bp, Arabidopsis thaliana landsberg
  unsure (1)..(420): unsure at all n locations
ggcaaangtatgggattagaggatgggaaattggtttgtttatggttcatattttatggttgatagtttatagtttatggaccatggactatagactatcgactatcgactgattcactaaaatggtgttaagatgagagtgacatattccccacggaagggctggtataattggtgcctgatatctggaaaaaaaatgaaacgcatttacatggttgttgtatgcctgcccnnnnnnnnnnnnnnnnnnnnnnnnnnnnnnnnnnnnnnnnnnacatccgttcctgtaaagaaaactaccacggagtcaacagcggggatggaagcttccatacttacctatatcaatgcccacaggagggcgaagggcttgcctgccctggtttcaaataaagcgattgcgcaccaggcagagataca

SEQ ID NO: 77979 - DNA, 389 bp, Arabidopsis thaliana landsberg
  unsure (1)..(389): unsure at all n locations
tttaacgttgccctggcgccgagcaactcgctgctcaacccgctggcggtcaaggaactgttcaacagcggtggccagagcctggtgcgcggtgtggcnnnnnnnnnnnnnnnnnnnnnnnnnnnnnnnnnnnnnccacgccaggtcgacgagcgcgccttcgaagtgggcggcaacctggccgccaccgccggcgccgtggtgtttcgcaacgagctgctggagctgatccagtacaagccgatgagcgaaaagcagcacgcccggccactgctggtggtgccgccacagatcaacaagttctacatcttcgacctcagctcgaccaacagcttcgtccagtacatgctcaagaatggcctgcaggtgttcatggtcagctggcgcaa

SEQ ID NO: 77980 - DNA, 532 bp, Arabidopsis thaliana landsberg
  unsure (1)..(532): unsure at all n locations
tggaaccttttgttatccggtttaagcaaatgttttgttagttttctttgatgggttcgttnnnnnnnnnnnnnnnnnnnnnnnnatttgactcaaaaagaaaaaggtttcatttttctgcaaacccttctcagtttcctgaccaatttccaattcactttgttaccagtagtattcacgccactagagcttcctcaatcggttcttcgactagggtgcttgacaaaattcgagtctctagtctcggtactgaagcaaacgagaatgctattaattctgcaagtgcagctcctgtggagagaagccggagttctaaattgagtggtgatcagagagggacaaagaaatatgtagctcggaagttcagttttcgaagaggaagcattgatcttgagcttgagaatttgtttgtgaacaatggggaaattgatgttaactattccgctattaaacccggtcagagtttggagcatcgcaatggaatattgaaacggcttgagagttgcagtgacaccaatgccatcaaattctt

SEQ ID NO: 77981 - DNA, 380 bp, Arabidopsis thaliana landsberg
gtatttaagaagaatactaaacttttaatgtatactgtacttgaaaatataccccggtgaagcgtcaacatattataaaatctcactttactctcgatgctcgaactctttattattgctatattgatgatcttggatttcacattccctaaatctaacctaacttgtgatgcatggttccacgacgtctattacaaacacatctatcatgtttacttctatgttcattactcgcaatcaaagatattgctttgcttcaaaggcaaccaaatatataacttttctaagcctatgcttcattcacattaaccctaaggacgactaacaatgatcttaaactacattccttatttaataacaatgaacatggagagaacata

SEQ ID NO: 77982 - DNA, 401 bp, Arabidopsis thaliana landsberg
  unsure (1)..(401): unsure at all n locations
accccggaaggccagggaagacacccgcccaccaaangcttcagagataacacggcccacaggaccaggagaccccaagaggggatacagcccatacaccccagccacgagaccgccagcaaccacaaacaaaagaacaacccannggaaggccaaagccnaagcggaaccaccaacaggnccaacaanncgcgcagagcaccaagcagaagacaccgaagcagccanaccaggncccaaggacgcagaccaacgggaaggacccacccataccctcgancacacagaagncggggacanaganccaccaggagacggacaanaccgacgagaanncgccannaangcagaacaagaaccnctacaanaaaggaaaanggannncaaaancacgaaacaca

SEQ ID NO: 77983 - DNA, 433 bp, Arabidopsis thaliana landsberg
  unsure (1)..(433): unsure at all n locations
gctatactttcagcctgtagaagcacaataccgacatacggcgcccgacagcaaaacggaagcggccaaaaaagagctgganggcaacgccangccggcgancagcaaggaaggcaagaccagcaaccagaaagccaacggggaaaacaacccgaaaacacaggcacccancgggcaagccagcaaanggcnaacggccgcccgcgaaaggacgaaagcagaccaggggaaacagacanagggcgaaaagaccagccaanaccnacccccaaacacaaaanangcaaagggacaaagcaccaaccgngagggccagggcgaacccacngggagggagacggaaacaggccgcagcccgcgacggccaaanaaaggaacaccggaagaaacggcnccggagcangcaaccaaaaaagaaaacgnacccaacccc

SEQ ID NO: 77984 - DNA, 278 bp, Arabidopsis thaliana landsberg
  unsure (1)..(278): unsure at all n locations
acgaacaaagaagggagcctagaaaaaaaaaacccgggaaaccccgcaccaaccnacaaaacaaggaaggaaacaaccaaagacaaacaagcaaaacacaaggagggcgaaaagaagcccagccaaccaaggcgcaacaaaggcagagaggggcgggagaaagaccgaccagccaagaccggaaccggccgaagagaggacagccaacagagagaccgaaagccaacggaagaacaaagacgagcggcgcggagcaacacaaacccggaaccccgacc

SEQ ID NO: 77985 - DNA, 490 bp, Arabidopsis thaliana landsberg
tttggaaatttagtttgtttttaactgtggagactagctagattacttcacaattttctctttgaatatgggttgcttttgccaatatgcgaaattttatatctttgaggggcagagaactgagaagattccaacccgtgattgcctttgtccattaaataattgcaagtgtttactttcctctgattatactttttattcactagtagacaaagatcggcactgcgatcagtgtaagacatgtgcaaattcttttaaccatacgcatgaacttcaataactttccttttgatttactcgctcttggttctcagaacaatgcagaccacgtattatgatgattgatgagtcattcatgtgacattttacttgatatttcttttggttagatggcctgcgatagctgaaaaattgcctggacaaacagacaacgaaattaaaaatgtttggcacactcatttaaagaaaagactccaccacagtcaagatc

SEQ ID NO: 77986 - DNA, 434 bp, Arabidopsis thaliana landsberg
  unsure (1)..(434): unsure at all n locations
aaaaaaaaaacgcgactgcnctattggcgacacagaaaaccaaacggagaggcgttcctcttgaaaagacgaccttccttcccctaattacccattcccttatctttttaaaagaaaataacaatgggctctttatatgctttatattattttattttaatatannnnnnnnnnnnnnnnnnnnnnnnnnnnnnnnnnnnnnnnnnnnnnnnnnnnnnnnnnnnnnnnnnnnnnnnnnnnnnnnnnnnnnnnnnnnnnnnnnnnnnnnnnnnnnnnnnnnnnnnnnnnnnnnnnnnnnnnnnnnnnnnnnnnnnnnnnnnnnnnnnnnnnnnnnnnnnnnnnnnnnnnnnnnnnnnnnnnnnnnnnnnnnnnnnnnnnnnnnnnnnnnnnnnnnnnnnnnnnnnnnnnnnnnnnnnnnnnnnnnnnnnnnnnnn

SEQ ID NO: 77987 - DNA, 504 bp, Arabidopsis thaliana landsberg
  unsure (1)..(504): unsure at all n locations
aactcagctcctgggagactaaggtaggaggattaacatttagttcaatgtcagcctaggctacacagtaagacccttctgtgccctccacctagcccccaacacatacataaagctgagtacataacacagggctccatccttgaaggctgcactctggcctgtctttggtttatttttgagacagagttacagtatgtagccatagctggcctcaaactcagaggccatgctgtctctgcctcccgagtactggaattaaagggctgcaccatgatggttgctccttgtccaccatgagatgaggagcatctgccatgtgttctcaaccccacgaaggtcttgttactctggagccagagcaacagaagcaaggaccannnnnnnnnnnnnnnnnnaccaacatatatgtgtccgccctgaagctgtctgtgccaggtattttatcacagcaacaaaacaccactgaactctgggttagatctgaaactactttaatggggc

SEQ ID NO: 77988 - DNA, 453 bp, Arabidopsis thaliana landsberg
gacggacttttatcgccggcgtatattgtagtctgtcgtgttttgggcatctcaactcttatccgtttaggctggggggggcgtgtcaagggatagatggagaaggggggggggctcaataagcgccctgtctactcactgagtatcgctcacctactcgcgctaggcagcagccgaatggtaagcgaaatgtactattattattacgtccccatgtacatagaatgtgtaggtggccactcttactgcctggcatgcaaacacccgcggcataacagatctactaaacgaacgaggccttacttgcggcgatatgccactaagcaaggggcgtgcgaccgttccctggcgcacacatactctgttagaagctagaacctgggccaagcggacaaatgaacactgacaacaaacagaacaagggtctaatcaatgcctatgcgcatatgacat

SEQ ID NO: 77989 - DNA, 497 bp, Arabidopsis thaliana landsberg
gggctccagcgtcaagggcgcgcttgatgatgtcgtgggcggggccgcggatgttgatgatgtgggagactccgagagccgagatggcagctacggagttgtgcatggagtcatctccaatgtgaccatgttcacagtcgagaatgacaccgtcgaggccggtcagggcaacgatctgggcttggcggacagaggggatggccacaaaggtcatcagggggtattcacccgccttgatcttgttgaggaacctcaaccgagggttctcaatgtcggttgtgagggcggagggataggtcttttgagtcatgattgatgaatggggagagatgattgctttggttttcttggtgtttgaaatgggctgatgatgataaggagggatgatgtgatggtctgttcagaaagcaagggtctttatgatttccaggcctctcttttctactcgccgagataaagtcgtcatctgaattatgatgccgttcatgggttgcaga

SEQ ID NO: 77990 - DNA, 310 bp, Arabidopsis thaliana landsberg
  unsure (1)..(310): unsure at all n locations
accccccggcgacgactacaacgacggcgtcacttaggggcgcgcactggagcggttacccacangcagacaacccgagaagncttgaagctcatcatccaccgaccgacncngcgcccaagacgaaacgagacggagaanacnccgaggacccaagcggcggaggaccaggcccagccgccgcgngaccaggcgacgccgggggcggaaaaaaaaacaacgggcaaggaaaaagcacggggacccgaggaacgccacccaccgacggagccagaggcaacgagacagangagcacgaccgcgaaagcga

SEQ ID NO: 77991 - DNA, 296 bp, Arabidopsis thaliana landsberg
cgctgtcaactgaatttgcgacttccttggtaacagaaactgttctcttgattgggatcttattgcttattggacaggccttaccctaagcgaagttgcgggacttgtacctggcggactttaaaaacatattgtaaatacggcaatatttaagttcctacgcacatcgttctgtagaaaggcatgctataaactaaagccgtccaatatgtctcttgcaatatcaaatacccctggattatctttgccggatgcattattttatcggacgaagggctaacaaagagttactggat

SEQ ID NO: 77992 - DNA, 435 bp, Arabidopsis thaliana landsberg
gcaggtataccacccagtcctcaaccctccctgctcgcccagccgacccgaaacgctttgcgcgccgtacccagcacccgagaagccttgcgcaccgggtgcaccagcaaatccggcctgctggtttccatagccatatgcgccgccgggctgcggtgtgcccgtgccgccggtggcaggaccatactgcgaagggaagaactggaggttctgggcagccgaggggccggcgcctgggtactgcggttgttggttggagtagtagtttgacatgtcgcgtaaacgattgaggttatgcgctttggggagaaagggtgtgggagaggttggggggcgaaagttgttggctttcttttgttttgagaggacagttggaaggatagctggcggattggaaagctgggctgccttgcgggtgtggctagtgtggaggtt

SEQ ID NO: 77993 - DNA, 360 bp, Arabidopsis thaliana landsberg
gccgggctgacttctacacgctcaactggtcccgcgctttgcgttgatctaccagctgctcggccttgggggcacgggcggctgtacgggcggaaccggtgccgctcccggtgccggtcgcgccgtgcgcattgttagtctcgcgcccataatcgtgtagggcggctcgctgccggagaaacggaataccgtctgcagggggttgaagctcgcgtagcggttcaggcggcgggcgcgtgacttggtgtccttagtctactggacggcggagtgcttgggacggtcggaggtgagccgcaactatagagcgcgcccggtgcccgcgccctgttggttcgtcactacgtgtagcttggtgac

SEQ ID NO: 77994 - DNA, 468 bp, Arabidopsis thaliana landsberg
  unsure (1)..(468): unsure at all n locations
cagccanaaggcaacaagaagggacattcntttctaaaccacaaataatactctccttcccaaccagagaaaacgggcacacttaaccggaaacgccggcaccccccaaagacaacccgggccaaccccagccccagccccgggaaacaacacaaacagaaacagcaaaccacgagaaaccacacacaacgggaaggcacaaaaaacaaaaagacccaaaaaccaacaccggggaaaagagaacagcaaagacacgaaaccaaaaacagacgccggcagaagagaagaaccaagaaaggcncagcacgcaacccgagaaccaaaacaacaagaaagggacccaccaagccacagcccacaacacgaaaaagcgaagcccacaaaggggaaaggggaagacaacaaagagaacgggcgggccgaacaaagaagcgcagcaccaaggaaaancaaccacccaaaaaacga

SEQ ID NO: 77995 - DNA, 210 bp, Arabidopsis thaliana landsberg
acacacaacaaagggcaaatttaaaccggagcaccaacaaacccccaaccgccggaacgaaaaaacaaacacaaagcccaaacagccccccaccaacggacgccaagacacagcaccaaccaccagcaaccccacccacccacacgcaaacagaaccgaccggagaaaacggcggaagcacgaacacgaccacggagaacggaggcaacc

SEQ ID NO: 77996 - DNA, 500 bp, Arabidopsis thaliana landsberg
  unsure (1)..(500): unsure at all n locations
atccgacttacacgaactatcataccatatgttgcctacacccttaccaaccgactttggttcttcgggcgtatgcatccggcggcgacctacatttatatgctataagttctcacgataaaaaacaagttgacggctgaattttgcatagtaccgacaagaaaaaactaatatggacgtatcccacttttattacttcagcgtccaccgcaaaagctttttataggaaatagtaggcttatattagggtagatcgagcaggatatccccaagatctttatttcaaattacactacacattctcatttttatgctatatctaggtatcacacgtggggcggagacgataatattcatattactttagactataatttacttactatacatggacatgtgcatttatacgtaattaataataaggtatatagattgtattngctaatatatgatacatgcaaaggcaatcagacgatctatatttccgctcatataaaggt

SEQ ID NO: 77997 - DNA, 527 bp, Arabidopsis thaliana landsberg
gatctagaactacgtggatcccccgggcaaaatgattttgatattttgtggatttatattttatttctggctaatgtggtcaatttacattgacttatcttaaaacaaccgatggttaattggtttttacattctagattctttgttactgtcaatgtgattttttaaaaacaaacatatttctgtgataatgcttaaattaatcattatattacaatacataaatgtcaattattgaatctatattccattttaatttaaaaatcaacttagcgttattatatatatgaacctcaaaacatttgttaatgaaaaaaattaacaacacacattgtgatgatatataaccgtagtgaaccattctgcaaaagatttactagattaacccaacttgaggtaattaataattcagtccgtaaatattagctctagtttatcattacttaaaactttctcaaaacagaatatacttctttgagcatataatagtggtttagacttttatcatattcggaaaaatattaatc

SEQ ID NO: 77998 - DNA, 284 bp, Arabidopsis thaliana landsberg
gcaaccccaagcagcagcagggggaccccatgggataggatgcccggctgactcagaaaggacccaccagagaagggaaggacttagcaccgcagaagccacccctaccgacaaagggccgtctaaggaacacggcaaagagaaggtggccaaacccaacccaaggaggaggaacaggagcacagaagctcaaaacgggaagggataggagggggggacggaggagatgctccgacagttctataaggcgggttcagaaaagcccaatatgcccaaggttacga

SEQ ID NO: 77999 - DNA, 550 bp, Arabidopsis thaliana landsberg
  unsure (1)..(550): unsure at all n locations
gcacctggcgatttgagcctgtccagtggcgttcgagcaataaacggcaaggtctatgtgatggagaggagtttcctctctgtaataggtgacggtcacacaggggcggcgaatgtcgacagtgcggttgtgccgcactaatgcatcgcgaatgtaccttttcaaaaccagaggatcggggtagtcgttaggcgagcattcaaagaggacgcctacgtccatatccggattgccatccagcggatggataccggtgtccagcgcatagctaccctgagtgaaggttgtgtaaggaggtgcgtccgcactgatatttttcttcagatcggaaagtagggtatctcttctgttacggaggtcctggctgctgtcgtagccaaaaagaatcgtccgatgaaagctttcaaactgggtttgcgcgcgagccatgtgctgtcctctagggatttctcgcacatggnggcatggctttttgatttcaataggccaccacagagttttctctagccttctaacctagcgaatcgcatatctactttangccttttta

SEQ ID NO: 78000 - DNA, 393 bp, Arabidopsis thaliana landsberg
  unsure (1)..(393): unsure at all n locations
gcgctcgccgacgagatggagcacgagaaatacgccgttagtgagaccgccgggnganggggcgcgtcagggacctcggcgcgaagcccgcccncaagacgcagcgcgcggaggccaaagaagagaagccccagcgcagagcgcaaacgagaaaacaccgacgcaagcgnggagcggggacaacgcaaagcccggccaagcgcaacgcccggcacgacgagaacgacggcggcgcggccgccgcaccgcggccgacgaaagcacacgacacgaaccacaagcaggcggagagagaggagcgggaacgcacccccgaggcgggcaagcgccaggcagacanacccggcgggagcagcgccaacaacgagaacggcgcgcacgcgcacgcgggcg

SEQ ID NO: 78001 - DNA, 573 bp, Arabidopsis thaliana landsberg
  unsure (1)..(573): unsure at all n locations
nnnnnnnnnnnnnnnnnnnnnnnnnnnnnnnnnnnnnnnnnnnnnnnnnnnnnnnnnnnnnnnnnnnnnnnnnnnnnnnnnnnnnnnnnnnnnnnnnnnnnnnnnnnnnnnnnnnnnnnnnnnnnnnnnnnnnnnnnnnnnnnnnnnnnnnnnnnnnnnnnnnnnnnnnnnnnnnnnnnnnnnnnnnnnnnnnnnnnnnnnnnnnnnnnnnnnnnnnnnnnnnnnnnnnnnnnnnnnnnnnnnnnnnnnnnnnnnnnnnnnnnnnnnnnnnnnnnnnnnnnnnnnnnnnnnnnnnnnnnnnnnnnnnnnnnnnnnnnnnnnnnnnnnnnnnnnnnnnnnnnnnnnnnnnnnnnnnnnnnnnnnnnnnnnnnnnnnnnnnnnnnnnnnnnnnnnnnnnnnnnnnnnnnnnnnnnnnnnnnnnnnnnnnnnnnnnnnnnngtcgacacaaagttcatggaaaagctccctttgtcctgctttttcggtggtgggctgtctttggctttccgcaaggtatcacattgccagtttggcctcacggctttaagttattgggcttttaagctttaccac

SEQ ID NO: 78002 - DNA, 540 bp, Arabidopsis thaliana landsberg
  unsure (1)..(540): unsure at all n locations
tattacctattatcactagtctaaaggtatcgacaatttgnnnnnnnnnnnnnnnnnnnnnnnnnntttttttattgnganncangnnnannccacgagcggattcgttccgtcatacccctctgcccgctctgcggagctcacggccccagatatcatacgcacttgagccagatcccttccttgtctctcgggggttgttctcttcgcggcatcccactatgcttcctgggaccagatctccgcagataatgcccacgtcacttccagtaccttgctggttctcacctcgtgggcaatgttgttcaaacagagcccggccgacgatgcccggttatgctgatgccttcaagtacatccccaccatcgtctcgacgaaaggatgcatgtcgtcatgatagaaggagttgaagcgggtacccattgaacacagagcaatggtgtcaagcgttaggcgtgtgaagtcatcagtcacggtgatgggcatcttcgggccttgtcgcgcccatttcatcgctaattgagtcgcaatattcgaca

SEQ ID NO: 78003 - DNA, 551 bp, Arabidopsis thaliana landsberg
  unsure (1)..(551): unsure at all n locations
ccccggtcgcggtggtcatgcccccgcagcatgtgtttctgttttccgacctgacggtgaccaaggcggatttgtggatgctggcgatgcccaatctgcccaagccgcgcgccgacaccctgcccgaacccagtgtcgagaaaggccttaagaagttctattgcgtggaatatgcgcggttgcgctcaggcctggcggtgttcggcgatgccaaatattggtgggcccgggccaagaatctttatgcccgcgccacccatccggtggaggnnnnnnnnnnnnnnnnnnnnnnnnnnnnnnnnnnnnnnnntgggcatgtggcggtggtgaccgacatcgtgtcgagccgcgaaatccgcgtcgaccaggccaactggcagaaccatggcgagatcgaccattccaccccggtgctggatgtgagccgtgacaatgactggtcgaaggtgcgggtatgggacatggccagccgtcattttggcgcccgtgtctatgcgatcagcggcttcatcctcaacgaagcggtccagnnnnnnnnnnnnnnnnnnnnn

SEQ ID NO: 78004 - DNA, 481 bp, Arabidopsis thaliana landsberg
cctccgaagactagattttctagataattagaaggtttccggcaatggacaaggtataaaaagcaggggggtaggtggtaggtagaagggagaaggacgctccgaagttggcggctcagaagcggaaaaattatcgacgaaggatcggaccacattctggaagaagtggaagagggtaattattcaaatatgacccgggttatggctacgtccctctctttggttggatgcccgggagatgactcgagaagaacctgggctaccaccgaaaggtggggatcggatcggacgcggacagagatgactagctacttgaataatggatctcctaaggcgaggttctttcaagacttacacacttcgggaagaccgatgctgaggctttggctggcatcgaaccggagctcggctggcgcggctgaggacaatctcttttgttcactgaaggtctgggagctaggatatagtaatagatcccatg

SEQ ID NO: 78005 - DNA, 156 bp, Arabidopsis thaliana landsberg
actctgtataattgcctcatcccctctaaaacctccagggcaattctaggacgacctgtgttaggatctaacctcacctgactctcttgaaaaaaccaaaaagatcaccttcttaaacaactgggggactttgatggactcttgctcagcacactt

SEQ ID NO: 78006 - DNA, 234 bp, Arabidopsis thaliana landsberg
taaactgacaaaattgaaaaggacaagagttcattttccatattgcaaatttattcttaaacttttatgttatttggtttgaaaagtcaaagaactgcagaaggagagagttcaagttacaattcaccccccttataataaacaaagtgactaaaccggccccattatttcttcaatcatcaattccaacctttttaaaaactaaatccaaccggcattgatacattgagatca

SEQ ID NO: 78007 - DNA, 335 bp, Arabidopsis thaliana landsberg
  unsure (1)..(335): unsure at all n locations
ccgacacaccaggggaacggaaagcagaacgggaacagaccggacacggaagcagncacaaaaagaggacagctagcaaaagccgagacgaacacanaaagaggacccagggaaggcggcggaccacagacgaagaaggcaagccccctacagaacaaggacctgactncagggccaggcccaccccagaaggaagaaaagcgcgagaaaaaaacccacgcaaccaaaagtgaaccaactgaagcaaaagccgggggagccaccggatgatcggcccaagacatataactcgacgcggcctcctgacaaagaccagcaggggaaatacagagcaa

SEQ ID NO: 78008 - DNA, 467 bp, Arabidopsis thaliana landsberg
  unsure (1)..(467): unsure at all n locations
tgggataaaaatatagcacgagctaatgagaaaaaattttttattatttcactcaaccaaataatacaccagggggggcttcttattcttcttcacattgtaataaccaataagtgaccattttaatggcaacaaccgattatctcagatggatctgaaaaccgaacactctacaaaattctatagctatggaccctcttactgaaaaacgaactaccttacctttataaaaatcttaacctctaccactaaatacaccgctgaatcacaatgctgtttgaaacaatgcatttacgagcaacactgacgctacctactaaaggnnnnnnnnnnnnnnnnnnnnnnnnnnnnnnnnnnnnnnnnnnnnnnnnnnnnnnnnnnncctatcaatttaagtaaacatccaagaaactttagatatctatgactatacttcatgtttatatcagcgaacagaagctctaact

SEQ ID NO: 78009 - DNA, 609 bp, Arabidopsis thaliana landsberg
  unsure (1)..(609): unsure at all n locations
aaacccccccgttctgtaaaatgtatcccgtcttcgcttgctaataaactgctatattcgagatcgttgtcagataatcaagcccgttggggttgannnnnnnnnnnnnnnnnnnnatcagttccggatcgtttaagggtacctctattatttccgtattgccggtggcgtttaaagccggaaaaaaaattacgccttccttctgcgcggcgccttcagcaacccgcaccagcagccatgtttttccattgaaacgaaatgcgcccggattaagcaggctgatgatctgtaaacctgcgccggttggctgcaggtctttaggcattaataacgggttctgcgggaagcggcgcgcaatatcattcatagctgcgtgttattataacgcccggtgccggttagggcaaatttcgtcccgggtatatttatttaaccccttgcagaatgactttgtttaaaaatttatgtatcagttaataagttggctaattcaacgagctttgccttttaattcccagtgatcagttccggcatttatcacacgcacatatctttcacctttaatatggccatctttctgttctttgcccagaaatagcaatacaggca

SEQ ID NO: 78010 - DNA, 313 bp, Arabidopsis thaliana landsberg
  unsure (1)..(313): unsure at all n locations
aaagggnccaaaangacaatgagaanaagancaaaaggtttattacaaangnnagnaagagaaggaaaaggggagggangngganaagccaaaggacagaccgaacaaacggccggancgaccncnacagccgcaggaggagggagccaagccgaaaggagagcagnnacagaagaagaaggaaggccnagccagacaagccaagcgggagaagcaggaacaacagaggcacgaaaaaaaggagnncccgaaagagagggagcagaaaccaaaacagagagggcggacacaccacaaaaaaggccagcgggac

SEQ ID NO: 78011 - DNA, 564 bp, Arabidopsis thaliana landsberg
tcaaactgcaagtaaaattaccaaattagtaattttagagattaagaagttgatgtatgtggaggaaataggtggattacttctgcagtccaatagaactgatatatgtcatccacatattctgcaacttccagctgattggattcatcatcaatgcttggaagtttttctggctctgtggtttcaccatttttctcatcgaactgcaagtaaaattaccaaattagtaatattagagaaaaagaagtcacaagaaacaacacaactaataaattacgaacctttgatccattcactagtagagatgtgaaagactttctacgttttgattttggcttcgctgtaacatccaacacttttgttgttgggtctttgtttccactagatgaactctctccttgagtgtcttcttcaagacattttgtctcaaccttttccggaagtgacagtgttgaggcaactgcagaagaagggattgaagaaatagatcttgattacttctacccactgggggctttttagagagctacggttttgtagcgagtctttacagttgtctggatc

SEQ ID NO: 78012 - DNA, 568 bp, Arabidopsis thaliana landsberg
  unsure (1)..(568): unsure at all n locations
ggagcatttacaccggcatggtttaattaaaacgtagtttctttttgtcgaacatcgccatgcgagatgatgctggcgaacataaaaaccagttatcatccatttgtcttaatggtaccgcatcaactggtttcgactgaggagatctttttcggaaggaaaattcataggattacaatggcgaatatggaaagcacttgcacttgccgaagatcgtttcgatcttcaaaactttgtattttgatgctaacggatctgacagtacggcctgtaagaagaattatataaaccaaacctgttaatctgtaaaacgacagaattatttttggtgttgtattgctgaaccaattaacggaacgaatgtcagtaataagcaaacctaacgcaaaggaagtcaccgacggtcattttcagcgggaaacatttccagtccttgaaatgagttgtgctgcttgcgcagtcagcgttgaatcgacgctgaagtcaacacccggngtaaaggatgccggtgtaaactttgccaatcaaacggcttgtgtggagtatgactcacaacggacaacacatg

SEQ ID NO: 78013 - DNA, 488 bp, Arabidopsis thaliana landsberg
tatgcctttagactgaccggggttgtatttctgacaggccgtctgcgttttgctctctaagggtgcaaatgcagcgggatgtaatgcacgctgcacccgatggcctgggcatacaaatttttcgacaaactcgtcccgacttagcttgcattcgtcggacaacctgagcacgtaaaggtgccaggaatgcaacccgcccgcacccgctgtttgcggcaacaccactggcaagtcagccagctcgtcttgataaatctgtgcaatggcttgcctgcgctgctgaaatgccatggcctttttaagctggtgaatgcccatggccgaggcaatgtcagtcagattgtatttaaagccgggggccactacctcgtagtaccagcttggggttttggcagtaaaccggtcgaacacgtcccgattgatgccatgaagacgcattgttttacgcgtttgatgacctcaagatggcgggagacaacatgccacct

SEQ ID NO: 78014 - DNA, 220 bp, Arabidopsis thaliana landsberg
  unsure (1)..(220): unsure at all n locations
atcaaagtatttcatagctttgatttcacaattgtctagggttactgatattcatcacacaatctcaattctaacataaaaaaaaaaaaaattgtaacaaaatcctcagaaattgaaaaaaatgacgattcattatcaattccagaaatatcccaaatttggcaaacaagagtgagaactttctaatttcatcantcgaacaatgtttaccgagacaaag

SEQ ID NO: 78015 - DNA, 453 bp, Arabidopsis thaliana landsberg
acttcaataacggcaacccgggacaatccggtggagcctttggcggaggccgtattaaaggggtcgttgcgatctgttcagcagcagtaataaacccgacaacaaccttaactgccggaacaggcaatggttctgcaggcaatggttctgcaggcaatggaacctacttcctgggatgcagtgaattatccgtaatggaaatggcttccaatttgaagttggacattttcccgaatgcggctactcatgaaattcaattgacaaccggttccccggttgaaaatgcagaaataagtctgattgatctttccggaagggtagtgtatgtgaacagacattcgttgtctgccgaaccaacagtcatttcgttggaaaacctgtctttgggaacctatcagctgtttttgaatagggagaaaattcggtagtgaaaaaagtaattaaaaactgatg

SEQ ID NO: 78016 - DNA, 601 bp, Arabidopsis thaliana landsberg
  unsure (1)..(601): unsure at all n locations
atctaaacctataaggcgaattctcaatccgatctccataagaagttcacctaaattctcagcactatccttaattccttcactgggtttacaaaagggtaaactataatagctaaaaggcatttctgtttctatagaagtaagtgaattcaccttcacgttcaagtaatcaccaactttatacttatgtggatagcttccaggaaggtaaaacccaaaacttgattgaatcactaacaaaatcgccaaaacccagatcccaaatcgatccattgacctcatatctggtttaacaaattgaggaaacacctttttagatccggatcggtgaatagtcaaagaagaagctcagatctagaaaattcgaggaaggagacagattagtggtttgagaaatgatgagattagggctctcgaaacgggaaaaggagatcggaactcacctattccggggaagaggagatttggtagcgaagaaataaattttttcggtgaaagaacgcatgaggcttttaatannnnnnnnnnnnnnnnnnnnnnnnnnnnnnnnnnnnnnnnnnnnnnnnnnnnnnnnnnnnnnntcctgactaaaataattccc

SEQ ID NO: 78017 - DNA, 509 bp, Arabidopsis thaliana landsberg
  unsure (1)..(509): unsure at all n locations
ttcagacaaagttttcatcaatggcggggttttttatatagntataaccgagaacgtctgacaaaaaaaaaacaatatatgtgataaagaaaatcatatgaaatccatagttttaaacatattctcaacctgtaaatataaccaacataacaacttgaaaacaaaattgatgaattatcataacaaatcatctctttgggacataagtgagaatgtagtatcttttggaatcaatgaataggagaaatcctattcaaacttgtgattcagatcctgcgagtttttcttcatagaaagataacacatgaaaaacaaaaaaaagacaccaagatcaacgtatggtgatactttggagtagtctgcgttaatgctctgtattcttcagattcaagaagagatcaccgaatgcatcttcacatgctgttcgaccatcttgtcccaaccccttgaggaaagatttggtgagtttcaacgaagagaccatctgaaagacctgccacaagatttac

SEQ ID NO: 78018 - DNA, 470 bp, Arabidopsis thaliana landsberg
aaagctatatgcagagtatgcaggaacgagcattgacgttggacctgttcacacgacttactgttgtttgccaaactctgaccacattgatccagcggatccaacatacatctatacaaaccctatccttctcctcctggagaacaatcctgtggcctgcaggatacgaattccaaacttatccaaggctattgagcgcatggtttacggtagataatgtcccttattcagtgagactgatgagagaagacttatgcttcaacatgtataagttatagcacaatcgcttgcgcagcgaaagttttgtcatacactcgtggataatatcatcagctaaaaaaagagtacatccacattgagactctgtatcaagactgaacatctaccaaaagagactcgtggcatgaggatgttagatcagaatacacaggttttgcttctctatctctaccagtattgtacgaaaactg

SEQ ID NO: 78019 - DNA, 384 bp, Arabidopsis thaliana landsberg
  unsure (1)..(384): unsure at all n locations
gaggcaccggcggacaacagggctactgttgttgcagcgtcgtcgccggcgggcagccccgccttgtcccacagcttgtcaaacaaccgcttggccttgcggcacgccttgcagatgtctgtacagccggcatcggaacatacgtctgattgatgcatgcgaactgcgaacacctcaatgagcaagttcagtaaagaaccccggtactcgaactctaagatatcctttctggagcagctggtacatatgagcgggagtagttattgctgttgccagcctgtcgtgatggaaggcagcccgagcatccgccggcttcgcagtagctgccgcaacaccgacagttcatcatcggcaactggcctaaccctngagctngatctatca

SEQ ID NO: 78020 - DNA, 552 bp, Arabidopsis thaliana landsberg
  unsure (1)..(552): unsure at all n locations
gcttgcccgactccgccttggccaggtccannnnnnnnnnnnnnnnnnnnagcaggtgcgagccgctggtgttgaggtcgtggcaatattccaggtacttcgcgttgccgatcgggcccagcatctccttggagatgatgtcggagaagccgatgatggcgttcagcggcgtgcgcagctcatggctcatattggccaggaagtcgctcttggacttgctggcctgctgcgcctcgaccagcaggatgctggtctgctcgttcttggcctcgatggtcttctgcgccacccaggtgcggcggacatacagctcttgcaaatagccggagaacaggcccaccgacgaggccatgatcaggaagaaattgttgctgagatagaagtnnnnnnnnnnnnnnnnnnnnnnnnnnnnnnnnnnntggtagcccgccaccagcgagacggtgaccagtgcggcgaagaaatagcgcagccgcaccaggcaggagccgtacatcaccaccatgatgaggcccgcataatagaggttgttgaacggcgccttcatgatcg

SEQ ID NO: 78021 - DNA, 367 bp, Arabidopsis thaliana landsberg
  unsure (1)..(367): unsure at all n locations
ccccattccgcctccactcgccaggattatctggttccacactccgttctcctactttctggtccaacctttcagctccagtctccagatttgctatttgatcgtcataatccttttggtagatctggttgctttcatctaaagagcgcaaagnattatcttataatgcgtggattttcatgcaatatagttggctagcttccttaaacaaatgtgaatggatgtgataaataatgaaatgctatatttttccttttgcactggataccatcttcttctcactgccttttatttcatatacactttacttcaaaatacaaatggtattcattgtcttgaaccacattgaatattaagcacgatttga

SEQ ID NO: 78022 - DNA, 318 bp, Arabidopsis thaliana landsberg
  unsure (1)..(318): unsure at all n locations
gtattttattcagctctcatttttaattgcaaaaaatctaaaaatgggagtgcgtgaaatttaattattgccatcctaagccaattattttattgtatactactatacattccttcaacctagaaagacgctcatatttgaaccttcttcgaaattactcaagccaaagccgaaccatcgtaccatttctttatccatgataaaactaattgtgtctacactgcatacaccatactatctacatatattatatttaaaattaaacactattatagaaaccgtatgataatatnnnnnnnnnnnnnnnnnnnnnnnttg

SEQ ID NO: 78023 - DNA, 491 bp, Arabidopsis thaliana landsberg
ctgttcggaagtgcgcgcccgcctggcccgccctttgagtttttcacgattccctacgcggggactgagctggccgcttacctgcgggttccggtcgtacggacgctgggactgaaggcacccgtcgtgatcatggtgccgggcctggactccaccaaggaggaactgcaggcgaccgccgagtacttcctggcccgcgggctggccaccctggccgtcgacgggcccggccagggagagtccgagtacggcctgccgatcgagcccgcgtacgagaaggtcgtcaccgcggcggcggaccatctggagacacgtcgagacactgataacagcaagatcggactgttcggggtcagcctcggcggttactacgccgcccgcgccgtcgccttcgagccccgtatccgggcgacggtctccctcgccggcccgtaccggttcgacgccgactgggataacctgccgccgcagaacccggccacgttccagca

SEQ ID NO: 78024 - DNA, 497 bp, Arabidopsis thaliana landsberg
  unsure (1)..(497): unsure at all n locations
gatggaaccccgaaggccttactcctgcttttttcatttattacaggcggcactttccaggaagggcatggggaccgttcggtaaaagacgataaagccatggtgggcggttttggtatgattgatggtcaaaccgtaatgtttgttggtcagcaaaaaggtgtgaacctcaaaatgcgtcagtaccgcaatttcggaatggccaatcccgaaggttaccgcaaggccctgcgtttattcaaacttgctgaaaaattcaataaacccattgtgaccctcatcgacacccccggtgcttatcccgggctggaggccgaagagcgcggacagggcgaggccattgcccgcaacatttatgaaatgatgcgcctgaaagtacctgtcatttgtatcatcattggcgaaggcgcttcgggtggtgcattgggaattggtattggcgataaagtnnnnnnnnnnnnnnnnnnnnnnnnnnnnnnntctcacctgaaaactgt

SEQ ID NO: 78025 - DNA, 230 bp, Arabidopsis thaliana landsberg
tagtcatagactgataaagttccaaatgcatagaactctatgtagactaggcttggggcatgtgacaggacattcacagatgattgactatcatccaacgtacaatgaaccattagatccctaaaaatccttaatcaaaaccattatcaacgccgttaaacctttctctgacctctgattaagtgaaccagtcgctcttcgcaactaaagactacaccagacagaatgct

SEQ ID NO: 78026 - DNA, 610 bp, Arabidopsis thaliana landsberg
  unsure (1)..(610): unsure at all n locations
cagggaggcgtgaaagcctccctatttgactttgaatatnnnnnnnnnnnnnnnnnnnnnnnnnnnnnngnngggggcctttgttatatatcacttcttagatattattagccagggcctctccaaatcccaacagattttttaggtcccttgtgctcctcctccacacgtgtattcctttttctaaattctttaggcatattactactccacagcttatttttttttctatttcagtttaaaccaattatgatatttgttatacatactctcacacaatctctattggacggtcaaagtacttaactctggaatcattcacaattttacaaggataagtattgctcaagctgtattagcatctacttatttctctcaattattgatacgctgcctacagaatctcaatagcattacagtaatttcaatctcaaacatctcactcaagaagaaaactgggatttgctactattgctgactattggtggttactgctactatagagactactagtactcgtaatggttcctttctactttngctacacagatcatgtaaattttttggatctcaggttttctttatcaaactaattctaaagaaaatgaac

SEQ ID NO: 78027 - DNA, 591 bp, Arabidopsis thaliana landsberg
  unsure (1)..(591): unsure at all n locations
tccattttttggttgatgttcaatggcttattatcgaccccgacctagnattctgatatgtnngtttttccctctaaagaaacatcacataatcaaacttcaaactcaaaagaactccacatcaatatttttgttttgattaatggttagaaagtaatgactcagtcaattcagaatcctgaaacgtataaaccaatattgagttcgaacttccaattcttacgttgtatacattttggtgtataaaaaatgaaaggaatgcattttcagcctttaaatttatgcatagaatataataataagtttctaactaaaggtcaaatcatttaattgtatttaacatttttgacacaactattttatcttgcaagaaataaatatgtaaactggaaaagtagttgagaaaacaaaatagttatttttatgccatgagaaggatgtgtgtaaaataagttagaaaatgctctaagaaaagagaaacataaaaggattttaagacgtcttacaggtgacaatatgaaaactttagtaaaagtctaccatacacccgaaaaaaaatgagattttaatctggaagtaaatgtatgcatg

SEQ ID NO: 78028 - DNA, 266 bp, Arabidopsis thaliana landsberg
gccgggcggtacggaggggaccactatggctactatgttgtttacaatgcatgcttcctttacaacagtgtggtcagctatctgtggagcgcctgtggacgtgcggacttacagggaaaatattgtggtgcacctaacatcctatttttgcagaccaagaactacaagatcacccctattgttctggggtgacagacggattcaaccgcacaagccagtttttcaagttatctatctctcgactgaggatgggagcaggtaagaaa

SEQ ID NO: 78029 - DNA, 333 bp, Arabidopsis thaliana landsberg
  unsure (1)..(333): unsure at all n locations
aggagaaccatccggcggcccccgaggacgaacgcctcatagaaacaaaaancnagnnacgcaaacagggactactataggaggagccgcagcaccaccgggaccagcagacgagaaggcgagcaaggccggccacacacgccacgcacagaaaacagcacgcacaccgaaancacagcaacaccgccagccaggacaaccaagcaccagagccagccaccccagggaaccccgcccgacgcaccgaaacgccccggcgacaacaagaagcacacgagagagcgcaccccggctgcccccgaccaggggcccggagccgcgcaccacgacaaa

SEQ ID NO: 78030 - DNA, 556 bp, Arabidopsis thaliana landsberg
  unsure (1)..(556): unsure at all n locations
ccagacaacaactttcagggacacaacacacaatcaagnaccccctccctacaaaagccaaagaatataaggccactagcgacacaggagaaaacgaccccgacaacagaaacgcaaagaagacccagagaagcccccgacggaacccagagagacactcaacaatgttcccaagggagggtgcccaatacctgtcctcacatgctgagcatgctgccgccgcgactactgaattcccagctcctctgggcggagaaagaaagtgcactcttacagcctatagctcccggagaaactggccccgcgtacacaggtggacacagagaaaaagaaacgcgaaggctaggcaccaagacatcccagagcacagaggcagactcaaaactgtggaagcaactctggctggccaaaaaggaccgcgacactaggtcaaaagagccacggaagaaactcccaactgtcaacaaggaagaaacccactatgacaagccagacatacaatggggctcctactctaccctgaaacacaggacctcacaaacgaaaaaggaaaaga

SEQ ID NO: 78031 - DNA, 372 bp, Arabidopsis thaliana landsberg
  unsure (1)..(372): unsure at all n locations
aggaaagaaaaaagcactccgaaaagagagccaaagagcgcccgaaatcggcgggagggactcggctgggggccggcgacgcggcccggacggaggcggaacggagcaaaccggcccgccgaccgacacggggcgaggaccgacgcggagcacggcggcggcccaagcccgggccacggacacgcccggggagacggcggngccgngaacgaggaccgcaacacgcgcccaacggcgagcccaggcaacagcgcgccccgagcgacgaccagagggcgccccaggcgacccgacaagaaacacggacccaggagcccgacaacagcgccaggaaacaggngagcaaacccgcacggggcacggaagcccgaa

SEQ ID NO: 78032 - DNA, 415 bp, Arabidopsis thaliana landsberg
actaaatttcctagatttgggtaccggttttatgatttggtttgctactccatatcttttaataattgattgtcataggaatgaaggaagtagtatttactttaggaatacagtttccttagtttcttcttctcatctaagcctacaaagaaacacttcttgtgtctctattttgactttttaaggtttctcctttgatgcctttatatcttttcgatttttactgatgaaattcctcaaatgttaaccaaagtgggacatgacagcggaatattaagtaagaaagatgtcactgaatggtattgtgaaagtcaaaagggttaccatgacttcatttgcgttttatttttttaaaaaaaatgttaaagaaaaggtgttacattagttgaccaaaaaaaatcagaaaagatgattt

SEQ ID NO: 78033 - DNA, 309 bp, Arabidopsis thaliana landsberg
  unsure (1)..(309): unsure at all n locations
tgtgtcaccaatgtgtgttacatcgacactaaaaaaannnnnnnnnnnnnnnnnnnnnnnnnnnnnnnnnnnnnnnnnnnnnnnnnnnnnnatggttagaaaatgggtgaaggtgagttactaaacaatttactacaaagaaaatatttattaacataaattaacatcgatcgtccaaaatatatataatttgtattaacaacaaaaaaacaagtataatttgtgaagagatgagcattaaacaataaacacaagttatttctagactagagaagcaaaagattgacttcgactgaaacatgcgtcaaa

SEQ ID NO: 78034 - DNA, 523 bp, Arabidopsis thaliana landsberg
  unsure (1)..(523): unsure at all n locations
ctgggaaacctctattgaaaaccggactacaagttcatgttaacaaaagcataccatataaaaactttgcaacaaaaaagttcatgggggactaaagaaaaccggacattataatccaataaacaatatagaccaaataaaactggcaacacccacaccgactaatgaaatttaaagtcgatgagataatgaattaggtttgatgttgaaatcatgatttataatagcttaataggaaccggaccatagaaacatgtgcgaaaacgacaacaaggagaagcagaagaagaagcaacacggtgatgggtttgctgggctccattgcatgtgatcgtgatccagatttacaattcttttattttatcctttacattatacatatatccataatatattattccaagaaatttatcttatagttcatgtgcattacatttatttttagttttgctttattgggtcgtggacgacagtatactttggtctcaatccatattccatgcatactntggtttcactcaat

SEQ ID NO: 78035 - DNA, 605 bp, Arabidopsis thaliana landsberg
tggaagttattatgtgcactcccacaacactatccatttaaattccaagagataaggaaaagaattatctgcttggtgtatataactatatgttttcaatcttaaaatgaattgagaattaatcaaacgtgtttggtcaccgaaagatatgttatggtctcacgactctcacattagtcatctgtccactaaataaatactaaatacaggttttaaaaacttgcaatattgaaatggtgaaaagtgggagaaaggatgaggtggcgtggaggcataatttgataaggacacaaaactgcaatagaaagatcgaatgatcgatcatgcatagctttctattgacataaataggaagttgggtacgctttttgacgaataagctccaataataataaccgttaacacatgcactaatcaatccattattacacattcccttattatacagtttttgtaaagtcaagattgattcgtggacgaatggtatctcttgtggctactccaccaccaaaatgacgattgttatttttaacctaaccagatcacgattattcggttcaatacgaaaataagtaacccccgcgttttgaatttcattttttatg

SEQ ID NO: 78036 - DNA, 578 bp, Arabidopsis thaliana landsberg
  unsure (1)..(578): unsure at all n locations
cttcatcttgctttttctttgcctccttaagcaatgttatcttcttctccgtcatgtccagttttgacttgttcggcatcacagccaagattcgatctttctgttccaaatctttccgcatcttattgatttctaatgacaagtcttcaagttcatgtcctttagcctcaatttgcttatttgcacgactcagttcagcttcaagttgtctctggctagaagcaagctcaaggnnnnnnnnnnnnnnnnnnnnnnnnnnnnnnnnnnnnnnttgcacatctctctcttgtgtttcccttaaatcttgaacttccttttctgctttcactagcctttcctctaacaattcgcatttacgcttctcttcttctattgccttatctttagattccaataaaccttccttttcctttaatctttcttgcaattccagtaagctatgtctcttcctcttctctatattccttagttccttcatcagagcttcaatctgcagccttaatccatacctctcccttaccaattctgtttctgagacgcgattatgctaactaccttctcgtagcttttgatcatca

SEQ ID NO: 78037 - DNA, 529 bp, Arabidopsis thaliana landsberg
tatatagtcttctgaattctgatgatacgtaaacgggaattttataatatgttgcgtactaaaaattattttataaatacatcaatatacttaattttaaattttcgaatgtcagatatattaaaaatgctataatgatcattttaattgttttttctctatatgaaacaccaaaggtataagtctaccaaaatgctataatgtatgtagttaaattgtccaatatatgattggggactaaaattctaacgtagctacgtgttccaatgagagaacacacaaaatgagcacaaagtatagaggttgaaacacacaataatatagctttatacaaagtcactttattcaattattgtattttaattcacaattcaattattgttttataaattgaatatagtaattcaatttgctatcctctatatagatagatatcatgtgcttatagctttccacaactttcagaacccccaaaaatatcaaagtgtcattaatagaaagacgagaaagaaagacccaccctgaaaca

SEQ ID NO: 78038 - DNA, 224 bp, Arabidopsis thaliana landsberg
ctatttgaggcaaatatctcaagagatttcacaacctaacgtaacaggttggggaagaagaccagcggctcttagagcacttagccaaaggcttagcaagtaattagagcttctcacacttcaaaaacacttttaaaaaaacattacgtcttctaaaacctaaaattgtttttgttaatgtcagaggattcaaccaagcagtgaatgggttcagcgatgaagga

SEQ ID NO: 78039 - DNA, 508 bp, Arabidopsis thaliana landsberg
  unsure (1)..(508): unsure at all n locations
ccggaatgcgacactatcacggagggcacctgaatgcttcatgattatgaaattgccaggattcgctagggatcctggcctttcgctaggcgggaaagacgatctcgccgtgctcgggatagaccttgcacacgtcgccgagtggcgtctcgaacttgacccagaagcgtccgtagcgccaatactcgcgtccccggccgcatagttttggaatcccggacaggtccgtatggattcccggctccagcatttcggccgctgccttcgtgagctcgtgggcacgctcgtaggatgcctcgcgggcgtgtccggcgagtaccaggcggtccgggtcctcgtgcgagccgccgaagtacttgacgacgtgcgggacgacgatcctgtcggtgacgagcgccagcgcgatgtcnnnnnnnnnnnnnnnnnnnnnnnnnnnnnnnnnntcgccgtcgttcgagccctcgtggtaccaagggaccacgatctcccatccgtgtctacgccgcgc

SEQ ID NO: 78040 - DNA, 459 bp, Arabidopsis thaliana landsberg
cgaactgatgaaacagaggtcacaaaacgtataaagttttcttttttttatagctataattcgaaaatgcagaagctttataaatggatttgtttctaaatcatatgggacaatgacttttctttgaaatctatgaacctagagattcgaaaatcaagcggaaaacagatctaaaacctagaatccagcaaagaaatctcagttcgagaacaaactacaacaagacgaacacgatacaagcaaagaaatgaaaaattagcaagaaatgagtcaaaatccaagaagctagaatgattagcgtacctgaaaattcgaattcgacggagtccgaaaattgatttcgtcgacgaagatgacgggtgataaaccctacaatgagaaatcgggttttgaatcaaaccaaatgggctattaaagttgagcccaatatcagcccagcaaagcgacatcatcaaaacg

SEQ ID NO: 78041 - DNA, 351 bp, Arabidopsis thaliana landsberg
  unsure (1)..(351): unsure at all n locations
ggcggggccacggtggacaacggcatcgacgaagccttcgcggacgtgacggcggtgctgaaggacggacggcgcgtgcacgtgttcgtggaacatgcgatcggctcgctgcagcggccgatgacggacgcgatgctggagggcaagttcacgcagctcgccgagccggtgctgggcgccgcgcagacgcggcagctgatcgcggcgtgctgggggctgggggacgcgaaggacgtgcgcgggttgacggcgctggcgcggggctaagtttgcgtcgtggcgggggnnnnnnnnnnnnnnnnnnnnnnnnnnnnnnnnnnnnnnnnnnnnnnnnnnnnnnnnnnnnnnnnn

SEQ ID NO: 78042 - DNA, 145 bp, Arabidopsis thaliana landsberg
acaccagaatgaaccaagccgattgaaggactaggagaaggaaacgacattaaaccatgcactataaaccactaaacgactgaaaagcagcatacccagtacgagaaaggacagctctcaacagatgttaataatgcaaaaggaa

SEQ ID NO: 78043 - DNA, 202 bp, Arabidopsis thaliana landsberg
aggaaacttaaaaggagggaccgtgttgacccggaatccaaaggtggaagacgaagggggaccaaaaatcagagttggaaggatgctgaccgaagcagagtacttaatactgacagagacagacaaacacgttgagccactctgtgactactggatgtagtctagtagtaacaagtccactgtctcatgagaacaatatcca

SEQ ID NO: 78044 - DNA, 493 bp, Arabidopsis thaliana landsberg
tgtgccgattgttcacgaagacttgttttccaatagccaaataatctattattatatcctaatactatagccgatcgttttatacacggctcaaatttacggctgagttattcaaatagttgggacttgggagttaaagactggttagtttaaaccaaagcgtctagagacgatgtttcgatggtttgaaacgttgctatgtagattgcagttaacgacgaatcgcaccatctgttttttttttttttttttttttatcacataagtacctttttgggtcactttttataaggtcttaaaaatggttgcctaatttgttaaagatatgaaagtacaaacttggttctaaattcaccagatcattaagaaaatgataattggcacaagcggcccaacgcacaagacgataagacgaaaccataggaggtaaagcgactttaaaagaggcaacaccttgctactttcactgacttcgttgttttgctacattcat

SEQ ID NO: 78045 - DNA, 241 bp, Arabidopsis thaliana landsberg
ccgtggataaaacatcacggtgagaaagtaaacctcgcgatttggaacccaacagtgaagcacctggggcctggtggggttcataacccttggacacttacacatacaaaacaccgtgaaccgatgaggaagacggcacgaatggagtgcctccaggccgacggccgggatacactgttaccaacgaacgacagttggcgcgatgatcgaacgacatggacgggagttactccacctcaag

SEQ ID NO: 78046 - DNA, 128 bp, Arabidopsis thaliana landsberg
  unsure (1)..(128): unsure at all n locations
acaattttgcgatgannattttaaagcangccttaacttcnnggtcgcaaaaaggggaaagggactatttnntccgactanatatttgtatatctaagntcgtatgaacccccgtacctntncagtgt

SEQ ID NO: 78047 - DNA, 569 bp, Arabidopsis thaliana landsberg
  unsure (1)..(569): unsure at all n locations
cgttttactcattgntctgtcttttccagaacaggaacagtgaaaggttcggttttttgggtttttatctgataatcaacaagaaaaaagggtttgatttatgtcggctgggtttgaatcgactgtgattttgtctttgattcatatctcttctccgatttcatcatcatcttccccatcatcgtcgtctttgaaatcttgtcttctcaacgctcttcacttctgctgtaataagcagaggcttgttctggagactccttctctttccatgcgcttaagacccaaaaggtattatctttatccttcatctttctctcttctctctttacatttatgtaccttctccgatctgagattttgttgtttgatttttgtcacaggacttgttctagtgttgaagtctttgggggttttcacataaagcagcaaaagttttctttttttcattgttcgctgagagttttgagttttgataccaaaaaagttttgaccttttagagtgattttttgatccttctgttttctgggtatttttgaggagcgggtttaacaatggttgccattagaaa

SEQ ID NO: 78048 - DNA, 555 bp, Arabidopsis thaliana landsberg
  unsure (1)..(555): unsure at all n locations
tcggaccagtcgacgtcatcggcgaactcgccggagaaaactttcggactagtagccccactctgattagaagtgagagagttgtgcatcttctttgggttttgtttagaagtgataacgattgaagtgtagtgaagaagccatgcaagctctctttatagaccaaaaactctctgtaaaagtaattttctctgttagctctaccagtcaaaacatacaaaaattacagttttggcccttttctaattagatcatattgatattttcattaattgaaactttaactagcgtattaactatacttttagtataacatactgaaatgtggaaggaatttgaaaagtcatttcacattttctgtataaataaaaaaggtgaaaacttctcttactatataaactttgatattcaaagttactaaccaaataaaatgttcaatgagagtaaccatattnacaagtataacatattaacatatggaaaagaattgaaaagtcaattttcatattataagaaaaaaaanaaacttatcttatcatatannnaattagtttt

SEQ ID NO: 78049 - DNA, 561 bp, Arabidopsis thaliana landsberg
  unsure (1)..(561): unsure at all n locations
atgcgaatctacaatnatttttanaaattctttncagatnaaaggctcagtgtaatattggcttctttataaaaataaaacaatnnnnnnnnnnnnnnnnnnnnnnnnnnnnnnnnnnnnnnnnnnnnnnnnnnnnnnnnnnnnnnnnnnnnnnnnnnnnnnnnnnnnnnnnnnnnnnnnnnnnnnnnnnnnnnnnnnnnnnnnnnnnnnnnnnnnnnnnnnnnnnnnnnnnnnnnnnnnnnnnnnnnnnnnnnnnnnnnnnnnnnnnnnnnnnnnnnnnnnnnnnnnnnnnnnnnnnnnnnnnnnnnnnnnnnnnnnnnnnnnnnnnnnnnnnnnnnnnnnnnnnnnnnnnnnnnnnnnnnnnnnnnnnnnnnnnnnnnnnnnnnnnnnnnnnnnnnnnnnnnnnnnnnnnnnnnnnnnnnnnnnnnnnnnnnnnnnnnnnnnnnnnnnnnnnnnnnnnnnnnnnnnnnnnnnnnnnnnnnnnnnnnnnnnnnnnnnnnnnnnnnnnnnnnnnnnnnnnnnnnnnnnnnnnnnnnnnnaaaaattccacttttgaaaaaa

SEQ ID NO: 78050 - DNA, 585 bp, Arabidopsis thaliana landsberg
  unsure (1)..(585): unsure at all n locations
tgtcggccacgatgaacgacgaataaaatcccacgccgaattggccgatgagctgggcgtccttctgcttgtcgcccgtcaggtgggaaaagaattccttggtgcccgaacgcgcgatggtgcccaggttggccaccgcctcgtnnnnnnnnnnnnnnnnnnnnnnnnnnnacaccgtgatggtgcgccccgccttgtcgaaatccacacggatgcgcagttcggtgtcgccctgcagcagatcgggctggtcgatggcctggaaccgcagcttgtcgcaggcgtccgacgcattggaaaccagttcgcgcaggaagattttcttgttgctgtacagggaatgcaccatcaggtgcagcaattgcttgacttcggcctggaaccccagggtctcggaagcgtgaacagaggtatcggaatcgctcataatgaatgctgtctgctgaaaaatgaaaaaaacaaccgcccggccctggatcggggctcaccagggcgcattagggccaatatggggataccttccggaatttaagagaccgnctgcgcacccgtgccggcatcgcctgcatgcttctgggcgtactg

SEQ ID NO: 78051 - DNA, 532 bp, Arabidopsis thaliana landsberg
  unsure (1)..(532): unsure at all n locations
tgaannnnnnnnnnnnnnnnnnnnnnnnnnnnnnnnnnaagaagagtgaatggaagcacgatgccgaccaagatctcatccaatgattggccactcattataaagtatgggagattggaagtggtcatggaaagaatgtatgtgaatttgaaggatatattgagctacaagaatctcagaccagctacatcattatagagggatttagttgttggttgaagagagatttaatccgtgaagtaatcccaaacgactggtcccatccaacccaactaaacgactgattaatatatcagcgaaaggtatcagggataaattagtttgaatgaccacccttgaagctttttttggcaggctggttaatatccaatttgtcatattagttagtccaatctgatttggccaacttttcatgtgaatacttttttttagcaacttttaaaccttgatttggcgtttatgctcttattcgttggttggttaagaaaacatttgcaacacttcatgagttttgcttatttttcattcatgc

SEQ ID NO: 78052 - DNA, 570 bp, Arabidopsis thaliana landsberg
  unsure (1)..(570): unsure at all n locations
cgaggccgtacgcttggtaccgccgatccagatgtcgctggagtacgcggtggaattcatcgacgacgatgaactggtggagggcacggcaaagtcgatccgcctgcgcaagcgctacctgaccgagaacgaacgcaagcggatgtcgcgcgccagcgcctgacgccgtagtggctggtcgccacgcatctcgagtcgtttccttcggcctttcgttgacaagccatgtcaacgaaaggccgaatttttttcggatgcacattgaggcatcgcaaggacgatgcgtcgatgcccaatcgggcagtgacgcgatctgtatcgcccggcaagcacaagggaacccggcttcgaaacaggatactgatcccgtttgctccgattaactcggagttaggtctatcttccaatctcgggcgtacatgaagannnnnnnnnnnnnnnnnnnnnnnnnnnnnnnnnnnnnnnnnnnnnnnnnnnnnnnnnnnnncatgggacggattgccacaggcagccctgaagtgatttatccgcagcgacccatcaccatggttgttggatacccacctggcg

SEQ ID NO: 78053 - DNA, 546 bp, Arabidopsis thaliana landsberg
  unsure (1)..(546): unsure at all n locations
cccacggcatcgccaataaaggattgctgcgccacaccatatttcaggagccacacaatcatgcaaaacgggcgggcatctttgcacgagcaatggacccgacacacgacatgccgctgttcttcatttgtgcatctagtttgggtgagtcggcgcagggaccccctcatttctcggggccctttgccccaccccaccccacccccgtgaccctggggtgccttgcctgcccccgcccaggcgagccaccctgtctgatgtctcacctgagtgctagcgcgatctccaacagtgtggagtatatgttgaacagcgcgggctccgtggcgccgtaccccccatcaatcggctgcttgaaagcgccgtcacggatggcctctgccagagagccgcggtcacaaaactccatgcagattgccagggcgcgtggctgcccggngcccacttcactggcaggcagtagccgcagaggctgctgcagcggngagccgggtgcaaagtgcgttgtcccaccggctgcggcagtgactgctgctgcgccagggc

SEQ ID NO: 78054 - DNA, 570 bp, Arabidopsis thaliana landsberg
agcatgtgatagatggaaattgttgctacgcgtgcaacttagtttttttctataaagttcaagtttctttacaggtttattggcagataatttcaaataccgagttatacaataaacccattgtgatacttaaagaaaacatgtgttttggttttggagcatttctatatagagataaggtatgttgctacctttcttttacagatttactgaagactcgaaagcaataatctatagacttgaaaacacaacactcatcaaaatcttcaggggtctctcttttagtcaaatatacagtatgggttttattggtcaaagagatgcaaggagcttaaatccaaaactttgacggttacaaaaagataaaactagtactttgcagttcttaaatcattttttgcatgcttcgtttacaaaaaaaaaaaaaaaaagtaccatttacttgtatgaattaaacgtgagtcacgaactttagtatgacttttaattttgatgatcaatatgatgagtaaatttctttgattttgtgaacagaatcaaaatagatttataaatgggccacatatttgg

SEQ ID NO: 78055 - DNA, 465 bp, Arabidopsis thaliana landsberg
caaagtatttggagaaggcttcctagctggctaaagggcaaggctttaagaaccagagaacggcttactcctttgttggttgtttgctttctccactctgtctgttcttttcttcttcagcttcatctccctttctctacaacacttcctgtgtacaaaaccacccaaatttggcaggataggtggatcttcttctttctctaattggtattgactagactagaagagccggactctaaagcttgtatgtgtctgttcttagcagggaaaaggaaagtgttgattacataccgcaggcctggtcctcaagggtttcaatgtagctgcccggttctcatagaagcattgaggagatggcgggtctgtacagacctgctgcaggaatcgtccgtgtcctttgctctttatagtcgcccagtatagaggaactgggatgttctctggatcatccattctcccaaaaaa

SEQ ID NO: 78056 - DNA, 525 bp, Arabidopsis thaliana landsberg
  unsure (1)..(525): unsure at all n locations
tgatatgccaaagtcaaactaagaaatatatgttttggggattttatctctttagtctaaacattaatctctagtggttcgatgagatcatccctatactaaaattagcatttcacattttttactttttttacttttctcaattaaaaagttttaattaattaattaaaaaaaagaagaagatttgcctttttccttttttaaaccgtacttttgatgtaatccttaattatataatccaacgttaagtgtcggaaactaaaccctagagaaatctcttcttctagttctagtctcctgcttcttcgagatcgtgtgtcgtaactcgtaagctagggaagccctttttgtcttcgaatttcggtaactatacgatgatcttcttctcttattgtcattgaatgattttgtagtttctgggatgatttcgacttgggttcttcgaatntaatttcgtacctgtgtgatcaattttacctgaatttcatcaaatccgatttaaaccctcagattagcgaattaact

SEQ ID NO: 78057 - DNA, 471 bp, Arabidopsis thaliana landsberg
  unsure (1)..(471): unsure at all n locations
gccaccacccagcgcgcgctcannccatcgtagccgcctttctcgccagttcactgtgcgcgctcggttgggaggccacacgcgcttccacatcgggccggtcgccggtgcgcgggtgcttgaagctggagccggagatcaccgaggcggcgtactgcagccggccgccgtcaccgagcgcgcccaacgcgtgcacaccccagtcggccgacgcgccgaacttcaaccgcgtcaccagctccttgtccacgtagcgatagcccgaccactggttcacgaagcccgcccacggcaagggcgccgagccgaagcgcagcactagcgccttgctgaaggcgccctgcaggtaggcgtgcttcagccacaggtcggtgggcgagctgtcgcgcgcccagttgatgtcngtggtgaggtgcgccgacacacgtcgctgagcggtggtccaggtccagatagaagccttgaggtcgc

SEQ ID NO: 78058 - DNA, 316 bp, Arabidopsis thaliana landsberg
ctgaaattagttcactgagttagcctgatgtaaataaacaaacctcctccttctctctatacatctctccctctcttgctctctctctttacttgaagatgatgaccggaaacttgaacggcggtggaagaggaggggaaggaccatgcggggcttgcaagcagttgagacaaaagagagtgaaaaggagacgattacattaattaaaacgctgcataccaagagaatgtagaatccacctgtaatatgagctctgggcatacctagactaacgcaaaaatcttgctaatattgtgatgagaccgggagattatga

SEQ ID NO: 78059 - DNA, 556 bp, Arabidopsis thaliana landsberg
  unsure (1)..(556): unsure at all n locations
tcggaaaaaacaaaaatttggttattaaaaaaaagtttagaattggacaaactatataacatttcaaccgtcgtgaaatctttgaatgttcgttgttatgtatatgttcagtttaacaatgtagtccatatgatttcatttagctgacttttttattagtatcaccaaagaatttgtttttcaggtttgtatgtaggatactagtcttgaggttgacatattgttgacatggaaaatctgcgtacagcttctctctgcggcgatgttgttgtttacgtatttttcagatctcatcacactgattttgttgataatgctgcggttttatattcagaagaagaacctttgccttccgctttaaatttgtaatccttcagactctaggaaacaaaacaaggatgagagttttctgggatatcttgtgttgatcatgaacgaataggatgtactcttccatgaaagaagtcttctnnnnnnnnnnnnnnnnnnnnntcttcttcctcttccatggaggaagctacttaaggttcgaggaggaatttagatgagcaggact

SEQ ID NO: 78060 - DNA, 503 bp, Arabidopsis thaliana landsberg
  unsure (1)..(503): unsure at all n locations
tatagnaattttaaaaaataaattatatccgtggtatactacgggttaaaatctagtatattgtaaatataaaggaacataattctagttaatttataatgctgacaaacagaaacaaaagaatcaaaatccctctaagcgacacgacgagagagaagagaagattggtttggtaatgccatatttgcctttcatttaccacatgaaaaaagtttagaagggtcaaaccgtgaagaaagataataacttttctattaagttttcttgcttaaaatattacaagaggtatagttcattatttatacttaagttcattcttgtaaaaccttagttgccttaaacattggcattgtttggtaacaagctaagtgcattgaaactattctatgtctcaagatgagtcactgtcctttcctgcagctttgttccttttgcaacggaattgtttggtccttgtttctcttaatcaaatcttttgtcttttgggacaagttgttgagtgg

SEQ ID NO: 78061 - DNA, 246 bp, Arabidopsis thaliana landsberg
  unsure (1)..(246): unsure at all n locations
gggcagaaactccatctttaaggttacatccgctgtaatcacttcagctcccgctatccgggcaaattccattgctgccaggcctattggtccggctcccattaccaatacaaaattctccaggcgtttaccatcttgcccttccttgatttccattgttgcacctntattaggaataaatggggcttcccaactataacggcccaaggtttgccttcccggcccggtggaaggctcccccttccc

SEQ ID NO: 78062 - DNA, 541 bp, Arabidopsis thaliana landsberg
  unsure (1)..(541): unsure at all n locations
ggcaatgcgagcattggaatcgagctgtacgaaattgccttcggcatttgccacctttgatcgaccctgaggagatcgggagttgaccttgatcgttgtaggtcaccgacttgccatcaacggggactttcaaggcgtaaggtaccgttgaaaatacctgccgtggataaactttgtgatgcgtagcgtcagtgatttcgatgtatgcggcgttgcttccatcgctgaaaattttgtgccaatcgactggagataagttgaggtaaatttggaaaacgccgtctttcaatttgacgcttgagaatgccaggccttcgagaatggcttcgccatctgtttcgctgcggaaaaagccgacttcgagatcaatgggaccttcgaccggctnnnnnnnnnnnnnnnnnnnnnggcccatataggagagttgcatagggatagcgaaggttaaatcgctccacatcacaactgtcaacagtatcacgcagcgtcgcagcatgtgcaacattgcacatctcccccattttctatcgaattacccttg

SEQ ID NO: 78063 - DNA, 592 bp, Arabidopsis thaliana landsberg
  unsure (1)..(592): unsure at all n locations
ctcgcgccgccaatggcttaaccttagaattaaaaagtatgatttaatatgtataattagacaaaaaagtaaggggctgaatggtaataaaaaacttctcgtgaagtaagtaaacgcgaaactggttctcccggtaacaagttgacacggcatttttatttgaaagaagagaagaagaaagagagagagagaggactgggtctggtctcttcgctgcaacctatagctgttgtttgctcttcgacgggattctcactactcttttgccaaaaaaaagaggtatactttccagaattgttcaaactcttgatgaatttctctttagaaaaaactcatctttttaggttggaattgattttgttttttacatttcaagttgaagcagttggagagaactttatgctcttgttcttatctagattcctgcaagtttgttgctttttctttctgtagctaaatttaagtctctctagtgattaattcgatgcaatttaatgacccaattcgagagttttgtgtattccgtagaattttgagctcanaattcttcatttgagtctcaatcgagttttggtgatgtgagttagttctt

SEQ ID NO: 78064 - DNA, 532 bp, Arabidopsis thaliana landsberg
  unsure (1)..(532): unsure at all n locations
gtgattgacggccgcacgcgtcgagcagaacactttggcgtttttcgcatcgnaatagcgcaacagggtgatgggggcgttttcgcggtccgaacgcgccacggccagcgcgcgatattcgatatcgacatgctgcttttcttccgactgcgtcgagatgcgcacggcgtcgcgctggtagctcttggcaagcttggcgatcgctgccggtaccgtcgccgagaacatcagcgtgcggcggtcatcaggtgctgcttcgagaatgaattcgacatcttcgcggaagccgagatcgagcatctcgtcggcttcatcgagcaccacggccttcagcgccgacatgtcgagcgccttgcggcggatatgatcgcagagacggccaggcgtgccgacgacgatatgggcgccgcgctccagcgcccggcgctcgctgcggatatccatgccgccgacgcagctgacgatcagcgcaccggtcatttcataaagccattccagctcgcgcttcacctgcagggcaagttcgcgggtc

SEQ ID NO: 78065 - DNA, 222 bp, Arabidopsis thaliana landsberg
tttgtaaaagaaactggatcaatgagtctgtgcatattctccatcacaccagaacagacgggggggggtctgtgtcaaactgatgaaccccaccaacgagcataaaaaaagtctgaccgttcgccatgaggtggagctagatgcgtatcaccctattgttgaagaggacaggcaatagaaaccctaatgcaaagcggtgctggcatgctgctaggaacgagg

SEQ ID NO: 78066 - DNA, 589 bp, Arabidopsis thaliana landsberg
  unsure (1)..(589): unsure at all n locations
gcacccttccagtgagcgaattgcacggcgaaggtacccacgcctccggatgcggcctggattaatattttttgaccttcccttaaccggccgtggtcaaataatccctgccacgccgtgagccccgccagggggaccgctgcagcatgtacatgatccaggctttggggtttaaaatgcacttcatccgccctgaccacgatgtattcagcgtaggtgccatttttggtcggatccgggcgtccgtagacctcatcgcctattttgaaatgcttcaccttacttcccacttgttccacaacgccggacagatcccatccgggtgtgaagggcagcgcgatcgggaacttgccttgagctgcaccttttcgtattttccannnnnnnnnnnnnnnnnnnnnnnnnnnnactttgacaagcaccttaccggcagcgggccgggggacgggcacctccttcattttaagcacttccggtccttcgaaggnnnnnnnnnnnnnnnnnnnnnnnnnttttcgttttgatggttgcggatcaaattttcaacaacccttggttttgttccgttttggggataatgaaaaaagtg

SEQ ID NO: 78067 - DNA, 536 bp, Arabidopsis thaliana landsberg
cgaaccaccgcaggcgccctgcgggacaggcagtccagcgcccggcctgaacgacggcgccggcgctttcttgtttgaggcgtcttcggcgcacggccgcgccttcagatgcaagcggctggcggtgccggcggcgatccagtacatgccggccgcaccgccaccaccggtgtcgaccagcaggtgcagcgactgcccgccggtagtttgcggcgtggcgtataaatggccggcctcgtactgggtgggcacggtctgggccgtggtggccgtcgccgcggccagcatgagtgcgagcatgcaggtgtcctccatggttgaccgggccgatcgtgcgcccggcgcgccagcgccgtcatatgccaaaggtgccccgtgcgccggcgtaccgttgccaagcgcagccgactggggtacataagacggattcgtgacccgaggggagcttcatgctgatttgtccgacgactgtggcggcgccgcgccgcacccgagttgccatggcgacgatcgcctttcgcgcaagcctgctggct

SEQ ID NO: 78068 - DNA, 326 bp, Arabidopsis thaliana landsberg
  unsure (1)..(326): unsure at all n locations
acggggtaaacgaggatcacacgacaacaaacctaacacccaccgacccaagcggaacaacctcccctcccggacaccgacaaaaanacagaagggagaagaagagccaagcggacaaaccagcccaacccgagaacggnnaaaggagaacaacaaacacccaggggacaagcaaaaccagccaaagagcgagaacccacaaaccaccaacaccagccacggaagaccaaaacaccaacaaaagaagggggaaccaacacgccacaccaaaagaaaacgcaccaaacagccaaccggaaacaagccacccaaacccacgggaacag

SEQ ID NO: 78069 - DNA, 471 bp, Arabidopsis thaliana landsberg
cttcggtgcgtgatacaaggcgagaagcttggcctgcactgtcggtgccgcgttcgtctcggcggtcccggccgggtggccggtgatgttcgcgagcaaggcgctcgtgccgcctccgtcggatgttgccgccagcgcgatctgcggagggagcaccatggccgccgcggcgcctgcgccggccagcccgaggaatcgccgtcgagagatgttcgccatgatttcgagcgtatcgagcagcgcagataaatattgacttcaagcccgagcatcgctagaaaaatttcccatgactcttccgcgacgcacattgcgatctttggtcactgcagccgttggactgtcggttgcgctgttctcggccgtcccgatgattccagaggcgcgggcggcgaccagcgacgcggttcagaccaccagcttccagcaactcggagcaggagtgacgttgacgaaattctccgtcgacgt

SEQ ID NO: 78070 - DNA, 292 bp, Arabidopsis thaliana landsberg
ggcagctcctaatgggatataaataaagctaatgggaaggtgggcttatatctccaataccttttacagattactcttcaattgtttaattggaatttatggcttggctgagtggacggcttctacatgagggatgtgcatattacacaatgggggaatcaaactaactactaatgtattcgattaatattatcttgagtaaaattagattgttaattattatttataaaaaattataattatttaaatttttactataaaaactactaaaatttccttaccagaaaataga

SEQ ID NO: 78071 - DNA, 574 bp, Arabidopsis thaliana landsberg
  unsure (1)..(574): unsure at all n locations
caccaactggaatcgcccttcgtcgatacgcgccagcaccgcatcgtcgctttccaggctggtgccggtcatgagtccggcggacaggtcgtcagagctcatgttcagagctcacggttgctggccagggtggcggtgtccgccagcgtggcgacctgggtgcgtaattgtctggcctcggccaggaagcgggggcgctcgctgtcactgacgccctgggcctgtggcagcggtacggtgagcggattcttgtgcacgccgttgacgcggaattcgtagtgcagatgggggccggtggccaggccggtcatgcccacgtaaccgatggtttgcccctgatcgacacgggtaccgacccggacgcctttggcgaaccgccgcatgtgcgcgtacagggtggagtacttctggccgtgcttgagaatgatgacgttgccgtagccgcccttgacgccggcgaagatcactctgcctttgccggccgccttgatgggcgtgccgctgggcgcggcgtantcgatgccttcatgtttgcgtacccggttcaagatcgggtgtttgcggcccatgctga

SEQ ID NO: 78072 - DNA, 558 bp, Arabidopsis thaliana landsberg
  unsure (1)..(558): unsure at all n locations
gctcattcttgattcgagtaaggaggcccattgggctgtattaagctgttttgtttttaaaacaggttcgcagacgaaaataacgaattgtcgccaatgttcatatcggccaactcaaatctatcatctaagagtaagaccaaaattaaaattcacagtacattgccacactactactatagaaaatggtgaaatacctaaaatgtgaagtctatgttcatgtttgcagttgctaaagactgataccaacgattgcgatcatcaaaagttattgcgcgcaacacattttttgttcgtttggtagtcgaacaaaaaatttggtcgttggtcgttatataacattttagggtgaaggattcgaaagaattttttataaaatactaaaatgaaacactttaattgctcgttataaatcaacttttaatcagaattttaatttatgtttcaaaagttaaaaatctcaaaacagntaaacgaaatactgactagatantttgttaaacggaatcatacgttttttttttttttataaaaatatcaagagggtttgggactgag

SEQ ID NO: 78073 - DNA, 117 bp, Arabidopsis thaliana landsberg
gtatttatcaaatctgttcatatctaacggaacgctattggatcgaatgacaaagacattgttttaaaaaagatggcttttctcggatgaaatggaaataggctccatgtaatgtaa

SEQ ID NO: 78074 - DNA, 552 bp, Arabidopsis thaliana landsberg
  unsure (1)..(552): unsure at all n locations
aacggatgatgtctttttctacaatgaagcactgctgtcgaaagcccatcccgtcacggtaaagttggagcataccgatgtcaaggcggcattgaagcgcattctttggggccagggtctggattacaagattgtggggaaaaccatttttctcaagaaagcagaccggaaggccgagaagatgccggagcctgttgcccctacactccatatagaaaacgcacccattgaagtgcggggcacgataaaagactctgccactggtaaggccttgcccggggtcacgattcgagtcaggggaacctctatagggaccaccaccgatgccaatggtcggtttagcttgcatgtagagccctccgctacgttattgattagctttttgggatatactacgaggatcgtgggcgtgaataacagaaccgcaattaatttgagtttgtcctcctctgcgcagagtctggagcaattgaccgtgatcggntttggtacacagaaagccaaggacgtcacangatccgtggctactgtggcaccggaagaacttaatga

SEQ ID NO: 78075 - DNA, 229 bp, Arabidopsis thaliana landsberg
aagtgcatcacgattttggccttaaatgacaatccttactcgaatcttctgtttttgagattgaatcttagtgttctcttgatgttttctagtcataccattttccatttttttggtttcttcaggacaaggacactagtgtagaacctcctcgtaggcgttgtcatcgaaaggtaaagaccgacctgactcttagggcgtaaacttggtatcatcaggacatggtttt

SEQ ID NO: 78076 - DNA, 406 bp, Arabidopsis thaliana landsberg
  unsure (1)..(406): unsure at all n locations
cgatgacggccaggcgacgcggtgatcgtcgggcnnnnnnnnnnnnnnnnnnnnnnnnnnnnnnnnnnnnnnnnnnnnnnnnnnnnnnnnnngccagtcgccgaccgtgtcgcattcgacgaggcgcgtatcgacgggannnnnnnnnnnnnnnnnnnnnnnnnnnnnnnnnnnnnnnnnnnnnnnnnnnnnnnnnnnnnnnnnnnnnnnnnnnnnnnnnnnnnnnnnnnnnnnnnnggactcgtatgactggttgcggttgaagacgaaatagctgcattgcacccacgtttgcagccgcagcggaatggacggtagcgcaggccgaagctactacggcgtgatctgcgcggatgatggcgtgggcagcatggcgaacaagagagcgagcatcttcatgagaacc

SEQ ID NO: 78077 - DNA, 555 bp, Arabidopsis thaliana landsberg
  unsure (1)..(555): unsure at all n locations
agggtactctcaggacctggtagcctgagtcccaatgtagcttgcagatttctgttttgcccttttgcgggtgtgtagttgcagcaatgacctggaagtgtggagatctctctgtcactaaccacctatgacttctgggaagagatggtgttagtggtcatttgcttctctactaggaaaaaaaaaaggagggcgcgggggtggcgggtggggtgggtcaattccgcctcttaggcattgagcatgccacagacttgccaggcttggtgcactggttggggaccaaggcttcatgccagattggagcttgcgctgcggggtggcttctttcccctgggatccctgaatttgcccttnnnnnnnnnnnnnnnnnnnnnnnnnattacttgtcttttcaatggatggcttaccttcttgtgacagctgtgcccttgtgtgtactgcaccccttggtgtttcaaaccgaggcccgtactaaactttcttacttgtacatgagacgttccctgttgggtttcatttttttttatttacttcacacccctccctcctcca

SEQ ID NO: 78078 - DNA, 577 bp, Arabidopsis thaliana landsberg
  unsure (1)..(577): unsure at all n locations
tcagaattctcaaaggcgacacctttaacctcctccactctgtttttcttctccaacaaaaatgtcataatcccatttgggtactctctgtttcatcatctctttactgggtttggccaatttctcactttctcaaaccggtctcgatgattcgactatgcaatctatcaaatcaagtctgaatcttacatcagacgtcgattggtctaaccctaacccttgtaaatggcannnnnnnnnnnnnnnnnnnagtaatcgtgttactaagattcagcttaaacaaaaagggattcgtggaactcttcctactaatcttcagtctctctctgaattagtgattctcgagctcttcctcaatcgaatctctggtcctattcctgatctctctggcttatctcgtttacagactctgaatctacacgactatctttttacctctgtaccgaagaatctcttctctggtatgagttctcttcaagaaatgtatctcgagaacaatccgttngatccttggatgattccagacaccattaaagaagctacgtctctgcagaatctaactctctccaactgcagc

SEQ ID NO: 78079 - DNA, 392 bp, Arabidopsis thaliana landsberg
ctcagtaaaaaaacaaaaagtgtagatggatcccatttctattattagacctgaaaccttactttggagccggaggtttgatgctatcttgactatcacatagttttacttattagcagataagaatatgcaaaagttgaatgcgacactgtaggtataagcgaaatcaaattaatataagctaagttggtcaaaagagaaaaaaaaagttgggggaggggaaatgttcccaattagcaatacaaagcctgaaacatattatgtttgtttgaataaatgtatatagccaaatataaaggaaagacttgagggtgctatgtttcttatgacaatgacagtcaaaattctgtgtttcttcttcttgatttatcttgcgttaggaggcattgtct

SEQ ID NO: 78080 - DNA, 128 bp, Arabidopsis thaliana landsberg
catacaggaaaagaaacacatggggacacaggacaaaacggaaacctttagtgggaagacatcttctatcatcccttgttcaccataccttggcatataaacagactttcttctttatagctgattat

SEQ ID NO: 78081 - DNA, 594 bp, Arabidopsis thaliana landsberg
  unsure (1)..(594): unsure at all n locations
tccttttccaatttcaaaacccaaaaacaaatcagcatgnnnnnnnnnnnnnnnnnnnnnnnccctttcaagtatgtggtttccgaaggctctcatggaagaagaagtttcgtccggaagctggtcagagctgtagcctccggagattccgtggctccggcgatttcggaagaatcaaaagtgaaattgggtggctcggatttgaaagtgacgaagcttgggatcggagtctggtcatggggtgataacagctattggaatgatttccagtgggatggtcagttctcttaatttcgattctcaattttatacattttgtgaaacaaaagtattgaaatgaattaaaagttaatctctttttttttattctctgtgatggtagacaggaaattgaaggctgctaaaggtgctttcgataccagtcttgacaatggtattgattttttcgacaccgctgaagtttatggttccaaggtaagattttgttaaagctgatcactcttcattgttttgaaactatttgcaatcctcacatttcttttggggggctcttcatctttgagtttccctggtgcttaagcttgaactctttag

SEQ ID NO: 78082 - DNA, 490 bp, Arabidopsis thaliana landsberg
taaactaataatttaaatgacatttttcccatttataattatatatcaaatattgttaatttctcattttatatttaaaaattctatatctgcaataattttcttccaaaatatcgtaaatcacaaattataattttccgttaaaattgcaaaattgcgttttatgaaaatcttaaaaagcttgtttccgaacaatttgttttggtcaaaattgagtctttcgcgaacaaatagcataataacattgcatcgagaaacaaataaagctcgattttggtgaaacaatgctcgagtggtgatctatatcacgagtgattgaggaccaacagtgatatctaattttaccaaagggatgcccaactagaaacccgcaagtcgaaaagaaacatacagagagatctgaatcggatgcctgctggatcgggcgctctagagcagtagtctgggcccgtccccctagaaaaaaaataggaacacttcttatggattc

SEQ ID NO: 78083 - DNA, 359 bp, Arabidopsis thaliana landsberg
tcctcgaacgctttgcggtgtttgtccgcttcgtcggaggtctcagtgtcctcgctggtttcctctgtggtctccttggaggcttctgcctctttggttcccgcttcggtggtagtctctacctctacctcggccgcctcttcggtggacgactgcacctggtctgcatctgccataaggggttttgttacgccggtccgatgaccggcatgaataatttaataataccactcaccgtgcctcggtctgaggctcgggctgtggattattggaagcgatgcgcgcaagcggggcgaaacgaccggatatgagcttacggacttctcgaaagactcgtactcggcggccgtattcggggc

SEQ ID NO: 78084 - DNA, 349 bp, Arabidopsis thaliana landsberg
atcaagttttgtcaatgattatgcgccaaaggggagtcatattctcatcaaagatggattcgggattacgcctctgtatgtatatatggtcgaagtaggcaaactctcacctttatagcagatcaacaatgaattttgcgggatcgatgttagcttaggaatgcttatctgcttccagaatacagcgattaattgcttgggaatcctacatgtgccattatcggacgtgaaccaaacaattggtcagaagtgcatctgggttccaagccaactgagaggacacaacggcaccagttattgatgaaccaagaacaggatgtacttaacgactctcacattctgtaataag

SEQ ID NO: 78085 - DNA, 620 bp, Arabidopsis thaliana landsberg
aaagtcgttgctcgcgccggtggtgacgtcgccgaactgaatctctttggacagccggccgcccagcgccatcttgatctgcgcgagaatttcttggcgcgtcatttggtgacggtcgtcttccgggagcgaccaggtgatgcccagcgccatgccgcgcgggatgatcgtcaccttgtgcaccggatcagccttatcgagcagaccgccgagaatcgcatggcccgattcgtgataggcggtgttctctttctctttcgcagtcatcaccgtcgacttccgttcgggaccgaccatgacgcgatcgatcgcctcatcgcaatcgttcatttcgatgatgttcttgtttctgcgcgccgcgagcagcgccgcttcgttgagcaagttcttgagatccgcgccggagaatccgggcgtgcgcttagccagcgtttcgagcgagacttctttggaaagcggcttgttgcgcgcgtggacttcgagaattttctcgcgttcgcgaaaatcggcgcgatcgaccacgatctgacggtcgaagcgccccggcccaatagcgtctgattgagcacgtcgggacaatggtcgctgcgatcaaaatacccccggggtttggtcgaagc

SEQ ID NO: 78086 - DNA, 438 bp, Arabidopsis thaliana landsberg
tgacgatgaggaagatgtgatgggttgataatatcgtcatgttagttggtaaagggattacttttcagctccctccattctgatttgccaactcctacaaatgctaaggttagttaactgatatttattttataatcgttgtgtctagtagtttagcaactaagtattatatgtgagtcgctatattttttctttatttgtgtagcttatttgcctctgtttcagagttttcaattatctccaagatggtgccggttaacacatctgatgaggtgcttgatcatttagatgaaaaaccggattattgatttccactccatttttgtttaacgtaactagacattattgctaacgccttttatatttaaagcagccagaaattctgagaaaaaccaccttctattcaaatatattactcgagctcacagacaaacaatt

SEQ ID NO: 78087 - DNA, 425 bp, Arabidopsis thaliana landsberg
aaatacccagaattgtacaactactaggttgagtaccatgtgttcattgttttgacgtatctacattattatgcagggatgctggtctaaagtttaaacgcactaggtgtcgtattcaagtagatagagatacatcatggatccatatgtaacagcggagtagttactactaatatgaggcggatgtactttctatttttcacttgtaaagataccagaacaagaggattagaaatacattgttaaatgtttaatggaaatttaccagcgaatattgacatgaaatatggtcgagggactttgtctgaatcagcataaagactttcgccttttgcatacgaatgattttgtagtttattgactcatgtgaggattatgtgaccgagatttgagttttagcttacctacctggaaaatagtctctt

SEQ ID NO: 78088 - DNA, 535 bp, Arabidopsis thaliana landsberg
  unsure (1)..(535): unsure at all n locations
ccagtttatttgatgaatattaaaaaaatgttgttttaaaatttattttacatccacttgcacatttagttagggatgaaattaatggaatgggcagtcgcatttctgatctgaagaagactcctataccttacattatgctattgaaaataataaggttattatcttttcgattttccatagtagcattgaacccccaaaacggacagcgcatacgctataattttatcttaggatgaatgaccctacctgatttttttttgcgctgaatgaaataaaggttctatttgtatatttccaatcaatccattctaatgccctgaaatagacttttgctgcccataaaaacattatagtccacatacccgtctaccccactgattttgtaattattgctattttgccacaagatgcattcacagtctggctttgactggtagctggcgatccataacttatagtgtcctggcannnnnnnnnnnnnnnnnnnnnnttcgacgcggaccgtcattggagtattctaaccccatcctac

SEQ ID NO: 78089 - DNA, 553 bp, Arabidopsis thaliana landsberg
acctagtagttatgtatataaaataataaattaaatgtaatataccatgagggcttcaaattttgagaaagttgaaagtgaatgagacaagccatgaacttagccaatttactacagtgacaagtcctccggcagttcctttcaaatttattggaaatatctggaagtataaaaaaagagtaaattaatgtaatgacaagattaagaaaaaataatgaaatatgaacattatatattgttttgaaattacctcagacattataacccatgggattgcacccattccaatagagaacgaaccgatgtagacctggaaattgggtttttgagtcaaccgaggaaaaaaccaagaccaaaccatatatattgaaaccaaagttaggtttatagatgtttaccaagacaccactaactgccagtgcccgaatgatgtcaagtgttaaaccatgagcctgccaaaaccaaaatcaaaccggttaaaccaaacgtcctatatttttcctgacatatacgctttaattttttttaatttttttcatagaatgaccttcaa

SEQ ID NO: 78090 - DNA, 364 bp, Arabidopsis thaliana landsberg
aaagcgtttcattcgctcctcgtgtgaggacggttgaattttccactgtggagcccaaggcgtgccctaataattctgacgcccatcgcctctacctttgatcaaaaagatctgccttggttatctatcctctgttcaacttatttcataatgagcttatccctcctataggacccaaggctacacgctcctttgatcaagatttcgagaattgcgcgaacaccctatcaccaccaaagctttcaaaaagtgaatcgactatgataaactttatgtctacctatatcggtatagaacattggacgaacggggagggctgtaacatagttattgatctgccaattaacatctgctctaggaggac

SEQ ID NO: 78091 - DNA, 133 bp, Arabidopsis thaliana landsberg
gagaccaacaacgaaggagacacctcgcctcgcagcaaaagggaaacaacccccgggggggggagaaaaagaaaagcccaaccccacaacccgagaaaagaagagaagaaagaaacaaccccccaacacaaca

SEQ ID NO: 78092 - DNA, 133 bp, Arabidopsis thaliana landsberg
gagagaaaaagaacacgaaaccgaaagcacccaagcagggcccgtcgccccgggccccgaccgcgagccagcggaagaaggagacggcgacacacccgcaacgacccgaccaagggaaccgaccggagccaaa

SEQ ID NO: 78093 - DNA, 434 bp, Arabidopsis thaliana landsberg
ttaaaagctgataattaaaatatactatatggcttatttgcttttgaacttctttactattttggtttgccctgagaaagaaatgaaaatatgagtcgaaattaatcacgatacgaacaagtggttcgagaacaatttcttgcatatgggtgaaagactagaacatatagtcaattgatcatctacacatgttgttgtttgaagattaataccaaccgacctcagatctaaaatggaatttctattcacattatgggtgtggtcgtatataaaaacttatctatctatcttgcgggaggaaaacacactgctcgtgttggcgcttttgtaattcgtctttacttatgtatgcatctagatgaatagtgatttgtcgttgtgcacctgcacagagattccgttttactaaaggtttatctaccaagtcgcaccgt

SEQ ID NO: 78094 - DNA, 105 bp, Arabidopsis thaliana landsberg
aacggattgaaatcggaaataacctgaccagaaactgcgattatctaacaattaaaagaagcagctgcgcaaggcctcgtctggccacactactccaccaatcca

SEQ ID NO: 78095 - DNA, 349 bp, Arabidopsis thaliana landsberg
aggacgcaatttgatttcttaagttttatttctcaaaatcatattactagtttaatctttatcattaaacagagaccagatttctgttaaacaaatgaaagaaaaaatagaagtaaagaatcatcttctcttacgcatcttatcaagaactgctacatttaagctaacctcgacacgtgataacatttgtcggacgcaattttcatacacagccacaaagcaatcaccacgtcatcttctcatcaacttggcttccttaatggtgccaaatggcagtgagtaccctatctatctaatgatcccagcaccatcctcctgtcatctacaacttgttccagctatgacatct

SEQ ID NO: 78096 - DNA, 138 bp, Arabidopsis thaliana landsberg
aacgagttctgctcatactctggccttctttttctccagacatttgataggacctgacgttgccagtatcaataggagctccgtacttagtctggccattatcatcggttacgacagggaactggataatgtcacctg

SEQ ID NO: 78097 - DNA, 534 bp, Arabidopsis thaliana landsberg
  unsure (1)..(534): unsure at all n locations
gaatgtataaacgtagaaaatattatacaaaagttgtaagagattttcaatatacataattacatatatatacaagtaaatacaccgtatatacatacgaaggagtaaacagtattatttggtatatagttacgtctctatatacgaagggttcaaacttcaaagtaataatttaatcaacaatgtgtacatattgataagtagtagtatatatgtaaaggtctcacgtctctataataaagtatgactcgtcacgtgacctcctcttcttcgcagagacagagataggatgagacagaaagaaaccaacaaaaccaaaccccaaaacccaagaaaaagagaaaaacactctcttctcttctctctctctctctctctttctatttaagagacttcactgtctctctcagtcttttaacgcanaacaacttttgtggaggagagaaagcgagataacacacacacagagatacacatcttcaatagttaagagttttctatatacagaagcatagaggaaagagagagagacag

SEQ ID NO: 78098 - DNA, 483 bp, Arabidopsis thaliana landsberg
  unsure (1)..(483): unsure at all n locations
gaatnnnnnnnnnnnnnnnnnnnnnnnnnnnttaacggtctgagatgatggcatggtcttcactttgtttaggaaaggtttttgggctacatttccttggcaagaggaagcgattaagtttgaaaaaaggcatgacaatgtgcggatttttagttatcaagatcattttagtggtcagagaatgtttctggtttcatcttatgaagaattctggaagaggttcttttattccccttcttttacattccttgaatgttgcaggatcagttctttaagtgctttaattattttattcttcttccttagatacatatctatggatccaaggcaccgacaccattatgaagtgattcaagaggtatctaaatctcattcctttatgctgccataaactgttttagtgtgtttctacatagctctcacaagagtagatcttccagtcttgcaacacatacgcatgtctgacttttgattgactgcgtt

SEQ ID NO: 78099 - DNA, 198 bp, Arabidopsis thaliana landsberg
gacgtgcctgtgatagctaatggcatgaggccgagccgacaatacgggacggcccaaattcacaccatattcctcctctgtcccgaatactcgactcacagaaggacttacattggaatcagtacactatcaaggctgcggagccttcaacagcgccgccgtgagcgagcggactcgccgacccacgtagcaggagca

SEQ ID NO: 78100 - DNA, 573 bp, Arabidopsis thaliana landsberg
  unsure (1)..(573): unsure at all n locations
aatagttatacaattatacattatttgcatcattcttatattttagtgatattaacaaacccatggtctcaggacacttttacgtagaaaaacataaaaacccaaataggatgaagccactcataaggataatgggtttatataattcacagcaaagaaagccatcgaactattcgattaattatccattctttttttttttagtttgaatgtataagaacaaagagttgttacgcatcatgacaatgtcttagaaaacaaaagaaatgaataaaaaagtaaaacgaaaaataaaaagtgaggatgaagttgttgaatgagttggcgaggcggcgactttttcatacattccatttacttaattcctaaagtccttctcacatctctttgttatataatgacaccataaccatttcttctcttcacaatctttacaagaatatctctcttctacagtaaacaaaaaatggcaatgaatggtttgtccaagatggctgtagccgccgcaactgctcttctnctagttctgaccattgtcccgggcgcagtagctgtgacttacactattgaatg

SEQ ID NO: 78101 - DNA, 203 bp, Arabidopsis thaliana landsberg
tgctgcctcagaggagctcccattccagccgcttttgttgcgcaagatatgatcagaggtcacgaggacgggtgactctaggatgagggcttgaaacagataaatcgattcttaatggacctggggaactcagccagccttggcgctttcatatcagttccagaagccatgctttgccatgcgaggaaaaccatcgtgacttt

SEQ ID NO: 78102 - DNA, 553 bp, Arabidopsis thaliana landsberg
tatatttttttttgaatattaggagggtctggatttaatcatgtaattccccaagctcaaagcacagcatctattattagttttttcccaagcgctatttgaacagcgacctccaagtttcgcctagtgtctttatcgattgagctaatgatacttggtagatgttccacattttacaacaaattgcaaactgagatatgagctagtagaaaactcgcaacctcgttaccttagttcgcaacgttaataaaatgaacaaaaccactccattaacataagtttaacttcgatttattaaaataaacatatatatatgtggggttgatagatagatatttctaaaaaaaactaattggattgcgtacgtagctttaattcatatatgtctatagatgcgaaaaataatttacgcaattcactcattcacttgtgtcatcgtaaaccctcaaaattttagatctctttcaaattgcgaaccatgccaaattttggatctcttgaattgtattaggaatgggttctacctcagaaattttcgcattttatacttttc

SEQ ID NO: 78103 - DNA, 449 bp, Arabidopsis thaliana landsberg
atcgcttcttcgttgtgcttccggccagcctgcgtgtgttgttcgcgggcgcttgctcggctttcgcatcgtgcgcgccggtgtttgtccacgcgtccatttcgttcgtcgcgggcgcggtgcgccgcaacgtcaccacttcgtcagcgggtcgatcatcgtgcgcaggctctcgccatctcacgttcttgtcgagcgtttggtgtggcactatcgatcgtcaaaggtagagcttcggtgccgcctaacagtgcgttcaaggcggacggcttcgccgccgcttaacttaagcgttagaccttattcgggctctaccaaggatcaaatatggccacggtgttcgactgaaatgatgtcgcgtatcaacagtggcttgccgataaccctaccggttacgtactcaactctaggcgtgtcatctcaccgccctacatggatttgcatcgcgc

SEQ ID NO: 78104 - DNA, 172 bp, Arabidopsis thaliana landsberg
ccaacaaccacgaagattaagttttagacaaagaggaaataacgagatgtggaagaccaaaataaacggcagagaggcaccgactgaatctaaggcacgcggcaaaagaacggatcacgagacctaggaccgacaacaatacttatctcgattatagggaaagctcaaagcc

SEQ ID NO: 78105 - DNA, 470 bp, Arabidopsis thaliana landsberg
  unsure (1)..(470): unsure at all n locations
aaggaatgcaagaaaagtttgtgctgtccgttttgannnnnnnnnnnnnnnnnnnnnnnnnnnnnnnnnnnnnnnnnnnnttagcatggttcccaaatttgtaaggaaatggagcaatcaataagattatggtaacttgttcatctaagatttatattcctagattgtctcattagattttcatctactgtttgttattaccaagattctactttgttttttttttccaattcttatttatcttatatcattactttacatttatacttaagacagttttttttttaatttttataaaaatcatctaaacagttcttccttcatatctacacaacaatttaatttttttttctgttttttttttaatattttcttcttttaatttctatttatctactctaaatatattaatactttctttctcatataaatacttacattatttttatttaattttttttctaattttt

SEQ ID NO: 78106 - DNA, 170 bp, Arabidopsis thaliana landsberg
gctcctgccgcctctttatacgacacgggaaataaaagaaaagatcctcgcgatgagggctttttcttaggcgatcgagtcgatcttgaccttcacgtgaggctggcggtgtccgccgcgcttgaagtagttgctcttcccctttgaaccttaccacttctaccttcttg

SEQ ID NO: 78107 - DNA, 560 bp, Arabidopsis thaliana landsberg
  unsure (1)..(560): unsure at all n locations
ctaaacctaaaaaaaggaaacaagtcatgtaccatctggacagatttgattatgaaggcatgatctctagcaaccagcagctgaaatctcaatctcaaccaccatctatcagcaggcacattggctcggagtttgaaaaaggctctacactctgtacaatgcgaaaatgcaaaaccttcctgaaacatatattgcatagaaacaaaatacacttcataagctaagtaaaccattcattcaaaagaagaagaaactttctggaaacggtgacgataatataccttggtggagcgccaattatcgagacaagatctgtgaacgtgcttttgagtacctttacaattgcacggagcaatcagatcttcccctgcaatcaaagaacaaaccaagtcgtctcattgtatcctcactcaattgagttaaggaattgcttttattatacctccaacatcaaggcaaattcacattgtggtntgatctccagaaacaagaagtgtggtttcgtcatcatcagtctcagctatttctgaaacttgtccttcctccacaacacgatctcc

SEQ ID NO: 78108 - DNA, 538 bp, Arabidopsis thaliana landsberg
  unsure (1)..(538): unsure at all n locations
gcaatggttttgtataacgttgcagagatacaagattacttaactgtaagaaaagaattagaagttcaaacatacacacctccagaagtgggataagagactacaaaaaaattaacgaaggaaacactgctggagatggatacctccagtggaagatagttggggcgatctggcttgccaacatcaaggcatggaaagtacgcagaagaaataggctctgtgtaggtttgcttgaaatagtcatacacagtaatctctctaataggtccctcacgttcaccatctttaatcttcattgaaaacctggaaaacggtgaagaaagtcaagcaaaggctgtaaaagaggacaaaatatatattgatagtacaatcatggggaacctacagttgctgattgcacggtttcggacttagacctataattttaaattccatgttacgggtgtggttgccttaaccctcatatgtttaagcattntcgcagcctgccaagtttcaatgaaaacttcacaagctcaaaacanaagcagccagtcat

SEQ ID NO: 78109 - DNA, 2932 bp, Arabidopsis thaliana landsberg
gcagcatgggactttactctttgaagtatatgtcactatatattctcctatatatgctcgatccttggactaaatctgtggtactcgacccgatcgatctactccactgcagttaagttcaaaaatacaacacctaaacatgtgttttttgatgatattggtaatttaccttgtatcacttggtacggtgttaccaatctgcttttttagatcatacctttagtagataacaaatatgagaactacataatatgtatgggaatcttaagtaattgtttatgatatgaacatcttcagtttcgactaaacttttgattgctactaaatacgtatagaacaaatcttcttaattatatcttataacaaccgtttcttaattattacaacaatatgtcatatgatccaagtctaaactataaatgtccctttgaaacggacacttcaagtacagctatatcacaaaagatttggcaaatctaagtacacatttagatttggtaaatttgtacagaatcagtgtgttccatttcaacacctaaaaatatagtcacttttaaaaccaaaaataaagaaaaaatagtcatatcaccgatgcttagcttgatcatcataaggtactgagcctcacggatctcgaggttagaaataagaagagagaaaaaaaacaccaaatcggacggttaacaagttactgacaaaacgaaattatgaacctgagagagtagacactagtcttcggatcttctagactaagatatcaaatctgtttgttattagaagataatatatataatgaaccaaacacaaaatcatttctgctctccataactagaacacctccaatggcttcttccgatgatccagctccggagaacaaccacgtctccgtcttagctagacaagctcgaaacccaccgacacattttttctttcctcacaatccttctcctcgtacttactacttctcggcgccaccacagatttatttcatctccgacatatatctccctcctcctccatcaatatgggtgtattatcctctttggtatattaaccctaaccctaatgtatatgagtctacacaagaacttcctcaacgttactctccaaaccctagccaagagatgactcttccaccgactagtagtagaagagtttttggccggagaagttacgaactatgtgagaaggtgacatggaggacaagtatcaagccggaagttgaatccaacggtgatcacatcacaaccgtcatgcttcgcaatataccgaaccgatacacgtgcgtatataattccttcattttaaattcataaccactagattatacagtatatgttagtatttaaacaaggtgtgatttaatttatttattttgttgtggtggtgaaatgatgaggcatatattgaagctaatgattaacaatatttgcaggagagagatgatgattcagttcatggataagcattgcgaagaagccaataaaagtgggaaaaatgaagagtttacaatctctgcttatgattttatttaccttccgatagactttaggtaagttttaatctttattattattcgttaattagtttcatctttgtttatatacaacgaaatgatgctatatatacaaatcataatcgataatcattgaatatctgcatgttacaacttacaaatttttattttgtgcattaatgtatttgtaatataagtatatataacaatgttactattcatcttgatattattaacttgatcatatataaattacctaaatgaattaaacaggactacaatgaacaaagggtatgctttcgtgaacttcacaaatgcaaaagcagtgtccaagtttaaggctgcttgcaacaacaagccgtggtgccatttctactcaaaaaaagaacttgagattacttatgctagaattcaggctagttccactcctttacatatatatatacacatctttgatctgtgtatcttatcttattcaatcttattgtaacacttgtcggggaaaacaacaatacttttgtgtagggcaaagatgagctggtgaaacgtttccagcatatgacatatccggaggaggcctacagtgcggtatgtttcagcccagctcgtagcggagggaaagatacagttcaaaccacaatggtcggtaaatgcaatgaaccagtgtgctcggtttagtctttccatatatgtaattaggattatgaataataaaagtgtatgcgatggtgaacatgggtctaggatggaaaagaaaagactcagacaccgaaccaaatccaagtaaaattctgaaatgtttagttttggatttggtttttgatgtgtgtgagttttgacttttcataattagtgttatgtttaagcgtctactactctacctgtttctctgatctatatataattttctatgttgttgaactgttgtctggcgatgtttatatacaaaaatatagctatggttttctcttttttttttttgttaatgattattctgatattcaaaaatttggttgaagttctttttttttggtgaaaatcaagtcatacttcattccagttatagagaagacaaataaatctttctacaatgaggattgtttttgcaccaattaattttttaaaggaagtaagccacgaactcttagcttagaaggtgatcgcatgaaaaactagctaacaacataaaaaaaaaaaaaaatgagttggccaaatatcgccggtggatattattagactacgttttcttgtcaacggtggatattttagatataagactttttggaacgtaccaaaaagtttctcttattcctttgaactcgctttatgttacaaaatataactagagaatcttgcatagaaaggtttgcggttttgtcactattttgtatgtgtactactgtactgtacattgaa

SEQ ID NO: 78110 - DNA, 468 bp, Arabidopsis thaliana landsberg
aatacgaaagagaccaagtaactaatcacatattgattagtttatactattaagaaactattaagctagaacttttagatctatgtgtggttgaatgaatatataaatcactagataacgtttacgtcaaaaccattattttttctcacatgaagatttcatcactatctaagatatctcatagtattttgtttcaaaatcaatcaaaggataaattaaaaacaagcaacaacttcatgaaaatacaaacaaagtagcacaaaacaacatcaataatatttccctttgatatatccaaaatccactgcattaggtataaatctataatcattggcgtggcgtatcacacaagtcacaacactaaactatatagtcaatggagaaatgaaatcaaatcttagtaatttccacacaatcatatgcaattaattgaaatcgtctcaacagttatttggtctttctccatta

SEQ ID NO: 78111 - DNA, 310 bp, Arabidopsis thaliana landsberg
gcgtttacttagacgcgtcgctctcgtatcttgcacgttctttttgcttcgtttgcaacagctgtctctctgtcacacatgaatcctcttcttaacctacgtaaccgacctgtagcctcacctgttacatatgacagtaaaataacaaatttaatttatttagctactagtttcatccgtagccagtatctattaatgtatatgactaaaataaatctaaaattttaatcattggaaactcattttggtgttcaaagaaatatttagtaacaagtaaatcatagttaatcagatggtcaagttaaattta

SEQ ID NO: 78112 - DNA, 480 bp, Arabidopsis thaliana landsberg
agaaagttccaaaaagaaaagacagaaagaaacaagtagaagaagctaatttaaaatgaaagtatagtgtgacaagataaagttaataatgaggaaactaatagtatactccacacagtcacacaaagataattgtataatgaggtcgactgaataaagaaaagaaaaaaaagtgtggtcgacttttactactaaaacgagaaagtcggtcgaaggattaggatttaggacacgatttttgtaaaaatatttagggaatttttcaaataaaatcgaacaaaatataaagatacagaggacttattacgagtgtgaattgcaaatattaaaaaagtaccgagtcatttaaagcaacgcggtcttcaaacgcgatatggttttctttactttatgttacatctttgcatttattttgggatgctattcactgccggagagctaagtgagtagaaccgatccattaacacaagaatcagcacg

SEQ ID NO: 78113 - DNA, 586 bp, Arabidopsis thaliana landsberg
  unsure (1)..(586): unsure at all n locations
ggaaataacaatggtcgctctcatgacgcgttggtgacctggtcccaattttttgttcctactctcctttctagttgcagacatgatatatttatcttttaatattcttgaactttcagccatacaaaataaattaaagcttacaggttaattagtcgatatactaataaatttgtagtttgttgtactaattggcattacttacaccaacatatgtgcattaatatacgtttatagacataaattggtagataaaataactgacattaattttccgaggtgggtacgaaaaagacgcgcagaataattattgaagataagtataattagtaagaccaaaataaattaatttcctacgtaggacgaagttctaatcattataatcaaagaaaagaagtttctttgctaagtttaattaagcttgttaattgattccgacacgctaatgattgacaagtcactcggtgtgtcttttcagcaaacttcatgggacttcttcttctacttctggcttggtccttacattacatcaatcctatgatattatagtgtttatataaactcggntggtagctaaattgtatgg

SEQ ID NO: 78114 - DNA, 511 bp, Arabidopsis thaliana landsberg
  unsure (1)..(511): unsure at all n locations
tccgcgcaggtttggattggaacccatggtgcttagcctgtttggaggccggttcttattagggaaaccgggagcctgcagaatggccaaggggacctcgtcatcgtcatcttcgtcagaaatgccagtgggaggtcctggagatggggtcttcttcatgacgtgcagttggggtgcgctcatcgaagcacccaatccggggcggtcaggtggctgcatctcgggttgctcgcctgtcaccttcatcatctgttgtcggtaaacagccatatgagcctcctgctttctcctttgcttcgcttgctgcttcgacttttcgatttcatcttcgtcgtcgtcgtagttgatctcatcttcgtcatcatcggcatgggcagtcgcttggtgagcgatctcgttcgagtccttttccttgtcttgccggtacttctcaaactgagcgggagtcatgaccttgnttcgtggggggctgggagctcgcgaggtgtatcgattgcgatgcgtgacgagt

SEQ ID NO: 78115 - DNA, 537 bp, Arabidopsis thaliana landsberg
aatataggtttacgttaaatttgttcatcttaaattatttatttaagaataaactaaatttgttcatctgagccgtgtgtaccacgaaagaatgtggaagcaaacatattacttatttaagctttgttgctgagtataatggatacctctgtatttatatgtctcaaactaaacttaaactatcatgggacaagacaaccataatgtcttctagtctaagtaacctaaatgtctcactcactatgcaacagctaaagtttctataaactctagatgattcattcagatgaaaaatttcttcatgtgaaccctagatccatgataattaccgatcccgcaggtttctataaactgcaaatatggcacaagacaccatacgatatccagaaaatatcatcgtgaacacgactctataaaccatatgaaaggacatgaagctcaatatgctgaaacaaaagctaaggtgtccaagtttaaggatcaatcaagtttaaggatctaccaagatcaatcaagatctacgacaaaaataaaatg

SEQ ID NO: 78116 - DNA, 279 bp, Arabidopsis thaliana landsberg
cgaaggtggaagaccttcccttcgatattcgtcagcggcgtgtcatcacgttcgtgctgagtgaagctgccgacaaaccaactcgcgcggcggttcggtcgaagctcatcaaagaactcaaggaagccctgcggaccaatcttgaggaacgtgcggaggacctcgcaactgcattcagaattgacggcgttgcttcaaaggtagacaactactctatttgggcttcggcaggcgatacgctgacgcacaatgacgcccttggaggggcacgacgcgaga

SEQ ID NO: 78117 - DNA, 316 bp, Arabidopsis thaliana landsberg
gagaagataagcgataggttttcatcctcatcttctcatttacaatgtagtggtaagattggcttctccgttccgggacgccaaagaagctgttcggctatggaacgaaatggaagctaatgggctaacccctgcccttcctcccttcccccccccctctcctctccctctccctccccttccccctccttctcccctctccctctctccccccccctccccctcccacctccccccccccttccccccctctccccctccccttctcttattttcccccccctcccccttcctccctcctctcacccctcccccc

SEQ ID NO: 78118 - DNA, 267 bp, Arabidopsis thaliana landsberg
tagcgataagctgctttttatcaccaaaccgtaaatctgttttccctctgaaagtcctttcaccaaggcacaggccctgaatactcctgataaacttatctcgtcgaaaccaagacccgatgacatgagtcggtgaaacaacagtagagctttgaaaccatgttcttcttgcgaataaccagtaatcattgcgttataagattgcctattaagattttctgagttgtcaaacaaaatttgagcatcttgcatattatcacactttgc

SEQ ID NO: 78119 - DNA, 574 bp, Arabidopsis thaliana landsberg
aaagatgttacctatacagtataaatactgaacatttttgtttgaaatagttatcaacatatacttgggtattgtccaggattaaaaaaaaaaaaagtttagacgaattatgggttctcttgagacatgcttacttttctttgtaatggttatgtttatgagtgcaactatgtctcgagcctcgacgagtgtagtgatttataatgatcttggaggtggtttgccactacggcaccactgcaaatcaagagaggatgatcttggataccagagtttagcaccaggtagatcgtggtcgtttggatttacaccggatatttttggccggactttgttttactgtcgttttagttggggagctgagagtcatatatttgatatctacaaacagagtagagacaaagaatttcaagagtttggttgcaaaaaatgcgaatggaaaatacggaaaaatggaccttgcaagttatataagaagaccggcatgtttgatcattgctattcttgggattaatatccttattttataaaacatgtccgaactatcaatctatgtctggctacttcttcttct

SEQ ID NO: 78120 - DNA, 370 bp, Arabidopsis thaliana landsberg
tataacccgctcggagttctttcaaaaactcaacgaacggtacggagttaagaattaaacaaaaaaggaccttcaaaatctgtaaaacaaatactgaatagaagacaaaccatccggaccagaccaagggacttgcaccatcaccattgagtctttataaccaaactcaacaacttcaccatcaattaagcagctaacaggttttttcgatgcataaaccctaaactatccggcaccaaaaactccgacctcaacagaatcatcattatacaccaaagaccggatcgcaccgcttgcgttcagcatgttaaccagtccaatcggagcaaaccggaccgaattacccctaatgggcacaacaggagagaca

SEQ ID NO: 78121 - DNA, 456 bp, Arabidopsis thaliana landsberg
  unsure (1)..(456): unsure at all n locations
ctctccattcccttgtcctgactagcttccatctccaacgcagctttctcacctttaagccgtagaatcatcgataaagcctcgctggcagcagatnnnnnnnnnnnnnnnnnnnnnnnnngttcttgattgatcttttgaagaagctcttgttgtgcccacatcgtttctctgactcctgaggtttctccatttcctcctacccccaaactcatcgttctctccaccattttagatcaaaaatttcttgcttttggttgatctttgatcaatgtgtgatttgttctatgattagaagcaggagaagagagatcagatcgaggatggtttttgattgatgcggcggagggaagcggagactttacgttgatctccgataaatgtccaccggagaaatcagatcgacaaggaagccttanagcgaccagatattctcggaagtcccaatcatagtgg

SEQ ID NO: 78122 - DNA, 560 bp, Arabidopsis thaliana landsberg
taaattactataacatgctatttgtacatgatatgacattatatgctaaaaacatatattctttattgacaccaggtgtttttcccccaattttagccaaacatttggctatctaacaaattattcaaacaaatagttgaggccagatcattgatctaatttgtgtttttcttttcttgatagaaaaaaaaaaatgatcaagattctagggggaaagagcaaacctggacatcaaactcaatgaagtcaataggacaatctgcagcaacattaaaagaaagaagagaattttctttgataaatttcattttctcgtccggagattgaagcatgttcatcccaaatcctctatgacccatcaaaacaaatttagggaaaacaaatgcctcttgcttcttatcatcttcaacaacacctttgaaaagcaacacacaaaaccaatcataaccaataatatattaacaaaaaaaaaaaaagtttttgcatggagccatttgatattattacctgatgataacatggcagaagtagataaagacaatgtcatagtttcaagagcc

SEQ ID NO: 78123 - DNA, 261 bp, Arabidopsis thaliana landsberg
acccccaatacatacatattcccaaaaaacacttcccacactaactctacctccctgcatacaccacaatgtcaacaaaaaaaccactattcataaatcaaaacatctacctcaccaataaaaacaactcatctacaaatacaaactcacatcacttttcagcaacctattgagcctacctttattatcttccttgtgataatgacatataccaatatctacctctttcatcgacatccctgccttctagacccatttcca

SEQ ID NO: 78124 - DNA, 529 bp, Arabidopsis thaliana landsberg
gagcgcccgggcaatggcgatggccagatgggacttgccggttcctgtgccgccgaccaggacgacattgcgctgatcggcagcgacggctccgccagcgagatcgcggatcaggctatcgttgacgggcgtgcaggtgaagtcgaagtcgtcgatgtccttggccagcggcagcttggcgacagtgagctggtatttgatggagcgggcctgcttctcggatatctcggcctgcagcagatcgccgacgatcttcggcggctcgtgctgccgtttgatggcgacgcccatgatctcgtcataggccgcgcgcatcccgtagagcttcagcgttcccatcagttccagcacttcggtgcgttccatggctgcttgtcctcctgaggctgtcatagcgggcgcagtcggcgatcggctcatgagccagcttcagcgcttgtggaatggaaaggatcgcgcccggcgccggatcgcggcggcgcgccaggatgttgaggatcaccgccgccgatgagacgccgtgctcgag

SEQ ID NO: 78125 - DNA, 450 bp, Arabidopsis thaliana landsberg
tttgaatgaaggagagactaaaatttggaatattaattactgatgattctattttttccaattttcacattcttaatactcacttcctgcactaaattcgggaaaaacgtaacattgaaaggccgtgtcatgaatccggtcacaggagaagggatttccggtgcggaggtgaagctgttgaagatcgtcggtggatatgattccaactataagactcttaaatcagtaactacagatgcttccggtaaatttgaactggataaatatacctggaccaaacctgttgctcgttgcgaaataggggatttttataaacttgggtggacaaaggatgatggacaaacatttattgacaatttcgaactggagggaaaaaaagggaaggcgatgcatgctgacttctatgcggaaccgcatgggaattataaattgataattaataatatcaat

SEQ ID NO: 78126 - DNA, 535 bp, Arabidopsis thaliana landsberg
ctccatgtcagtaatacatacagttacgcttatagcagcaaaagaaaaaaacatgaagttagtagtactatgttcaagtgtaagatatagtttaaaatctttgttttttcttaattacattctttcaccatgtgaagattggtcaaaattgatgaaaatgtaatctttggttgaaagtggtcaacctgtgagggtctaaatcgataaaaaaaagtgttgggggtcaaaactggaaataaataaagaaaagaaagatgacgattttgccccaaaagttgaaataattacccaaattcccgcttgcgcctcccaacactgagacagtgttgtgtctgtgtactgcgtaaggtttagtgagtccatttgcaaagatgactcgtgagttctaatctatcgacctctctcgttttctcgcagttgcagagtctcaggtaaaccctacaaactataagcatctctcttctcattatcgaagaagtttttgcttttcaataattcaattgtcctcagatgataagaatcactcttcgtgtgt

SEQ ID NO: 78127 - DNA, 548 bp, Arabidopsis thaliana landsberg
  unsure (1)..(548): unsure at all n locations
aaagaaaaatgaaaaaaaaaaaaaaaaatctgaaatatttttttttgatgtgaactgtttttttcttttgctttgtcttttcctggtctccattattgacggtaaataaagtggtggaaaagggtaaaatcgtcacaagaaataagaagatgtataaagcaatgtcacacacttcagtcttcacgcccacttttagtgaatttgctaaaaatatattttcgaaataatattccgctttctcgtttcttatccgttcaagctttcgtgaattcgtctcataaacctctccactctctctggatctccacgcatagatcttcctctgttttcctccatgtacgcttcttggattcacttaaccattgtttgtcgctgtgctctctctgtttttttattcctcgaaaaagttgaattatcagcgaatttgatgcaaatgtgtttaaatcgttaccaaaacggataaattcttctattttcgtagcttggcttgcaaaatccaagcttttagttcttgattttgcttaaaataaatatacttngtcaatgct

SEQ ID NO: 78128 - DNA, 496 bp, Arabidopsis thaliana landsberg
  unsure (1)..(496): unsure at all n locations
tcttaatcccggtaaatttcttctcttggcctgccttcataatatatttatcaaattctgagtacataaaataaacagataaggggatagnnnnnnnnnnnnnnnnnnncatctctgaagttcaataagaccctatgggatgcccattcagcaaaaccagatatgagaccgaactaacacaccacatgatccaagaaatccaagttgagttaaagcctaaacgggcaagaactgcaggaaaaaagtctcattcgatcctattgaacgccttgctcatgtccgtctctaatagccaaaaagttaatctacaagcatgattcgtacgtcgaccatgaaacattccttgagctatcacgctggaatccggtattagtctacttgaaacaaacgccgatcgtggttcagaaactaaccgtggcacatatttttaaagcctcaagcacaggactttagatatgatctatagctcacattacaaaggcttactgggctaacc

SEQ ID NO: 78129 - DNA, 183 bp, Arabidopsis thaliana landsberg
gactaaaagaacgacagctatttgggaacataaacaccatcgaaggagggtgggaggtagttttaatcttatgatagattgacacaagattggaagggagtcatcgagagacccttcgccgaggagaatgattatgttggtgagacacatgattgttcctcttctttgctagccttttcctac

SEQ ID NO: 78130 - DNA, 489 bp, Arabidopsis thaliana landsberg
caagcggatgttcacatcgaagttcccggcgaaatctgttaaagagaggctgtttacggcttttgcgtgagatggatatgagagtgaaacatgtaaaagactgcaagatgaagctgcaaagaagaacagaaggtcgaaaggaaggctctcggtgacggcggaagtattcgaagtcgctcctgaagtctctgtcgtggagttctgcaaaacctcgggggatacgttggagtattacctcttctgtgaggatgacgtcagaccagctcttaaagacattgtatggtcatggcaaggtgatgatgatgaagacgatgttaccactaatgataatgttgacacaaatgacaacaaaataaataatgtttcatgagctgtaataattcactttttggaattggatgtgcgaggcgagactgtcttattgtgaaattgcaaatgtataagaacattttttttatgattaacaataaaaattacttggggggtttg

SEQ ID NO: 78131 - DNA, 498 bp, Arabidopsis thaliana landsberg
  unsure (1)..(498): unsure at all n locations
ataactgactccatctacagaggtattttgaaaaaccagtttattttttgaacacacataggtattctgaaggatgaatgacgcattgggcggattggtcggcaaaacgactgtttgtccatccgacgtgcttatcgctgaaaataggcccgcaccattttccgcttttaccgaaacgcaatacgtggttccgacacttaaatttaggcctccgatactgatcgttgtgttccaataattgttcgtccaggataccacctctgatccgcccggcgtggtaccgatagccacccagtaattctcaacatccgaatgtacatccgaagagactgtccaatttgcctccagcatggagttattggtcgtcgttgtgatatcggctgacaatccattcaaaacagtggtaannnnnnnnnnnnnnnnnnnnnnnnnnnnnnnnnnnnntgactgaatagcagacaaattccccgcctgatcctgaacaattgacttgatgcg

SEQ ID NO: 78132 - DNA, 520 bp, Arabidopsis thaliana landsberg
  unsure (1)..(520): unsure at all n locations
acctaccttctccaatctcttttcgatttcgattttttccatttttcaattttcagtagtttcggggcaatttggcaatttcagtgtagtctacgatgaattcggctttagattttgcttttccggctacatttccggttaaatcgagttctgttggcggatatcggattccttctgctggattcagttcccgcttaagattgtgctctcttcctccttcttcatctatcaaggttaaatctcttctgcactttctccctctgcttcgattcatatcattttttcagctggatttttgtttaattacgaaatttgcagaatcgtatcagagtcttgttctatgcttccacttgttattcaaatttctgcatctgaaattaagtcactttttggaatttgaaagctagttttccaatggaaatctgaatcatacaaatgcacttgtcctgacttgtnnnnnnnnnnnnnnnnnnnnnnnnnnnnnatactagcaatcgtgagtatgagtatacaacatttc

SEQ ID NO: 78133 - DNA, 587 bp, Arabidopsis thaliana landsberg
acccgaaactcttgttcgccgtgcacgtgtcctaggcggctatctttaaagcctttgtgggaagaaaatcccaatcaggaaacaggaattcccctatgatattgggatctggtcaaatattaggaacggcatgggtgggagtgccaatgtcagtgattccgaccttcagcccaggattgggagttgacatggttacagattataagctggttctggccattagctgccacacctgatcagaagactgggtgggaattcgacatcaatgactttgaaggtatgctcctgagagggcagtgatcatcgaatacagactgactgacttggtcatccagatccgggagtaacatggcccccgccagaccccgatcgcattccactaccggctgttttcttagcacctgaagacgaatcaaaattactcaagacctattcctctgctcgagaggaaattgaggcattccgtcgccgccaagcggaagatatcgcccgaacgcgacccttttcttgaatccaaagacgcaagcggttccaccaacgatatagcaggaggatagccgggatagcgatgacgacgctggagcgag

SEQ ID NO: 78134 - DNA, 335 bp, Arabidopsis thaliana landsberg
aaaaaattaaaaacaattcccaattcccccccattttttcaagatcccatccacaaggaaacattttggacagttttatacaatttacccttactccataccatttctctctcaaaaacactaaaaacgaaaaatgcttttatttaattccaatactatactcttcaaaaatattgaaaacactaccatctcacttacaaccagattactttcaataacaataagttttaaaaaaactcaatttctcataatgagccatcactttctttttaatatcgacatttcattcatttccaaaaattacccataaccccaactacttatgtaccctactt

SEQ ID NO: 78135 - DNA, 455 bp, Arabidopsis thaliana landsberg
cgcgctcacgaccgctgcactgctttacgcacggtccgccgcggttgcgctcgtgttgcggctgtgggggcatctcggggaagctagcattcggcgcaccgactcgccccggatcgtcgggatcgcacttgtcgggggcgcgatcgcaccggcgctgctcgcgtgggggcttcagcgggcgggcgcaacggacggcgcgttgctgctcaacctcgatggccgccttcacgggtctgctcgcacgcgcgttctttcaccagccaatcgggcgtcgcgtcgcgattagccgttgcatgtatggccgccggaggctccgcgttgaccctcgactcgatgacgactggctcggtcggtgaactcggtctcggcgctgctgcgggtgcgacggcggcatgggcgaccgacaacacgctcactcgttcggttgccgaacgcgacccgttccatgtgatcgc

SEQ ID NO: 78136 - DNA, 508 bp, Arabidopsis thaliana landsberg
atcctatacccctaaatggaccaccttgtctgtttctcagtgggagaggatgtgtgtagttttgggggatggggctgttagtgtagcaggtgacattgaatggggctttcccttctcaaaagaaaagggtaaggtgggctggggggaaggacttgtgtggagcagtactgggagaagaggagggctgatattagaatgtaaaggaagagtgagacgaaaagagagggagatggagggaaagttttggagggcacacacaaaaatcctgcagaccagaccttaaagagtttagaatttatagagactaactatagcaactttatctcctagttctgggaaagaaagaagaagcctgagtttgggagtggtgtggttctagggcctttctcatcaacaactcttgtggaggcatcccacagctgtcactggggtgtttgtttagtgactcattacctctaggaccagccttgtctagacctaatggggttttgcctatacatttcttatg

SEQ ID NO: 78137 - DNA, 331 bp, Arabidopsis thaliana landsberg
ttgaacctgataggttacttttaataattatactacgagattaactgacaaatgaacttgacagatatttaggatgtatgcttcatcgcgttacgcgtggctgaactcgttttaacatgcttggatgaatgataatgaacgtgagctttctcacattgatcttgagactgaaatactgtattacgagcgggattgatagttaatgttacactgatctgtttttacccgtttacgtgcatgcaaacgttatagtggtaattatgtcgaggcggatgactgagcgttccgaccgtggatggatcatatagcttattacacatacatgaaaata

SEQ ID NO: 78138 - DNA, 433 bp, Arabidopsis thaliana landsberg
aatggatgactttgttgtatttttgtgtcaaaaaaaaaaaaaattggcttttctgtattttaaaaggaaactaccgaaagaacattacactgtattttttcctaaccaaacaagactcgagttaaaaactcgaccggtcaggaaaaaaaaagaaaaagactcgacaacactcaaatcaaacaaaacttttcaattcccgacccttgtatttttcgacaatcgatgaatatgcgtcatcaaatcaaactgaaaaagatgtataaaaccggaaatctatcggcactaaataaaaaccggaaatacttttacaaactttttaattatttatatcaatcatcttttaaattgggattattaattctttaaaacataaaacgacgtcgtttacaacttaataaaactggtaacgttgacttgaatctgttcaattgac

SEQ ID NO: 78139 - DNA, 129 bp, Arabidopsis thaliana landsberg
ctcttttttaggattattacaaaagtgtcttgttcatacattcacggctactgaattattgttctctagtgtttggggggattgaggctccaagaaaggtcccggtcccaactgacacagctgcctatg

SEQ ID NO: 78140 - DNA, 459 bp, Arabidopsis thaliana landsberg
cgggattgctagctggcagtaaggtgaaattaatggactgagactttataaccccaaaaatagtttattaattaagagatgcaaaaaacatagaagcaaaagcatcgccggatcttccgctgatctacacgtctttttgattcccatatatatgaccgaatctaatatgtatcagttgtttcgatgattcattttcattgtgtattttgcttcgatgaatcatttttgctaagaacctgcttcttactttcatttgtttagccgacacgtcgacttagaagtaatatactgcataatatagttgatgtaggctaacttgcattatctgattgcatcttcgataagtagactatggatttttttttttttattagaggctccggacagtcggcccatttttggggtagagaccaaaacatgctaagaccttcttttattggtagaaagaaaattcaaact

SEQ ID NO: 78141 - DNA, 601 bp, Arabidopsis thaliana landsberg
  unsure (1)..(601): unsure at all n locations
gtgcttcgccacgctgtcgtcggccttggcctgggcgtgctgttcggccttttggtacacggccacccagtcggtcttgtgcgaggggttgaggtaggcatcgagcacgcgatacgtcaccgcgttgaatgcggcgccggactgctggttggtcagcacgaccaccccccagcttgagtgaaggcaccatcgtcacccgggacacgaagccgggccagccgccggtatgccagaccagcttgcggccctggtattggccgaggaaccagccttcgccatagccgtagtagtccggtgtcagcggctccagctcggggatcgacgccttcctnnnnnnnnnnnnnnnnnnnnnnnnnnncatctcgtggtggctcttctcggagaacacccgccgcggcttgccgtcggcgcccacggtcggcaaggcgccgccggccagttgcacgttcatccacttggccaggtcgtgcacgctggagtagatgccgccggcgccggtgtcgttgagccaggccatccgcggcaccggcttgatgttcttgaactcgtacggggcatgaccggcagccacgtccatgcccgggcttaagtaagtcatgtc

SEQ ID NO: 78142 - DNA, 111 bp, Arabidopsis thaliana landsberg
ttaatctattacataattactgtactcattcattcatagtttcctaaaaacagtagtcttttattaggcttttgtgaacttctataatactacaccccaatacacatttta

SEQ ID NO: 78143 - DNA, 489 bp, Arabidopsis thaliana landsberg
  unsure (1)..(489): unsure at all n locations
nnnnnnnnnnnnnnnnnnnnnnnnnnnnnnnnnnnnnnnnnnnnnnnnnnnnnnnnnnnnnnnnnnnnnnnnnnnnnnnnnnnnnnnnnnnnnnnnnnnnnnnnnnnnnnnnnnnnnnnnnnnnnnnnnnnnnnnnnnnnnnnnnnnnnnnnnnnnnnnnnnnnnnnnnnnnnnnnnnnnnnnnnnnnnnnnnnnnnnnnnnnnnnnnnnnnnntttatcgctcccatcttttttctctttcttcatgtttttcattattcttttctattatttttttctttgctacctttttctttgatgtttccctttcatcttttttttccaatcttcttatttcctaatctttgtgtattctcatttattcattctttttttcactttttctcttttctactataatttttttaattatatctctttttattttctttaattctttttttattttttctcttttcctaatttttccctctcttatatttttattt

SEQ ID NO: 78144 - DNA, 368 bp, Arabidopsis thaliana landsberg
gaagacatacaagagcgcgtgagacgcctctacgtacgcataaccatacataattatgtggagcgtcaggatctcatctcctttctatagccacattcattttctcacctttactggactttctatctgcggttggcatcccctttcatattctgtgatacactcccttgacatgagctgaggaatctcgatagaaatctccggtacataaggtgaggaagctgcacgtgacggcgaagaccgacgcggcttgttggattaccggctattcttggtgaagaatcgcttggatagaaccattccgcgatggtagactgagaaatggaacgtacctgctttagcgactgtattgagcctataaccatact

SEQ ID NO: 78145 - DNA, 259 bp, Arabidopsis thaliana landsberg
  unsure (1)..(259): unsure at all n locations
gaacaaaccaaggggaacaaaacgagccaacggacacgaacaacccgaagaagccgngcagcngaagancacaaccacgcagaaagggcanacaaanaccaanccagacaagaagaccaaccanacagaaagagcaaaccagaggagaacccggagcaacaaacacagaggaggagagaccggaccaangaaagaangaaagcncnncaagaacccacaccncacggcagcagagnaagncaagccaccagaaaaaaaa

SEQ ID NO: 78146 - DNA, 474 bp, Arabidopsis thaliana landsberg
gactttttccctgatccactgcatctactcttttagattttattgctttgaaacatatttctacgtcgtagtaaattcgaaagcagaactggttatatataatatgccaagtttggttatagaactcatgcaacaaagaagcaatacatcagctgtaagcaaaagaatctttccattctgtttctaatctcagtgatctaggtaccaatggagatcaaagagccttatggtaacatcttcacatctaactttgtttcttttcttttcgcggatctatttcgattttaaatgactgctgatgaatatttttcacactcttataatgagatatgaatgcattatcaagaagataacgattatgatgtttctaatgtgtgtgcatgtttaaggtgttgaattaaggcggatgggaaaagctatgggtagaaagaaaaacattgtgggatgtatgagaagcaactcccattgttgtgc

SEQ ID NO: 78147 - DNA, 374 bp, Arabidopsis thaliana landsberg
  unsure (1)..(374): unsure at all n locations
cccatcacctgcggntgggagcgcaggcaatacggatcctttttctctcatcgcctttcaggtgcgaggcgcggatgggcgaatggctcatcaactcgcgcaaagtatgggcggtannnnnnnnnnnnnnnnnnnnnnnnnnnnnnnnnnnnnnnnnnnnnnnnnnnnnatctgagcccttggcggcttcggtggcgagcgctcccgcgaccagggccgtctgcatcaatacctctgactcaaacaggaccggccaaagcattggcggtggagaactgggtgccattgagcagggccagaccttgcttggggccgggatcgaacggttnnnnnnnnnnnnnnnnnnnnnnnnnnnaggcgggtttgcgcacgcc

SEQ ID NO: 78148 - DNA, 489 bp, Arabidopsis thaliana landsberg
gcgaccggacaaaccatcgtctcggccatgatgatcgccgtggctgcttagtgtagatcagcacatactattgccaaagcgtgaggaagatcaagacttgttcaagtgcgtgaggaacagagaggaagtgcgagtttgtctagggaactaggaacgcggccgaggttggagcatgccaaatatcggtcggtgcagagaggataaacagcaaacgacagatgcgatgaggaggaagaggatcaggtagatgaggggtgattaaagagagggagacagaagaaatgactagaaactaatgtattaggcgggcgagaacgagtggctgaagaacttagatcctacgcggccgtaggagaaacgaacggtgggcaaaagactgagagggtcggccgatgggatcgagctctttatacaaggaatgcaatggatgcaatgtttacagggtttggcgaggctgcgtataaggtgcgaaatgaaggaggcggcgtt

SEQ ID NO: 78149 - DNA, 529 bp, Arabidopsis thaliana landsberg
cgaattgtaggcgccgacggcgtagaaggcaatgtgtttcgaaggacatttgcccggaattgccgatcaggatgttcaggcccaccccgaggctcactgccagggcatacagtgtcaggatcaacagccagtagctgtccaggttcaaggccaggcccgcgccggcgatgccgagcagggccaggcccagtggagcgagcaacgcgcgcatcgtcatactttcacccagagtttgcggccgaacaggccgtcaggacgtactgcgagcaccacgatcaccagcgcgaaacacagcaactgagtgaacgcagagccgaagtacaaggtcaccagcgcttcgaccaagccgaacagcagcccggcggcgaacaccccgccagcactggcgataccgcccaggatggccacggcgaaggccttcaggccgaacaaggtgcccatgtcggcatgcacgctgtacagcggcgcgatcagcagtcccgcgatggcggcgaacacggtcgacagggcaatgccgcacccagcaccc

SEQ ID NO: 78150 - DNA, 436 bp, Arabidopsis thaliana landsberg
  unsure (1)..(436): unsure at all n locations
gaacaagggagccaggccaacgnaggaggcaggccggcaggcaggcttcgagccgtcggaagcgcgaggagcaggaggaaccgtggaaagagagacgagaaggacaaaccgagaggccggcggaaggacaagacgagccggacgacgagagaggaggacaagggagacaacggacgaaccggcgcaaggcgaggaggcaaacgagngacgcagacgaaggaagaccagagagcgagacgaggagaggggcgccgagacgggaagagacggaagaccagcggaggagaccgaggacaagccgaggagcccgaggacgagcagaggagccagaagagcnnaaaggcgagccgaagagcacaaagacgaagcggagagcccgaagacgagccggagagcccgaagacaagccgagggaacaggagaagagaacgaggcg

SEQ ID NO: 78151 - DNA, 359 bp, Arabidopsis thaliana landsberg
  unsure (1)..(359): unsure at all n locations
aacccaagagantaaacctaacaagaaaattaaagcctgttttagattttcacggttggatagacaaagaggggagcgggacctatataaagggatcagacaaaggatgcatatcatacaggtacaacagaacttacgagctctaagatgaaaaggaatacttgtttctaggatcctgcattgctaacaccataaaacatagctcttatcatagagactacctttgaaacctaaatagcgataataggaacggcgcatgctgaccaaaaatcaaaccgtatacttaaagcttaatctcatctctagattacagacctatattacacagaagacgctttgctaaacatcaagccttacaa

SEQ ID NO: 78152 - DNA, 122 bp, Arabidopsis thaliana landsberg
caagtgaaataaccacacaaggcaagaaataaaagatatcgcacgatatctacattgaaaattgtgtgaaaccacattttttagctgaaggacatgctggcgaacaccaccatgctcttgtg

SEQ ID NO: 78153 - DNA, 119 bp, Arabidopsis thaliana landsberg
  unsure (1)..(119): unsure at all n locations
ccaacacaaagcaagccgggcaaggaaaaaacaaaaccacaanccagaccaaaagaaagacccgacaanaccgcaaaacaaaccagacccgcgaaccaaccaggaacgggcaacaccac

SEQ ID NO: 78154 - DNA, 549 bp, Arabidopsis thaliana landsberg
  unsure (1)..(549): unsure at all n locations
ttcggccttcgcgatcacgtcatcggtgacggcaatnnnnnnnnnnnnnnnnnnnnnnnnnnnnnnnnnnnnnnnnnnnnnnnnnnnnnnnnnnnnnnnnnnnnccgttcgcatcaactcgacgcgccctaccgcgctggtgacatggtctcgatcctcgatgtcggccagccaccgacgcagagccgccgattcgggctcctggacgatcagcttcaccaacgcggaggtatccatgtagatcatcggtcctcacgcaactcggataggaccgcgctcaagttccgccgcggcagagccttggtgtcgatagaggcgagaccgccacgtgggcgggccggcctcagcgagccggcggcaatcaggccctctcgcgtgcggtcagtcgcggagaccggaaccaggcgcgccaccaaccgggcccgcatggtcaccgacnnnnnnnnnnnnnnnnnnnnnnnnnnnnnnnnnnnnnnnnnnnnnnnnngcaactcttggacccctataacgttcacaaaaagcaatatttcacattatgtgctatcgcat

SEQ ID NO: 78155 - DNA, 373 bp, Arabidopsis thaliana landsberg
tccacgttgtgcaactttactaacatctttagaaccatgactcgaagagaaacaacctttatagtttttgaaagcgagccagagcggacgttcaatggggcgagtactaacgacaacacaacccctaagatgcgggagacaatgagaattgcctccggatgagacaatggataccatggtgcaacaaaccggagatgcatcttagtgaggcagctgataaacaaagcgctcagacacagtgaagtgatgagaacaggatactggagcgccaagcaagaacacatcttaaagttcgcaagaagaagaccgccccatataacgcttcccatgggagcatcagaaagactggatgctaccgcatgtaccacttgcc

SEQ ID NO: 78156 - DNA, 523 bp, Arabidopsis thaliana landsberg
  unsure (1)..(523): unsure at all n locations
tggattcaggagggcctgctcgacannnnnnnnnnnnnnnnnnnnnnnnnnnnnnnnnnnnnnnnnnnccgttcggtggtctccgttgtgggcgccacgctgcacgaactggtcggccaggacggcgaagtgctggaggcgctgcaggaactgaccaggctggcggtacaccgccggactggcctgcgcgcacggctcatgctggacgtgggcggctttcgcgcgcgccgtcgatcggaactcgcggaactcgggcgggacgtggccgaggaagtagcgcgtactggcgagccgaagaagcttcgggcgatgtcgccgttcgagcgtaagatcatccacgacgcggtggcgtcggcggggctgcgcagcgagtcggaaggcgaggaaccgaaccgccgcgttgtggtcttcccctccagctgagacaggcaccgtgggcgagccacccgggatcgctcgggatacggacggcggaaccggtgatgtgccaggagttagcgacggcgcgccaccggatccattg

SEQ ID NO: 78157 - DNA, 234 bp, Arabidopsis thaliana landsberg
cacacgcaaacgggggaaggaagagccggagacggccaaggacgagcgcaagacgagccccgacccggacgagcaggaaggcccaaaggccgacaagcacagcaagcgcaacgagccgaagacggaagccgaagcggaaggcagcgacgaaaccgaagacgaacaggcgcggaaggccccggcgcgcggcgaagaggccaaaaacagggaggccggcaaacaggacgcgacgca

SEQ ID NO: 78158 - DNA, 424 bp, Arabidopsis thaliana landsberg
  unsure (1)..(424): unsure at all n locations
aaaaagcaggaagcaccggacggacgagcaaacaataaggattgacgcaaaaagacancggagaaggaggggcgcgacagaaggcggagaaccccgcggagaaaaccagcaaccagaaancggacgagaaaaaccgcggggagaccgacaaagaaccggagcanacgggcagcnacaccgccgggagggggggcagggacacgacgcaaaacgacccgccggacggggaaacaggacccaccgagccggagggcaaanacaaaacanaggacccggaagggaagcacccggacaaagggggcaaagcccggcaagagaaangggaaagccgcaaagaacgcaggcaaggggcggaccaagaacccaaaaaagccggggcggcgagccncgaagaaacgaaagcgcagaggaaaccaggcaaccg

SEQ ID NO: 78159 - DNA, 482 bp, Arabidopsis thaliana landsberg
aactacagcgagaagaggatcttttttaaggagaaaagcagagagagaagagacgattgtgtgaagtttttttgtcttttgtttcttttattacacacaaatagatgaaacgaggaaagctacttcttttgctacttccataaaaaggttcttcctttcgcagagaatcaactttgatcatcttcttccttctctttctttcttcttctccctccagtaatgcttatatagtctcctcctatatctctacctatacatacacaaaccctttatcctcgaaagcttcctggttaggtttttatcaaaccctttgagccaatcggtaagatctcttcgtcatgaccttttcttttttcttttgctttctactctgatggatctaaaaccttatatgggtttggtttcatttggtgcgatttgatgtgtttggtttctttgtcctaaatctcatgaaggaggttgcatccttcattaaaccgata

SEQ ID NO: 78160 - DNA, 395 bp, Arabidopsis thaliana landsberg
  unsure (1)..(395): unsure at all n locations
gacccacccacacaagggacaaagggaagcagcacagccancacccccggacacaggaccaggagaaggaaccccacaggcgcggaacagcgagaacccagcagagggaaagcgcagaaaaaccaacaccacgaggacaccgaggcacccaaaagcgaggaacaacacacaaagccgcagacaccaccgaggcgacacgcaaacacagcaacaaaacgccagaggggaacccgagcaaaaagcaggaggcgaggcgggagaacaacacaggacgaggggcgggaccgaaagggcaccacgcagagccacgnncgacgcagcancaacggaacacacaanccggaacccaaacgacggggaaacaccagcccccgccgaacccgcgaccgaacaac

SEQ ID NO: 78161 - DNA, 544 bp, Arabidopsis thaliana landsberg
cttgtcgccgggcgcctgggcctcgaccttgacgccatgcagcaggtcgtcggccatcttcagcgccttgtcgttcttggcgtccggcgggacgtaggattgcgagccggtctgctccttgccggcgtcacccttgaggtggccgcgcagcgaggcttcgcccttggtgtcggttcgcgacttcaggtcgtccggcacgtcctgcaacacctcgatgtccggggtgatgcccttggcctggatcgacttgcccgacggggtgaagtaacgcgccgtggtcagccgcagcgcgccgttgccggagccgagcggaatgatggtctgcaccgagcccttgccgaacgagcgggtgccgatcagcgtcgcgcgcttgtggtcctgcaacgcgccggcgacgatttccgacgccgaggccgagccgccgttgatcagcacgatcagcttcttgcccttggtgaggtcgcccgcccgcgcgacgcggcgctgggtttccctcgcgttgcggccgcgcgtcgagacgatctcaccgcgctcgaggaacgca

SEQ ID NO: 78162 - DNA, 571 bp, Arabidopsis thaliana landsberg
  unsure (1)..(571): unsure at all n locations
aatacacatggaaacactatcgaagtacaactactcaaaagtgcgcctataagtgatattacatatccttacaatggcacaacaagtgcaaccaatattgttcctaaaaccagccccgttccagtcaacatccggaggcttctccttttatagtttgcttggatcaatcgtgtattgattgcttccatgatcggggaaagaattaatgcgtactagaaatgttttttgttcttcatagaattgtagatggttgggaagacatgatgtgcagtgtagcaaacaagatacaaactaactgcggtaggaattcctgaccacttgaccagaacacctttgttcttaaatcccacaccgtcaatagcgccgatccaaagaatagacattactagtatacaagaaactaggatcccaccggccgaaatatacgagagaaaatcttgtgtttccaaccacattgtttgaacaacgatcaaggagcaataacgataacannnnnnnnnnnnnnnnnnnnnnnnnnnnnnnnnnnnnnnnnnnnnnnnnnnnnnnnnnnnnnnnnnncaaatacactcga

SEQ ID NO: 78163 - DNA, 608 bp, Arabidopsis thaliana landsberg
caggtgatgcgtagtatggcttgacgggaatccacttggtgcgagtagaggagtctcaatggtatatgttcacttgtaaaagacctagagagcctgccaaatcaaagagaactttgttaaagataataaagcattccaaaaaccgttgtaaacagtgaaacaacattgtaatttgtataaatgatatgatgaaaagagatatacccttcatcgactatgattgaaatatgtatatagcatatgaaaaaccataagaaataaagagttggaagtttgaaaagattaaacaatttcttggctacttaataaaaaaaccagaaatatgatatgaaacataagtaaatggagatgcaacaaacctgcaaaattgataataaaaaatctgtttagggttgaccataagagaagtgaatttaccttcaaatttgctcttcttcgaaaatgttttgtgctgcaacaaaggatatatgcataacttgccattgtgttggagtgaatggtgtttaagaagattcatctccatggtaatgtcatagatactgaaaacgtaaatataaaattcattattcttgagactaagaaaaatgtgaaatagataatttgatgag

SEQ ID NO: 78164 - DNA, 518 bp, Arabidopsis thaliana landsberg
agacgcgccaggccgggtgcgcgccgcgcggccacggcagcagttccaggtcggggtgcaggccgtccggctggatggcgctggcgggcagcacgggcagcgggccgccctcggcgctgatgcgcacttcgcgcacatggcgcagcagcagcagatacaggcgcgccgcgtcggcgtgcgcgtcgcccaggaagaaccgcaggctgtcgccggcccagggcgcgcccggcaggccggccaggcggaattgcagccgcagcgaccgcgcctgggtgccgccgccttcccactgggcgctcgacagcgccacgggctcgagggtgaccgggaacgaagcccggaatatggcccgcaggccgtccaccggcacagaggcgaactcggtgcccgccgggatggtcaccggcccctccagcgcggcgcggggccggtagcgcatgatggtcatgcagggcaggggccgcagcatgtgcggaaacagcagttgcgccaggttctggatgaattcgggaaaatcg

SEQ ID NO: 78165 - DNA, 389 bp, Arabidopsis thaliana landsberg
  unsure (1)..(389): unsure at all n locations
gaaggggagaaacgccacccgaacccaaagcattccggactttcccgaaaagcgacgaggcggggcagaggagaggacataacggggnaacccaccgaccccgcgcgggccgagagagcggcaccaaaacgaggcaaacaccgaagaccagacacgaccccaaaaaaacaggggacaaggacggccagagagacggagggggaaaagccacaccgacnnnnnnnnnnnnnnnnnnnnnnnnnnnnnnnnnnnnnnnnnnnnnnnnnnnnnnnnnnnnnnnnnnnnnnnnnnnnnnnnnnnnnnnnnnnnnnnnnnnnnnnnnnnnnnnnnnnnnnnnnnnnnnnnnnnnnnnnnnagcgcgccngcaccaaaaaagaacggggccaaac

SEQ ID NO: 78166 - DNA, 611 bp, Arabidopsis thaliana landsberg
aagcagtactcaaccacgattttaatttgcttccatcaagaaaatgttttattttacgttttaaattagcttatgataagaattataattttgttcaacaatttcctaatattcctaaattgttaaatttcttaacgcatgtaaagttatactataccatatccgaaactggaaagtacatactataacatattacaataatatatccaaatattagcatgtaaagttatacgataccatatcagaaactgaaaagtacatattataacatattacaataatatatccaaatattattatattagctgtgacaaatgtaataagaaaattaacagatgcaaaataatgcattgagatctgttcttgttgtgtgcatttagtatggtggggttcacgcccattaacgctgtatcagttgattagattaaagaagatttatgggtctttaattaactaaaataataaccttactaaattatttggtaatgcattacaatttacagctagaaacctcgaaccaattaattaaatatgaaaacaaattaaaagacgtgcattatagtgactttagcttaaagagagttcatgattacgataactaactcatggat

SEQ ID NO: 78167 - DNA, 282 bp, Arabidopsis thaliana landsberg
aaaccctctacccttaacggttgactatctattatactaataaactaaaccctaccatgatcttttcatattgaaccaaacaaacctactatcaaaaaggattacaccaataaaacatataagaataaagaccaggtcattgatgactgtcaacggctatcatgtggcattatgacttacggtgttatttcaatccagtatctgaacataataccaattaaacccattaaagacaatgtattttttgaccattatccacaacaatcgcacaaaacagaaaca

SEQ ID NO: 78168 - DNA, 530 bp, Arabidopsis thaliana landsberg
  unsure (1)..(530): unsure at all n locations
agcctagcggcccagttgccaatgcgcggcgcgcagctgtccggcttttggccatcagcgaggcggcatcggtatcggggcgccagtagctttcgagggcgcgcttcaattcacgcttgcgcccgatgcgcggaaaaccggaaaaagtgacgatggacatgacaattcctcttgacgttgtaaagaggaacgaagggcggccgttgttctggtcagtgaccttcgcccccgcgggcgaactggcgcggcaagccgctccaggtcaggcggaagtggtgacgctgcttccgatcgatgcaggtcttcgggcttgtggacgtggcttgcgccgcctaccggccgtcgcttcccggaaaggttcttccagtgcgtgtggcggctttcgtttccacataccgctgcggngcagcgccggattcgcaccggcttcctttatatcttttgattcgaatcaagagatatatgcatcgatgcggggcaatttagccgtccatacgtncgaagtcaaacgtgacggtcaaggatgcata

SEQ ID NO: 78169 - DNA, 181 bp, Arabidopsis thaliana landsberg
caaaaaatacacactcacttgatttcttccctttttcagttttgtttttctattggctactatggatccctttcagaggctttatattctgtgatgttatcgccggccaaatgtgagtcacaagaggctcaagctccattggatctccatccttcttctagaacttgaaccggaatgtctt

SEQ ID NO: 78170 - DNA, 510 bp, Arabidopsis thaliana landsberg
gaaacaaacatggcggaataagtggtattttctttttggatttaagagtattaatcaacgctaaaggtataagtcgaaaaattcgtctgatttgatgttcagcgtgtattttctctacattactattatttctcgagtctttttatatattatttataggtaaatatgcaatcattcggagaaatgactgttgttattacaggaggataccacaacatagtccctataaagtccaaaattaggtgaaaattggatctgttagtagttgagaaggcacagtaaattgcgctttagatcatttttctcgagatttagccgacccttttagtctcttttggctattatgatcacgatgtttttccttataatatcataaatccaagatatttacgagattgaaagttgcacattccacttactaatacagatattggtgttatttagcgttaatatctgtgaagctactgtctacagactctggaaactgcatgatactattttataaaaacg

SEQ ID NO: 78171 - DNA, 638 bp, Arabidopsis thaliana landsberg
ctacaggagtgctttagaaatttaatatcttcacccagagatgtttccacttcagtctcagaaacaagcgagtcgggcgtttcctttgtattctcatcagtatagaaggctaagaatgcttttctagcttctctacgagcatctgcaccaacaaggtataaaagagagagagagagagacgaaataaagagcttgctgtgaatttccaaaatagaaaaagtattgacggcttttcttggtgcacaaaagaagattatggattagtgcatgttaaacaagttcaaacctgaactggcacgcacttcctttattgaatgaccacgccgccatcccatctttagcaaaagtttgacccctgaaaaatataaagaagcataaatgtgagatcaggatttctccacttgatgcattcgaaaataaagaaaacgaaagaaaaggaacttttgcaaaatattaaagaggcttattgaaactaaccaattgactctgaaactggagcaacaagttcgtcaggaacagggccaggaatggctgatggcctgtgatacagaaacaatatgttacaaatatatagatagcaacttcttataaaatacagactacagataagtacacagacctctcatggctgtctttct

SEQ ID NO: 78172 - DNA, 606 bp, Arabidopsis thaliana landsberg
atctgtgaaattcagccaatcaacttctcgcattagattcttgacagcgaatcctaacgctcttcagagttatctgttcaatttcaagcttttttttttctttgatgttcaaactctcttttatacgaattagattcttcacatcaattgttttctgctaatcatttgatttatgataacttattctttgatcactagttgatggtaatgactgtattgaccaaatgatgttatagatttacataaaactaaaaaataaataaataaaaaatacattaaactacaaattaaaattaaatgtcactgtcaatgttcttttgatatttgaatgtactctttcaattaacactcgtagttttccgtgagactttacaaatttgcctatgcaactcaacacaaacccgaaaaacaattgttacttatcaaaattaaagaatattaatatggtttcaatttatcataacaagttttagctagaatcctaaagtcgtcacttttgtaatataaaagcagaggacatgcatgtgttcatgtatgtgtgcgtacgtgtgagagataaagaggtagatcaaaagtgaagagattgaaagcttgattgagcaaagt

SEQ ID NO: 78173 - DNA, 555 bp, Arabidopsis thaliana landsberg
gtattctgtatatatttgcacatgatatgggacatgcatgtttttggcttacgtagtgagttatcggagtctgggtacgtagtgatacgttttacatgcacgaacgttagtcaaagagtacaaaaatacaaagtcaaagtctttacgcacctttgtggagatgaaaacacccgatattccatttctgaagtgctacaacacaagcaagagtggaaatgagaatatacatgtcctcttcaccgtcttcgtctccaccatcagccaccgtcgttgtataactggtggagttcatccagaaaccttctctggcattttgattgcacataatccaatctagacaaccttggaacatcggtttaagctcattatcatctacgttgatgtcttgttcgatcatggataaccaagccgtgtcgtaagcggaaggagagacaaatgagtaaggatcaagattaatgttggacaactgaatttctctcttgatctcattgacaaaagtgtggagatcattagaggaagaaccgtaagaagacttcattgtttttataaaaaaag

SEQ ID NO: 78174 - DNA, 526 bp, Arabidopsis thaliana landsberg
  unsure (1)..(526): unsure at all n locations
ttattcaaattactcaaaacttccttccagaaactttgctttcacttacagagaatccaagtgatgtgtgtggggaaagtcctccaaaattcacttccacttagtttgttgaacaccggactcaatttgacagctataattaaaccctgagaaagtttgaaaaagatcattccttagttgccttcatcacaaataatctacattgtctattactcactaaaacatattccccaacttagaacaagttatcttccaagcttaactacaaaatttgaactgatccaatccaaaagactgatacttccaccataatctaacttcattaccactaaatcaacattgaagcaagaattcttaatccatggatacttttaaacacgaaaccctaggagagaactgaatcaaacataaacgaactaaaaactcttcaaataagcagcctaatcaacaattaagtaactatgaataaaaccctcataatgcagatcaaagttcanagattgaaacaaaggaaaaacgaaacaat

SEQ ID NO: 78175 - DNA, 615 bp, Arabidopsis thaliana landsberg
ttgggctggtgctgtgttattgcgcatgtgccactgtcagttataggccgcagccagggcatgaccatttcgctgtctcaaccaaccgcaacgcaaaatctttttaattctgagcatttattttttatcgccactgcgctcttaatgacgctcggacttttcttcgtagcatttgcgagagaaaaaatcgaagacgagcaaatatggcagctgcggctcaactcgttacgctgggctatttatatcaattatagtatcctgcttgtcagcctggttgctgttggcgatacggtgcacgtcctggaactgaatttatgggtacccttattattttttattgtacgtttcaggtggcttatctacaggcttaaccgcccggcaaacgaaacggctgggttatgaagaacacgatacgaattgagcgggccataaaaaacattacgcaggccgaacttgcagcagccgttaacgtgtcccgccaaacaattaatactattgagagtaataaatacgtgccctcgactatcctggcgttaaaaatagcgcgggtgtttgcaaaccgcttgagaaatatcatactggaagaggggataaaaaaataggaaataatcagcg

SEQ ID NO: 78176 - DNA, 113 bp, Arabidopsis thaliana landsberg
aagcagcgataattggcacatatatgtcgataaaaagataacttaacatctgaaccaaacaaaagataactaaacgtgaatggctaatttctaattggcactatatccaggtg

SEQ ID NO: 78177 - DNA, 324 bp, Arabidopsis thaliana landsberg
cgggggtcatgccattggtgtagccttggtccaaaaccatattgtctatgtccacgaatgcatattccagcggcgcgtgcgcggcataaaaaatggatactacggcagccatgatctccggtgcaataccatcaccttacgctacagcaatattcgccatcataaaagcgtatataggcgccgcaaggttacgtcattacccccaagcctccatcagggatcagtcaacatatccgttgaccaactaattgacccgaaactgacaaaccggcggcacaattccttatttttagggagcagaggaaagaggtgtggtgagaaaaa

SEQ ID NO: 78178 - DNA, 544 bp, Arabidopsis thaliana landsberg
  unsure (1)..(544): unsure at all n locations
ccaaccatgttaagcgtaatctctaaatccccaaatattaaatttttaaaaatagncggccattgctccacgtggaacgtgtccaattccaaaagaacttcgcgtttcactgacgatatagtttacgtacgtatgattctttctaaatgaggtatttttgtcccattagcaatttaaaattcaaaatggttgtgtaactttttgaaatgcttagtagttaaaaccgaactaagaagaaaaaatgatcggacagtgtttatgtcagctaatgcattacccactgacattaactgatccagtttactgattttagacaatcatactctatttttactggagttgcagaaaaagggacttacaaaacgatgaattaaatttggacaagtatatatacataactagaaggttatagaatctagttttcgatggatatttctagaatcatcctacgagtgtgacaactaaatgcacaacaaaacaacaatttaaatgctaaaaagcaaaaataaaaattactggtcacctattagtgaacaacaccaca

SEQ ID NO: 78179 - DNA, 325 bp, Arabidopsis thaliana landsberg
gactagtacaagttttgactcttcattccgatagagtcgacaaagctctgttttcggttcgtggactgcttcaccaagcaaacagcatcttctcatacacaaagacgagatccaaagctcggttgtgtcctccatcaaatcatttcttgcttctcatctccagctatcagacccaggggatcttctaactgcccaagaaaaccgcacttgcacatactctcaatgcgatctcaacggtaataatggcgttaggaatgtacaatctgagttagggttaggttctctctgttttccaagattagtcaaataatcaaccggaacccaa

SEQ ID NO: 78180 - DNA, 396 bp, Arabidopsis thaliana landsberg
  unsure (1)..(396): unsure at all n locations
ggaacatgaaaacggaccattttctattactctcgacgagggggagggaggatattccgacgagaggacccatgcttaagaatgacgagaccgtatgagtgaaattatgtcggtctgaagggcagaagggtgactattgcaactttcactataccccaaaaaccaaacttgtnnnnnnnnnnnnnnnnnnnnnnnnnnnnnnnnnnnnnnnnnnnnnnnnnnnnnnnnnnnnnnnnnnnnnnnnnnnnnnnnnnnnnnnnnnnnnnnnnnnnnnnnnnnnnnnnnnnnnnnnnnnnnnnnnnnnnnnnnnnncgagtaaggacgcaacagggcgtctaggcgtgagatcttatcaagactgatattgatgagcctggaatgtgaaacatggaggtt

SEQ ID NO: 78181 - DNA, 507 bp, Arabidopsis thaliana landsberg
  unsure (1)..(507): unsure at all n locations
tgcccggcgcactggcctggctgcaggcacgggaggtctagacttcaggaacgaaagcgcgtgaagctgaccggcgcgcgctggcctagatcgaggccaggacatccgccaccatgctggacatggcctgcctcggaggatattaccctaagccggcaatcacccagagaggactgaacgacctgcggatcctcgaagaccggaacatgatcttcggggcccggggccccagggccttgccagcgtgccgtacagccaggtggaggacgtggagatcggcgggccgggcctggtcaagagcgccggcgggtttcccggcagagggctcggcgccgtcagcacagccgaagggatggcgatcgcggccgtcttgaacgcgctgacgacgccgaccttcatcaagacggacctgcggatccaggccaccggatccgagctgttcctgctgcccaccaggctcacaccnnnnnnnnnnnnnnnnnngctgtcgcgcccgctgggcgccat

SEQ ID NO: 78182 - DNA, 321 bp, Arabidopsis thaliana landsberg
  unsure (1)..(321): unsure at all n locations
ttttggaatgttcacactggttatattccaatgttttgatctaatatgctgggaaaacgnnnnnnnnnnnnnnnnnnnnnnnnnnnnnnnnnnnnnnntggtcatccagtttcgtgggctggcccctatgttgccagacatatgttctcacttaaccgataacaagcccgctggcgaacatattcccggggcgagcgatgacccagaccactatgccggtgccacacgtgattatgctcgaacgcctttgaaaggtactgtgctgccgtgtacccgtcatggttagggcacgagctgaggaacataccctatatcgttgtc

SEQ ID NO: 78183 - DNA, 330 bp, Arabidopsis thaliana landsberg
aacaaaaaagaaccatgagacatgggcaggaacatatgcttggtgctagttcctatccaaactctcgtaagtaacagacaaataaaaaaagcccacaaccatgtaatcttctaactatccaaagaactaacatattacaaaaaactcttttggattattaataaaaaaacggactgtgtacttgatgataatcaaaaggattgagtaaatgaataaatacctgataaggaaaaaaactgtcagatgggcgttgagggaagggtgaaaagaaccaagcaaagccaggaggatacatgtgaacatggaaaacaaaaggttatcttgcaacca

SEQ ID NO: 78184 - DNA, 564 bp, Arabidopsis thaliana landsberg
  unsure (1)..(564): unsure at all n locations
aacatgaactcgtctcgttacaagtctatgttttttggatgaaccgactcaaaccacctagacaggaagctcggggttgcgtcgacccaggccaatcctgtcgacgagcattccgatgtagggccctacgacgggtaggccacgcgcgaagctagcaatcgtaccgaggaagtctccaaacaggatgattatgccgtacgcttcgacgagnnnnnnnnnnnnnnnnnnnnncatgagaataaggatcaagccgaggaagaaggcggcggtgcccttagccttttgctttcgagcaaagaagaggagtgtcttttgaggtccgatgatgattgtcaagccgatgaggaaaaggatctattcgtgcggagaacatgttagcttcgggtttttgcgccgctcgctggttcgtggggatcgaggaaagggagggagtcgtacatttcccatggcaagcctgtaagcagtcagcatcgtcagcaagatggcaacgggcattcaggaagactggacgagactcacatggctctatcaaagaatagcatcacaccttcgatgaggaagaag

SEQ ID NO: 78185 - DNA, 455 bp, Arabidopsis thaliana landsberg
gaacgtaattaccaatttaaggtcctcctcttatcgttattatcccactctcagggtttttagggggggaataatataacaatctaattagtcaaaaattggatcaagtgctagtaaattatgcttggtttactaatctttcctcattcttttttccccattttgatttatgaggatcacgtttaatgtaaggtttaaatttctcaaaccagagctggttgtcatcgtttaaatgaatctatatgcatgtattctattccattagaaattatacacacgtagttaactgtaattagctatagttaaatccgtacacaccgttttttccagcttgaatcagtgtagtgatacatgatataagtatataacatgcgtataatcaacatacatgatttagacaaaatatattatgattctaatgcttgtcatatagatctcgattcacattataaact

SEQ ID NO: 78186 - DNA, 170 bp, Arabidopsis thaliana landsberg
actgtttttgtgactatgtttccagcatgaaatatagtcattactttatatacgaccaagtatatgtggtctaatacagtcgtctaatagtggctaagtagtagcaactgtcggccgatgttttgctgacacatgcgtagctccgtttatactcactactttgccctctt

SEQ ID NO: 78187 - DNA, 542 bp, Arabidopsis thaliana landsberg
ccatttcaattcgtgtaagttaagaatatatttctctgatttatttcctaatataagcaattgtgataagaagatgaatatttcttggtttttccttgcacgtaccaagtataccaactaaattatattcatttcttactatggagaatctaccaaccccaatatattatgcaccaaatacaatatttcttgaaattttagttatcctaaaaactaaataggagaaaactgatggctaatagtagtatatagtagtaaaagaaaattaaatgtaaaaatgacaagaagttaaaaaaaaatgacaaactcgcaataaaagaaaaagcaaatctaaaatcaaaggttagtattaatatatagtactagaaattagttagctgaggaaaatttaaatataagtggcacatcactctgatttattttacctaaataaccggtttgtattgtttttaattaatttaaactagtccaccatcaccgattttcttttctttcccaattgccatcaccgattttataccacgtaattgggtggatttttt

SEQ ID NO: 78188 - DNA, 549 bp, Arabidopsis thaliana landsberg
tataaagatttgatggggtatgggaggagattgatttatatacagagcgactatgatcagtgggatgggattttgtatttttttttgtttatttacctcttctttattggatttctagttaagaagagacaatgttaatgggactatgggagatttgatttgatgaaacccaaaaggatgtaagagtagatcttcgttttggccgagaagagtagatgatttcagctttcacataaaactaagaacaaagtatgtgatctatacatacgaacgactatacacacacacacgcccacacacatatatagcatttttattgtttctataattagatgagactattaccattatatgtgtatgctatatatagcaaacaaaatcgtatatacacgcacttttttagttaaagatatatacgcacttgcaagacatatatatgttttattgttaacaactcatttgcttaagaactaaactttcaaactgtaatgttccatagataaatcatttgtagcgaatgatcttactattttatatataatgttttaa

SEQ ID NO: 78189 - DNA, 582 bp, Arabidopsis thaliana landsberg
gcaatctccttttggttggaatttttcattagtgttgagtattgaaagaaaggaaactattacttcacagatccaatttaggactttttgtcttctcgaaatggattacaaaagttaccattttttaaaggggatgagattttagttgttatgtcatggaatttttgtttggtaaataacctaactgataactccattatatttttagtgaaaattgtttgaatcatgaggtaattaaacgtcacactacagattgtagaaagagtactaatggttaaactcaccgataatgaccagctaacataatcaaaataggcccaagtgcattaacacatgtgagactgatatttgtttcccttacctttttcttttaccttaacctaattctaaactgtaagtgaatccaatttctttgttatatgatacatgtttgtgtgcatgcatctgcatatagtactcaaaagcatcgtctgtgtcttttctctaattaagaatctatgactcatacattaatatgggttctacaaacatgggactatgggagatagtattcccgtatataaatagttcacaagaagaata

SEQ ID NO: 78190 - DNA, 379 bp, Arabidopsis thaliana landsberg
acgcccgagcaaactcctgagcgagctgagcttgttgaggaaacgcgacaaccgaccccccaaaacaccaagagaagaagaggccgacccccgacaacaggcagagacaacaggagacaacgagaaaacaatggtgacacggggcgcgaacccaggtgacacaggagttgttacacataacaaaggaaataatctacctcaggagagctataaagcatccgtgtggagccatcagagcccgtgagagagaccatacgctgtagagggatttcatccgactggacacagaggcgaagcaagagcatgtcctatggtgagaacagtcactcatctagatggggagactggcctagacaaccctgaaagagatgcatgggat

SEQ ID NO: 78191 - DNA, 297 bp, Arabidopsis thaliana landsberg
agacctattcgcagcaaatagattggttctctttttgcagcttctttcaattacacaaaattagtctaggagtttggtaatgaacaagaatgtaatttgatttacaatcactgttatgaaatcttttgtcattgatgtacttcactctttttatcgtctggttgaattgttgaatccatatccccatcgccacatcttccagcttgaaaagctttcaacaaacaacataagaacaacgtcacttatgatatctaggattcgttatatcttaactctatggtgatgaaactacaaaac

SEQ ID NO: 78192 - DNA, 410 bp, Arabidopsis thaliana landsberg
aagggacgaaagtaagaaagctttctttggcatgctcatttttttttgttacaccgctagaatgaggaacaagatcgtaggttacaaccaacaatacaaggaaactttttttgaagcatgggagaggtatgaaagctacacatctcagagaccacttcacgggttgaataaggcttaatttttgggcacactatacatgagagctttaccaacgatcagaacgcttcttgacactgactccaatgggcactgactgaacaaggatagagcttaaggctgggaaatgggcgaaaatctaacacgatttgttacgtgcttcaatgaatactattaacacggagagagaggtgctagcagtactgaggacaagcagagcacggatatgaacgctctgaatgaagagatagacg

SEQ ID NO: 78193 - DNA, 210 bp, Arabidopsis thaliana landsberg
aagacattaacagtcacagccaatctacgacatcaagtctctgtgggaatacagacaaaggtaacaacttttgtaagtcttgacagcaagaggaccgggtgtttcactgtccgaacaaacagctcagatcagttgcagattgctgtcatggctctgcttctccttgccatgtgatgtcaatctacatgaagatttttcgatcagaggaaa

SEQ ID NO: 78194 - DNA, 568 bp, Arabidopsis thaliana landsberg
aaaaacgggagtgaaaagataaaataaaaggtggaatgtagactaagaaaagaacaataaaaatggtttgaatacacaaataaaggatttacttttctcctccaaagaaaacaaaagagtgcaaagaaagaaagaaaaaagaaagccttatttaccatttaccacttttgtttttttattttcaatttctttctcttttctcttttctcttttcattttctttatccctttgcttttcttccccctttcttaacctaagttcctctagccccccatgtccacacaaacaccttctctctcctctctctcacacacactcaagtgtcattttctcacatatacttcacacaaaagaaacaaccattcactacatactaccttgtcattgattttctctctccctctatatctctcaaaaatctttgcaaaatcttcttaacctcaaacaatataaacaacattctcaacaaaacccagaaatctcttcctcaaatcctcaatacccttttctattttcctccctatacccttaataaaaaaggatatctttctctttttatcttctttg

SEQ ID NO: 78195 - DNA, 558 bp, Arabidopsis thaliana landsberg
ggcattgatgacagcgccggtactggcacatcgtaagatcaaggctgtcagctttgaatttactttccagaaagatcttacaaccagggaagctatgttgcccgaactggaaatcctttcagagcggctgtctgcaaggctacaacgttctaatctaaaaggcaggactgttacggtaaaatttaagattcatgactgtaccattataacgcgcagccattccctgtccgcattgatcaatgacaaaaaaaatattacgcgagcggtaaaattcattttggaaaatgccccggaggaagaaaagagagtccgtcttttaggggtaggcatttacaaatatgaacctgctgccgaaaagaaaaaagacaacggggatattcaattaagattattttaagcagataatgagccctctgtatgtaagcacaagttaagattgatacctttatttactgatattccttatggatggggaatgctacacccctgccacatcattcggtggatgagtgaccggcaatttttttttaagcagtggactgttcccacgatcaggat

SEQ ID NO: 78196 - DNA, 397 bp, Arabidopsis thaliana landsberg
catgtgaattctgtttgggggtatgttttatgcggctactgtctgagatgagatgaggagagactcttaggccatctaatgcactgagatataaggaatgacaccactacacgttaacccggaaggtgaatacacccaactgagttttttaagaagtcaaaatattcatccctgataaactaacttataataaaacctgaacaaacaatcaatatgcgcgtcaaattctaagatctatagctaaagaaaagttaactcatcatggtgaatgaaccgtgcattttatataggatggggcccaacttagattacttttatgttcattctagtggtctacgccttcctaggtcatatacacacactagcacatttgagtccatactaactactctattgc

SEQ ID NO: 78197 - DNA, 352 bp, Arabidopsis thaliana landsberg
  unsure (1)..(352): unsure at all n locations
nnnnnnnnnnnnnnnnnnnnnnnnnnnnnnnnnnnnnnnnnnnnnnnnnnnnnnnnnnnnnnnnnnnnnnnnnnnnnnnnnnnnnnnnnnnnnnnnnnnnnnnnnccccaagatagctttagagcgcctcggctcgagcatagggcagaaacagtttactgtccagctctatcgcgagacatcaaacgattgagacnnnnnnnnnnnnnnnnnnnnnnnnnnnnnnnnnnnnnnnnnnnnnnnnnnnnnnnnnnnnnnnnnnnnnnnnnnnnnnnnnnnnnnnnnnnnnnnnnnnnnnnnnnnnnnnnnnnnnnnnnnnnnnnnnnnnnnnnnnnnnnnncacagtgtgaat

SEQ ID NO: 78198 - DNA, 415 bp, Arabidopsis thaliana landsberg
gcatcctgtcttactttcttacagattcctgatggtttgtctgaaattgttattcaagatggtgttatgtctttgctggcgcaaatcaaccttaacgctgagtctccgtttcgtgattgcttgcgtaaagtgttgctggaatcaaaagagtcagagagggttacttgtttgatcgatgactgtggatggctcttcacacaatctgtttcagagagtttgaagcttccgaggcttgttctctgttctcttaaagccactttctttaatgcttattcgagtcttccacttatccgaaccaagggatatctttcagtttcaggtaatttatgctttatgaaatgcttatttttaatgggcaaatttgctatttaggaaaaaagttttctttactttgggagggaaaattcggtttttt

SEQ ID NO: 78199 - DNA, 456 bp, Arabidopsis thaliana landsberg
agggcacggtgtcggcggcgtggcggccgagcggttgcgtgccggcggtctacgtctaccgggggacggtcgacagcgccgacgtcgatgacatcggcggcagccgcgacgagccgctgacctcggcgaccgtgtcgctcggggacggcagctacacggtcgccttcctgcccgaaggccgctacacggcggccttcacctgcgatgccgatgccgacgatcccgaagacaatgacgatctgaacttcaaggccgataagagcttagatatcatcgccggctgaacccgcacgctcaagctctgagccggccgccggagccgcgcgcattgcgctgcctcgtcgcttgttgcttgcggctgccggcagtgcgacgccggagcgccgcgttcagcggcgttcgcgtcgcgggctgccttcatctgctcgaacttcttcttgccgggcaggatgccca

SEQ ID NO: 78200 - DNA, 400 bp, Arabidopsis thaliana landsberg
caagactaccccatatgtcttgagccttttgcatataagataaatgacggtagagacggtgatgggttaccgctctatgactcgcagtaacaattcctatgacatccctaccaataccacattgaagctggccaccaagcatattaattcaagggaagcaattcactacactgcttacggacccatagcgactgcatggggatggagtttggattatatgtatcatcatgctataaagaatgacggcctacattctgttgttgctaacaggagccacataataacgagcttgcagacgattgatcatacagatgcgaagcatagtatgtccgagactacgatccatacattcaacctcttcatagagaatatgacgatgaaccaatattgacttgacacc

SEQ ID NO: 78201 - DNA, 566 bp, Arabidopsis thaliana landsberg
  unsure (1)..(566): unsure at all n locations
ttgcgcgctttgcgtactgcggattcttcgaacaatccgccgggtagtttgtgttcctgcagaaagccgggtatatgtgctacagcgtgaggggctgtgaggaatgcagtgtactgccctttaccaacggtagcatcgagataggtgaagagcctgcccagttcttcatccaggcgcatatagttatccacctgctccatggaattggggccgaatgcgtggccgatataatcgggagaggagaagctcactgtgaggaaatccgttaccggccctttgcccaactgctcgcctgcaatggctgctttggccatttccacagtaagggtattgccccagggagtggaagatatcttgccataatccttgcccgcaaaattgctgaggtcataaggaaacccttcggctttggagcccagggggcggctttcataaggctttacatcctctgtagcatagggagcgtaagccgaacaggcatgctcannnnnnnnnnnnnnnnnaacagagagntcacgatcttcctgttgttgaacgggttacccagtcgggcaatgtattcatgt

SEQ ID NO: 78202 - DNA, 586 bp, Arabidopsis thaliana landsberg
  unsure (1)..(586): unsure at all n locations
tatgcaatgacatatgtatcgatgtacgtatttgaataaaatttgttcgtgggatttttttatacacatgtatcgctcaagggatatgcagttcaattcttgatgtcacaatgatccatgtgttaaagaaagatactgattattgtattcatgtgtgatccttttaagttttaggtgttttttatatatattatattccaaattctatgaattcaaagctagttatttagctcataatagaacaattcgtttccatgattttatttatgtaaattcttttcttttagtttcgttaaccaacaagttattttattttcataatatatgttgataagaaaaatattcttgagtgattagatttcttataaacattcgacctaaacattgcattatttattttatacagtgcagtttatactttgtatacctgggattggcaatcttgggagtggcatttatgggtaatgtcaatagtttttatatcatcatttaagtattttcttaattgtaatatgtatgcaataaaatganttaaaaatgtatggaatggattttttgtgcagagggatattgttggagcaaacag

SEQ ID NO: 78203 - DNA, 580 bp, Arabidopsis thaliana landsberg
agtccgaattcgactttaaatgggagtcatggtcgggatgattctctggttgaatccacgtctctaaccagagatagagttggtggcgagacttcgaaaatgaagccattgattgggagaatctgaatttatccacggcaggagagagatgacaatgaagatttcaggacttctactagacttggtattgagactttgaatgaagaagaagatcgtgagaatcagaatgaatccatggctctaactccaattggatctaacaggattgaagaagatattgaactttttaatactgagataggagatggtggcaggactgaaacatgagttgctgagattgagatagaggaagaagaagactgtgaaaatccgaatgcatccatggctccagacagagataacaatgaacatttcaaggctcctactagatttggtagcgagactaggaatgaagaaacagatgaggagaatcaggatgcatccgcgattgatattgatgaaccagaagaagaaagagatgtttgacttagtgctgagacagggaatgatgtcgggactgagacagaggttcgtgagaatg

SEQ ID NO: 78204 - DNA, 588 bp, Arabidopsis thaliana landsberg
  unsure (1)..(588): unsure at all n locations
aagctttctctttttgttctgtttaacgtttcttctacatagcgttttaatggttttttgattctcagtttcaatgtacaaaagttgtggtttgattgatgatattctaaagaacgaactatatgagaaactttgcaattttttcacattaaggtttcaatacaaacataaacgatacataaagttctcaaagacaaaatcaaaacatgaaaaattcctcagggtttagtggtagaagaagaagcaagaagaagctcaagcatctgattacccaaatcctgttccttaagacacaaagctttccatccatcattcaactctttagctttatcatcaccaataagcttgactctctcaaaagcaacttcttcagaaatcaaaccttgagctacaataatctccactaactccttcaaatacggatacttaacccaaaacccttccacagtttctgtaacacaaaaatcagagatacgaatcgattacacaacaatctcgacataacaagactcgttcaagcttattcagagtagaaacagatgntatggtgaatatgaaccttcgtttacgagaatggagagagatcct

SEQ ID NO: 78205 - DNA, 422 bp, Arabidopsis thaliana landsberg
tgatcgcccaggcggtgctctcgctgctgcgcgccagcgtgcgcagcgaccgttagctcatcgtttccggcaacgtcaccgcgcgggtggaccgcacctgcaccgaggtgcggggcgacctgcgcgtggaccgggcgcgcatcgtgatccccgacgagaccccgtcgtgcctcgacgatgacgtggtggtgcgcaacgcgccgggcgtggccgagaccgaagacgagcggcgccagcgcccgaccgccagctcccagggcagcaagctggacctgcgcctcgcgttcgacctgggccccgacttccgagtgagcggccgtggcgtggacacgcggctggtcagtacggacgaagtgcgcgccgcgcccgacgggcgttcggagatcgtcaggctgatccgtaccgcgggcggtacctaccat

SEQ ID NO: 78206 - DNA, 308 bp, Arabidopsis thaliana landsberg
tccacttctgttggaagtcaagcggtcgaagatcaatgcgttgcctatcttaacgtgatgctaggaactctagctttttgcatgaaatcataccttgcctgattctactgcgtaggagagcccaggcctaccattggattcgatccaatcagcgtcgttgctacaaatgatattgctctcaccaattagagaaggttgatttgacaacaagcacatgtatactgaattttttggtcaatatatcatttttttaattctcatgaaaagagaaactgtggctcaaccactacaccattagtatttaataa

SEQ ID NO: 78207 - DNA, 366 bp, Arabidopsis thaliana landsberg
aaaaagaaatatgaccaactgcggtttgaatgtttttacaaaaagcaactgttggtacgctacttaggaatagatagtgagcataaatcatatgatagcgaccactacattcatagcgtacgtacacaggaactgttgttgatacagaaacacggagacctaaaagcgaccggagccacaaaagactatctaaatggattctgttatgtcgatagactcccactgcatcatatgaattgcaggaaaggggatctttcacatacttatagtttgtgaaccagatgctggcatattgatagttcctgtgaataccaggattatatgtgaacgaacaaatacctctatgagtggcgctggttcatacat

SEQ ID NO: 78208 - DNA, 402 bp, Arabidopsis thaliana landsberg
accgaaggctatagcacttaacaacacacaaatgtttttatagattgttagtaacaaatcgacaggcccgtaatattggcatacataaaagagaactcgatgatatcatcaaaatgatctggctcactatgttccatacatacgaagcattgagatgatttatcaaaagatcacacacacgcgacgtacgggatatcaaggtaatatgcaaaacaagcacaggagcggcgaataatgttatgacactcttttcttttacagggtgtgcgttatcgttatatcaatcatacgcagtatctaaagatatgaacatgtttaatctatactttacttatacgcatctgactccaagcttcttgtcaagatatcgggaaagacgtacatctatccgtatatcgatgt

SEQ ID NO: 78209 - DNA, 354 bp, Arabidopsis thaliana landsberg
  unsure (1)..(354): unsure at all n locations
gaccaagatagccaccaattaacgcaaaaattaaggttaaccatttccgccagatactcgtgctttcgggtttttgggctggataaaacaccattgaactcacaacagctttctgggacgtgacttaaacataacggaaggggataccattggctggtcaacgagaacatgaagcctttgaacgactgggaacagtcacgggtcagttgactcgagaggcagagaacatatcagcagtatcgatccaggcggtgagagcctatacaaagccttatgattgannnnnnnnnnnnnnnnnnnnnnnnnnnnnnnnnnnnnnnnnnnnnnnnngcaggttatgttttggattcctga

SEQ ID NO: 78210 - DNA, 444 bp, Arabidopsis thaliana landsberg
atctgctctctgcggcctttcagtttggcaatgatctcatcactatcgattgcaacgattgcagggggcattttgggtactggcaccgtgatcaggctatcggtaatggcatgctgaaaactgtctgtaatattgatccatctctgtatggcgagcctgtacaggaagaagcgatccaggtccctttcctcccagttaaaccagttcacatctttgatatctgccgaaaatcctttcaggtagggaagcaacacagatgaaaccagtctgatcagcttgccgtctgagccaaagaatgcctggtccctgtctctcggtaccggatagtataccttgcctttgcccgtatcccgtgtaccccatttgcactgggcaaaatgcctgtcccaatcgacgatcacgatatccaggcccctctctgtcatgaacatgcgctggtcaaca

SEQ ID NO: 78211 - DNA, 190 bp, Arabidopsis thaliana landsberg
aacggaatcaagaagcaatagtgcctatcattcgacgacgcgactgcaatgacgaatccgaagaaggacacagtgcctatgatcacgaagaaacatccccacaagatctctgacttcgttgttaaacccagtccagctacggggtgcctgagatgatctagaccgtctcgatgaaggagttaccgaagcc

SEQ ID NO: 78212 - DNA, 740 bp, Arabidopsis thaliana landsberg
caaatatttctttaattcttataaataatattatctaaattaccacttcctaactggataatgcatatctaataataatgatttcgaaatggataatatatagttgcatacaaataaatattttcaagcactcttgacagggaaaataaatatgcaagcttaattataccaaaatagtaggtgacttattccttagtggattggtaaaccaacatgacatttaacatatagctaggttagtccatatttaaccataaattcatagatgacaaaatatatattagatttaaatattatgatgtgagcaaggtatgtaatatattattttgtaccagtttggtgagttatcatctaggttcaaactcgtataatacaaactttttgacaaaaaaaagctcgtgtaatacattttgatgaccaaaaaaataatctatatggcatataaaaatatgtcaggaaaatactatgaaatgtatagatgtgtgatctcaaaactaaagtgggataattaacaaagacttagaacagagtgacatacatttttatttttcaacattcaaatctatgatcttttcttttaaaaagggaataggagatttaagaaaatattgaaagaaggtcataaaagaaaattaaaatataactaaattatagtaaaatggacgtatctgttagaaaaatagacaaaaaagtctctcatataatgtcaaatggaaagttatgaacccaatggttttata

SEQ ID NO: 78213 - DNA, 501 bp, Arabidopsis thaliana landsberg
  unsure (1)..(501): unsure at all n locations
gcgcccgccgcttttcgtcgagttcatagcggtgcaggcggatcagcgctttcagatcggccatcccctattacgtgtgccgggagaggatatgcgccagctgcaggtagccctcgtcgagcgtcgtgtgctcgcgcggcttttgcgacaggaactgttcgagctgcggatagatctggatggccagatcgaccttcgggtcggagccgcgcttgtaggcacccaggcggatcagttcggccatatcttcnnnnnnnnnnnnnnnnnnnnnnnnctgcgccaccagcgccgcctgttcgggcgtcaggcatttgggcatcgagcgcgagatggagcgcaggacgttgatggctggatagcgcccgcggtcggcgatcgcgcgctccagcaccacgtggccgtcgatgatgccgcgcacggcgtcagcgatcggctcgttgtggtcgtcgccttcgacgaggaccgagaaaacccggtgatgtcgccctgcgccgctggtcg

SEQ ID NO: 78214 - DNA, 396 bp, Arabidopsis thaliana landsberg
  unsure (1)..(396): unsure at all n locations
aggaactcattttctgaaagattctggctttcgtgcttaggctgtactgtctgagccatgcgactacccatgagagcgcgtgggacattttaannnnnnnnnnnnnnnnnnnnnnnnnnnnnnnnnnnnnnnnnnnnnnnnnnnnnnnnnnnnnnnnnnnnnnnnnnnnnnnnnnnnnnnnnnnnnnnnnnnnnnnnnnnnnnnnnnnnnnnnnnnnnnnnnnnnnnnnnnnnnnnnnnnnnnnnnnnnnnnnnnnnnnnnnnnnnnnnnnnnnnnnnnnnnnnnnnnnnnnnnnnnnnnnnnnnnnnnnnnnnnnnnnnnnnnnnnnnnnnnnnnnnnnnnnnnnnnnnnnnnnnnnnnnnnnnnnnnnnnnnnnnnnnnnnnnnnnnnnnnnnn

SEQ ID NO: 78215 - DNA, 352 bp, Arabidopsis thaliana landsberg
cacacaccgcagatcgacaacaacacccgaatctaatactcacatgatttatcttatacccaactttccttttcctaactcaacgtgaaaccgtacgtatgtctttaagaagacccaagacctgttgcattgttggtcgcttcactggcgtcttcgtcgtgcaaaagtaaccaatgcgaagacttctttaccatttcattaaccgattctacagcagcttaccgcattctcgagtgaagagcttactctgctcttttctccttaaccaaccggggaacggatttaacattctcatcactcccttgcttcccggtttataacttaaacaaaatgacccacaaactattcacat

SEQ ID NO: 78216 - DNA, 462 bp, Arabidopsis thaliana landsberg
cagtagcgggctgaagactcctgggatatatgctatcttgtgttcctaggataactatagagagctctctagatggctgatcaaagagcgaccgatgctgatccatatagggcaagtcttgaaagcgcgctaggtttcgatgagacgactacacagtcacaagagtgcactgtagttagaagccttgatgtcgaatgaactgcttgtcgggaagggctcaggtgggagcaatagcaaggtagtcagacgcacaatgagatcctagccatggtaagtacgatacagctggtaagtaggtatggtggggttgcaagagcgcggaccgagacacggagctgacttccagtctcggtggagctgctgtcgttactcacacagataggcgggataggtgaccttgaatggggccagggtcgtgtagagagggtgtgaaacagacggctaacttatcaaggactgttc

SEQ ID NO: 78217 - DNA, 397 bp, Arabidopsis thaliana landsberg
cacattctgtttaagcctcagtatatttgtttgtgtaagtctttatcatgattgttcattttaacattggtgtgtgagacaaatacaattttattttgaacattttatctcatcgtttcattccaatatagaaccaaaaagacaacaaaattgaaccaaaggagatgttaagaggtcgattcaagagagactataacaacatgattaaaccaaaatgacacaaaacaacacgttttaatttggaggaagaaaaaaaataatttgggattttctgggctgatgaagattttattcgagtttttaacgttgctgttaaataataaacggggagtatttctttgtccaaatgtgttcagtcaattacactatgtggaattattttgttcacataataaat

SEQ ID NO: 78218 - DNA, 395 bp, Arabidopsis thaliana landsberg
  unsure (1)..(395): unsure at all n locations
acagaagacaganagacgcccaccaacagcttttgtttcacacaacacgaaaagacgacaccggggaggaccgcaaaaaaagaagaacccaccacccaaacacggacgagcgccccaaacacagggaaaccccagaaccggcaccggcaggaacacgagcacaaccagcgggcacccaccgccgggggcacaacaaccccccaggaaaccaacacccggacaaaagggacagcacacaaagcaagagaaacaccagccacaaggaaaacgcaacccaggcgggggaggcacagggccagcccccaaccctgggcaaacaaagatatagaggaggacccacagaaggcccaatcgagatggccaaaaaaaacaaaaaagatgccaaaaaaaaaaga

SEQ ID NO: 78219 - DNA, 529 bp, Arabidopsis thaliana landsberg
  unsure (1)..(529): unsure at all n locations
tcggttttggctggcgggtgtcgctggtcgcggagactttgttttcgtcgagcggtgtaggataccggttgggcggggctgccgacctgatccagaccgatcaggtgttgcatggacactgaccctggtggtgatgatggccgtgctcgaaatgggcatcctgcgtcccctggagaattacctgttccgctggaaaaaagaggctgaatgatgccgacaaaccgcagcacatcgcgcaaaggcggcgccagcaggcgcctgattgtcgcgatgaccggtgcctcgggctccatctacggcatccgcatccttgaacgcctgcgcagcatcggtggctgggaatcgcatctcatcgtatccgaagccggcgtgctcaacgcctggcaggaatacggcatggaccgcaaggcgctgcacaagctcgccgacgtcacccacaacgtgcgcgacatcggcgccaccatcgccagcggctcgttcctgaccgncggcatggtcgtcgcaccgtgtnnnnnnnnnnnnnnnnncg

SEQ ID NO: 78220 - DNA, 561 bp, Arabidopsis thaliana landsberg
acgcgatcacgcggcgcggggatgattgggccagcgagagcccacaattctttgtgtttatactatcgagtagccaggccgaactgtgattttttttaatacctggacaatcttctacgaatttttgagctcgaaatttccgtcggtatttgaagtaatgattaggctagtacgagagagttctatagagggccttctagaatactctatttatacgtagatggctagcatgcttggacgaactcctaatgcagttgctcccagatcacgacctgaaggaaaccctgttaacttcattaattagcatgtgttagaattagctagacaatataatagaagaagaccacttgaatcagtgactcgaaatctgagctgtgggactttttgtgcagccctctagttttgggggctgcccatttgcctcataccttggggccatggaagagtttatgaagctccagaatttgaagaaaatacggaaactttggaatattttgggagctgcagtagtagataaatgagggaaattatgctctgaacccctcgcgtactatgactatg

SEQ ID NO: 78221 - DNA, 529 bp, Arabidopsis thaliana landsberg
gaaagtgctcagggaatttactcagattcttaatgtacgtagttgaccggtttataatccatgtttagtaactttctaattcactataccttttttacatttataattttgctttgtttttggaattataatcctttttatagtctttgtgaagtaatctaattttattttaataacttatacagaaaaagaggtaaaaagttcaggtccatgattacatgtgcccaaacacctggagctgactcagcttacacaatatgctgaatgtatatatttttgtgcgtatctatgagtccatcttttatccaaatatgatttaacaaaaaagtacatttatttccatatttcttggtgagtttggcaataatttttaataagtcttaaagagttacaaaattttaaatttagtatatccactgtattgcttataagaatgaaagtattcgtaaataacaaaaatctcatttttactatgtaattgtttggagtggattacgtaatgaaattgaagaatttttcaggcaaatga

SEQ ID NO: 78222 - DNA, 550 bp, Arabidopsis thaliana landsberg
tgaacatacttttcgatgcatgcctatgaaaaagttaaattaatagtctgtatatgagttatgaccaaaaaaaaaaaaaggggtctgcatatgagtttcaattgcgacaacgaatattgaaaatgaccattaattggtagtcaatgaatataaatgttcaatatatatttatttctattttttgtaatataaagtattttcttagcaaaactgaattcttttagattcgtattttcctcgacgttgttttaagactttttctgtaaacttacagttttgaagattattgagttttttattattgaaaaacttatgtgagcaatagtcattttatttatttatagtagtactataatcgatgattgcagtaagttttaaaatatagagaaaaagaaacaaattaatggggatcgtcgaacacgataaaaacaaaagcatacatcgattaaaccaaaacagaaaaaatgaataataataatgctgcgtgtgtataagtgtattattatttaaaagttactttttttaatttttagcgccgctaaacggataa

SEQ ID NO: 78223 - DNA, 600 bp, Arabidopsis thaliana landsberg
  unsure (1)..(600): unsure at all n locations
tcaccaagctcgctctacttttagagataccgttttgggcctagaatatttgcattatcagggctgntgttctacgagatatcaagccggcaaacctcctgtggagcaaggagcaccgagtcaagatctccgattttggtgcgtcctactttggtcgacccattcgcgatggcgagcccgacgacaccgtttccgagtcagaggccaaagatttcgatgatgatctcgaacttgccaagacggttggcactccagccttctttgctcctgagctttgttacacggatctggacaaggagcaacccaaggtttcggagcagattgatgtttggtctcttggagtaacactctactgcctgatctatgctcgcattcccttcctggcagaagacgagttccagatgttccgaaagattgcgacggaggaggtgtatattcccaggaagcgtcttatgccggttcatccatcgacatcgccgactgttacatccctttacaagcgtcagaacatgcacccctatcgagacgataacgacttggcatatgaggaagtcgacaatctcctcatcgacctcttgcgccaaatgctcaccaagaacc

SEQ ID NO: 78224 - DNA, 390 bp, Arabidopsis thaliana landsberg
atgaagggaaaagcagtgaaatactgaaactgcctgatattttatgatgtcggtagaacccaaaatgtagccgggacatgttccaatcttaatctcctggacccacaagccgacaccgctcaataacataccctctatttatatgccttgacattggataactcctgagggatgaccattggctgcttaaactccaaacactctacaaaacatctaattgcttgttcgggtgaacccgacaaataggacactttcattaaaatttaaagaccaagacttattatgacccagctggcagaatgaaggattacacattgatttctacaacctgaaactcgctgaacactcctgcttgctgacacgaaaacaaatttgccctcctttgcataa

SEQ ID NO: 78225 - DNA, 529 bp, Arabidopsis thaliana landsberg
  unsure (1)..(529): unsure at all n locations
atatcccccgcgacccgcgccgcttcaaaatccgatgccatgaaatgcccccgaaaagccggtttctaccattccgtcgcaaccccacaaggcagggcgctcgccgtagcccggaaaaccttgaaaatccggctcaaaatagccatttagcttgggtaattcctgcccatccgctagtgaaaatcagctcacgtgctgacctgattcgggacccctttttgagcacctccgaaaacccctccgaacnnnnnnnnnnnnnnnnnnnnnnnnnnnnnnnnnnnnnnnnnnnnnnnnnnnnnnnnnnnnnnnnnnnnnnnnnnnnnnnnnnnnnnnnnnnnnnnnnnnnnnnnnnnnnnnnnnnnnnnnnnnnnnnnnnnnnnnnnnnnnnnnnnnnnnnnnnnnnnnnnnnnnnnnnnnnnnnnnnnnnnnnnnnnnnnnnnnnnnnnnnnnnnnnnnnnnnnnnnnnnnnnnnnnnnnnnnnnnnnnnnnnnnnnnnnnnnnnnnnnnnnnnnnnnnnnnnnnnnnnnnn

SEQ ID NO: 78226 - DNA, 392 bp, Arabidopsis thaliana landsberg
cacgactacaacatatcacctacaagctgctaatctatggtttgattggtaaacaaaatggagtaaaagtttgagatagaaaagctgaaaagagaagaaaccaaaagtttgtgtgctagtaaaaaattactctgtttttattgtattagttgaaataattttccttttctttcaacttgattgaaaattgaaatacacaaagcataagtgagagtaactaataaattacgccacaatgtttactctaattggtactaccaaatcacccgtatctatttgctgtctaatcagaaaagatgaccgcagaatgatataacattcatggtttgatgattgaaacccttctttaaacaaaacaaaaattgacttgttgatcttttcaggatcttttt

SEQ ID NO: 78227 - DNA, 784 bp, Arabidopsis thaliana landsberg
cgtagacattaagcatctataccgttgtacctctaagatgaccttgtggtcacaaggagacaagactgatgacaaaatagttttaaggatattatcgcttaaagatggacctttttctatctgatctcaaacaattacaaacctaattttgcaatcaattaaattttggtctatacaattaaaagcacatgttaatatatgaaaatagctataggcatttatgtttctatataaatagaacaagaaattctaactaaagaatcaaatttatagctactatacaaaactttcgacaaaaatatgagattggatcaatatagcgatgaccactaaactacaaaccacttcatgatcaattttgaaatcttaggaagaagatattgtagtactagtatgaacaagggaagattgaggcatacattagaagattcgcgagcttaggctttggggttggggttgcacgtgatgacacatgtaatgtgtttgcaagtaagttaagaaacgacgaagctcttgaaaaaaaatttaagtgaaaaaagttttaaagctttgacaatagaattcgcagttcccaatggaggaagagaagagaggagagagagagggcggtagatgtggggggaagaaagggatgtgtgcatgggagtgattaaagcgtcccctcattcaaccgttgttgtcattccttaattaccactgccattactgtttgtcggttctctatacaattccttacctaattatttaaattcctttttttttaattattagtatttaatttcaa

SEQ ID NO: 78228 - DNA, 266 bp, Arabidopsis thaliana landsberg
tccttgtttttcacacacggcaattgtttataatttctatgggaattgctcaacatgtgagagacaggcacctttcatgcacggacatatcaaatctacgaacattctcctaactgaagcttgcacatccgggggtgctgaatattggattgctcgactaactacgaatgccgaatgagggaccacacgggtggcaccccacgcgccaggatccggaggttactcaaaccgatcagcacttaccatcgattcaactgacacacaca

SEQ ID NO: 78229 - DNA, 299 bp, Arabidopsis thaliana landsberg
ccttacatgctcctacattcggcccatccgcggtaccgacggcgaatcccaccgctgtagtcacaacgagcccgagcactggcaaaccgtttgctgctccgaccaagacacccaccgcgggcccgactgcgggacctacggctgcagccactgttgttccgaccctggctcccactgcaggccccacagttgccacaactgtcgcgcccacccgtagacccaccacgaacccaacagccactccctctggggtccttacaacggccaaaccgtcgctcacgcctacggtaaagcccact

SEQ ID NO: 78230 - DNA, 557 bp, Arabidopsis thaliana landsberg
  unsure (1)..(557): unsure at all n locations
tgagtaggaataatgtcaggtctacatgttaccatttggagttaaaattactagtaaatggtgaacggagagggacatgttgttcgtgcccatttcttttcgaaataatggttaccaatcggaccctatatatagttgtaaattaaaagtctactattactatatatggaaatgtaatgtacatgaaatgaatcataaataagttcattttggtttacttccaaataaaatagcacacaaaaagaaatgattccaacattcgaatcctgctggcgtgatttagattagtaattatcacaacctccaaccacaaaatctaaataaataaataaaccaccacccactccaaaaaacgaaaaaattaacattacgaaagaaaacatttagcattaaataagtttttcgttggcaaaatataaaataattacgaaaataaaagtccaaattatactaatatttatgacataagagagagagtgatggtagtaagctgaagaggcatctcatgagagctgacgagaattattgaatacccaagagtcangatcatctacacg

SEQ ID NO: 78231 - DNA, 259 bp, Arabidopsis thaliana landsberg
acacatccaacataaagcaagatagccattcttctccacaaactccaaagagctcgaataagagcgttttagtcaaaatctaagaatctaaacttctacggcaacctaactgcacacttcaacacaatgaaacactggagaacactccactaacgagaaaacctaatgtctgccaatccaatgcgatatatagtgagtgttaaaaagaggaaaccttcaaatcacataaaccgtgtgactacccccatgagatttcccc

SEQ ID NO: 78232 - DNA, 532 bp, Arabidopsis thaliana landsberg
tccacagttcaccgctgcccacttcgatgcgaaggaatggtgccattctctttcgtgaagcgggcgcacgggatggggttccggtcgccgagcatcatgacggctttccgctatacgatagcgcgttcaccgaatggagcgcggcgaagatgggaccgaagcgcgatctgatcggcgagattgccgaggccgtgcgcgcggaagggatggtgtttggcgtttcgtaccatcgcgcggagaactggttcttctacaacggaggccgaacgtttccatccgatgttcaggacgaccgctaccgcggcctgtacggtccggcccaacctcaggaggacacccactccgtcgacgctcccggcggagcggacgaaacctttttgaacgaatggcttcagcgggcctgtgaactggtcgatatgcaccgaccccaggtcttctggttcgactggtggattcaccacacatcattcataccctatctcccgcggttcgccgcatattattacaatcaggccgattcatggggcgacga

SEQ ID NO: 78233 - DNA, 528 bp, Arabidopsis thaliana landsberg
tatcaagatgaaacacctacaacaacaaatgtaacttcatttgtcaggaccggtccgcaggacaagcgtgtgataaaactgtgtgttttctacattttttatgaaatgggtgtaattgaaagatactaaatgttagggcttttcagaaacttccgttacgttttaggcgtttaacacaattattattttctaaaacgagagccgtttaaagagaaagagaaatttctaactccagagagcgaagaacacaatcccagagtagcagaatctgatccatcccacctttttcaattctcaggcaaaggtaccgatctttctccttccccgtttgagatcagccttagattcgtcattctcgtccattgaatcgatagatctcgaataattgtcttgttttattgtttcttctacgctgttttgatgctcttgcttgattggtggatccaattgaaattagatctctgtatcgattcggttgatgccatttttatgattcttgttctggatttccactgtaatggagctgat

SEQ ID NO: 78234 - DNA, 625 bp, Arabidopsis thaliana landsberg
  unsure (1)..(625): unsure at all n locations
gctttcatctctagataaagatcgcttcttttctttccagaggaaaaaatacaattctgtaacaaaatttctgctgaatatttaaaaccctctgcatttaatagccatccatagggatgttcggagaacctgtggtattttaatagaacttnnnnnnnnnnnnnnnnnnnnnnnnnnnnnnctataaattatcttatttacttttaagattcgagtttaatattaatacttctatatttcgattctcacagaaaaacctacagtataattttttgtaataagtcagaaacaatggatcataatagatgatgacctatatacggataagttataagtgatgatttctgatttggcttcataaatcttactaaaatgctgtaccaaaaatatagttgtaatgttatgtgcaatgagttgataacaactctaaccatgaactgtccaattaaccggctcacctatttccagttagcagtccgcanaagttaaccaggttgcatcattttcaattcttgattagctgctatttcattataattaacaacaattcctgaagcatgctcataaacaccagagcatttttcagttttgtccaataacgcatattctcatttaaagtttttac

SEQ ID NO: 78235 - DNA, 529 bp, Arabidopsis thaliana landsberg
tagatgtgggaactcgactttggtctcttactggatttaatggtgcaagacttgatctctttgttgcatcttggtttgttttcttgtcagaagccagtggtttgaactgaatggttttctttagcttcttagttgatgggacatcttgttgactgtcagacgatatgcggtttctcccagcctttgattgttcattagctctgcgcaaagtctttgcagattttgacagttttgttgcggaaggagatgtggacaagcttttctgggaaacatgtgatcggaaatgaaaaaagaactgccttataactctaaaagaacttctatctgaggatccaaagagagggtcaagcgagagagctagcaaattactcaacagctgcagaccatcaagtttcactatcaacatattggagcgtctctttgctgaatctacttgtgacgatttcttggcccaagcttctccagaagataacgctttcctcttatctggagtgtcacggatcagctctgacacatactctttcttctt

SEQ ID NO: 78236 - DNA, 493 bp, Arabidopsis thaliana landsberg
  unsure (1)..(493): unsure at all n locations
ctctgtttagggntgattgtctgtgtttgtgatatgattacttattaatgtgtaattattcttcacttacagaagattaagaattggtttaaggaggacagttttgatggatttgatataagatatgcatgcttgaccttgattagcaaaaaaccactgcctgcttacattttgagttggggtctttcacaaaagtccctaagtctacataatatacattacattctgcttaaggagagaagtttatgtacaaacccttaaaacttaaaaccaaaaaaacaaactagaaaagagtactgatcttgaaactgtgtttacaaaatgcgttttcctttgaaggtatccacttgcttccttagcccatcgatgacatcagaagcttcctgttacattatcaaatgatttgagtatgcgtggatatgtctaaaataaaatgggatatttccactatatggtaattacaataggactaacccgtagttttttccttaag

SEQ ID NO: 78237 - DNA, 513 bp, Arabidopsis thaliana landsberg
caaactctttttaccagcggtaaggatcggagactttaacgccgtgataatcttcaacgacggacttatcacttcctcgccgttggatactgcaaccgctcttcaaacgcagggagagatcccattctatctattagctaaccttaaatttccgacaagaaaacctaaaaagacttgacgaagtagttggcgttaagttttgtggagtctaacggaaaaaataataacccgtgttgatagggtatttatagggacattaaaaaaaaaaaaggaaacatggagaaatggaaattaagagcgcgcgtgacagatatgcattgagtctctcgttatgtcgaaatagtttcgtgcatctgtcgacattgttttgttatgttgccatttttaatcagttttgtaatttacactaaccttcttttttggaccatttttgtttttcaaaccaaaatggcatcttcactttgtattttattttctatacttggattcttccatttgtttcgtacaaagaaa

SEQ ID NO: 78238 - DNA, 218 bp, Arabidopsis thaliana landsberg
aacttcaaaatgtgtattaaactacacaacttttaaagtaatttccctctaatgaaaccgtaatcgtgaaaaaaatattataagaacttatacctacggtatcgatcatgaatgtatctagagtttagtgcaaattcgaaaaaataactgctgaacatgatggttctacacttctacttatgtggtttctctaccaaaagttaattcttagttctaaa

SEQ ID NO: 78239 - DNA, 512 bp, Arabidopsis thaliana landsberg
ccctgggaagatggcagcatgtggagatgtgctaaggctgttgtaggctgctgtgatggaggaaagcaggggggggtgatgcagggctagccagggaagctaagaagggaggcaatagtgaccatcagggttcaaaggttgttttcactgtagtatgatgggtagaggggggtgatcatggtttggtgaagtgaactacaaagctgtggactgtccgtagtggacttgatgtgctttgggtcctgtctaatactgtgctatttgaaacagacatgatccacagaaagggcctgtcttttttagctgatgtgacttccagccagtctcagctccctcatgtctctgctcccacaggaaacaaagccctgtccttgtgttttccaggccaagaaaagttcaagctacatttcccatcacacagtcttttacattctgtgtggcctgctctggtcctgtccccttggattaccctccttccagttttctttcttttcctgaggacttcctatttt

SEQ ID NO: 78240 - DNA, 617 bp, Arabidopsis thaliana landsberg
ttaggaaaaccagagtttgttcaggtaatttcaccgcttcacgaatcgtaaccgccggagaagacgatatagacttacggaaaaccgcccttgccgtaacagccgttgagaagcttatcgtcgaacgaaccaccggacgaaacttccccttaaaaataaacatggtggagaagagaacgaaggagaagacaaacagaatcacgaaccaaaagaacgtccgccatgaaacaacgacgtttccgccgcaaccaccaccaagtttcctacgaactttcatctcctacgccgccgaaatcgccggcgtaatggattagagaagaaattctgttttaattttgttctgtttttctttacttctctgattcttttccggtcaaagtttctggttttggatgatgagaagagttttgaatttacgctattcctctttttgttgcttctcaattaagaagaagaaaaaggtaacaaaattttatttattcctgacgcacgaagaatatgaaaagagaagaaaaaaagttaccaacttggagaaggagaaaaaaagacggctcactaaaacaattggtctccgatcatatttattttgttttttaaggatacgaattttacttttt

SEQ ID NO: 78241 - DNA, 559 bp, Arabidopsis thaliana landsberg
  unsure (1)..(559): unsure at all n locations
tcttaaaagaaattctataataaatcaaaagatgtagacaatttaacaaacgtgcacatttccaagagtattgaggagagcttactaggtgagtttggttgcttataaggagcaggcatcgaagaaccttcattgtccagaacttttgaagagaagcacgagaaacaactcattttatgaagattttcttcgtctgaaacctctcctactagcaaataatataggaaaatatctctcaaaacttttgatgagttttatacgaagaacatagaaaatacccaacagtcctataaaaaccagaaacagattaagtttgctgttttatgtagagtttaataggttataacagaaagaaaataagagagagagaggtattaagaaagaaacaatattgagaaagacaacctcaaacagaaacaaatttgacaggattgttggctatctccttttccatttataaacaaaatattatttggccaatttaagaaaaaaataaagaaaaccatataatnttagttaccatttatgttgatgacctgtccacagaanaatcatgttt

SEQ ID NO: 78242 - DNA, 103 bp, Arabidopsis thaliana landsberg
aagcaaacatcagcaggtccaaccacacgaccttacatttttttcaagagagcccacacaaccaatcccggagcccctcatccacacgagaaccacaaagaga

SEQ ID NO: 78243 - DNA, 706 bp, Arabidopsis thaliana landsberg
aggactctttaacatttaaattttacactatcattctttacttacctaaaatttttattcttcttcttcttctatacattggcattcatgaatagtactaaatacatgaatcttcattaaacacttacataataagttcaaaatagattttacacatatataatatttttaatgtgtatgtacacttaagcaaaattattatatatatatatatatgtacattgtaatactaatctgcaattgattttaacaacactattcaaagtaaaaataaataattataatttaaattaattttttttggaaaatggatgatttaaagacaaaaataaataaattatagttcaatgaataaaagtaaaaatatagataatatgaaaacaaaaaagaaagtggaaaaataaatatgatttttatattgattaacaattgtagctaactcgttactgtttctaactagtccgtacacgtcagttgtacacttatttcgctgacaaggtccattttgttttaaatacactaataacttattgggagagactaccttgatctaccaaatgttaaaaaaacttatttttatatctacggaaaatatatttattttcttgtgaactttattttattttgcaagaatttttagtgacttgaattgattagtccttgacattgacattttatgttttaccaaaagatctttcaataaggt

SEQ ID NO: 78244 - DNA, 424 bp, Arabidopsis thaliana landsberg
gtaaacacatcatgtataggcactgcatacatatgctctatatttgtattaaggttgcgtctacttcttgttcatgttcatctccaacactcttgatcaaaatctgactctccatacacatgtgcgttgctttcgacactctagcaacacgttcttgaccacaaaggcgagtcctttacagttctagaaaaaaggatgctgcaacaacttctctgccgatggtcttttagtaggagcttgctctagacacagaccaaccatttctctaaaagctgttgagaactcatggttacccatgctgctgcttccgctcgaattgagctcgtaatcagaagaatgaaaccttttggcgatcttcatgagcagacttttcaacggcgggaagtgagataacggaggtcttccatgtgctaactccaacgct

SEQ ID NO: 78245 - DNA, 590 bp, Arabidopsis thaliana landsberg
  unsure (1)..(590): unsure at all n locations
nnnnnnnnnnnnnnnnnnnnnnnnnnnnnnnnnnnnnnnnnnnnnnnnnnnnnnnnnnnnnnnnnnnnnnnnnnnnnnnnnnnnnnnnnnnnnnnnnnnnnnnnnnnnnnnnnnnnnnnnnnnnnnnnnnnnnnnnnnnnnnnnnnnnnnnnnnnnnnnnnnnnnnnnnnnnnnnnnnnnnnnnnnnnnnnnnnnnnnnnnnnnnnnnnnnnnnnnnnnnnnnnnnnnnnnnnnnnnnnnnnnnnnnnnnnnnnnnnnnnnnnnnnnnnnnnnnnnnnnnnnnnnnnnnnnnnnnnnnnnnnnnnnnnnnnnnnnnnnnnnnnnnnnnnnnnnnnnnnnnnnnnnnnnnnnnnnnnnnnnnnnnnnnnnnnnnnnnnnnnnnnnnnnnnnnnnnnnnnnnnnnnnnnnnnnnnnnnnnnnnnnnnnnnnnnnnnnnnnnnnnnnnnnnnnnnnnnnnnnnnnnnnnntttgtatatatatatctttctttcaaggggacataaaaaacccgcgattcaaattcaacctaaaggaaatggtttcaataatataatccttctaaattttgaaagcatttatttcaaataaaa

SEQ ID NO: 78246 - DNA, 543 bp, Arabidopsis thaliana landsberg
cgcgcctagcgtaggtcccgtagctgctgaattcggtcccgttgataccactcgtccgtcttcggggtgccgaacaatggcggcgactcccacgggtcttgccactcagacatgagtaagaaccagccacgtcatagcgaagatgaaccctaggacgagcgccagtgctaggacacccccgcagctagtgcctgtagcattccttcgctgctctgagtccgcaggtacacgctggcccatagttgacctcctctgcccacagccctggacgagatcgcgccacgctttctcgaatgcgttcgatggtttgttcgtcaagctcattcgccttctgtgtacgggacttggccattactgcccttcacgatgtgccaggcgaaccaggccgcaaagctcatccaacccgctgtgaatgcggcggcccctacggtgtgatgagttcggaaccaacgtcgagtcgtacgcgatgcggtacggtcgaattccttgcgccagatggcgtatgcctcgaaagtgaggcccgctgaaacagtgccggccacg

SEQ ID NO: 78247 - DNA, 620 bp, Arabidopsis thaliana landsberg
  unsure (1)..(620): unsure at all n locations
catttagctaaaggtccacgaaagcatgtatctttttttgatctagtatttaactatacgtacatantgttcattaaaaatttacaaccctaaaacatactgtatcaattactttttgtcggcatctaaaacatttcagctatgaaaagataataaaacgaaagaaatgtaaatgaacaaaaatgaaaaagaattagagaaagggagaagccaagtgtgatgtgtataccatttgccttttaagcgatgcgacgagccgcaattagcgaggaaaagtgtgtagtttcttacttctcgcatttcgttaatcctccacagcacaacacgtttgatatcttttttttcttttcaatgtttaccacatccactttacataattacatatacctttacttattttgatatgattacgaacgttcttcaatgaaagagcaaaatagcatactgtccattagatacagataagcaaatgttacaaaaaaagatgatttatctaagccaattagtagatatgagtggttggaaaaaagaagttagagtgggacaaaaatacgatatatatgcatgttgttgttattgttggaagatgataagtcattaatgtgtcgaagtttatcatg

SEQ ID NO: 78248 - DNA, 569 bp, Arabidopsis thaliana landsberg
  unsure (1)..(569): unsure at all n locations
aactccgatgatatattcaaaatactgaaagaaaaaaaatctgccattaattaatattatacccaacaaatctatcctgggggtatgaagaaatgaagtctttcacagacaagcaaaaactgagggaattcatcaccactagattggctttataagaaatctttaagggaggcctacatctggaagtgaaaggacaattactaccatgacaaaaatataaaactataaaactcattgtagaccagagatacaaaacaaccagaacacaattcacaaaatgaaaagagtacatcttcacctatcagtaataactctgagtgtaaatggattaaattccccaattaaaaagatatagactggatgaatgcattaaaaaaaaaagacccaattatatcctgcctataagaaactcacttcacctataaggatacacagagactgaaagtaaagagatggaaaaagataatctacagaaacggaaacaaaaagggagaaggactagctatgcttatatcagataaaatgagataaaatggactttaagtaaaaaattgttatanagaaaaaga

SEQ ID NO: 78249 - DNA, 605 bp, Arabidopsis thaliana landsberg
ggggaagctattggtcttgttcttcgggcatttctaccggcacttcgcctccttcgggtggtacaaccagttttatcgagactcttaggctgtcggccatcgggcatctctggtaccggcaatctgtgcctccttggtaactcttggtccagggctcaggatatttactttttttcaggttgaccttttggtcaccgtaaagaaaatccatatacaacccgtaaatcggtaatgccgtacgggcgccttctccggcttcgctgctcctgaaacggatgcggttatcatcggcccctacccaaacaccggtgatgagatcggctgtaacacccatgtaccatccatcggaataattggaggatgttcctgttttacctcccacttcattgccctggtgcgtgaacttatagctccacaatgcctgtgaggttcctcccggctcttccataccgccacgcagcatataggtcatgagccatgctgtttctgaactgatggcctgcttgtaatgcggactgaaagtaaccagcaccttcccttccatgtcggtaattttggtcaccataatggggtcggtgtgcaggcccttggttcatgaagtagta

SEQ ID NO: 78250 - DNA, 508 bp, Arabidopsis thaliana landsberg
tgtccctactcaaaactgggtttttgacaatactttttaattgtaaacaaggccattttaattggaagttcgatcctatttattgtccatgtcaatttctagttgtttatttttaatttctcatagtagctgattactaaagttgtggtaacttgtaaccataatctggttaataattgacaagtgcatttttcgcaggtggttacaactacagctgtctatagtcacgactatagtaaaaaaaaagaagggataaaatggaacgactcctcactaaaatgggataaattgatttaaagtagggtataaacaaaaatatggttaacataaaattgtaaatgaaaagttaaagcccacataaatgttgtgtctaaaataaagatagtaaatgatgcatgacaaatgtttgtagctcgctaaactgaaacactcaattcaaataattatttttgttaacacgttagtatatagatgttttaataatggataactcgtttataatataaca

SEQ ID NO: 78251 - DNA, 537 bp, Arabidopsis thaliana landsberg
actgcccgagcccaggcccaatcgcgtcaagatcgaccgccatctcgttctgccgttcctgaagagcgagacacagcggcggctgatcggctcgctgatcgacattgcccgcacgctcgagatcgaggtcgtcgccgagggtgtcgagacgctggatcacgcccgcctgctggccgggcttggcgccgatacgctgcagggatacgccttcggccggccgcaaccggcgcaggtgacacaggcggtcctggagacggccgctgcccgcaggatggagaatgccggctgagatggttcagaactgtcctacgccgtgcgccttgagcgcatcgagaaacggttttggccgcaggtcggtatcgagcggcaggccacggttgaagccgggcgaggttccgtcgcgccagtagccatgctgcttgtaggcctcgacctcttcgggcggtagcccaagccaggaatagcgatccgtcagcctccaggtggcgacgccgcgcagatcctcgaaatcgcagaccacatcgagatagcgcgcca

SEQ ID NO: 78252 - DNA, 625 bp, Arabidopsis thaliana landsberg
atcttacatgattcggttttcctaatctaatatatttgcttacagaagcagaaagtgtcattaacaaattttgatgttgaagacaatggttaaataacattctttattttcaccaattgtttcattcatgatgatatttttcgttaatgtaaaactgttgatttgctggatgaacttttgcagtagttaccaagccacaagtcacggcaaaaactccttggttcaaatcaaaatctattattaaggttggttgctgctttctttattgctgcaaatgtgattctttttcaaatatggagtcatgtgatttaacgagtattttgtcacttttcatatccagccacaagtaaatgtggtgacaattgttgatggcttgaaaagattgtacactgaaaagctaaagcctttggaagtcacatatcggttcaatgattttgcatccccggtactggcgagtaatatccttaactgtttcagaaacacttgtgagtttttgtttatccgctttttccgtgaagagctaaagaactcattttatatccacatggaaattgatctcaggttattgatacttatgattggaaactagtagcgattttgatgccaacccatggtaatgcttttg

SEQ ID NO: 78253 - DNA, 475 bp, Arabidopsis thaliana landsberg
acatctccctattatggttgatgattttttttttttggtgtttaatactatatataaaataaaacagtctctagcatcaggttttattttatgaattagatgtgatatgcctgttgcccaaaaaaaaaagaagatgtgatatgccttagtagaaagcaataacaacaatctttttgttgaatgaaaaattattgaggtgacgattattatttttatggtaagtggtaaccatttgtattttagacattaatttatagtgggatcttttgcctttccaatacatgtcgcatttttatttatttattcaattgattttgcgttatgataaatatattggagatatcttaattagttcgatgaaaccttgggtatctgaaaaatcttcgattttgtaaagaaaattatgtttctgtatcgaataaaattaatttttcatttaaatgaaagatttttttaaaaataaggccaaaaagca

SEQ ID NO: 78254 - DNA, 548 bp, Arabidopsis thaliana landsberg
gcgggtcgccctgggcgcggatacgcacccacacggcacgcttttccttttcggacaggaaaacccagttggcgacctccatggcggtgcgcccgcagccgcggcagacctcgtcgtacagcgtggagcacaccgcgatgcagggcgaatcgctgggcgaaaggctgtgcgcgccatcggtgtcgcggccgctggcatcgcagccctggggatcgcggtcgtcggtcatacgcctgcgctgcgccgcggcgtgctgcgcccccaccggggcggcagcgcgcacggggcgaaagcgccgcacatcatacggccagcttgatcgcctggcgcagcgcctgggccttgtcggtggcttcccagctgaactcgggctcggagcggccgaagtgcccgtaggcggcggtcttggcgtagatggggcgcagcaggtcgagcatttcaatgatgccgcgcggacgcaggtcgaaatgctcgcgcaccagccgggcgatctgctcgtcggggatgatgcccgtgccttccgtgtagaccgtgatgttgatgggctc

SEQ ID NO: 78255 - DNA, 106 bp, Arabidopsis thaliana landsberg
gcaaactccacagggtgattccagcacaacacctttaactatataacaacaaaaactccacaccaagggcccccgggcaaaaaaaaacccaaaaacacaaaacccc

SEQ ID NO: 78256 - DNA, 670 bp, Arabidopsis thaliana landsberg
catggatgtggtatgtgtaatcccctttttgagtagttatcaaaggtaatcactcaatctatgttactatgtctatcaagtaatcaaccaacaaatcaaacatcttgttctttttaattcatctagataccatacatgaatcttcgagattttatgatttgaaaatctctagattgaatatcttgtttacgcatggaatctctgatttagtacatgtttcacccaactgagttctacattgtatttcgatgagatcaatatgaatatttcttcgtttttatcaattaatcacgaaaataacgcgttaagaatataccaaaaagtaaataacgctttagaaattttacgaaaaactaaataactatttagaattttatgagtttgttttaaagacagcggttactgtgataattgcatactatatttttgtcgattataagaaaagattcgcccacccgttacaacgatataaacatgatttttcgacggttacaagttaatggcttaaacacgagaacattacatgacctgccaaaaccaaaatatgaaaaatttgtcccagagtttcatttatcagtttccttttaaaggattaggaaagtctataacaacacagccaagtggggctttaagtacaaagatgtgtgaaaaagaggaatgcatcaagtcc

SEQ ID NO: 78257 - DNA, 476 bp, Arabidopsis thaliana landsberg
  unsure (1)..(476): unsure at all n locations
tcgctttgtacattttgannnnnnnnnnnnnnnnnnnnnnnnnnnnnnnnnnnnnnnnnnnnnnnnnnnncaaatttccgcacctcatttccttcgtattgaatgctatcgtatccaccggtcgggtagtcgatcctggacaacatgcccagcttcgcaaagctggcatctgcttcacggttaccggttgccagcggaaaccggctggcattggtgtatccgccacccgcattatgctgatcaggctttggtacaaaagttaagttgattttaccgttataataaccccagagatcttgaaaaaaagaaagccgttgagcgcgcagggcaggctccaggtaactgaagtgatgcgttttctcctgcagcaggtcggatgaacgctcacaaaggcctctgagaaagggcgtatggacaatgcccgccccgttttcattatatgagcctgtagcaacgatatcagcatagtcaaattc

SEQ ID NO: 78258 - DNA, 490 bp, Arabidopsis thaliana landsberg
  unsure (1)..(490): unsure at all n locations
aattcttctgcatcttccaggccgatgaattccacttcgaaaccaaattcactcgcnnnnnnnnnnnnnnnnnnnnnnnnnnnnnnnnnnnnnnnnnnnaccatgatgccgaggttcatacatttaccgatcacatcagcaaagcttacgtccatcaggttggccagttcgctcacggtcacaaattccgttacctgcagtttgttgacctgcatttcttcgcccatggcttcggcagcctcatcgcgtttggcgcggcgtaatttggatttggtgcttttcttgcctccgctgccggcgagtttcgcctgtgtttcgcggatcttgtcctgtatcgctttctggtcgatctctttttcttcgcgcggaacaaacctgctgcggtttccgccgctcctgttctgtccaccgccacctccgcgattgttgttattatcgcgggtgaacccacccctgttattggcaggtgtgatcggcctgttgggacctg

SEQ ID NO: 78259 - DNA, 515 bp, Arabidopsis thaliana landsberg
  unsure (1)..(515): unsure at all n locations
tttggatcatgtctaatctgtcgatcaggtatatttcaaatttttaaaagtcattgcagacttagcatccgagggatttgtttaatttttagnnnnnnnnnnnnnnnnnnnnnnnnnnnnnnnnncttgtcggattatgaagctttggttttcatttggtgtagtaccttattcattgcaaactgtttgatttttttttcttctaaaaaacgtattcactctttctcattttataagatgttttagctaaaacacacaccaaaattaagaaataatatgtattaaaccatttataaaaatgtacgaacagaaataaaaagctataaaattcaaatggtcataacatattaaataaacattaattatgcattaaaatataagacaatcttataaaatagaataagaggaaaaaaaaaaaagctaaaacattctataatttggaacatagggtatagcttgtttcaggattagatgtaattttcatatcgaggcttttctcactcatattttatcat

SEQ ID NO: 78260 - DNA, 464 bp, Arabidopsis thaliana landsberg
  unsure (1)..(464): unsure at all n locations
atagatctgtgtaagaaaaaatcttaaaattgtgtgaaaaaacttagaacttagtttgaaacaaaatgaatacaggatttaattaaagtgaggaattattaagaatataacgaaaacgttgagaactgtaaataagcatgttgatccgtatgatcactcttttacatgcatatatctctgcattgctttcgccctaaatataatctctctcccgcctcaaacacgtgaatgtgaatgaacttatgaatataatcatatcacattttattagctctcttgttgaaatcagttgtgtgttgactaaagactaccagcgattatttttgaactttgatatttgagaaattgatgatcaaaagtcagcaaatacggagatgaggaaaccgctagctattacaactaatttggcttacatacggtctattattatatctatattcacagntttttttgggtaaccatca

SEQ ID NO: 78261 - DNA, 420 bp, Arabidopsis thaliana landsberg
aattacattagataattttattgttatccttaagttttaaatttattagcataatttttacgcacgggtttatgggtatatatgttgatttaaagtagatttgtgtgcgctcaaaattacataattttttttaaaatgtaagtccctaatttttttattttttatttagcttaacagaactcagattccgtccaaaaacattcataaatcttttcttttttttgatgataaaagaaaacgagctgagatatatgagtatatgaccactggataaatcgatggatcatatctattaagcagggacatatgacagaaatcattgtgtctttgacgagtgctaaaaccccacattactctattttctacagtgacttaatttgagtgtcacatttactgtgtcactaatatgaattggcacca

SEQ ID NO: 78262 - DNA, 556 bp, Arabidopsis thaliana landsberg
gatgaagcagaagaagaagtatgtaaaaagagtggttattgatggttaaacttaaagctatcattgttgtcgtcttgtatggggaggaacactcaaaatcgtttcacagagacttgcaggaggtttcttattttatgaggacaagaggtgagaagtataggaagcccacagttggttattttccttttcaagatttttcaacaattaataagaaatattatatgaacgtatctctaaatcaattaattattagcatttgttttcataaaccttgtaagacatcccccttgttctctaaatcaattactgtcatcctctttctaagtgaaaattgtatttatttttatcgactctaagttgtttaaggggttaaaatactaattacaaaaacacagtctaaaacataaataataaatacgtttatctcttacatattacagctgagatttttgtattagacgtataaagatttttggggagattggatactagggatccttgttagaactaagaaggaaaacaaactattttacatatgtatatttcgaatataaat

SEQ ID NO: 78263 - DNA, 487 bp, Arabidopsis thaliana landsberg
  unsure (1)..(487): unsure at all n locations
cnnnnnnnnnnnnnnnnnntgtcaatatcaggcctttttacgtttaggcagattttgtacaaaaagcgaggaaaagggtcagcgatgcactctggatcggcatattgctggctatcatcgtagcgatcatctttctgcgctcctggaaagccagcagcaccatcctgatcactattcccgtcacattagccttgtcgctcattgtgatgcatgccgtaggatataacttaaatatcatgactctcggcgcgatcgcagcttccatcgggctcattgtggatgatgccatcgtcgccgtggaacagatccatcgtacccatgaagagcatcatgatgaacnnnnnnnnnnnnnnnnnnnnnnnnnnntccattatcttcttccggcaatgattgcctcctccatcagcaccatcgtgatctttacgccctatatcttgctgagcggngaggccggggcttatattaaagtattgggcaacagcatgat

SEQ ID NO: 78264 - DNA, 404 bp, Arabidopsis thaliana landsberg
ttacggtgctatgttgcccagtcccaacgaacgagtggtgtcgcacggatcggatttctctgcccacccacctgtgacagactctggatcagggaccgtattgtggaaacatcatcgacctacaaaagggagtatgacatgggtaactaaaccgccgaaacacctgtatcaacatgatgtgtcgaatggcaataacacaaccctgccataccgtgaaacaacagggacaccgagcctactctatgctaagaccatgttactgttaacctaacctccgtgaaccataacaaccaacattgggtctcccacgaagttacaccagttgtcgctcggctacgccttccgtcctgatggtgaaccctgactgcctctccgcggactatccttgcgggagcacccttggc

SEQ ID NO: 78265 - DNA, 549 bp, Arabidopsis thaliana landsberg
  unsure (1)..(549): unsure at all n locations
atcgttgaggttagaccgattcagaattttgaataacattgactgaaagcaacaaatacgagtttatcaatttgttagttagtcatctttttcgacatgaatcgggaaagatgactgctgttttagcgcgtatgtttggttttgaccgcattgaaattgcagaagatatagcgcaggatacacttctaaaggccctaaatgaatggagaagtaagannnnnnnnnnnnnnnnnnnnnnnnnnnnnnnnntggcaaaaaaccaggcacttgatttattacgaagagaaaaactgttcaatgaaataagtcaggagttgacttatttttccgggcacgaagaaaatactttaggtaaactatttttatcagacgaaatagaagacagccagttgagaatgttgtttgcgtgttgtcacccttccattgcattagaatctcagattacactaagtcttaaaacattaggcggtttgagtacttctgaaattgcccgggcatttctaacangtgaagacaacatcaataaacggctatacagagcaaaagaaa

SEQ ID NO: 78266 - DNA, 494 bp, Arabidopsis thaliana landsberg
  unsure (1)..(494): unsure at all n locations
gctgaaggccagctagcctgcagtgcacagtacagcagcattcctaataagagagaccattccttgatatcgatgcaaagcaagannnnnnnnnnnnnnnnnnnnnnnnnnnnnnnnnnnnnnnnnnnnnnnnnnnnnnnnnnnnnnnnnnnnnnnnnnnnnnnnnnnnnnnnnnnnnnnnnnnnnnnnnnnnnnnnnnnnnnnnnnnnctggagagtgaggcagaggatctcaagttcaagccctatgtggacttcagagtaaggtcaagaccaccctgtttcaaaataaaaggtcaaatgaagactgagctatagctcagtggtgaagtgcttgcctgccatgctcaaggccatcggctcaatccccacagctgcagaagttatctgtacattatgcgaagaataaagactaaacagactatggggagcccctggagtcctgagtgcatgtgtatttgtcgacaggagcttggtgccttaaaaccatggaat

SEQ ID NO: 78267 - DNA, 523 bp, Arabidopsis thaliana landsberg
  unsure (1)..(523): unsure at all n locations
cggatccggcctcagcgggggctgggcggccaaagaactgactttataaatggcttacggtgctgatgatcgagagagggcagcagctggaacatattaaagggtacaagnnnnnnnnnnnnnnnnnnnnnnnnnnnnnnnnnnnnnnnnnnnnnnnnnnnnnnnnnngcaagacccacgagtttctcagccgcgactatccttacagcgaattcaacgcgagttactggttcaaggattccgacgccccttacgaggagaagcagaaattcgactggttccgcccggacatcgtgggcggcaagtcgatcatgtggggcaggcagagctaccggtggagcgacctggacttcggcgccaacgccgccgacggtcacggcagcgactggcnnnnnnnnnnnnnnnnnnnnnnnnnnnnnnnnnnnnnnnnnnnnnnnnnnnnnnnnntcagcgggcagaaggaagggtacgccccgctaccggacagccattttatgccgccgatggagatgaactgcgtgga

SEQ ID NO: 78268 - DNA, 276 bp, Arabidopsis thaliana landsberg
ctgtattgctttttgtttttaggttgaatggaccaagaccgacccaaaactgcaccgacggtgaacaataatttctaatttgattagtttttaataaaccgacgactttttgaccgaaagcttccataaggagttaatatggttcctaccaaaaaatggcaggggcctactgtgtgctgcgttttgtcaaaaaccccactattgtatattattttttgtttctttggtattactatcataccaacatatcattgaccacgaataagacctaccgcg

SEQ ID NO: 78269 - DNA, 581 bp, Arabidopsis thaliana landsberg
aagcccatccatgtggatggtcagagaagaaacaaaaacagggaaatctcagacaacacaatttcgctctattttaactctcagtcgacggaccacattttagcacacaacaggcgaattaaaccttgagaaaataaaatgttgccacaccaccatctggcgaaacaactctcatatcgatacgatggttaaaacgatatacattatgtgacgatgggatacttcttaatacatcaacatcttcttcttcatcttcttttttaaggacaacctttctttttaaacgtaaacccttgttccaaagtgaaaaaggggtgtggggctttttttttttccagggggaagaactttggaaataaaatttttttttaagcccaaaccccacttttattcccaaaaaataaactttttcccagaaattttggaggacccgaatgggcccttggggaaaatatttttttttggccccccacccctttttttacaaaaaaaattctttctcaaaaaggggggggcgccccccccccccgcccaaataaaaaaaaaaaaaaaagagggggggctttttttttttttttttt

SEQ ID NO: 78270 - DNA, 530 bp, Arabidopsis thaliana landsberg
  unsure (1)..(530): unsure at all n locations
cgaccaccgcaacgaccagtgggtgcgccgcaagagcaatgtggtccttcgcttttcaccagtcgtcgctgctctatggccagacgctggccgagaaggggcgcataatcggcccggaatggggccttgacccgctcgactacgccggccatggcggcagttttccggtccgtgtcaagaaggcgggcgtgatcggagcgatcaccgtatccggcctgccgcaactcgacgaccatcgcatgatcatcgaggcgctcgaacaattcctcaagctcgaattgccgaaattctgaaccgccaccgccacatcagtgttattggaggcgggtagataatccgacgcaaccgatcaatcacaaagcatatggaggacgaccatgannnnnnnnnnnnnnnnnnnnnnnnnnnnnnnnnnnnaagagggcagcggaagtctcacttctcagagcggagcgctctcgaacttgccctattcgttcaaggctcgtttcgaggacgaatccgggcagtcgggcaccaatccggaagaa

SEQ ID NO: 78271 - DNA, 566 bp, Arabidopsis thaliana landsberg
gaatttgttggattagtagccaaacatattcaaatttggtgggcagataagaaatagacaaattcgttgaccttaagactttcgctgccactggatcacttttctcgttccagttggcctacctcgccagttccacgccatctttcataaacctctttttgctttcattatgatgaaatactttgggttataaaaatatagagtatgtatttgggtatttatatgaatttattccgcataagtgtacgaaaattatactgtagatggcaattgataaagcatccaattatatatgtttgttatttctcctaaacctatatatatatcttttgttggaaggagtaaaattgtattctgaaaaataaaagtcccgagtccgagtgtgttatccttctaatttcaaaacatttagggttacgagtggtaaatatatctttaagttctgacatcaactaagcgtatttatgtaatgggaattgatctttgatttcggttaactattttagcggtttgcaggagtaggtatttaaataactttgttaccaaatgacaaatgtcagaaattg

SEQ ID NO: 78272 - DNA, 311 bp, Arabidopsis thaliana landsberg
taccatgcgccataccagggcgaaccgggatgatcggagaaattggaaggcgccacaatccatgaaacagttggcaaccggccggtctttacatcctgccttaattgatataatacatcgcctttaggaatttgcatggttcgtgttgtgccattatcatcatacgtaatggtttcaaggctgcggtaatctgcatcgttgctgttattgcaaaacgctttttcatgcaggtttttttgtaatgatgaaagcttttcgaagttttcgggcgtgtatttattaatggcatcttttacataatcgtatttatg

SEQ ID NO: 78273 - DNA, 506 bp, Arabidopsis thaliana landsberg
actcgatgtcggcggcagggtgcgcttgctgcacgtagtgctcaatcaggatctggaatggtgttgaatcttcaaggatggccactttcatgtctgaaaaccctccttacaaaaaaacgggttcatgcaatcgtcatgaacccatcttagtccctttggatcagcagggggcttccccaaaaggaatccccctcgtatcaggcgggtagcatctggcggatcaggccttcggcgaccggcatggtcatgtaccggggcacagcgtacgtaaagcgcgcttcattcagggccgacttcgcaatctcacgaatgtcttcctgcttcagtgtcgacaggtttggttggaatgccaaacttggcattcatgtcacgaatgcgctgaatgaaagcctcggcctgttgctggtcgctgccagtggacaagccaatggggcagtaacgggccaattctgcaagcgtgccgtgcaatcaggcagagaataatccagcacataaggcatcacatg

SEQ ID NO: 78274 - DNA, 499 bp, Arabidopsis thaliana landsberg
cccatttatttatcactatagagatataaacatttttgcaaatcatttatctaaatatacaataggggtttaaggcgagtatataacaaattggcaagtgaatcactgaattgattaaccgaatagtatgactcgtatctaaactaatacttaaaaagatcgatgttagagtatctccattgcaaatatttcatatggattatacaaaaataataaaaagtagaataataataaaacattttagctttctcaaatagtagtagaaacccacataaaaaaagtttctattttttctctataaaaaaccttctttggattttttccgtactgaaaacttcttatattttattatttttaatatatatatctctattaactcatgtgagattttctcattttgcaatgaaaatgtttcttttaaaagaaaaaaaacatatgaaaggtgaccatccttgaccgatcgagctaaatcaaaaaaacgcttcttgcttgggtcatg

SEQ ID NO: 78275 - DNA, 480 bp, Arabidopsis thaliana landsberg
cggcgtccgcggccagcaccggcgccgccggctggcgggcgcggtcggcggcattcatcgcctttgtgctggtgccggcttgctcctgctgtgcggccggggcggcgtccagcggggccaaatgggtgatgtcccgatccagcgtgcttttcacgccgaaccagagcgtgggcacggcgatcaccagcgtcagcaccacgtaggtggccgcagtggcgtagcggtcgaacaggaagcgcgaatgggagatgccgccactggtcaccagcggcgcgtcgacctggcggatgcggtccacttcgagctggatggaggcgtcgttgatgcccaggtggcgcccgtacttggcgatgtagctgcccaggtagaccttggagtcggtgccgtcgtactgatccagtttcagcttgcgcaacacccgcaccggcaaccgcagtgcgttggcgcaggcctcgagatcgagcccgcgtgcctcgcgcg

SEQ ID NO: 78276 - DNA, 564 bp, Arabidopsis thaliana landsberg
atgttaatgtaaaagttcacctcctacactttgtgtttaatattgattatttttgtgattagtataacggagaactctaagaactaattttgattttcgaattttattttattttgtttgcttcacttttgcatatctaactaaaatgactatagctagtaatagttttcgtaaatctgaataaaagttgcaagatgtatgtacaacaaatagtaattgtgttttatccatctaatttcaacaacaccaaaaatgatctcacgttgatattgtgggatattcaaaaagttagtacacgcagattgtccaccatgtgtgtcataacatcaacactttatggtaaatcaagaatgatcagagtaatgattagcaaggttactctaggtattcgcgatgctctgtaaagttggagttcatttctccattgccaattcatctgctcttaataacgctaataatatgctgatttaatgttaagaaaataatctgtcttcttaatttcaatatggatactcagtttgagagaaacgaatttcaactaatcatcttgagacataaccatgt

SEQ ID NO: 78277 - DNA, 105 bp, Arabidopsis thaliana landsberg
gcagagggggcacctaacacaaatgcggagggagccgaagctgggaatccaagaaaccccgcatcgaagcacccgggcaaagacgcaaacaggacatggggctat

SEQ ID NO: 78278 - DNA, 433 bp, Arabidopsis thaliana landsberg
caggggtagtcttttgtaaggacgcatatgatttttatactcttgttcccggcagccggttacggggcccggggtctgtccgctaccaaagccatgcccaaggaaatgctgctcggtggtcaacaagccactgatccagtatggcgtttaagaggtactggatgccggtctgaacgagatctccatcgttaccgggcgcggctagcgtgctttggaagaccacttttacattagctacgagctggaaaatcagatcaagggcaccgacaaggaaaaatacctggttggtatccgttcgtctgctccaacgagtgctcgttctcctacacccgtcataccgaattgaaaggcctgggccactccattctgactggccgtccgttgatcggtgacgagccttttcgcctggtgctggcggacgacctgtgcttga

SEQ ID NO: 78279 - DNA, 582 bp, Arabidopsis thaliana landsberg
gaacaatcatatcctcgtcacctcgctctgcgttccagtttgcgacgtcggtatccaagatgtcgtgtccatagacgcacataaagtcgatccgaatgcggtctccgggcatggtctacggtctgttgaacttgtatagatgcaggctatcattctcaatattctcgagcagtgaatagtgcatctaggccgctatagctcagctcttgtagctgtcgccccagacctcatacgtgagctggtgagccggagtttgccacatcatctgcgtgcctgcgactctcagccacctagaatttgggtgatccggtggaggacgtgaaaggacccaggggatctcaccggagccggtccagaagccatgctcggacggcttccaggaatctctgtcgttggcgacgtggtctggcttcttgagttctggcaagtatgggtgaagtgcccccatgcgatagcgaatgaagcctagcggagggttgttgatgatgttcccagagacgacatacgtgtgcgggttgccaatcttatacgaggcaatcttggggatggcgctgtcctcgaaccagagctagagctagtttg

SEQ ID NO: 78280 - DNA, 355 bp, Arabidopsis thaliana landsberg
  unsure (1)..(355): unsure at all n locations
tcgcnnnnnnnnnnnnnnnnnnnnnnnnnnnnnnnnnnnnnnnnnnnnnnnnnnnnnnnnnnnnnnnnnnnnnnnnnnnnnnnnnnnnnnnnnnnnnnnnnnnnnnnnnnnnnnnnnnnnnnnnnnnnnnnnnnnnnnnnnnnnnnnnnnnnggcgtgcttgagttcctcggggggattggccatgggacgagtcgatgatccggagctgcgaagaggccaaatggtagcaccgcgcaccgcaccgtccgctgtccggcgccacattgccgcgccgcttcacaggcccagcgagagctcctccgcctgcacccggcccatgtggatgccgttggcgaacagcgagaacgcgagct

SEQ ID NO: 78281 - DNA, 269 bp, Arabidopsis thaliana landsberg
tgacctgctcatcggcttttgcttaggtcaggcttgatcgatgataccatctgggcaacagacaatgggattttccatgagaaggagttccctctcatatccaacgtcagatgatacttcatcccagtgaagcattacggaggccaaccggtgtgcatgtttctcgccaggtccaaccgcttttacctatataaatggcagatgcttggcggtcacttaccgataaacccgttctcatgaaccaccgaacacttctgctttcagagact

SEQ ID NO: 78282 - DNA, 337 bp, Arabidopsis thaliana landsberg
ccttacgcacaccgggaccggcgggggcgggccggcgtgccggtgcgccgttgtcgcacgcagatcggcgcggaagaaccacgggaacaccaggttgaccgtggccgtggcggccagccagggcgccgccatcagggcggtgaactccatgaaggacagccccgcctggtggaacgccagcagattggtcaggttggacaccggaagcagcagcgaggcggtgttggccaggtgtgcggtcgcataggcgtgcggtcgcatcggggcccggcggcggcgggccatcatcagcaccaccggggtcagcagcaccaccgtcgcgtccaggctcagcacc

SEQ ID NO: 78283 - DNA, 561 bp, Arabidopsis thaliana landsberg
atttgtgtattttcgttgttggaaccaacttggaattatgcaaaaagaattaaaatataattatgcggagatagatttagtttagacatggaaattcagttatcgatttaaacggttgagttttttttatatatattattcttccgttttgcataccaaatagatacaaattttatttcggtttttggttcggtttaggataaaaattatcagaaaactaaaattattaattaatgttatagaaaatttagtatatatgatgaataaacactaggcaataccgaatatctctaacgccatcactgctattgattatcgtcgtctctttgtaaactatactgtttttaattataattcctacttcccacgaaaaatgaaatatattcgaacatgaaaaattataacctagatgagacaagaaaaatgaaaatttcttgctaattcttgtttcccaagtaactgaaaaaaaggcttgtgcaaaaggttaatgctccaattttcatgaggtcatgcaatgctactccggatacgaactcatccaacgataagccgaaccaatca

SEQ ID NO: 78284 - DNA, 559 bp, Arabidopsis thaliana landsberg
ggtaaatatcaactttaaaatgagtttaaagagtccattctgtatcaaaaacttaacatttagaaaactggaacaaaaccaggttataaaattccaaaagggtggaaagtattctcatcgtttagagcggttcatttagacccaaaccacttcaaagatgctcgcactttcaacccttggagatggcaggtttgtattttaagccctgaacttggtttgggtgttctttctttgcattcttgattttgagttattgaacgattgcaattctgtggaacagagcaactcggtaacgacaggcccttctaatgtgttcacaccgtttggtggagggccaaggctatgtcccggttacgagctggctagggttgcactctctgttttccttcaccgcctagtgacaggcttcaggtatatataccttcacatagaagatagtagctctgttttccatttcaaaaggctaaagagactgatttgattttgttttgtaaatttggttgaacagttgggttcctgcagagcaagacaagctggttttctttccaactacaagaac

SEQ ID NO: 78285 - DNA, 533 bp, Arabidopsis thaliana landsberg
ggagtggtctcgttaaacttctttttagggtataaaaaacatatctccaagtcactaaagtagttacaaattttatgtagaacaagatttggaaaataggtcaaaacaatatctaatttctttaggacaaatatttgtatttgttaatgattgtgatagattttaccgttagtcatagttgaaaaacttataacgtatatataatgactgaaaaatgtattgatttacggattgtggatttgataaaaaaaaaaaaaaaactacaaaactgattttgcggaattgtgtagtcggtggagtagtttttgtagttgttgcaatcaattagttgttagaacaattaatcagtgctttagtgatttaattaaatattactagttgttaaaaacggttttgtttgtaaattaataacgataatgttggtgggaacgaacgacaatgaaaacgtcccgtgacgaacattcccggtctcgtggtcatcagaaatgctagttgtaattcattaagacagaattaccctttatttatcggac

SEQ ID NO: 78286 - DNA, 289 bp, Arabidopsis thaliana landsberg
  unsure (1)..(289): unsure at all n locations
aaaaaaaaaaaaaatcactgtgtggggagggggggtttatttcaatcttgctgtatcgcttacccataagaccagcccttgttgaatcggtggagaaccttttatcctgtatcgatgtgaatccatannnnnnnnnnnnnnnnnnnnnnnnnnnnnnnnnnnnnnnnnnnnnnnnnnnnnnnnnnnnnnnnnnnnnnnnnnnnnnnnnnnnnnnnnnnnnnnnnnnnnnnnnnnnnnnnnnnnnnnnnnnnnnnnnnnnnnnnnnnnnnnnnnnnnnnnnnnnnnnnnn

SEQ ID NO: 78287 - DNA, 321 bp, Arabidopsis thaliana landsberg
  unsure (1)..(321): unsure at all n locations
cgcctcctgcatgtggggcggggagcacatgcactgcttnnnnnnnnnnnnnnnnnnnnnnnnnnnnnnnnnnnnnnnnnnnnnnnnnnnnnnnnnnngggtnnnnnnnnnnnnnnnnnnnnnnntgactacattttctggaatgggagatcgtaatctatataaaatccctgagctgcaagctcgaactgagcattggcattcaacatctggagacttctggcacctatcactatacaagatgcactgtatttctaaatgagctcactgggacatacaatcacgcgcttggagtgcacagcttaccaagctcacaacatt

SEQ ID NO: 78288 - DNA, 583 bp, Arabidopsis thaliana landsberg
  unsure (1)..(583): unsure at all n locations
ctatctatcttgtcctttccatttcataatgctaacaagttctaaaagatcttttggtgtaatttactttagatttttgagtcgaaactgctattttcttatatatgaatattgttcttgtgatcccatttgatttttggtgtcgatagagtctacgtatataacaatgtctactttgaacatcatttggaaaaaaaacaaaaacaattagtttgatcgtttgatttgaactgttaataaaagtaagttaaatagctgtttgattttgattgcatcaattattggaactacaattatttcacactatcatccaacttgcttcatgatgtatccatttcaaatcctaaaaattaatttccaacttcatttgttaattgcaatgtgtatactatttgtgccgatagtcaaatacatgatacatctacaattctacatacattatgtaattatacactttggcaaatatatcgccactaatcgaggaaaacaattgctcataccatcatactttntttatttttttttgataagttcatacaatcatacttcttggcaagttggcagttaattatctttaatttat

SEQ ID NO: 78289 - DNA, 556 bp, Arabidopsis thaliana landsberg
aacgaactttcacaggttgtttcgtgaatgttgcaatgcgagctcatgtgtcgcatggtagcaaagagcgggtaaggtctccctcttccgtcgttcccccgcatgatcccgcaatgactaccctgctagtctcccatcgcctccacgccgaacgtggtgccgacatcgcagcccatgcgcagcgtcttggcatggtgctggaacccgtggtgctgcccgccgatcccgaaggccggctgtctgatgccgattgcgctcggctcgacctggcatttttttccaacgacatcttcccgatgcattcgcgccagtttttttcaacggtgcgcaaagcgcccggattgagctggttgcatgtgttcaacgccggtgttgatcatccgatttacaccgaaatgctccagcgcggcgtacgcctgacgacttccgcgggatcgactgccgtacccatcgcgcagaccgcgatcaccgggctgctgatgctggcacgcaatttcccgcgctggctcactgcgcaacacgaacggcgctggcatccgatgcggtcgccggattt

SEQ ID NO: 78290 - DNA, 388 bp, Arabidopsis thaliana landsberg
cttgacataaccaatattcaaagaaaacttttccaaagcattgtcaaataaaatatcttcatatcattgtatttcttcgttttaaagcttggggttttcattaatttatctatttcaaaaaaatatttaaaatcaaaaataaaagaaaaaatcttaatcatattttcatacaagaaaagataattaatttaatgatacattactcaactaaatatgtgttattaaagggtaattaatacaaacaaatctttagcaagaattcatgaattagttttctttaattaatattttagaaaaacaattgattaattatttctcattttcttggtgaatttagttagacattcatatatttcgagggttatttttctccctttggacattttgg

SEQ ID NO: 78291 - DNA, 443 bp, Arabidopsis thaliana landsberg
ctaatgtatgggctttaaacagtttaaaccacagtaacgttctgttttaccggactccaaagctatactccattagagtttttttcccccaaaagggagaaaagtcgttaactatttggcacgtgtattgcatgagcaccaagtaagtctaaatctgcattaaatgcgaacatccgagtcgacttaacaccttttgatcaaggctttaacgtgtcgttgttaccatagaatatagatgatagagcgcattttatatcactggatatagacacgtggttaaacttaattgggttgttagttaagttgttgtgctacctccaagtgactttatcatatactctctgtgtttctggtagtaaaaaaaggtctaaaaccatagtgttaagcaaaagagaaaaagaagagcagagcacaatccctaaaattttcaactctgttttgct

SEQ ID NO: 78292 - DNA, 610 bp, Arabidopsis thaliana landsberg
  unsure (1)..(610): unsure at all n locations
ggaagacgaaaaagaaaatgcccctgcatggcagaggcatttgtgcggttttgttgccgggtgccggttttgccttactttgcctacacgatcgtaggcccgtgcaagcgaagcgccgccggnnnnnnnnnnnnnnnnnnnnnnnnnnnnnnnnnnnnnnnnnnnnnnnnnnnnnnnnnnnnnnnnnnnnnnnnnnnnnnnnnnnnnnnnnnnnnnnnnnnnnnnnnnnnnnnnnnnnnnnnnnnnnnnnnnnnnnnnnnnnnnnnnnnnnnnnnnnnnnnnnnnnnnnnnnnnnnnnnnnnnnnnnnnnnnnnnnnnnnnnnnnnnnnnnnnnnnnnnnnnnnnnnnnnnnnnnnnnnnnnnnnnnnnnnnnnnnnnnnnnnnnnnnnnnnnnnnnnnnnnnnnnnnnnnnnnnnnnnnnnnnnnnnnnnnnnnnnnnnnnnnnnnnnnnnnnnnnnnnnnnnnnnnnnnnnnnnnnnnnnnnnnnnnnnnnnnnnnnnnnnnnnnnnnnnnnnnnnnnnnnnnnnnnnnnnnnnnnnnnnnnnnnnnnnnnnnnnnnnnnnnnnnnnnnnnnnnnnnnnnnnnnnnnnnnnnnnnnnnnnnnnnnnnn

SEQ ID NO: 78293 - DNA, 549 bp, Arabidopsis thaliana landsberg
  unsure (1)..(549): unsure at all n locations
gggccgggccgccagcgagaagatcagcgccagcccaatgcacatcgattacttcgcgcgcctgaccttcacggaaatcgccgccaaggcccgcaggctgaaagccgagatggagggcgctggcatccacctaggcgttgtttgcatcgatcatatgggccttgtgacgccgtcggatcgttatgctggcaacaaggtggccgaagccggggaagtgtccggccgggctnnnnnnnnnnnnnnnnnnnnnnnnnnnnnnnnnnnnnnnnnnnnnnngctctcccgcgatgtcgaaaagcgcgaggacaaacgcccggtcatgtcggaccttcgctggtccggcgagatcgaacaggatgcccatgttatcggcttcctctaccgcgaggaatactacctgaaccaggaggccgatcccgacattgaaaagcagcgggaggcccgctggaagatggaatttcttatccgcaagaaccgcaacggcgccaccgatgacgtgcgcctttggtgttcaatcgcccattcaagcatcanggacaatctatgagc

SEQ ID NO: 78294 - DNA, 509 bp, Arabidopsis thaliana landsberg
  unsure (1)..(509): unsure at all n locations
gatgagggcaagccgctcgttttcctggccagcggcactggctttgcacccataaaggccattgtcgaacaaatgatcgccagcggcgaccagcgcacggtcactctgtattggggcgggcggcgtccggccgacctgtacatgcacgacaaagcccggcaatgggagcaatccctgccgggcttcaagtatgtgccggttnnnnnnnnnnnnnnnnnnnnnnatcactggcaggggcgcacggggtttgtacatcatgccgttgtggaagattttccagacttgtcggggcaccaagtgtatgcttgcggtgcacctgtcgtggtcaatagcgcgcgtgccgatttcacacatcaatgcggtttgccggaaggcgaattctatgctgacgcttttatttcagatgcggataccttatgaatattaaattcgatgcgtgccaacagcgcaccgtgcgacgtcttgtgggcgccgcagttagtggccactggcgtgggggggttgggcgc

SEQ ID NO: 78295 - DNA, 364 bp, Arabidopsis thaliana landsberg
  unsure (1)..(364): unsure at all n locations
aagccatcgaggccgatgatcgggcggatgtccatgcttggttaatcggtgcgctccagcagcaggaaggtgatgccctcctgcttcttgccggtcttgtcggtgcgcaccagcatgaacatgcggttggcgtgatgcgccagcgtggtccnnnnnnnnnnnnnnnnnnnnnnnnnnnnnnnnnnntcggacaccgccgcgcattgcagcgaggcgagatcggaaccggcgttcggctcggagtagccttgcgtccagtagacgtcgccggcgaggatcggcggcagatgcttgcgcttctgctcttcggtgccaagatcgatcagcatcgggccgaccatctggagacagttcggcaacagcg

SEQ ID NO: 78296 - DNA, 441 bp, Arabidopsis thaliana landsberg
  unsure (1)..(441): unsure at all n locations
taaagacaaaaggataagacttaacattaccaaaacaaaagaaccaaaatcaaaattgaatacttctagttacgaattaaaaaaaaattgagcataaaatatggattttttaacgtatactacaaaatacaaatattgtgatgaaagagaccaaccaaacaaaaccaagttgacccggtttgattcgttggtatcttggttatatgagtggttcaccacaaacaaatttaaaatacttaacaggcccaccaaattggctagatagcccattaagtttcactctgtgtagaacaaatgtccccagttgttcaactaaaaacaacttattgggcctaaaatgggccttttaaattgaagtagacggttggtgcagaagactatgatngatttaattttgagtcactttttcaatatttncgattttggatgatttattcatga

SEQ ID NO: 78297 - DNA, 611 bp, Arabidopsis thaliana landsberg
aaaaagtctgtcaatttcaaagaaaaaatattatgtttatttatttaagttgaatatttattcgtgtgcataataataatttatttttcgtatagacattttttattctatgtgaatgtatgtaactagttgtttgttgttacatgttaaaagtatgtactattaagtttatatggtttcaataaaaaaaattcaatactttttatgatgaaattatttgataaaatttaaataaatgaaaattgtttttttaacaacaaaccgatcatattaatgagaatttattttaaaatagaaaagccgtatgcaatacacgttatatttaatagaaaattcgtagtcaaatgatgaatttaattagcagtttaatttttaagaagttaaagatttagtcaaatgatgaatttaaatttattcgacaacaaaaattatcaataaatcaaaaatgtaaaactgacgattattctatgaaaagtgaaaacacaacggaaaatacaaataataatgatgagtttggggttttatttaaaaaaaataataataataatattggttttgacaattagataaaaaaagtaaacttttttttgcttctcctttgtttattttaa

SEQ ID NO: 78298 - DNA, 643 bp, Arabidopsis thaliana landsberg
  unsure (1)..(643): unsure at all n locations
cacaatatggatatgccctttaaggtagttnnnnnnnnnnnnnnnnnnnnnnnnnnnnnnnnnnnnnnnnnnnnnnnnnnnnnnnnnnnnnnnnnnnnnnncaaaaacaactttactggaaggctctgtaagggtcacgaaagagaataaaagcactgtcatatcacctggtcagcaggccaggctgaaggatggtaatatcaacgttatcgccgtggatacaaaagaagttacagcctggaaagacggctacttcatatttaagagtgaagatatccagagcattatgaggcagatatcacgctggtataacgctgaagtagagtatcagggagacatttcaggaaaagttttcggaggaagaatatcccggtccaggaatgtatctgaagtgcttaaaattttggaattgaccgggtctatacattttaaagttattccgggagattctgaaggaaaagaaaggaggataatcgttatgccataacctgtactatactataaataacaggggagcgaaaaactgaccggtgcgctgcgaacgcaccagccaggtctgtctctacgacaatttaaggcttacctgtttatgaatgcgatatcaacatactttaataaacctaaacaattaaatgtatgaaat

SEQ ID NO: 78299 - DNA, 113 bp, Arabidopsis thaliana landsberg
gggggcaaaaaaaaaccccgcagaacggacacaggacaaacaataagccgaaaaaagaaggcgacggacccacgggggaaagcaaaaaaaaaaccacggacagcaagaaaaca

SEQ ID NO: 78300 - DNA, 569 bp, Arabidopsis thaliana landsberg
  unsure (1)..(569): unsure at all n locations
tcctcccacgacgctatcccgccggatcacgaccgggctgnnnnnnnnnnnnnnnnnnnnngccggcgtgatcatgaccgacgacatcgacatggctgcgcttgccaaagacatggaccgcaaatcggccttcatcgcggccctcgccgcgggcaacgatctgatcatggtgaagaacgtcaccgatcacgaccccaatttcccgctgcatgccgtgcaatgggtggaggaggccatcgcaagcggaaccctgtcgcgcgaggccatcgccgcctccgcgcgccgcgtcgaggccctgcctattccgagctgacatccttgtgagcaacgagatagctctggcgcttcaacaatatatgatttaatatattgtatattgatgaattccgcgaggcttcatgagcgccgtcaagatcaccgaccgcctgacggtcgcgagccagcctgacctcggccacatcgccgatctcgcaaaagattacgccaccctgatcaacctccgccccgacggcgaggacgcggtccagcccggcaacgacgccgaacatgcggcggcggctaacgcaaaa

SEQ ID NO: 78301 - DNA, 489 bp, Arabidopsis thaliana landsberg
  unsure (1)..(489): unsure at all n locations
cctggtaggcccggaggccctcgacagcggtgcgggtgcgctcggcaaagtcgcggttgaaatttagctcgacctccggccattcgcggggtaccgcattgttgaggaaaaggacggcggcgatctggccctcttctgtcagcggcacggtgacggccgaatggacgccgatgcccttcagcgcataggaggtcgcggccgtacgcgggtccttgtcgacatcggcaaagacgacggtttcgttgcgcttgaggtcgtcgatataggtgccgtatnnnnnnnnnnnnnnnnnnnnnnnnnnnnnnnnnnnnnnnnnnnnnnnncagtcgcgctcgatcgtcaccgtttcggcaatcggatcgatcgtgccatagccggcgcgcgtcacatgcagcgccttgccgaggatctcggcggcggcataagcaatttcggcgggttcggtggtctggcgaatgcagtctgcgaggtcgatcagcgccatgcgcc

SEQ ID NO: 78302 - DNA, 597 bp, Arabidopsis thaliana landsberg
aaatattatgatattacatggcgtacgctgtgttactgtagtgttaaaaatgatttttgggtctattcacttgtttggcataaagacttaggttgatcaaatgtactaacagttattcagttagtgattgtgataataaagtagaagggttttaatttcttgtttataataagtttcttcatgagaactctttatgaaaactttctttgtccggtttggattccgttctaatttttataataattgacaaaaaagaatcaaattcttcgtggatcaaaaattatttccacattttcattttcgtttctgtttgtcaatgattttcgaattttctgaaattgagttctttacaaattcagacaataaaaatgtgtgattggattagtctagtgatagtagggctgacttttaatcaggaccattaattgtaatccgtatgaaaaatactttcaaagataaaagccgataaatatgtacgttttcgttaatctatcaaacaattaataattgtgatcttcaagtcaacgtaacgtttacacaagacgacccatattagtggcgaataaacaaacatgacgatcccttaacatcagcgcg

SEQ ID NO: 78303 - DNA, 654 bp, Arabidopsis thaliana landsberg
gcgccgccagaactcggtgatgctgacggagaggtaggggaaattgaagttctccgggaagcggtagccgaacatcgacgcgaggccgagggcgatcagcgaatagccgccgaagtccgcgaagatttgcaggctgtaggcatagagcagcgggaccaggaagaaggggctggaggtggcgagctgctcggtgccgatggtgagcaagccggtctgctccgacaggttgtccgccacgtaaaccttcaggaaatagccgaggatcagggtgcggatggcctgctgccaggggatgtccgcgaagcgcttggcggcgatttgcggccagaactgcttcgccttcacgatcgggccggcgacgagctgcgggaagaagagcaggtagaagccgatgtcccgcacgcccttcgcaaagcggctgccgcgggagagcatcgcatcgccctcgcgggtcacctcgccccgggcgacgtccacgatcatgctgatgccgtggaaggtgtagaaggagatgctcgatcggcagggggatgtccttgagcgcacgcacccagtcggtcggcacaaagggaatcatgcccgcgacgaagccagcgtacttgaagacggtctgcagcgcgagattcagtatcaccggcaggcgggtccagaact

SEQ ID NO: 78304 - DNA, 465 bp, Arabidopsis thaliana landsberg
  unsure (1)..(465): unsure at all n locations
gggcccatatcgggacgttgcatgagtcgaccgttcggattttagaggagatcgtncatggcagtttaggccttccatcgtgcgcccgaccttcacggttccgggatccggcgtgcggccgcagcagggcaggggccggtccgcggtcgtgccgacgacgatgcaggcagcccggccacgggcatcgtgatcgccgcggcgctgggcgcggcgatgtggggcatcctcctccagctggtattctgaagcccggcttttagcggaacggcggttcgttgaaggcgcgcagcttgcggctgtgcagccggttgccttcggcgcggagcaggtcgcaggcggccacgccgatcttcaggtgcgcggcgatcgcctgttcgtagaaccggttggcctggccgggcagcttgatctcgccgtggagcggcttgtccgagacgcagagcagcgttcccgtaggcacgcgga

SEQ ID NO: 78305 - DNA, 476 bp, Arabidopsis thaliana landsberg
  unsure (1)..(476): unsure at all n locations
gatgatgctgtaggtgaggccgtcatcagagaccgtgaccgagtcagcgatattgttctcaagagtaccatctgctctatagacgcaagaggccgtcatagatcagggccgagaggtccttatccgcccgagtgaccgcaaggaccggattcacgaaccgtggtacgcctnnnnnnnnnnnnnnnnnggttccgccccctgcagcgatgcgaacggtgtagtgcatgcttacctgtatgaggaatgccagtatgaatacgccgaatacgagaagtgcagcacgcatcaagaacctgtcgcttgcagaaagcgcttgtgaccagccaaagaagcgatcgagagcggttttttcggtctcggaggctcagacgagtctccgagtggagaaagataagaacgcatgggatttgctccaaatgtgaattaagtacagggagggtccgagtgcgctcaaggcgcacggtttctagtgaagt

SEQ ID NO: 78306 - DNA, 530 bp, Arabidopsis thaliana landsberg
acgccgagcgtcgcgatctacgacaatccgcgcaccttgacggagttcgtgcagcagacgatcaccgtgatctcctgtccggccggttcgcccgccaccatctgctcaacgggacaaagggtccggaccagcagcaataactcggtgaattttgctgacgacaatggctggttcttcgatctgccggatagcggtgagcgtgccaacaccaaccctactcttggtctcggtacgctaggctttaccaccaacgtgccgaattccagcgcctgtacagttggcggttatgcttatggctacttactggattaccgcacaggggctgtcgtatcgacgtcgagcactggtgtcgacggtacgctgctgggtaacgcgctggcgacccggccggtgtatgtgcggctttcgaacaataccgacggcgaactcactcggttgtaggacggcaccacggtgacctcaaatgtgccgatcgggggtggcgttacggcaacccggcgcacatactggcgtgagctgatctctgaata

SEQ ID NO: 78307 - DNA, 503 bp, Arabidopsis thaliana landsberg
accgcgctcaacgcctcggaggccaactacaccgcactaggcacctacagcggcgtctcaatgtcgtacaaggcgccggtcatcgtgctcagcaacctcatcaactacccgcaggtgcatgccgcagcgcgcgctttgactcctcgtggctgtggcacaacagccgttgaaagcttactgtctccaggggtcggcaggcatagagtcagacttatcccggtctgtttactcttggcaaggctgacgcatcaccttgtgctgctgagcggtgctactcaagggaccggcgtcggcgtagcttgtgactggttatttggacgggcattggcgtagcgtgtgctcaggaagactgactcgttggtgctgccgctgccgccgtcgccgctttgcaggggtactactgcctgaacatcgtggccacactgctcaagggctccgcgcaagtcaccccctccagcggcgcgccgtaccacgccccgtctgaggacatgaccatcacccgc

SEQ ID NO: 78308 - DNA, 636 bp, Arabidopsis thaliana landsberg
catccgctacatgaagcgcgccggggtgaagtgaaaggacgatactgggtcgacgcgaattcgtttatctggggcgcaagagatccattcccgatgccgggcatgatggcctattggtcttggtttgaaaagcaggtggtcgctggcaagatcacctctcacaagatggtgatcgatgaagtgctcaccgggacgaagaagaccgacaccgatccgctcatcgtctgggtacgttccagaaaagacaagctgaccgactcggcacccgactcgaaagagtgtcaggaacttgttggtaagctatgccagttttcttacgacaccttcggaccagccaaaacggctgagttcacgcgcggcgctgacctttggctgatcgcgcgggccaagctcgatgatggcgctgtcgtcacgcaggagagtgacaagaagcctgtgcgcatacccgcggtctgcaatcagttcggcgtaccgttcaagaccatctttcaaatgaacagagaactaaaaatacggctctgaattgatcttgccatagcagaagttggtggtgagattattccgcccagatggtcatatagtctcagccagggggatgaccaaactctcgatgcgagataaatcgccgatacacac

SEQ ID NO: 78309 - DNA, 458 bp, Arabidopsis thaliana landsberg
tatgataaagttggaatataaacagcttcacatgtattatttttttatgtggatgtaatggacacgagcttgggttggtgattggtcgcctcttgccaacaatttctgttatagttgaaatgtatttaaacattaaaaaacatgaatgaaagttactcgtaagaaagaactggccgttcaagtacaaaagtggaatccgattatccaccgaaattgcaattaaatattgaagatttgctttagggaaaagattggcatgctatatttataattaaaattttgatatgcgtagaataaagtttgtggagtatttcatatccaagtggccttgcctcatacgaaacttgccctttagtaaagcaaacaacgagcgtaatggatattgcttaaataataccaaagttacatgtttcaaaaaatagtattagttttctaaatgccctttaattagccatcac

SEQ ID NO: 78310 - DNA, 447 bp, Arabidopsis thaliana landsberg
  unsure (1)..(447): unsure at all n locations
ggaacccaacaagagccanncgngctgnggacccggacataaggcccgaatatcacccggggacgaacccgaccgagaggggcacnagggaccagaaaccgccgaagaacgaacaagaggnnncnnngggcccnnccaggcganncggaaaaaaagaaacagngaacagaggcaagacaaggacgcannaacaaaagaccgncgcaanccagcccagnncaacagagccgggaggngacaaggccccgaaggaagaaccggacacggacagggccaagaagaccgcacacgcgaacaaaaanccgaggnnggaacgaaaccaacnnacccacgaacggaagagggggggagacacgnnacgccacgagncagaagagagaaaacaagananggcagagcnanncacccaaacacaaaccgagccggagcaggngcagcacaagggag

SEQ ID NO: 78311 - DNA, 567 bp, Arabidopsis thaliana landsberg
caaaacaactttggttgactctgtcaagaataaaattagatttgttctcttattttagcgtaaaataagggatctgaattaaggatatcccattatctctggacttggagctatatgatcagtactatcattgaatttagacacaaattggttataagggtgttcgtttaatatagtttggtattcggtttttacaaaataaatttgaaaatccgagacaaattggatattcaaaataattgacagatcgtaaggtttatttttattgaagatagaatacttttaattattattgtgagtcggtcttaggttgttgagacgaaagttaattataagaatgtttgtcacaacccattactaagtctaaagcatagaaaacttgggatgactaaacttggggtgacttgtacaatatcaaaaatcgagatcattgcctcggacaataataaattccacaaaagtgcgagtgactagtgtccacgagactagtggttgaagattaagacttgaattcattccctctagaagtttatacatatttcagacccaacttttaattaacacttt

SEQ ID NO: 78312 - DNA, 493 bp, Arabidopsis thaliana landsberg
tgacttcacactttagtcttttttctctaactactttacaattttaaaaaagggagaaagacaatgggaaaataaacctgtggtgtttatatgctctagtgatactatatacccaactactgtaattggtatttatttgtatcctatgggcgaaaagcctacgttaagaaataagcatgcgtttgatttaatatctctacaattattcaacttttattagcatgtttaatggtaatttagggctagggactatatagtctatatcttacagatgtaatatattgattaccaggtacagatcaagaacttgcgcttagctgtctatagtttgagatgataaatgaactaataaaatgcacatgaatcattaatcatcttcataaataaaaatcatctgttaagtgtaaacacaaacaatttcttatttttattacctaatgcgttggaaacaatcaagagaagcatatgatgatgtcacagaagatgtggactg

SEQ ID NO: 78313 - DNA, 292 bp, Arabidopsis thaliana landsberg
cggtagttggtaggatttttttttttttttcctttaattttactttgaaaattgaggtttctcgggccatggttattttttattttctattttctaattgctattatagaatttttcagattaaagcttttcttttgaaaatagaggccatactccaaaaccttaattatattatttttactatgattaagaaaattaatcatcgaagtcaactaactcggatgatctacgtacattggatgataacttgactacttaatttaaatttaactctaaatgaccttgtcgggta

SEQ ID NO: 78314 - DNA, 427 bp, Arabidopsis thaliana landsberg
ccgaagaaagtctggaaaacgccggtcttgctgagatttcctatgggcagcagcggggcgcgccagagggcaggggcgcgcgtgaccgccagatagaacacggcgccgtcgccggtgagcgccagcccgttcgggctgggcacattgccgatcaggacatcgagcctgccgccgggttccaggcgatacacgcgcccgctcgggtcctgcagcccgggctggccctggtcggtgaagtagcatcagccctgcgcgtcgaaggtgaggtcgttgacgcccttgaacgattcgctggcgcggaggcccagtatgggttgcatcgacccggttgcggagtccaggcgcaggatgccgtgcctgtagtcggcgatccacaagctgccgttgcggtggaacgccggaccgttgggcccgcctttatattgcg

SEQ ID NO: 78315 - DNA, 292 bp, Arabidopsis thaliana landsberg
ggagggtacaaagtacggatggacccctggatgcttatcttatacttgaaaggacattggctcgcgcgggggggtttctgaggacggtgatgccctataaggtaagcgatccaggatgcgtatcattcccttggtcacgcagaccctgagggcgcaacatcacgccatgagattcgtgaggtgcacgagcttcgatgccgatacatgaagcctagtgaatgctataagataagtgcaagccgaacagcatgaatcttatacaagctcatggagccctgatagcgccttatgg

SEQ ID NO: 78316 - DNA, 604 bp, Arabidopsis thaliana landsberg
aatggtatttactatatttgataaacacatattgaaagattaaaaacagatacataaacatgaaaatcaatattcgaaacaatggcataaattgaactgttaataagacaaattttctattcgaaacattttcacgagattcgatgtggtgctgactctttagtcaaatatttttcactacacaactaacatatactataaaattgtagatattggaatagcaaaaaatagcgagaatgtttttttaagaaaaatctataaaattgaatacgatgtgcactttttttctttctattcagggtatagataattgaccatttgaacatggggtcttgttttccttgtaatagtccacacgaaccagtctatgtttgcctgaaaacatatccagattgggtcattctaaaaatgtcacctatataataaactgagaataactatacagacttacaaagttttaaaagcctgttaagcattttaattttaaaatcccccttaactagatacgaagaaaagttcttaaaacacttacgatggtatgtaggagtaaaaccatctattaagcttatttgataaattaggtatctccgtgtgacaaagaaca

SEQ ID NO: 78317 - DNA, 139 bp, Arabidopsis thaliana landsberg
ttcaacggttaagccctttgcgtttggcgcgtttacgcgttttaagcgtttagcgtcgcacgcgctttaggcgtttgagggttaggcgtttgagggtttaagcggttagccgtttaggcgcttaggcgtttaggcgttt

SEQ ID NO: 78318 - DNA, 397 bp, Arabidopsis thaliana landsberg
aggttcatagttcttggaacggccgagcgacatagcccctttttcggtaaggtatccgccgattacgaagagaactatcgtaaccatggctatatagcttttgtttctccagaaaggtaccggctctattcctccatggccttctttttcatcagccagttttttcaggttggcatttacctgtaataaggtaagcgctaccacggccagtatcagggtaagaacaccgaacagcagggtattatcgctttcctggcctttttcagccgcaggaccggcagcgggaccggcttttgaaggatcgggaacggttttgatataatcaaagatcgcgtcaatttccttttcgctcagggcggagaagctggtcatcaacgtatgcgcgtactctttgatc

SEQ ID NO: 78319 - DNA, 420 bp, Arabidopsis thaliana landsberg
acacccgatcaatcttaccagggagcttgaagcgctgggattgacattttcgaacttcagcgatattggcggcagatgtcagtggccatctttcaggcctactcgccacgtgaaaaaacccattacctattttctgcaccgcggcctgcgtcgtcagggtattcgcgcgaagcgcggcgggatatggactgaaatggactgcagcttccgatttcaagcaactgacaccgggcaataaaaagcaccttgaagagatccctctctggcctttcgccttgaccatgggctggattttgatgcagagcgcgacctaaaaaccctgggccggctaagatgaccgaggtgtgaccctgatccctgacttcgactcaagcttctgtatctttacactgagttcacggcaaggaagagcactagtct

SEQ ID NO: 78320 - DNA, 188 bp, Arabidopsis thaliana landsberg
  unsure (1)..(188): unsure at all n locations
caaagcccgnaacagngaacccnncgtcggagcccagagatagagccgcatacaccagccaagaggcagcgacgncngagggagcgaggcgacganggcccccggagaaaagaganccgagangaangcnnaaacacgancggagacaancccgaggaagaagagaccgaacccgaacacgaaaccaa

SEQ ID NO: 78321 - DNA, 474 bp, Arabidopsis thaliana landsberg
  unsure (1)..(474): unsure at all n locations
aaagacccncacgcccacgccccaatcgncctcccggaggaataatagcccccaaatgatccccagacngggaccgacgccaaagggcgcnctatacagangacccccaacgaggaaaagaacggcgagagccaaaggaagacgagccanaacggcaagccagaaacacagcgcncgaggacggaaacccccaagaaggaggagaacggcagnnccggaaccaagggagggaccaaaaaaangacnacccgagccgggggacggagcacaaagagaccacagacccagaaaaagagggccgaacccggggggacgcggnaagacacccaagaaancangccaacgaacaaaaccccccccggaagcaggaatagcgacaaggacaaaaagaccngnccaagccaangagcggaccccgaacagnccagacaaaggaagacccagacgagacgcacgcaagggggaaccacgaaa

SEQ ID NO: 78322 - DNA, 111 bp, Arabidopsis thaliana landsberg
gtacaattttaaagaaagatgtagtgcaaaagcctaaatcgtaaacaaaaaccaaaaactaacaaaataaaaatgaaatgacaaccattcttttttttgggtggggggggg

SEQ ID NO: 78323 - DNA, 298 bp, Arabidopsis thaliana landsberg
tggatcatagtaagcttcgcgttggagtttttcactttttacgtgtcttgcattaatattaaccggaagcgggctcatttttgttcttttatgattacatatataacgaaaaaaacattaatctttctttatctaattcgatacataaagttgatgtatcctctaatcttctcttttcgctattcgaccaagcacgtgcccttctttatcacattaatatttattataaaccctatttatttatttatatatacgcacatattacaaacatttatggttaaagggttgacgtgtatat

SEQ ID NO: 78324 - DNA, 212 bp, Arabidopsis thaliana landsberg
  unsure (1)..(212): unsure at all n locations
ccaacaccaangncncaagcggagcagcgaaccacacacccaaaagccacaancagaggccgaagaaaggaangaanaagaagaccggaacccccaaagacgacgaaaccacaagnagcgaccanaaaacaacaaaaggaaaccccaganagagaacacaacaaaaannacnagacaggagcgaagccgagcaaaanccgaagaaagagaac

SEQ ID NO: 78325 - DNA, 123 bp, Arabidopsis thaliana landsberg
tggccgtacaccacgtgcgacggctaagacgtttcatccggtcgcgagtgatggcgcaggtgtggtttatgtgtgaaaaggttatcaaaaatagttgccttaagcccttcttgcccgaccatg

SEQ ID NO: 78326 - DNA, 338 bp, Arabidopsis thaliana landsberg
  unsure (1)..(338): unsure at all n locations
atgtgcaaccccagcatggtggtgttctttgaaccgtccatggggctggctccgcagatcgtngaggaggtgttcaacatcgtcaaggatctgaacgacaaggaaggcacgacctttctgctggccgagcagaacaccaacatggcgctcaagtacgccgactacggctacatcatggaaagcgggcgcatcgtcatggacggcccggcgcaggaactggccagcaacgaggacgtcaaggagttctacctgggcgtgggcagcgcggagcgcaagaacttaaggacgtgaagagctacaagcgccgcaagcgctggctggcttgaaatgcagaacaa

SEQ ID NO: 78327 - DNA, 530 bp, Arabidopsis thaliana landsberg
cccgttgttgcagcagcatttccttcctgttattaaaaataaaatcactgaacgcccggtgcagcacgggcggggggggcgctgccattttttccatagtgcctatggcgttatcctgttcatctaccagtatcacatgttccatatacaataactatgctgttcagagaagattcagctgtttcctgatgcctgctttcgcaagtatcagcagttttccatgatcgggtatgcgcactctttcgttcaggatagactgcggctgcattttccggattttgttgaacaatgaataataatatttatatgccacatacaccccgaacctggctttccatggcaggcgtatgatgccttccatcgcgtgctcaaaatctttctgcacctctgcttctatggcctgtttatcggtccgtgtaaaattcccgaaatcgcattcgggaaaatacatcctgttcaggtgctcataatcagctctgatatcccgcaaaaattcactttctgaaaaagccgcctcaggctttgcgcat

SEQ ID NO: 78328 - DNA, 477 bp, Arabidopsis thaliana landsberg
ataactctcagaaagttgtcggaaataacccccaaaagttaagaggctttgagtagggcagaactttttgggtaacagagtaaaaactagacaaaacttctcctcaaaaagtaattataaaactggacaagtttgccaaggataattgtttcagggctgagtatctaacaaagacaaatgactcatccagaagtatttgttctgaagctttgtgctgggaccatacagccggtgggctcagcctcccgggatgcccttccctaacctcagctctctcttgtcatggaccgacctgggcagattaggctctgaaaactgctgcctgctgccagggggtggcttgacttggagcagggcacatgcacaagggcattgtcacaaacaacagtggtatggagatctgttgaaggtcagcacctcagccacatgagtttgtaaaccggtgtggcaagaccaacacacagccaagggagagct

SEQ ID NO: 78329 - DNA, 621 bp, Arabidopsis thaliana landsberg
ttggacctcactattcatttagacccaaaatgtaaaatagtgccttgaaacagagggtttcggttcgtgcaagtcaatttctattggctgtaacggtttaatcctggtttagtaactcaagtgttatatacgaatcaaaacagagtcgctgttctgttttgttaatcttcttcgtcattcttgattacgagttgcaaggtttatctcggttcatgtacctgtaatcgatagatatagtagatttgatacagaacatggagaatcacatgcgatttagttagacttaattgtcaaagacaaacactatggacatttattagtattattgaccacctgattttgccataaggtcataattcatagaagcaaaaacagaattagatcttacagaaaaagatatattatattatatcccaagtgtttatttttatccttatcaagttcagttcaattcaacctcagcatcagcatcgccattaaaaacatatatgcatatagagaattgcaattaagaagattctgtaaccattattaattagaatatttctggaaacatttgctactatgtcatgattcaacaaccatcagattatgaagaaaccatatgactaacaatctgtt

SEQ ID NO: 78330 - DNA, 568 bp, Arabidopsis thaliana landsberg
  unsure (1)..(568): unsure at all n locations
aacgtaaggtaggtgcgttcagcgggtaaaaacagcattttgtcgtattccctggcaatatcgggctgaatggtcggggcgccgcagaccagctcgataagcccgtccatattagcggcaatacgatgtatggcgccgatgaaagcgtccttgccgcctcccaccatgcccattctcagttttcggttcatgatttgtctgttttcggttgttgctgcgttatggcagttgcgataaatgtaagcagataaaaaaatgcggaaggcaaattttatcaatcgggttttaaaaataaaaaattacatttaactgcggtattgnnnnnnnnnnnnnnnnngcttttcttcatcacccaaagccatattctaccgttatgcaaacttcgtttcaacctaaccggctttttcttgccagccggatagcgcttatcgtaactgccatgacatttgctttcagggcctcgctcgaaggtatatggggtacaganattcacctgacgaaagaagaggtccggtggatattcagtcccgccttctggggttttacccttgccatgatattcggcggc

SEQ ID NO: 78331 - DNA, 513 bp, Arabidopsis thaliana landsberg
gacgatgaagccgaagcggatttgcttgccggcctggactgtccgttcatccgcgacaccaagacccctacgatttaccactggccggcgccgcctgtcctggaacaaaaacgtcgttgcgttcggactggcatcgggttttatcgagccattggaatccaccagcatccacctggtgcaacgcggcatcgcgaccttgatgtccctttttcctacgcagggaatcaatcaggcggaagtggacctctacaacaagctgatggcaacggaatacgaggctgtcagggattttgtcatcctgcattacaagcaaacgcatcgcgacgacacaccattctggcgtcaggttcgggacatggatattccggaaagtcttgccaatcgcatggcggtctttaccaatatgggccgcctcgtgctggatccgggagaattattcaaggaaacaagctgggtttttgtcttccttggacaggggctatggccgagaggctatgaccctcagccgatctc

SEQ ID NO: 78332 - DNA, 167 bp, Arabidopsis thaliana landsberg
acacccttttgaaaaaaaaaacaaaaaggggagccagggagggaagtggagaaacagacacacccacaaaaggggcaagatgactgacaaagccggagaagacgaggcgcccgaagaaaagaggcagaaaaggggccgagaaggaaagtggaacccacacgacaaaa

SEQ ID NO: 78333 - DNA, 484 bp, Arabidopsis thaliana landsberg
aacaaattacagtcagcctttttttattattattcattggctccgcgtgggcttcacgcgctccttgaacacggcccacttaaccagacaaatcaaggatcttccattagctaaaccgtattcgaaccgagtaatgaatctctctttaaccggtggtactcttatccaaacaaaaatatccacgactatttatatccgatttagattgttatctctttctatattttttatttacttgagtgaaaaacatgaattgttattctaaaaaaccattataagaccgaaaattatcaaaacataaataatgtaagttttcagtgttttgggttggtcggacaggtctaatccgatcgagacatgcctaacaatatcttctacaatttaagatgaaacatacgatgaatacatacgtgtatatttgctgatataacatcagagacaaagtgcttgacgagaacaaaatggaataatggtatttttgggg

SEQ ID NO: 78334 - DNA, 200 bp, Arabidopsis thaliana landsberg
agcatatatacggggtttaaactaacaggattcttaaacgggggctggaagagcccacttgaaaatggcgtttgcgttcgatgtagctgaaacgtctaggcggaccgggcctagtctgaagggcccgaggtgagagccgcggcccggaccctgtgccagaggcgtgctacatggttgtggaatgcagccatcggcggaaa

SEQ ID NO: 78335 - DNA, 612 bp, Arabidopsis thaliana landsberg
ctcggcatggtgctgtcgacgctcggctcgatgggtttcgacatccaagcgacgatcgacaaggtcgtcgccgagggcagcatcatcctgctcgtcgacttccagaccaaagacttctcgaacacgacggccgccggtatccaggtcttcctcggttccggcccgagcacgcccgcctgcatgacgggcgagacgtacgacgagacggcgaagaccggctgcggtcaccacctcacgccgggcacgatgttctcgagcgcgacgggcaccaatgcggcgctcggcggcaagatcatcaacggcacgttcaacggcggcccgggcaacctgtcgatccagatcgccctcggcggtacggaagcgatcaacctcgacctgatcggcgcgcgcgcgaagggctcgggcatctcggccgataagatcgacggcgtgatcctcggtggcgctgtcacgaaggaagacatcgacacgaaggtcatcccggcgattcagaagcagctcggcccgatcatcacgcgcgactgcccgatggcgacgatggcgaacaactgcatgtgcatggatccgtcgacgggtaaaaccatcgtgaacctcttcgacacaaacaaggac

SEQ ID NO: 78336 - DNA, 161 bp, Arabidopsis thaliana landsberg
ttggcggctctctgacattctgaactctcactctactgtgaccttttgctcctcttactagtttaaaaccgtgtctcagcaatccaggcactggttatcatatcctcattatttgatcaacaagcttttattaaatgaatccctttgtgacattgtttggt

SEQ ID NO: 78337 - DNA, 441 bp, Arabidopsis thaliana landsberg
cgcgatagcaaaatcaacaattttgtttttagccaaaaggagatgcaccattcacttattgtcggtgatacaccaatttagacgctaaagcacggcacgcataccagccaataaataataaaggcagcatgaacatatacatgtacattcaaggatgtatttgtacataccaaagaatgccctaccattaaaaaacagagagaaaaagaactaccactatgactccggcaacatccataacaaaggctgacagaaccaccgacacagcatagagcatattggtgttcgcatagtattacatcgagcctaaggagcaatatcagcaaagctaagccgtcgatgcaaaaggcaccaaccgaaggagtcacattcgaacactcgcatcacgagacaatctcgatcttatctcaaatagtaatcgttaccgaagcaccgaacaat

SEQ ID NO: 78338 - DNA, 106 bp, Arabidopsis thaliana landsberg
gatgggaaaactgaccacagccagtgcttaatagtcgccggagcatgctgcaacagacacgcggcaagagcccagggctcctcgccactgcttgcgagcttacggc

SEQ ID NO: 78339 - DNA, 348 bp, Arabidopsis thaliana landsberg
agacggccctggtggaggaggctgtgcgggaaatccacatactccccagcaactgaccgttctaggagatgacgcctgccgcggtactgtctcatcatatagcggctagagccctatggatgggacaggtgatgccctacttagcccctgatctggctgtgaccactgcagaacatgctatgcgtactcccctcgagatttgatctttacgaaggcaaccgtagttattatggtgcgacacgataagagctagtcaccaaatgctaaactaggagatgcgacacttgcacccgaatggcgtccactgcacgggtattaaattactctaacgtcttgcgtgaacgggct

SEQ ID NO: 78340 - DNA, 147 bp, Arabidopsis thaliana landsberg
ctgtccagattatctatacatcaaactcctacaacgttcagatatgtggcataaaacagctgtggagactggattgtacccaatctagtgaaagactggactttttcatgttcgtttacgactggctgaaactcctaaaccattaga

SEQ ID NO: 78341 - DNA, 412 bp, Arabidopsis thaliana landsberg
ctgaattggtttttcatttgcatgcaaaatatagtattttaattataaatcattcagctatactaggcatgggaaaggtgaattggtaaacgaagactttgtctttattttattgaatcattcaacaaaaaatatattttgcaatcattcaacaagttaaagggttctttgtaattttcttttgtaaaaacatataaaactatgactagatgcaccatgacttgaaatgccaaatcatgtacctattacgcttgacacccatttagagaagcaacatgttattcatgatcaacttataaagactgattatttataatatattaaaatgagtgttaatataaatgcaaacatgtaacaagaattaggaaaatagtttgcatgacaattcgaaggttgaaaggttttactcatc

SEQ ID NO: 78342 - DNA, 595 bp, Arabidopsis thaliana landsberg
gtagttcgatacaagctattgatttctgttacggtagaaataatatttaatgtttgtaaatgacatgttgcaggttgtgaagaagattggtatggtgggactgttcacaagagggcttcctcttagaattgtgatgatcgggacgttgactggagcacagtggggattatacgatgccttcaaagtgtttgttggcctgtaagttcctctctctcttcacttactttcgtaccttaattgtaccttcaaaatgcaaaactctcaattcttttgatttggtattcaggccaaccactggtggtgttgctccagctcctgccatcgcagctactgaagccaaagcctaaacaatgacgaaaaaggttattaggagttcgatggggtaggatttttgtttggaaaaataagagaaaccatacggtgatgaggaagagtgagtaagctcaatttcttcctgatttgaactttatcatttttgttttttttgaaatttgtgttcctgaattcaggataatgctctctctctctttacatactctcttcctattggttcttgtccttttttctttgtgtgatgtaatcttaaaagatgaga

SEQ ID NO: 78343 - DNA, 409 bp, Arabidopsis thaliana landsberg
  unsure (1)..(409): unsure at all n locations
tcgcaacacctgaaagaatgagtaatgggatggcttttaagttcaacgaacttcgaagttcttttaggagccagagtcgagcaagctcctcttctggggaaacttcaaccttttcttcctcatcggtagcgaccttctttcccgttcgccgcgcaagacccggggcttggggatccatgatgccactaactgttatccnnnnnnnnnnnnnnnnnnngtcctactagcttcttatttagcaccagatcgaaatgtagctgagaaatgcaacaaaaacaagtgaatgcttnnnnnnnnnnnnnnnnnnnnnnnnnattacagggcgcaagtcagtatactctatctttcccagagggtgttatccacaaaattcaataatctgtattgcccaagtgagctacgacacttt

SEQ ID NO: 78344 - DNA, 669 bp, Arabidopsis thaliana landsberg
  unsure (1)..(669): unsure at all n locations
gaggatcaatgttctctttagttcggatgtacagttttgtttctgcttgtgtaccgaaaggattctcagttcatggctcgtttacacgactcagagatttgacaattgatctttgtagtgcgagaattgactaacataagtataaatgatctcattgtcttcaacttcaagctctgttagtgttacatgtaaagaagaaataagaacaaagacagatgctttcaaacatatacataagcaaatgcttaagaagtttatatacagtgaagacactatttctactaccatgttctgaccagtcctggtgtccagtttcgccagtctagcttcgaaagcgacttgtttaagttcatcttatccctaagatcaagaaccttcttacgataactactaccttgcttctttagctcaggctcactctctccattgagctcagctttgattatctcttctgtttcatcagcaactggcggaggaacgttttctgcttcttcatcgatgatgcgtccaagtagtgatacgacttcgctcattttaggccgagatttcggttgcttcattagacatttgtttgctaaagcagctactctttgaacagacttcatacagnnnnnnnnnnnnnnnnnnnnnnnnnnnnnnnnnnnnnnnnnnnnnnnngagtctgataca

SEQ ID NO: 78345 - DNA, 466 bp, Arabidopsis thaliana landsberg
catttaatactatgagctttgttgaaattaggttttttggtttatgaaaatttcactaacccattcggaggtagctactagtttaaacaatggtgatattaagcgattcaataacttaaaattaacagtaatcctacacaccaacttagttgttaacaaaatctaaaaccaaacaattcaatgaaatcagaccatgtcactaaataaatatatattctcttctgtcgattatggcactacttaaatttttatgtatgactttagagaataggaaaaagatcatgtttcgtcgtcatggaattctagaaattaaccctttgcaatataatagggtgtatagttgactttggaagtattcttgacttccttgacacgtgactttataatcatcaatgacgtcatggattcgtagttgtcattaatatcacgataatctgcaatttattcgaataaaaaagggatcgga

SEQ ID NO: 78346 - DNA, 577 bp, Arabidopsis thaliana landsberg
  unsure (1)..(577): unsure at all n locations
aaacaaaaaccaaagaaattgcagtcccaagatctgagtagatgctttccatttcttctatgtaggtgttagagagatgataaaggtaaacacatactagtaagtttgtaaattactgtgttttattatctccatgcttgcatgcgcattttttttgtttcgtctctagtttctctccacattcttcttgggttcttaacttccgacccaatttttattttattataataaccatgacgatggcagtgatatcacaattacattagataatacttgcactctaattaaactgaaaagttgtatggaaatgggtacatgaagtttcatagtcgaatcttttcttgtaagtcttgttaggaaacaaagaaaaacagaacttcgaaaagtggatattttgaagaacaaattcttctttttaagcaaaaaggattaaaaattttttgtctttaaccgatntttatgatgtaaaagttgtaacagaattctaaattacttttaaaagacactttgattttcgttgttgttctaaaaaaaagtactagttgtcatagaagtagttcattttgttttaaaaggg

SEQ ID NO: 78347 - DNA, 592 bp, Arabidopsis thaliana landsberg
aaccattttttctttttacggacaatgtttttaactttggatttatattatggcttattacatacattaattaacaattttttgaatcgagttataaagaaataagacacagacaaaatttaaaaaatgtagaaatagacaaaaattggatagaagaattatcaaaattgcctttttgtttttgttaacgcggaattatgtttttttatttatttgtttatatcatcgtccaaatttttgacagtatttttttgtttgttagagaagggcgagagagagtgactttttttgtttgcctttgttaatggcttgtgtgtgagattcattgaattttttgaaaattctgacgaataaaaaccatatctaccaatcacaaaccctagatttttgttatcttcttcatccgaagattctctttgatctgtgtctccttccttctgattctcccatttcatttcattgattcttttgattcgattctattcgagctcaattttgtagatcagaacccagaatcgaatttgggataacttgaacaatatccttggtaacttggtgatctgaatttgagtgaagaagacatcgaattcaa

SEQ ID NO: 78348 - DNA, 539 bp, Arabidopsis thaliana landsberg
  unsure (1)..(539): unsure at all n locations
tccggcgacaaccacacccgctacgaaatggcagccattttcactttcgtgctcggattaccggtcacctgcgaacaggccgacctcgagcaccaaacagcgtccacgatccagcgcggcgtccccgaagggatggcacgcgacttcacggcgatgtactgggcccaacagaacgggatnnnnnnnnnnnnnnnnnnnnnnnnnncccccacacccaccaacttccacacatggtgtgagaccgtgctcaccccagcagcccgcaacgtcccatgaagacccatcaacaacgctctccggggcccctaagagcaaccggctctggccggggccggccccggccccaagagcatgctgctggtgctcgtcagcaacagggcgccgccaacgtgctttcgctcgctgacggacatctccacccgcacccncctagtgacccgctttgcgcggaaagcgagtcactctcgaacgggctggtggatatcgccggcgccgggcgcgcacatcgccgaaggcagggctgtcgcatgaggcagcac

SEQ ID NO: 78349 - DNA, 617 bp, Arabidopsis thaliana landsberg
ctcttggaatttcaatgccgcttatgcggcattttgcattttatgttgtttgttgtttacatattgcattcggaaaaactgcatctgttttacgtgggcactactgatcatttggctggcagattagcacaacacaataatgcgacatttggccctaaagccatgcatttaaaggaattccatggacaatgtacctgattattgatcaattggatagtggccaggcttatgccatagaaaagcatataaagtcaatgaagtcaaataagtacattgaaaacctcaaggcttttccggagatggtggaaaaactaaaaaacagatattcccaaggtccgggcccatcccgaatctatcggatgggacacagaacaaagcaatgcaacagcggtgctttttctttttagccaaaacgaaccacttaaacagcagatttggcggatcagcaccgcagcttcaccatgggcaaggctggatttacttttcagaataaaccgtttgagttctgcaaacgggcttttaccgaaaattaagaatctcttgattttggcggtttattttcagctgcactaaacagcgtgataaataaaaaatattatagtgaccccgatctgaaa

SEQ ID NO: 78350 - DNA, 394 bp, Arabidopsis thaliana landsberg
aagctcttcattaactttccttggtgtgcccaggcgcctctatcgttataaggtttattgagcatcgaagcgggtgtgttcagcaccctgtttgccgggcatacatcaaaagccgtgatattattttcccggtgaagttagatattggcgatgccgccgatgttcaggcaaagatcgtattcggggaaaaggagctgctcgcctaccggcacgatgggggcgccttgtccgcctagtcccacatccatcgcgcgaagatcagagaccaccgccatgcccgtttcggcggccagcgcagcgccatcgcccaactgggctgtcattccctgcgcgggtatatgaaaggttgtatgcccatgagaagctaccacagtggcctgcagaggaatatttt

SEQ ID NO: 78351 - DNA, 413 bp, Arabidopsis thaliana landsberg
  unsure (1)..(413): unsure at all n locations
cgccggcggctcggccccgccaccccggtgccccacctgagtgctgccggcgcgcacgcgacgccggggtgcggactggtcttcgtcggcctgtccgcccccctcgtctccgaggccatcggcccggcctgacgcgcgacagggtcggacgccgagcttctcgatgatctccagcgtcgccttggagcggttgagcgtgtataagtgcagccccggcgcaccggcctccaggaggtcctggcacagctcggcggccagggcgatgccctcggcccgcatggagaccgggacgccgtcgagggcggcgatccgcgcgacgacctactcgggcacgtcggtgccgatgagcctgccctgccggcggatcgcggagaggttcaggnnnnnnnnnnnnnnnnnnnggatcggcaggt

SEQ ID NO: 78352 - DNA, 612 bp, Arabidopsis thaliana landsberg
  unsure (1)..(612): unsure at all n locations
ggccgcgacgatcatgagcctggaagaaatcctctatcagatcgagggcgcggatgaggccaagcgtgatgccgcccgcatccgccgcgatccagaaaactatttcatttctatttttggcgagccgggggaaaagggcgcctggggctggcgcgtggaagggcaccatctctccttgaatttcacgatcaaggacgggcagatggtgcgcgccacgccgtcgttcatgggctcgaatcctggcgaggtgcgtgagggcccgctggccggcctgcgcgtgctttcggcggaggaggagctgggccgcgagctggtgaagtcgctcacgcctgagcagctcaaggcagccatggtggctgaggctgccccgaaggacatcctcaccgccgccgcgaagaaggccgaagcgctcacgccagcaggcctgccagactctgagctcaatgacaagcagaaggcggtgctcgcccggctgatcgacgaatacctgggccggatgcggccagacgtcgcccaggaagcgcgcgaagagaatcagaaaagcgggccggtgcacttcngctgggcaggcngcgtggagcgcggtcagcccactactaccgcgtgcagggc

SEQ ID NO: 78353 - DNA, 507 bp, Arabidopsis thaliana landsberg
gaggtcacgccgcgcaaccccggcatcacgtgctgtggttctttcagcgtcaggccccggccgatggggtggggggtgcccgcttcgatgacgaagaagtctccgggctccaccggcacgaagcgcagcagctcacgcaacgagccacggccttccagcgcctcgcgcacgtcctgcgcgcgcgtgccctcgcggaaacccagatacaggccggcgttcggttcccggtccaccacgtaccagctctccggcttgccgcactcgccgggttccagccctgcgtagtcgtcgctcgggtggatttgcaggctcaggggctcgtccgtgtcaatcagcttgacgagcagcgccgtgccggagcggccgcgccgccgctcgtccccgagcagcgcttcgggcgctttggcgatgaactcatcgagccgcgtcccgtcctcgagtcgcgcgggaaaatcgggctccacggagacctcccacgattcgcccaccaacaggtccgggctcgtt

SEQ ID NO: 78354 - DNA, 459 bp, Arabidopsis thaliana landsberg
  unsure (1)..(459): unsure at all n locations
ggacaaacgaaggaagagagaaagagtggtcggagatgaatgatggtttatgaggattagagatcggagatgacgtgagattgatcggagagtgaggagagttttgaacggaagtaaagagaggatgtgttcgaggaggtgatttggtaagttagaccagatggttggatccatgttggtcggagaagatagagcggtgggggaagattccggtgaccagtagaggaaagtggaggcggtggtggtggtggtggtgatgtgttatgggtttctncccgtgcgctctcatacttaacatggtgtgaatcatctatgagnnnnnnnnnnnnnnnnnnnnnntcttgaagacttgtgacggtaagaccgaaaaatatcactcaacctttgcgactttgctacttttcgtctataccgatacacatttaggatgtgtcgaaaattaatacttaatccgtaccc

SEQ ID NO: 78355 - DNA, 555 bp, Arabidopsis thaliana landsberg
  unsure (1)..(555): unsure at all n locations
gggcggccacggctcggtcgggacgaagcccggcgactacgtcatcgcctatacgctgccgtagcacggccggattccagtctcgcaaaagctgcaaccgctaatggttccctgaagttgtttcagggagccattgtcatgaagatcgacggcagcacgctttccgcctatgcgctctcccgccagcgcacggcgacggccgacaacagcctttccggcggcacgggcggcggcggcagttcttcatcggggcgcaacatcccgaccgtcgagcccaccgccgcgatgccctccggccttgccaacgcgctctggctgacgacggccaagctggagaaatccgggagcgaaagcgannnnnnnnnnnnnnnnnnnnnnnnnnnnnnnnnnnngacgcccatcgagcggctgcgcaaggagctcctggagaagatgggcctcaccgaggacagcctcgcgcagatgccggaggaacagcgcgcgggcatcgaagaagagatccgccgcgccatcaaagaacgccttggcatctacgacacgcaacacgccggcgcc

SEQ ID NO: 78356 - DNA, 221 bp, Arabidopsis thaliana landsberg
ttcgtattttagaataaaaccgacatgtgatgatgaattgatgatcgtttggttgaacgacctccagcagaaagatgacacatgagaaaaaaaactcatctggggcggctatacatcagcgacaacgaaagagcgatatccctaagccatatatctcgcccgaccgcgatagtgaacgcaaacattatcttctatgtatcgaaggagaggaaggctgtgaa

SEQ ID NO: 78357 - DNA, 456 bp, Arabidopsis thaliana landsberg
ggcaccgcgtagccgcgcggacaaccagccgaacagcggcgtttcgatctttatcgcgacgaaggtggcggcggagaaccagggcagcgcaaccgacccggtggcgccagccagctggtcgcgcaccggccggatcacgtagtacgcggccagcacgcagaaaaacgccagcgctgccagcacttcgtcaccgcgggcgtgcaagatctggcgtgtcggcatgcggcgctgtcgtccgtgcaagcgcgcacactagcacgcgagcccggtggaaacgcacccgccgcgccatgccagaatacgtccaccatggtgagcaaagcgagcttcgaccacatcatcgtcggcgcgggttagccggtttgtgtgctggcggcacggctttccgccaacccggcgcggcgcgtgctgctgctggaagccgggccgcgcgactggcaccgttcatccacatgc

SEQ ID NO: 78358 - DNA, 199 bp, Arabidopsis thaliana landsberg
  unsure (1)..(199): unsure at all n locations
ccacaaacacgggcaaacaagagggaagtggcccaaanancccaaagaaaccacagagcggagaaagcaaccagagacgacagacccaagggaaaagcgggaagaaaaaaaacccaggcngcaaagaacacagcaaaacgcgaggccagaccaaaacaagaagnccaacaggcacacagcaagcaancaaacaagcggg

SEQ ID NO: 78359 - DNA, 533 bp, Arabidopsis thaliana landsberg
  unsure (1)..(533): unsure at all n locations
aaagcgagctatgtaaaatatatttgtatctattacaaccaattttatggaatanccnggngcgctgcacctgggaacatagcttgttctgctcattattaatatctaatactctaaaccacatgtgtaattatgtctaattgggtatagtgtgtaccattacatctttagacttttttagttacatacattttttttttttacgcacacatctctagtttgacctttccattgttttcttgcgacgaaataattgacatgcggtcattgtattatattgtatgatatgaaaccatatcactttccatatcattacttatcaatcatacgtaaataaaaatcgctttccttcatgtaatattactcataaacaaaataacaaatgagcataggtaagttatatataggattagtacacaatccacattatcacatattagagaaaaataatcaaacatattataatttataagtggatatatagtagcatcattatgatagaatatctatataaacattactacttattcgga

SEQ ID NO: 78360 - DNA, 470 bp, Arabidopsis thaliana landsberg
ctcctttccactggtgttttgatttgggacatcagacgattttcaagagataaatctattataacctatagaaaactttttaaaaaagatttcttactctataaaacttaaagaattatatatttcctaaatttaaaatatttacattatatctataaaatattttctatactctataaaatatttcttaagatttctaactatatctacatttgaccgacccctttctattttattatgttgcatatgtcgtcaaataagacctcatagatctctgaaattaattcatgatggatacaaatcgagtggaaggtgattatccaaaggtggtaaaatcattagtaaccccaagctattttggaagtcatacatggagacgaaaaaagtggtcaatccaccagtaaattaaaatagaaaattgtgaaatattgacctcaactcacaagcaaaataattttttgatacacgaa

SEQ ID NO: 78361 - DNA, 493 bp, Arabidopsis thaliana landsberg
tctcccacttgccgctgttggcgtcccagcgcccggcggcatcgccgtctatggagagatagaacagcgccacgcgcccgacatgcagcacatcggccaccttgccatcgacctcggcgcgttccacgcccagggtgcggccgtaatccgcctcgatctggaaagcttcgagaatgcgcttgaacttctccgaggtattggcttcggggtccgccatcaggcgcttgagcgaggcgatgcgttcctggcgctcctggcgcagaaagggcagatccatggagacgaacttgtcgaggctgtcgagcatgcgcagcatcagcggcatgatctcacgatcggtgttgtccatctcggtgagctggcgctgcagcgaagccttctcggcctcctgctggttggcgatctcttcaagctgctgcgcgtagacgttgagctgctgcgcctgccaggtggcggcgcggtaacgctccagcatctgcttggtctgatcgtc

SEQ ID NO: 78362 - DNA, 457 bp, Arabidopsis thaliana landsberg
atccttgatctccgatcccaggagtggccgaggattttcgtttcgagcttcggaatctcaagcgcgaaatgggttgtctccgccttgtcgtcggggatgccgacgaggatcaatggcgcgccgacatgcgtctcgtagtgtccttccatcgccgcgatcttggcaggctgatgctcgagggtgttgagcccgtgctggtcgcccacgaagatctgcaccggcgtcaccagcgctgccatccacatggccatcgagaacatcgttctggcctggcgattgctgctgtcgcgcaacagatgataggcgcccaccgcgccgaccgcgaacgcggtggtgaggaatgccgcgagcactgtgtgcaggagacgataggggaagctggggttgaagataattgcccaccagtcgagcggaatgaactgtccggcctcgtttgtgccgtagcccgctggtgtct

SEQ ID NO: 78363 - DNA, 466 bp, Arabidopsis thaliana landsberg
  unsure (1)..(466): unsure at all n locations
nnnnnnnnnnnnnnnnnnnnnnnnnnnnnnnnnnnnnnnnnnnnnnnnnnnnnnnnnnnnnnnnnnnnnnnnnnnnnnnnnnnnnnnnnnnnnnnnnnnnnnnnnnnnnnnnnnnnnnnnnnnnnnnnnnnnnnnnnnnnnnnnnnnnnnnnnnnnnnnnnnnnnnnnnnnnnnnnnnnnnnnnnnnnnnnnnnnnnnnnnnnnnnnnnnnnnnnnnnnnnnnnnnnnnnnnnnnnnnnnnnnnnnnnnnnnnnnnnnnnnnnnnnnnnnnnnnnnnnnnnnnnnnnnnnnnnnnnnnnnnnnnnnnnnnnnnntccaaacttcgacctttaagtaccttttcgcgcatttttgcggtttgtggcctttttcgggccccaaattactcttcgcaggattgtgttcaaaattctttcaagcatcaaagctcgctaagacttgacgggggattccttctggcaggtgg

SEQ ID NO: 78364 - DNA, 478 bp, Arabidopsis thaliana landsberg
ccacgcgcgagaatcttgaccgcgtaaaggacgtgcgcgaggaagtcgagaagcagcttgaccacctgattcgccaggcgcgcgcggccgagcgctggaagaagctgaaggaagagcgcgccctgcgcgaagccgagctgcgggcgctgaactaccgttccgtcagcgccgaactggagggccgtcgcaaggccctgcgtgaagccgaaaccgcactggaaggcaagctggcgcagcagcggcacctggaagccgaaatcgagcagggtcgcgagacgcaccagcaggccaccgaagccatgaacggcgtgcaggccgaggtctatcatgtgggcgcggaactggcgcgcgtcgagcagcagatcaagcaccatcgcgaaatgatcgaacgcctgcaacaggaccgcgaagagtccgaacgcacctgggccggcctgcttgaccagcttcgcgccgacgatgcacagcacgccgagct

SEQ ID NO: 78365 - DNA, 302 bp, Arabidopsis thaliana landsberg
  unsure (1)..(302): unsure at all n locations
ctgcacaaacaacttactctggggagcactggagacattctacatcacttttcccaaaatttagatcactagaatccttttattcgtttatgagggattatccgcatgacctacagcgtattgaacagctatgttgtttcggcgtcacctgcaaaaagcagagatatgtgatttaaagagtgtttatcttcagatatgactcacacttggtctgcaatttacatgccttgactcattaaagcaactgcgggggaaattacgctttcatattcgannnnnnnnnnnnnnnnnagataaaactg

SEQ ID NO: 78366 - DNA, 155 bp, Arabidopsis thaliana landsberg
  unsure (1)..(155): unsure at all n locations
agaggaaccgaagcacnacggcaaagaaaagcacgacncacagggagaagaagaggcaaaaacgggaaaaaaaacancaggggacgcgncgaaccgcaaaaaaggaaanaaggaagagcccgacgctaagggagaaanggaaaacccatggaaaa

SEQ ID NO: 78367 - DNA, 302 bp, Arabidopsis thaliana landsberg
atactaaatggaggggtgacattagtaaaacggtcaaagaattcttacaagcctgatttgatgacgcgtgtacagttaaacctcacgtaaataggaccggagaactatggaaaagccggttatagggaatgatccgatgaccatcacttacctgatgctatgctatccccgatggactagtgggtctcacctaactatgagcttgcattcaagtttactaaacgtctccatcgtcctatctaacatatatatgaagctctttcctcttctaaagccaaacaaagatattacttgttttgtat

SEQ ID NO: 78368 - DNA, 544 bp, Arabidopsis thaliana landsberg
actccgctggcgcacgggatcggcgcgtagccctcggccacggctgccgcgacgttctttaagcggttgttggcgttgcgcaccttgtcggccagcgtgttgccggcgtactgcgcggtggcggtggtgaaggcggcgcccagcgcgacgagggacagcgcgccgaggatgtgcgcccgcgaaacgagtttcatttccgatctcctgaggcggccccgcgccgccctgttgcgccagcaagctacgcagcagggcaagcccgtgcctcgggagacgttccctattttgagactcgtccgtccctactttgcgtcagcggctgcggccgcgcgcggtgaccggccagatgtcgaccagcgtgtcgcccttcacgatgtgatagctctcgtagaggttgaccgtcgggtcgcaatgcggcggcgtcaggatcacctgctcggccagcgcgggcgccgccttgccctcgggcgcgatcaccgcgaggtgctcgtcgcccatgaagcgcgtggtcgcgccttcgacggcgcccttaaggatcatcggc

SEQ ID NO: 78369 - DNA, 203 bp, Arabidopsis thaliana landsberg
  unsure (1)..(203): unsure at all n locations
aacacacagaaacacgaccaacacccaccaaaccaaaagaacagaaagaacgagaacagaaaaaaggggaaaaaaacaaaacaaaccaaaggaaacccggaaagggggcccaccagaaaacggcagagcngacaagccaaacgcccgaacaaagacccaacaacagacccaaacacaaaccaacaaacagcgacaaaccaaag

SEQ ID NO: 78370 - DNA, 502 bp, Arabidopsis thaliana landsberg
agacacaacaataatgttgcatgaggagcatggatagggttcgctaaaaatctccactttgaccatgcatttgtttatgcatgctcgcacttgagtaatcttgttcggattaaaagtatcacgattgtttatctgcacgtggattgctgctctatcaagagatccctcgaatgactttattccgcgagtgttctcaaactccttatcgcgagctagaatactatgcaaacctacaacacaatcgttaggcttactgctagtaaaggcgtcaaaaaagctgatgaattgtttcaaggtgcctacaacagcctctttaatggcgcacagcttgggactatctagtcttttgaaccgttgtccttgccatctgataaccgatataggtttcaccatactgaatcgctaactacacttgaacacaaagtccaccttccgatcgatgcatactgtggccagaaaagaggtgctaactctgattttgagtactgtctactcacattat

SEQ ID NO: 78371 - DNA, 499 bp, Arabidopsis thaliana landsberg
  unsure (1)..(499): unsure at all n locations
cgtcgtttcgatggcgctgccccagtcgggcggcaggtcgtcgcttgcgattgcggcatatgctgtcgtctcggggccgggatcggcctttgcgaggatgcctttgcgcatgccggcgagcaccgtcgcgccgacgaggtaggggttggaatcgatgccggcggcgcgctgttcaaggtggcggctggcgggcgcgcctgccggaatgcgcacggcgacgctgcggttgttggtgccccaggtcggtgtggtcggggcatagctttgggccgagaaacgccgccaggaattgaaatgcggggcgaagacgagcatggattcgtgcatcgtctcgagaagcccggcgacggcgtgtttcagcagcgcggcaagcgtttcatcccggtcggcgagaggttgtgtgccggccgcntcngcaaggctggcatgaacgtgcatgccggagcccgcgcggccggcgaagggcttggccatgaatgaggccatcatgccgtggcgc

SEQ ID NO: 78372 - DNA, 543 bp, Arabidopsis thaliana landsberg
  unsure (1)..(543): unsure at all n locations
ttcccgggcaacgtcaagcggtttgcctcgaatagtcttcgatggaattatccttcgcaaccaacgaatgtctcaagtaaccgctctcaccggggcatccgcagcttcaaaacgaaacgaatccagccatacgtgcgtatggatgtcgatcatcttgtccggcaaaaaatctttcaagcgttcctggtnnnnnnnnnnnnnnnnntccttgatttcgaataatgaactcatctttgtgcccctcccggtttttagctgtatttcaatttgaatgcggagtatatttctctataggcttgatgcgcagcctggtcgggctctctctccaacttggggaaattcaaagcacggaaggcctccgcctcctcttcataaatccccacacccttgccggccagaatcgtcgcgccgaccgccccggcgcaggagccgttaaccgtatcgatcttccatccgagcacattcgatacgatctgtggccatgggtgcgactcggacggaccgcctaccatcgtcgctccatcaaaatgccaacccgacact

SEQ ID NO: 78373 - DNA, 589 bp, Arabidopsis thaliana landsberg
acgcactttatttctattaatattaaagaccataactatcgcacaacgtttgacaaaattggggagtttttttagatatatactctattttttttatccacctacgttatatagaaaacaacttcacaattggtatttattatatatatttaatccagaaagatatttaatctcggagaacatttatttattatatatgtttagagtatttgtaaaaatacattatttcgtatgtttttttcaaaaatagatttttactatctattttttaaaatatctctctttatgtggtaaatggctaaattatctttctttagtgagagaaagtaattagaaggtcaatttgtcaaataaaaagatttccgccaaaaaaaagttcactaaccgttaaaacaattcccgcctgaaaaaattccgacaatttttttttaagaaaacattttcccccaaaataactttccgatgaaaattttcccgttttggtgggaaaagtgctcctataatttttgcaggatctggattacaagaattttaaaaatattatacaaatatatataagagatttaaagaatttcaaatggtttaaaag

SEQ ID NO: 78374 - DNA, 523 bp, Arabidopsis thaliana landsberg
gtgctgatgctggtcgaagggtcggctgtcgcggttgtaatagaaggacagccttcaagtcattttgcttatgctgaaacttttattgttcctgctgctgctaaaaggtataagctcatcaacagagggactggcagggcaaaattggtcaagtcctttcttaagaatgagatcagactgtaactgagaaccaatttataaaccaaatatatgatgaacaattcttataaattttatctgggtttaattactgtggtggcatctcttggcggcttgctgttcggttttgatatggctgtaatatccggagtgctgccttttgtggaaaaacagtttagcctgactccggtgcaggaaggctggtttgtttcgtctgccctggtgggctgtattgccggggtcgctttttcgggtgatctgagcgatagactgggccgcaaaaaactgctcttcctttcggctgcgttgttcctggtatcggcagtgggctgttcgctggtagattccctgaatttgctgatca

SEQ ID NO: 78375 - DNA, 594 bp, Arabidopsis thaliana landsberg
tggacatttgggtgcacactctctcttttaaatcatgaaccttagatctaaaagtaaatatattttatataatgtgaaaaaaagatttaaaagctgtttttgtcttttatatatccatattgtttgaaagcactcgaaatcctttactaacgtgttggtactgtgtaatagcttttaaacattctgttcacaaattgacaaaatcaaaagcagtccacatctcatatactcagattggaggactaacacttgaaagtggtccattgatcatatagacactctcccagtgcaacaacgatggactgacttccgtattgttttctcatcattacgattattgttttctcatcattacgacagaaacttgaatcaaactaataaactaaaatcattaaaaagttttcaccttttcaccgtccaccggagcgtttcctcctccttattcagcaagtttgttcaccggagcctttcctcctctcttttcagcaagtttgttcaccggaacgttttttaggagatcttttgttcttgtttctctggaatgtagtccagcaagaacagtaatgtgctacgtcatagcttggagtttcttct

SEQ ID NO: 78376 - DNA, 548 bp, Arabidopsis thaliana landsberg
acacataatacgagccatcaagtttaagtcggcagatacaaattatgtgatagcttagttgaattttaagttaaacttagactaaagagaaaacacaaatcttttgtaaaggtttattagtatagtgaaaaggagattaagtaagattcttgtatttaattaatagtaatgacgcgcaataattaaggagtgtaattgcagatgataacgtggacactcaaaaaaccattgaatggtttgcaataattgttagtgaagtaattaatatattaaatgtggtcaggattaggtctgacattttggtaaatggggtcccttatttgcatgtccattttgatcttcatgcacctacagaatcatagatttgtatgtgatcagtgatgacgaattagtgatatggttttatgatcattaacattgttttaatatgataaattaaagatctattttgttagtgtccattgtccatattgatcctcatgcaactacagaatcacagatttgtaggtgatgacgaattcatgaatgataataatatgcgatcatta

SEQ ID NO: 78377 - DNA, 570 bp, Arabidopsis thaliana landsberg
  unsure (1)..(570): unsure at all n locations
tcgcggctatctcgaggcgcagaagcgcgggctggtcggctcgcatgtcgggctttgcaccttcatcaccggcgctcaggacaaggagcgccgcggctttgcgtccgatgcggcgcccgatccgcgccgtgcgtccgtcgtcgacttctcgatgaacctgccgcccgagcccgatgatccggagctgctcgaccgcatgcgcgagggcatgtcggcggttgccaccaatctcattccgttgctgcgctatcagggattcggcggttccggcatggacaaggaagcggcggccgcctggctcagccgccgtggcctcgtgccatcgcaggagcgcatcttcgtcacccccggcgcacacccggcgctgctggcgatcttcggcctgctggcgcggccgggcgatacggttctctccgaaaacatcacctatcccggcatgcgctcgatcgcggcacagctgcggctcaacctttccggcctgccgatggacgacgagggcattcnnnnnnnnnnnnnnnnnnnnnnnnnnnnnnnnnnnnnnnnnaaggcgctctatctcaatccgacgct

SEQ ID NO: 78378 - DNA, 173 bp, Arabidopsis thaliana landsberg
aaattaatatataattattattttgtattgtatgaccacaaaatggttatataaaaaaaagaataactataaggaaattcactttggtgggacagaagtaatattaccacctcaaataacgtttgcgtcatgacattaaacctgtcatggacgaaacgttatctgaatggggg

SEQ ID NO: 78379 - DNA, 551 bp, Arabidopsis thaliana landsberg
cgtattcggtaacaagaatttgtttctttgttttttgctttatttttttttggcaaagtctttgttcattgctatatatggttgtgatgtgtggaacttccaaatatatagctagtggcgtttgtttgtaaaaatgataattattgttattagttattatgtatggcgtgggaaattatagtatccttagcatttctatatttggtatatatggggcttgtacgtttgccatggttgtgacggcatacctacataccattggtattttatttggttgaaacgtccccatatattttccattggatttgagacaactaaccttttttttttggatatgtaattatattgtagacaacgattgatcgtgtaataattcaaaacttatcacataataatggatgcatgtcgtgtcaaatgaacggcgtgtaaaatgcaaagtactcctaatgaaaggaaaaaatgtaattttgtctgataaaacgaaagtttagttctcgttacctgaagcgacaatttcacaaagaagcataaatgtcgtattatctaaacta

SEQ ID NO: 78380 - DNA, 589 bp, Arabidopsis thaliana landsberg
  unsure (1)..(589): unsure at all n locations
gaaaatataaggttagatctactaaaggacattggcatttattccaaaacaatttacaagttttttcactgcttgctgcagtctaggcaaaaggcgctgctggatcttaagaagatgcaaacagatgatgtgagcttacagtgcaacacttgctgatgtaaataaggatcacaagtattgcttgatgtgaaaaacgtgtgaaatatctaaaataatcattgcttcttttaatatcaatccgtgattccagattttgtatctatttaaagttcaaaagtttgcttaggttattgatttttctattttggcatgagacctcaattttcgatgatttttcttgcttactacagtgttgggtttcactaaagcttttgttctatggacttcgcagattgagaagctcagtgacatacagtgtcagcctgaatcacaactgaagttcattatagaagcatggttacaggtaaaatccattccacccttggcctttctgagacttttggattttgctcactaantttctctacgatcatagatagttgaatgcagacgangtctaaaatggacatatgcctatggttttacatac

SEQ ID NO: 78381 - DNA, 517 bp, Arabidopsis thaliana landsberg
acggctgctgcttccgggtggtcgcagtgtcctggtggccacccgccacgatcgtggcggcgaggttatagcgctgcagcggctggtcttgacgatgcgcatcttcaccgtaagggaccgcatcgaatccgagacatcagcgctggtagcatctgtcgcgcacgaactacgtgcgccgctcggcgcggtgcgcggcttctcccaaaccttgcgcagcaggtgggagcaactgcgtgaagaccagaagctgtggatgctcggggcgattgatgccgacgcggctcgcctgcaacggcaggtcggggcgctgctggacatctcgcgcatcgactccgggcgactccacttgcgcaagcgcgaggttgatctggtgccgttggtccggacaagcatcgagcggatcgtgtcgaccggtcacgacccggtgagtttcagcctggtgagcgaccacgacgcgcttgtcgtgcaggccgaccccgaccgattgatccagaacgtgtcgaatctgctggagaat

SEQ ID NO: 78382 - DNA, 584 bp, Arabidopsis thaliana landsberg
cttttccaatttgcttggcgaattttcttgtgaagaaaatatttgccaagatttttgaataattgaacgcggccaaagaagagtatgagaattgaaaatatcgacacgaacattgatgaagtgggtccaacactcccagtaccagtctattcgggctattcctatctacgaagaatcggattgcttccgtcgtttattgtttagatttatcaaagagccagccacccgacgaatcacgacgactcttcttcccccctttaaggatgttgacaccgtgtcgttttgtcaccttatagagttatagtcattcagacgccgtgccgttttatcagttagagttattttcttcatgttgaacctttttttgtcagcccgttttatcccacgttgaagtttcaattagcttattttaaaaaatattagatcggagtatcttttgtctaattaaccaaaactccaagttactacatttatatgcaaatacatgaatgggtcatagtaatcacaaaactatttttctaataaaccaaatatatgcgttaaagatgtttacagctttatacatatggcggacactagaacta

SEQ ID NO: 78383 - DNA, 178 bp, Arabidopsis thaliana landsberg
cagtcttgtttgaaaaaaggagattgggagtgttgactagcacatacccactagcatttggcacctataaaagtgatttgctcagctccctataatgccgtacgtcgagatagaatgtgaagtgctactatactgatcttcttgcacgatctaggagcgttccaagcaagctcaagta

SEQ ID NO: 78384 - DNA, 446 bp, Arabidopsis thaliana landsberg
cgggcacttcgggaatcatgtatggtgatattgtagaagcgtaatatttaagactgcaaaacatgatcttaatcatcggcttactccaatgactctgaggaaaagctgtcccacatccgagcagagctgcgttgtcgattctcttcttcttcagtcagtggaagctatgatggattgctaaaagagaatacaatacgcacgaagccacgcttgagaaaccatgagaatgtcatcagcttccgccggggaataccggcctttcgccgtaagtctcagcagttacggaggtggtcaacgagatgctgagtctctttttcgcacgaaaccaatgtcggagattcgaattgtggagtcggcgactaggaagaacatcgaggataagaaagaggagcttcggcaactccttgggactaggtaccgcgatctaatcgactcagctgactcga

SEQ ID NO: 78385 - DNA, 556 bp, Arabidopsis thaliana landsberg
acactggcgatgcaatctctttcccctgttcctaagcttctctccacaacaccaagctctgttctttctttttacaagaacttcttcttcgtcgatttcgttggattatactgtaagtccaagaggaccagacgcagacttcgtggagactcttcctcttcctcacgctcttcttcttctctctctcgtctttcctctgttcgtgccgttatcgaccttgaacgtgttcatggcgtctctgaaaaggatctctcctctccttcagctttaagacctcaggttcgtttcttcactgatataaatttcacaaacacccaacgtgcaaagtttcatcctttatggggatcttttaagcaggttgctaatttggaggatatattgtctgaaagaggagcttgtggagttgggtttatagcaaacttagataacataccttcacatggagttgtcaaagatgctcttattgctcttgggtgtatggaacatcgtggaggttgtggagcagacaatgattctggggatcgctctgggcttatgctttcattccttgggattt

SEQ ID NO: 78386 - DNA, 542 bp, Arabidopsis thaliana landsberg
acttgcattgtaaattgcatcatggaaaaattcctgcagcaacaagtgttcgacaatacgattgatcgttacctgtatgtggcgggggtaatattggtggtgttgctgctgaaaaggctggtatcgaaatacctcgccaggatactgcacaaactcattgccaggcatgtaaagaatgtagccagggaatcgttcctgaacctggtggtgcagccgctggatgtattcctgttactgctgatctcctttattgccatcgacagtctttcgtttcccaaagcatgggatattaccatctaccatattacgctcaggcagttgatcgattcggccgcagcagcaatgatgatcgttgtatttatctggctctgcctgcggctgatagattttattgccctggtgatggaagaaagggccaaccttaccgcagaccagacagataaccagctggtggtctttttcagggatttctttaaagtgatactggtgatcataggaatactgatgctgctgcgcttctccttcataaaaatgtgggtaac

SEQ ID NO: 78387 - DNA, 527 bp, Arabidopsis thaliana landsberg
  unsure (1)..(527): unsure at all n locations
taacggccgctccggctgccgcataatcaaacgctccgatggaccggccccgcttgtgagcgtcttggtagattcagagccggtcggcgcggtgccgcccattgaacgttggtccgtcatccgcctctcccatggtcgttactgagacaccacggctgatccttcgacagttgcatcccggcgacggcgaggcgatggaagcggtgttcggtgacgtcgaggtgatgcgatacggcgactgcgtgcggtcgtcgccgtgggtgcggtcgtggatcgctggctgggtcaacgaatactacccgcggtgggggttagggatgtgggcagtcgtggaccggcggacgtcggcggtcctgggatactgcggtctgagccgattcccagaacggtgtgtggtgggcgaggccgagatcgggtaccgcctggcacgggcgcactgtnggcgcggcttggccacngaggcggcagtggcggtgcgcgatacgcatttgccggctaccctgcctggctgatcggctgatcgatcc

SEQ ID NO: 78388 - DNA, 539 bp, Arabidopsis thaliana landsberg
ttgctggtggcctcgatggcggtggctgcaccgtcggtcatggccagcgggcaggtgttgatctcgctggcgacgtgatacagatacacgcgcacgaactgttccagccgtgccgtggcgccggtatcatgacccgcggcgaccagtccgtgacgcgtggtgatggcggggccctcgcgccaggccgtggtcagcgtgatgcgatccacgcgccggccccaagcatcccagggtacgtgcacgggtgtcccggccggcgtgtccgcgcgtcgccgccattccatcagggcgtattcggccagtgcctcgagatcgggcaggacgacggcccgccgggcggcgggcaaccggtgcgccagcaggcattgcagcaatccgtcggtaggcaacggatccggcaactgcggcgcgtcctgcagaaaacccatgacatcgactccgctcgcgggcacgggaaggaggataggcgctgtcagatgaacgtgacgttccggcgggctgtccggtccgttcacttcttcttgcgtgtgccttttttc

SEQ ID NO: 78389 - DNA, 249 bp, Arabidopsis thaliana landsberg
ggggtgcatggctaacacatgcacatgggacattcttttacttgaggatggccgcccactggggggagaaatatgaacaccgacctaggatggtgaacaacagtgcgtaacggatgtttatacaccggaggctgtggaataaaaagagtactccatccgcagagtgggaagaggaaaatgagactgttgacttagcaaaacattagcaaaacaaaaagcagcctaaggagcatacggttggacggccac

SEQ ID NO: 78390 - DNA, 677 bp, Arabidopsis thaliana landsberg
tgtgggttaggtaaaaggagaggccatgatcttgagccaggattctagtctatgattctcgtcagttgcaaatttctgcctcgacgaaactgccaagtattattcacaacctctattaccatagcatctctcctcagcccaacaatatcaggaggatttagaggcatcgttgcgtttcaaagttaacatcccaatttggaagaagtttaggaagaattttttatatatctatttatttcaacaatattcatatattaattttttttgtgaacatatattattaagttttattatgtagtaagaaaacaattttttgttttggggataaaagttgcttattaatattattattaagctttttttgggggataaaaagaggtaattattattgttattaagatttatacttttttgacaaaagtcactataaataagaaagttacgaaacctctttttgatgcaaatcaattgatgtaactgaactttaatttgtagtgatatgttaatataaattctggattatgtcaatggtatatgtttttaaaaaaatttggatttaaaaataaagttaatctcattcatcgcgtgtctaacaacccagtcttttacattttatttagaagggggatataaaataataattatgtttaacaaaagtggggactttcttttaaaat

SEQ ID NO: 78391 - DNA, 603 bp, Arabidopsis thaliana landsberg
  unsure (1)..(603): unsure at all n locations
ctaaaatcttgccatcagctttatttgatgactgaagtatcaaatttaaataaattaactagttaactagttatataatgagacttattttgaccacttaggtccactaatagacaaattaaattatcttatattggttattgtcccatcgcatgaaaatcaaggatggtgttttctaccagggaaatagttacatatatagtacatgatcaaacttgaataaactacacgataatgatcattatttgttgaaatcaaataactttaacaaacaaacaaaaaaactaaaatcaaataagaatattagtagcatagtactttcattataacctttatgaaattttagtaaatagtataagaatttctcaatatgcatcgattttgatttaataatgagtaaatgaaacgaatagaaacaacattttgatttgattaaacaaatagataaaaacaagactcataaattaaaatttggaagtttccgacaattagaannnnnnnnnnnnnnnnnatctgattgcaaatctgaccagaactcgaaaatattgaaaacatattttaggaataataaaagagatgatagcttaagtggaaagctgaatg

SEQ ID NO: 78392 - DNA, 555 bp, Arabidopsis thaliana landsberg
agctccaccttaggaagaggaaactcaggggaagaggaatacggatttgacggaagagtttttagaggtttctaatggtggagtgcagagtttgactttgggagcgttggataattcgttcttggtgaatgattatggggttcaggtttataggaatatggagcgtggtattcatgggaaaggtgtgtgcgtgagatttgattctggaaactcaaagttcggatcagggtcaagccagacaacaccgaacaaggctcttttgatgagggcagagactaatatgatgctgatgagtccagctaaacaagggaaacctaactccactggtgttaagcagctcgatatagagtcagggaagattgttactgaatggaaatttgagaaagacgggactgaaatcacgatgagagacataacaaatgataccaaagggtcgcagctagatccatcagagtcaacgtttttgggattggatgacaataggctgtgtcaatgggacatgagggataggagaggtatagtgcagaacattgactcttccatcttggaatggac

SEQ ID NO: 78393 - DNA, 163 bp, Arabidopsis thaliana landsberg
ctggaacaaccttgccacaaacaaccacatgcggctaaaaagcaacaaagaatgcaaaaccaggagctgctttatactagaaaagaccaccgaatacatcacaatgaaagaatacactgatcattggcaaaaacaatatgaagggggcaaacagatctgctaa

SEQ ID NO: 78394 - DNA, 427 bp, Arabidopsis thaliana landsberg
gcaagatcgccgttatcgaggagatgtccggcaagttccgggactcccagggcgcggtgctgacctatgtacctcggcctgaccgtggctgacctgaaggagctgcgcggctcgctgcagggcaacgcgcagttccgggtggcgaagaacacgctcaccaagctcgcggccaaggacgctggcgtcgatgaacagatcgagccactgctggttgggccgaccgctatcgcgttcgtcaacggggatatcgcacaggccgcgaagggcctgctggacttctccaaggcgaacccgctgctcgtgatcaagggcggcgtgctcgacggcaagctcctggacgcgaaggaagtcggcaagctggccgacctcgagccgcgtgaggtgctgctggcgaaagtggccggcgggctgaaggccgggctggcca

SEQ ID NO: 78395 - DNA, 397 bp, Arabidopsis thaliana landsberg
acttttctgtttatttctaaagtgtagatgctttctttttccaggaaaaatacccatcttggacttgctagggatgcctatctggtgcctttcttgagattcttagatgtacagagctggtgaaattaactatcattcagaaaaggacatgaattcacaggcaatgattaatgggtctggattgccctagattccgtattgcgcgaacgaaagtgtatttcttttgaatatcatcggatcccttgtgactgcctgggctacaggtcaggcggtggactgcaaaatcgtatgactaaaatgaaatcatgtgaccgctatgaacgctacccgctttacatacatgggataggactctttatgctctgagcaccgtcctgtcagcgcgtgagttgcgagg

SEQ ID NO: 78396 - DNA, 288 bp, Arabidopsis thaliana landsberg
  unsure (1)..(288): unsure at all n locations
ggaggagtacgccttgctgatgtgctttgggtgatgcacatttcggggtcaggcgctgttgatcacaggggacgatgcatggggctgagagcccttgcagtccaggcacagagacacacttatggggggggnnnnnnnnnnnnnnnnnntatagcgccggcgtgcaggccttctgctgggggcccgttatgacaagacaaatgcgagagataccccatctgtctctttgatttttacgccttcatgtcgtcacacgagagggacagggtgcgcgtacaggggatctct

SEQ ID NO: 78397 - DNA, 355 bp, Arabidopsis thaliana landsberg
attatgaagaatagacaagatgatgaaaaaaggataaagagagtgaagccagggttatgcatgctctcacgtttagggcgtgactctaaactagcgatttagtttacggtattattaaaaataatattagtcacataatatttgtaattttagtcgaaattaatgacagaaaaatactagacgctaggatttgtacttccttgaatccttggaaaatatacgtatgtaattaatattattcattatcaaaccacaaatacggaaaccaagtttgtgtcaaatccaaatggagtaagttggtatcttaggttgttggttatcataaatgagaaactttggggttgcactcgatcgg

SEQ ID NO: 78398 - DNA, 408 bp, Arabidopsis thaliana landsberg
ggtggaactaatggtttcacatgatatccaaaagtaaacgtataagtatttacgatgatactgttctcatcagctatacataaattttagtttttatgtgatatttattcttatatatgctctgcataaagatgatctttatttgcttaaaagtttggataatgttggagatgataaacttgtatgcggataaaatattaagtcggcatccgtacgtgacaaatttgctgaatatctagatatttcgaaatatgatcgtgtcaaaacaatacgttttactttcttactacacactcatatattagggattttaatccctaatgcatgtaaaattgcagtggtgtagatacgattttagagcaaagtttttaatgagatggaagtttagtggataaaatctaaaataaa

SEQ ID NO: 78399 - DNA, 418 bp, Arabidopsis thaliana landsberg
acttagttttatatatttatacaccaaaaatttttttactatgaaaaaactaatcaaaatttctgcgtttgcaacattggtatttgttggagcattaggaattcagtcgtttacttccacgaaggcagtgtcttcagagaaggtattaagcaatatcgaatttaaagtgatcaatgacacctcttctgaatataagtactgtgtgaatggtggtcacaactacattagtgcgggtgcattcaaaggattcagctatagtgaaggaacagagattaagcatttggatggaagtaactgcggaggagtttggtttaaagcaacgagctccatgcatggaaaatcatccaaaattcctgaattgccgaaattaatcactcttttgaaatattgaacaggaagctttctttttttaaggggc

SEQ ID NO: 78400 - DNA, 585 bp, Arabidopsis thaliana landsberg
  unsure (1)..(585): unsure at all n locations
cttttatactaagacatcactattacttcaaattttatgtatgtatagggtgggaaatatgggagggatgctgtatggatagacatcactacacaacttcaatatagtttctttctttctttattatgaaaagtacatgtcttaatgcgacaagatatttctagcctcattttctatatagttttgtttatagattatattcatcaaaaaagattttgttagcttttgtttaggtttgtcatcctctgtttctcaagtttaggactgttgtctcacaaaattttctgacttgttgtctttgtttctttgagattccggatttcgttaaccggaatatgcagacattgtttccggttttttcccacctttgcactatacttttgcagtttaaaaggattttacaaaggcggtttatcaaactggacatgcgattttaagccaagatttgttttcatgcaactaatcaacaaaggataagaagannnnnnnnnnnnnnnnnnnnnnnnnnnnnnnnnnnnnnnnnnatgatattgacacatcattgctcctaggataaaaagcccctacagtcttaaagtccgaact

SEQ ID NO: 78401 - DNA, 355 bp, Arabidopsis thaliana landsberg
tgtttaaaaataattatgtctgggacaattaacttgaaatgattattgcaagtgttttttttatttctattcatttgtatttgaccacgtatttttaaattcattcgaatttgttaattaaaacaaacgtatacatacgtattcatttgttttttgttaattattctggtcataagtttatgttttgttttttaagaattcgatctgttttaatatatacagaattagatttgaattttattttcctaaatatatttggatttagtagaatttcagtgtaaaatacctacaattaaaaaaatgttaacaaataaccaagattataaccttccatggtttattggcacaaaaaatc

SEQ ID NO: 78402 - DNA, 603 bp, Arabidopsis thaliana landsberg
  unsure (1)..(603): unsure at all n locations
ggcgccggcgcttttcgatcagcgcgttccgccagcgcggcacgcccgccatcgtcatccgtttcatttttggcaccattccgcccttcgaaagcctgaagctgccgtccgtgctcaaggacatcatcatnnnnnnnnnnnnnnnnnnnnnnnnnnnnnnnnnnnnnnnnnnnnnnnnnnnnnnnnnnnnnncggccatgatggattaccgcaacgccgagaagccggggcatatcctgaccctggaagatccggtcgagttcatgttccagaacaagaagtgcattgtgaaccagcgggaggtcggcgcagacacgctggacttcaagatcgcgctgaagaatgccctgcggcaggccccggnnnnnnnnnnnnnnnnnnnnntccgcgacaaggagaccatggcggcctccatcgcgtacgcgcaatcgggccacctgtgcctggccacgctgcacgccaacaacagctatcacgcgctcaaccgcgttatcatgcttctacccgctggacaaccgccccgcgctgctggaggacctggctgccacgctgaaagccatcatttcccatcgcctggtcaaaaaaaggccggtggccgcattg

SEQ ID NO: 78403 - DNA, 433 bp, Arabidopsis thaliana landsberg
  unsure (1)..(433): unsure at all n locations
nnnnnnnnnnnnnnnnnnnnnnnnnnnnnnnnnnnnnnnnnnnnnnnnnnnnnnnnnnnnnnnnnnnnnnnnnnnnnnnnnnnnnnnnnnnnnnnnnnnnnnnnnnnnnnnnnnnnnnnnnnnnnnnnnnnnnnnnnnnnnnnnnnnnnnnnnnnnnnnnnnnnnnnnagcacattggctagagcatgggcatagttgctttctgatgagtaatatagtgtgacctagatcaaatgtgattgatacataacgttnnnnnnnnnnnnnnnnnnnnnnnnnnnnnnnnnnnnnnnnnnnnnnncacgagctccgttcatgagacgatgaccgtgattgaagctttaatatagacgataaaggaagagtatgagtatacaacattgtcctgtcgccctcattttcttgattggggctttatgactgactgaaaatg

SEQ ID NO: 78404 - DNA, 493 bp, Arabidopsis thaliana landsberg
  unsure (1)..(493): unsure at all n locations
cattccctccagcgtggccgccaggagccgttcgacgcgcggttcgtcgtcgacgaccgcgtgggcgagccgggggtcgctgcggtacagcgcggcgacctgcggcccgggcgtggccatctgccagaacgcgcctgacatcgcggccgcggccgcgatgaggtcgacgccgtcgagttcggtcagcccgggcagcaggcgccggaccacggccacgatcgcgtcgacctcggccagggtgacgagcttgaaggcgcgcaccgcgtccagcgagacgttgcgctccaggttgagcggcgcctgcgccagcaggtcgcagaacaagccgcgggccgccagcgtgctcgcgaacactccggccacggccgccggcgtcggggcggcgagctcctcgagccccgcgcgcagcgccgcggaccactcgcgccacccgtccgcggtcagccgcagaaagatcntcctccgggtctcgaagtaccgcagcaacgccgac

SEQ ID NO: 78405 - DNA, 584 bp, Arabidopsis thaliana landsberg
  unsure (1)..(584): unsure at all n locations
ggtcggtaattttagggtttatatgcaaatatggaatcgttttcgctcacaaacttttctaaagcaacttctgactttgtctcattttgggtgagattctctgccacacaactaatcaatgttccattttacgagtccattatctctttctatttttattttctttcatgatactgatacccaatatatatattcccaatccaataattatattttgaaaggcacacctatttttttttttttttttttttaaagttgaacgaactagttgtatttcaaataacagtttaacagaaagaagaagaatatttctagctaaattaaatgtagtgacaaaaatacaaaatcattatttcttgttgtctgttggctctttgaaggaggaaactgggcctagttgaattgaagtccattaagtgtgttttataagatgttcccaaaaaaatcaggcctattcttttttcttttcataagtataagattgagattttccccanatgcgttctaaaaaatgacgaaattacactctcgagggtttgtttttccaaattcactatatattcgttttttttttttgaactttt

SEQ ID NO: 78406 - DNA, 420 bp, Arabidopsis thaliana landsberg
cttataaatcaaatgaaactatatttttgtaaataattataaaagttgtctcgtctcccataaaaaaaaagtatcgaatttcttgaaaattttcctttatgtgttgaaaaccgtctggttattctctaggctcaatatccttagccgattgcttcaagagatccacattatttttcttcgtgtgtagtagcacttacacatataataaccgattgcaaattttctttagatgtcccaactattttaacaatatatggtttaattagggacttaatcgcttcctagatgatgctaaagacattatattccgtttcgttgaattattataattgctggattgtgaggcatataaaataaataaataaaatctatgtcaataccatctagatggcgtattaatttgtcccagagtaaacgaag

SEQ ID NO: 78407 - DNA, 208 bp, Arabidopsis thaliana landsberg
attatatatgggtttaagcccacaagataatgttctgccacatgacacgatatgcttcttttggatattgacatacactcacagggttgggtggctaggtccgattagaaagttaaccacacgggttttaaaaccagcatataattgcctgggactgaatctatatcttgatctgggatctacagttagagctctacaacgtcagcat

SEQ ID NO: 78408 - DNA, 569 bp, Arabidopsis thaliana landsberg
  unsure (1)..(569): unsure at all n locations
gaagcccgctgagaaattaccaacaaagagaggattgtaatccaactaacgttcannnnnnnnnnnnnnnnnnnnnnnnnnnnnnnnnnnnnnnnnnnnnnnnnnnnnnnnnnnnnnnnnnnnnnnnnnnnnnnnnnnnnnnnnnnnnnnntaaagtttaagagatttgatggaagataaaatacttcgacattgattagaaaaggcaagacctggacataattattaagtgtctcttggaaatgttcttgcagaagaaatcatttctttatttagttttcgtttcacaaacatgtgtttttaatccaaatccagaacatgttagtatatatttactagggtcaaccccatgcataccgcgagttgtatatttattagtaaaactttattaaagtagatctttaatcagatctcaaatagataagcacagaattttctatatagttttttaagtcacatatttatattcgtttctttttaaaaagataccataagagttttgggatagacaacatgccttcaaattatttctagaaatttaaattgcaaaagtgattgtgttttgcatg

SEQ ID NO: 78409 - DNA, 532 bp, Arabidopsis thaliana landsberg
ttctgaggcggcgaggaagaaccacgcgccgccgaagctcatcatcccgttccagacgagcgggatcatccttgacggctcttccagccgccagaaccgctgccacttggtcagccgcaggatccggctcgcctcgtcgaggtcccgcggctgggataccagggagtggtagaacgcgaacgtcatgttccacgccatggacgtgaagatcgcgaacaccgaggcgcattccaggccgagttccgagcccgggaacaagttgatgaacgcggtcaccgtcaccgacaggaacccgagtaccggcacggactgcaggatgtccaggatcggcagcagcaccttctccagccgccggagccgggcggcggccgtcgcgtagacgaaagtgaagatcaccgacaggatcagcgccgcgaacatccgcaccaggctgcgaaccgcgtaatacggcaggttagccggatcggtcgagaccgcggacggtgccgtcttgtgcaggaacggcgcgttgagcgctggcgccagcctgata

SEQ ID NO: 78410 - DNA, 512 bp, Arabidopsis thaliana landsberg
ccattctacatacttgagactgcaactcttgtgtaaacggatctatgacagcgatgaaaagttgtctgtactaaatgatttgtctctcgatgatctcaacagctttattcctgaactccgctctcaggtaacattctgcattagtgtgattcctgttttacttaatacacagaatttgtgactgttctctggttttgtttaaattgggcaaaggtcatgtaatacctctgttatgtcttcagatatttattgaggctctatgtcatggtaatttgtccgaagacgaagcagtgaacatatcaaacattttcaaagacagtttgacggttgaaccactcccaagcaaatgttgacatggtgaacagataacatgtttccctatgggtgccaaacttgtgagagatgtcaatgtgaagaacaaaattgaaacaaacttaattattgaggtaaaaaggaaaccagcttcttttgtgattagagtcagcccaaaagagttgaaaccattgtccttt

SEQ ID NO: 78411 - DNA, 494 bp, Arabidopsis thaliana landsberg
ctccgcggcccttcggtgtgttctatgaaacggaccgcccctgttatgaagatatcattcttatgttgatagaagaatccatcgccaccaaaggcataggagacctggataaacttctgcgcggcagagaagtgtgggagatttgtttagtggtcgatagtcgatggaccatagtccatagcccaatcaatagtagtttatagcgtatgccatggaccattgactatggaccatggactattttctacacccttacgaccccattccttatcgcaaatatcaccagtcctacccgggaagctacttttagtttttcgaacagggtatctcggtaactgtctattgtgcgtgggctgaggcacatggcggatgctatctctttataggatttactctgtgcagagccattgtatataatcgcgttccctcggagtaagtttctgtgcctttttgttttttctgcgctttattcattttgcgggtgattcatggat

SEQ ID NO: 78412 - DNA, 595 bp, Arabidopsis thaliana landsberg
gttgtccaacgaatctcaactgtaatatagaattttagtgtccacttagaaagcattcattcccatatatatctcccacatgtttggtctcaaatgagttcaatcatttactgatttttagtcaatttagtggtactaattctaagaatctcaattgttcatctatttttaacccaatagtcaatcggcataccacttcttcaagcccttatcgaattcactcgctcatgtagtcatgtgttttgtagagatttttaagtaatatcttctttcttgtttgatttaattggctaatatttttttgggggaaactaaaggtataactattgcaagaacattgacttggtgattatgtatgtgtgtttttttctctaaaaacattgacattgacttggtgattcatgagcaagaaggtaatttcgtgattaacaaggtaatgaatcttctattaaaatagtaggttactgattccctgcttattgatggcgtattccctgttttcacctttgtataaaaacatacgtcacaaaaagttactcatatttgacagccaaaatctagaagcaatgaatatgttcattttaaaaaaaaaata

SEQ ID NO: 78413 - DNA, 506 bp, Arabidopsis thaliana landsberg
tcgcgcacctacccggtcggcacgttcctcgtgcagatgcgtcgcatataccagcgctttcgacgtttgcatggccacctcagcgaagacaaaaccataccgggtccatcccgtccccgcaaagctgcccaccctacccggtcgcgtccagcaccttgtcgcgtcccatctcctcgggatcatcaccgtggccaagcgcccgttcaccgccgagcagctcatcctcagcacgcccgacgccagctgcagcagcgcgaccacccgcatcagccagcctgccgacagcatcaccgccgcaaatcgcccgcgcgccaaacccatcccgcctgtcctccctcggagcgagagcgagatcaccgtgtccggtcgaaggtattgcctacaccggcgttttccgtttgcgcaccaatcgttataacacggcctcacgacacgctattttccctgaccccgatttccactaggcctgacacgccggggcttgtaggctgtcctattgttcagat

SEQ ID NO: 78414 - DNA, 333 bp, Arabidopsis thaliana landsberg
  unsure (1)..(333): unsure at all n locations
aaagaccacagaacccgaacagcagaaggggcggacaaataaggggaccgctaaaaatctcgaaacaagagcagaacggggacacctgggagaacgaaccaaccacccaccccgcggaacaggcaaaaagcagacacagaancccccagacgaggcaaaagcccaaccccaagacaaacccagcaacagaacggaaagaggccnaggaaaggaccaagcggaggcgcacgaacagcgagaaaggcccgaacccgggccaaccaagaaaaaaagagaagacaacgaaagggagacaaaggcaccaacaaaaccagaacacaagggacccaaacc

SEQ ID NO: 78415 - DNA, 375 bp, Arabidopsis thaliana landsberg
ggcgaccgtcacggtctcatcgacgacccgaccagggccggaaagagcatcggccagtaccgcattttccacggccctcgccggtgcgggccgatcggccgcgccggcgccgttgatcgtcggcggcggggccgagcgatcatcggcccgggccgggccgggccgggcatacgacccgaccaggaggacgatgatcgcgagccgggccgagggccgagcgcgtcgaagcgcccgagaaagcgcgcaaatccggagcatcatcccaccgacgccattgataaatcgttcatgagcggagacaaccatatacgaaaatccagaatacatgctgttgccctcggcgacgatgcagccctgcgctagaccgaattgcgc

SEQ ID NO: 78416 - DNA, 591 bp, Arabidopsis thaliana landsberg
aaattcaaattaattaaccaactgaaatacaatggagctatgtgaaaagttagtaagggaaaaactctttacaagtctatcacaactgggataaagtttctttacccttaaatctacacactgcgaatatttttcgggcagactttacttcattaaaggacgttgacgattcacaatacttgatatgcaatatatttcttgctatccagtttatctccatatatctcaaaaacaaaacaagaaaaacagagcaataatattgaaaacagagcaacgatcttgaaacggcaagacagagcctacaacaatatcgattttattactattttatgactacttcttttgaatatgtgaatctaacatctaatggacccttacttttgatttttggtgcgttatgtaactattttggatttattttttctgaaattttcattaagtatcatggcaaataatctttttttgatgaaagcctggtagttttggagttacatattttaattaactattttatagttacccgataaatttaataaacatcgacaccccaatgaaaatttacaatatttaattaaggatctttaatttttt

SEQ ID NO: 78417 - DNA, 500 bp, Arabidopsis thaliana landsberg
acagtttacatcataattaaccttcatttgattatagtctttattcggcttttagttttagagatggtcttactagctccaaaacccaaacaattatatggagattgttcaaaataacactagctaggggtacggtttaactgttgaattactatattacacattcacacgtttaatcggagactacacgattttaagttaagcatttcttatgtttataaaataatggtttgtatctatattatcttaagaaatttttgttagggtttgagtttagcacgtcatttttatatgtaaggttgagaaatgttaaaagttcacaaacggattttttcttatatggtctacaaaggaaaacgatcgacaaagaagaaatgaagaaaattattatctgctcttttattttctatggccaaattttagagccacggaatctttggttatcttgagtgtaattacgtttcgttgtttacacccaaaatgacataatacttattttg

SEQ ID NO: 78418 - DNA, 576 bp, Arabidopsis thaliana landsberg
ggggcctgcgcaaggtgacgaggtcggccagttcgccgtcactcagttcgctcagcgccgcctcccccgagcccagttacggtttccgccaactcccgcttgtgccgcagcatctcggccacccggtcctccacggtgccctccgcgacgagccggtgcacctggacgtgccgggtctggccgatccggtacgcgcggtcggtggcctggtcctcgacggccgggttccaccagcggtcgtagtggatgacatggcccgccctggtcaggttcaggcccgtgcccgccgccttgagggacagcaggaagatccgccgctcgccggcctggaaggcgtcgaccatccgctggcggcgcgcgaccggggtgccgccgtgcaggaagaggctcggcacgccgcgggcggtcaggtggtgctcgatcagccggcccatcgccacatactgcgtgaagaccaggacggacccgtcctcggccagcacggtgtccaacacctcgtacagcagccgcaacttgcccgaacggccgggcagccgggtgcccacgggctccttatagaactgcgccgggtggttg

SEQ ID NO: 78419 - DNA, 351 bp, Arabidopsis thaliana landsberg
ttcactctggctatttaaaggaaatcaaactgattatagattttctttttgtataaaaaatttgttttgcaagacagacatcccaccctcaatatctaaggatcataaaaatatgaaatcttcgtcacaacatggtttacactcctctttatgtataaacaaattctaattgtagtttgattaaaaataacaaaattgaacgaacactaaattattttagagattcacaattcatttccacataatataaatttaacttctctatttgaaaagcatccaaaatttatacaataaggaaaaaactcaaatcatatgcagaactaagtttcagaagacaagataaaaatttgt

SEQ ID NO: 78420 - DNA, 396 bp, Arabidopsis thaliana landsberg
ggggatcgtaaagaacaaagaaacaagaaaaaagttttattctactcacaccatggacggaaacagcggggggtgttcttgatgagtgctctgtaaaatctaggatgaacaataaaatcaaatttgagagctttctttacatgtacaaattatgcatgatatgagctaccatcaatagttggtatcatgcgaaaggtcgcccatccatgttgcttaacattgaatcgtggcatatatatgtttagctctgcatattatggcacggaccattactggcttgctttaatatacgtaacttgagtcaactggtatacatatatcgataagtgataaccgactgaaaatctatagcctttacaaatattataaacgcatccatttttgttccttaatacc

SEQ ID NO: 78421 - DNA, 507 bp, Arabidopsis thaliana landsberg
tctagtttagcttatcgttgctcgtcttttgtatccacattcatttatcacgttagcatctggacgacaaaaccatctaaactctcttcttatgtgtccactcttacatccacaagtttcagaagatttccgagaggcttttaaattcgctcagggagtgctaaaaagggtttcttgtagtatacgaaactctcaaaacatcaattctaagatgtgagaaagtgaaaaaaaattggttattaagtgagtgtctttactatgcaggatcatattgatatacatttttggttatattccaaatatagattttcataaaataatagttttacataaaataggtgttgaaactgtccttttgcttgtagcctctacagaaaagccgataatcttctttgaactcaagaggcctctgaacaaagccatttcttgagtctggaaaatctaaatttgaagcttctgagaaaaagttagatgctcaaaatttgaggtctggattgcttcactact

SEQ ID NO: 78422 - DNA, 518 bp, Arabidopsis thaliana landsberg
tgtcttaactataaagaacataatcgcatgagatctatttaaagaaagcttaatatatgtatattacttttttatctattaaccgatttgctttttgatttgtttggtgaaacacatacgtaaaagctgagaaagagacgtttacaagcactgaatcatcatcaaaacgagtaaatagaacagttaaaacataataagtttagtttaacaaaaccatatttgataatatgtagaaaaaaaactaaaataaaaacatgtatatagggttggatcaagtcaagggacccagaagacagtccggtttgcttgccggctcgatttagaagacaatagtttaaccaacacatgctattaatattacaagacacatgacccaaaagacgacttttaactcaagagagcttattacgaaattaaatataacatagtctattggcgttgattgatgattgatttgactcaatgcagcctagtgagttcttaactctcttacacaactcgtcacttgaacattcatg

SEQ ID NO: 78423 - DNA, 529 bp, Arabidopsis thaliana landsberg
ggggggtgtggccgttcgggtctctcaccctgcttgtttgtctaaccgccgaagtgccccaggagaaatgttgcctgcttgagacctcgaacgagctccaccagacgctctctcgcctcgagagcaatacacagcaggtcaagcttcacctcgattccattgaacagcgaatcagcaaaatggaactgccgataaatgttcctcctgcgaataaatcagagagactcgagcctctcctgcatcgtggcgggacggatactggtgcacgcaacgtcgtgatgcctgtcgccgaagacattcccgcgatggagtcgccactaccaacgcgaggcagggccatattctccagcccagctcacttcgacgagcctcagacagatgacgacttctcatcgccaactttcgagtacggcaccgagaaaagacggtgcctcgttcccgtcgtaatctttatcgttctggctgcaatcgctgctgccgctttctactacattcactccacgcaaggacaggcttatttgaagcaggc

SEQ ID NO: 78424 - DNA, 535 bp, Arabidopsis thaliana landsberg
  unsure (1)..(535): unsure at all n locations
atttccttacacctgggtggatgatgcacggtttcttattcctacaaaaatacacacaataaggttggaccttttcatggtttcagtaacaatttataaaaatctggtgttatataataatgtgtgctgcattcaatcagatcaatccaacattgatactctctaccaataatctctgatctacaaaactaccgaattcatggtggcatttgattcatgcaagttacagatcacaactacagatattgcagacacacacagaaacacagacgacgactatctatgtgtagagaatctttgaaatgaagaaaataatataacgtctcctagtcaaaatggatgactatagatagatggcatctcaactcgtagtggtagtagaagaagaagatgaggaagaagcagagagggtaacgatgaaatgcaaattgaccatcagtggcggnnnnnnnnnnnnnnnnnnnnnnngaaagcccccaaatgcaggcgctcgattatacaagttggagacttgcacatgaacaatggtggagct

SEQ ID NO: 78425 - DNA, 208 bp, Arabidopsis thaliana landsberg
  unsure (1)..(208): unsure at all n locations
aagagagcaaagccaaaagcacctcctacantcttggtgngaaaggaggacanggaagaaccggggcccctgaaaagcnccggcccagaaccccccncgnanggcnaaacgncgcacacgagaacnccccacggnaagcaccgagcccacacgccccaaccccaccaaagggcagaacccggacagncaccggcagacaaaacaaacc

SEQ ID NO: 78426 - DNA, 543 bp, Arabidopsis thaliana landsberg
tattggtaatgctatgggggtcaacattagcgcaaaatatgtaaagtgttctttcttttattacgactacatataaagtgttatgatggctttggaatagtataaaatcataatcaacttatttaaaattttggctatttaactagtatccggtagagacagaagtcaactctattgtttatatgtgtggttagtcttaaatatatccatataaaatatgctcacgggtccaacttagatggacttacgtatacatacgcatgcagacaaaattcgaaacagacttatcttagaagtcaactatttttgtaggtaaaaacccaagggatcggaatgattttgtaaagtaaatattaataatcatattaaagtatgtagtgtagtaaaatagcgacggattatgaataaataaaagccattatcaatgattcaatatgtctatacgtgtaaaacaaactttataaaaagaattctagggtcatcttactaccgatggaactatcataaatctcattatttggttttcaaagctaatatatttct

SEQ ID NO: 78427 - DNA, 437 bp, Arabidopsis thaliana landsberg
gttcgccggccggtggggcggatggcgcgggcgtggttgttgtcggcgtggaggcgggtgccgatgccgcatgggccgcgggatcgagatcgttcagcgcgcccttgaattcgtagcgcgcgtacagctcgcgcagggtgtcggtgtcgggcgcggcgaaggtcagctcggtcggtgtgcgttccagcggcacgtcggtcttgatcgtcaccagatcgcgcgacagtggcaaccaggccagcgcctcgcgcaggtgctcgccgatcttgcccttgaaggtgtcggcggcggccatcacggcgtccagcgagccgtagtcttccagccatttggcggcggtcttggggccgcatttgtccacgccgggcacgttgtcgaccttgtcgccgaccagcgacaggtagtcgatgatgcgctcgggcggcacgccgaacttg

SEQ ID NO: 78428 - DNA, 444 bp, Arabidopsis thaliana landsberg
ggcgacacagacgctggggctggggcagattctggtggctgtgcccgagggcgcatccgcggccaaggtgcaagagctgcggcaaagggccgaggcgattctcgccaagctgcgccatggcgccgatttcgccagcacggcggccgcttcctccgatggcccgcaggccctgaagggcggcgacctgggcgtgcggccgctgcagggctggcccgatctgttcatccaggccacgcaaaatcttcaggtcggcgggcttagcggcatcatccaaagcggcaacggcttccacatcctcaaggtgctggcacgcggccccgagcagggcgaggcctctccgattgcacagcaaccgcagggcgcccagcagccgcaaggccccatgatggtgacgcagacgcatgtgcgccacatcctgatcaaggtcaacatggccatgtccga

SEQ ID NO: 78429 - DNA, 475 bp, Arabidopsis thaliana landsberg
atcacttgtgggaaaactctgattccgttattccttgtgaaattttgccggagagtttgaaatctaggggcgggggaagattaccggtaatgagagataaagtgagattcaagatggaacaacgagattggagtagtggtggtgatacgagattggagcggtcgcgggacaatatcaatggcgaatctggccgtgatcttgaggttaagaagaaaattagagaaggatacacttactgtgccggcgagtggccgttttagtctattctgatgacgtggaaaaaaacaaaatcgcgaggtttaagatggattcgaacccgcgaggcttgagtttatgtgttgattggccaattggaatctaccgcacgagctgcttctctgatagtttcagtgctccaattgtttattttataaagccattactctaaggattaactttatttctttctatgggattaatttaaaaattgaaatat

SEQ ID NO: 78430 - DNA, 169 bp, Arabidopsis thaliana landsberg
tgactcgtattggcgagaccttctgcatacttttgactgactaatcttcaaaaatccatctaatgacattgaataatataatctgattaatccatatgatagcactaaatattgcaaagttggcgggagggtgcaacctacatacatataaacagacatataccatcaa

SEQ ID NO: 78431 - DNA, 243 bp, Arabidopsis thaliana landsberg
  unsure (1)..(243): unsure at all n locations
gagttctgttttcattgaggatgctcggtttctcgcggagcaacaagctgcngatgcgaggcgtcagtctatgttaatggacgagttgcttcctgatagacacgatgattatcatatgatgccgaggctcttgaaagcgaggaaattcgatgccgagaaagctaaacaaatgcgggctgatatgattcaatggaggaaagagtctggtactgacactatcattaaggcatgctattaaacaca

SEQ ID NO: 78432 - DNA, 203 bp, Arabidopsis thaliana landsberg
catgaggaagacctaatctttttcagtgttgggacctgtgaatgggataggggtatttggtctcaatggcacagatcgagcatgttcatattgacttaacattcaacctattaatgcgaacgcgccgaggggagcaactcttgcccatagatcacctaactgacacctacacgtatgctctccttgggcttgctgaccgccca

SEQ ID NO: 78433 - DNA, 249 bp, Arabidopsis thaliana landsberg
  unsure (1)..(249): unsure at all n locations
gagggaaaacacccgacaactccccggcccagaaaagaagctgacgcgcagtgatcaacacnaggagaagggggaaacgggaagggaagaagggaagagcccacanaanacgccagaggaangcagagaacgagaacaacggacaaggaacaacgaggacaaagaaagacgccgaggggcccggccgagaagcgaaagacgcgagcaggaaaaaaacggacagacacacanganggcaaggagcccgca

SEQ ID NO: 78434 - DNA, 386 bp, Arabidopsis thaliana landsberg
agatactgctcttgagatgcacactaacagccacaatatacggtcttgaacatctgcgagagagacggggaggggatatatatgtggcccgtctgttgctcccgaagagataaaaagttcctatagacaacaaaaataggcggtggcgtctcgcattaaaaagaaacctcaattaggttattattttcaatcttcacttaaaaaattattgttttttattcgatacttcatctacacaaatagaaggaaatccactgagaaaaagttagaaatccacaattcatacattctctataatgtccaaattaaactaagcttgctagtcaatataacagacataaatttgccacattttggaaacatgattgagacatgtgccagaattt

SEQ ID NO: 78435 - DNA, 434 bp, Arabidopsis thaliana landsberg
cgcgtatagctttacgttattctgatgttacagtcaagcttgattcccagcataaaattttcacaggtttgttttcatgcgtttactcctttgatataatactgttctattgtgcttatgaatattttcaatgatactattcagttaaaagtgagcatcttgctgaggttcgcgacagaaacactgtgctaagtacaaggtaagctcacatgaatctcttgaattctttactcggactcttgactctgtccatgcatctttatcattcattgtcctctctgtcaaattcctatttctcttacacgctctgtttgctataaaagtggggatgcgggtactggttcctttcaaccttttggcatgcttggaacacaaagcagcactggaggttggtgtttcttgtgcacattcagaatttttttcaatttggctgc

SEQ ID NO: 78436 - DNA, 524 bp, Arabidopsis thaliana landsberg
taccactaactggtacttatgagcatcgcgcgatccagggctgggcaaagaaagtcccctactacttctggccgaaagaccgtaagatgcagtttctgcctgggctttttcaaatcatcgaaacgaccggtccggctggtgaaaaaagacagagtgcaagctttgggatgctgacccggacagccaatgaactgatggcgaatattcataatgatggggaattccgtcaccggatgcctctacatcttacgccggagctggaatccttctgggtttccgagcatctgaccgatgacgacttacaggtcgtattcgattatatgctgccggccgaagcgttggaccgtcaccctgtttttagcatccgcgataaaaagccgcggcctgatggaaagccaaagtttaagttttggaggtatgagaatttgccaccgctcggagatgacaagtcttctgaatcccagctttcaataattaacatttagtatacagcatagactaaatcgcccataaaaggttgaata

SEQ ID NO: 78437 - DNA, 568 bp, Arabidopsis thaliana landsberg
ggatgttgttataacaaggatgttgccgatggcaccgatcatcatatagcagaatatatggatacttcgctcgtttttccgggatgagtggaaggagatgcagagaacggcgaggaatgttgcgaaccacacgggaactgtgagaaagagcgtagtcgtcttaccgtatcccagggactggacaatggttgggaagaaatatctattattctctgtcagtggcttgccttgtgaaatgatccatgcagacgaattgacatacgtgaacgactgagctagtaagacgaggtggttcagcagcatgaacagatatagccgatagtcggagaaggccatcttcactgcttccatgggtgatactgcatatcgatcatcaatttcaccagccgcgtcctgagcgagtcgccattcagcgtactcttgttcgtcgcgggtgagccagcgagtggtgtttggatagttcggtatgaaccaccttttttgggtttgcaaaccattccgggacaaaaagatagaacaacacacattgctatcatcgcaattcccacggtcgctgatccctcaatat

SEQ ID NO: 78438 - DNA, 463 bp, Arabidopsis thaliana landsberg
gaggcgaacgttacgtgcacagccggctgtgcatataagttcacgtgaccggcgcacagccgggggggcgggtagatctgttatgtaagcccgcctgagtgacgaccaagtcactttgcactatacatatacactcagccatagctctattaaatcaagccattgggttattataattatactcggaaattagtatcatccttatctttatattgatatatattaactgcatattgcattattccccaaattgttaatggggggggttcctattctgatacaatctctcctgtacttcaatatctctctcagcagcgttccatatttgctgcatacctcgcctccccgagaaaggctgctgtgccatctccatcgctacattctgcttaactctctcgttctcggacctatcccagtcaagataactcatctgcttcctccttggtccattccctgatgcctg

SEQ ID NO: 78439 - DNA, 485 bp, Arabidopsis thaliana landsberg
  unsure (1)..(485): unsure at all n locations
aagaaaaagaaaaccccnaccaacgttgctaacaaattttttaactgncctccatgcggcnatatttaatgggcttttttaaacttccccaccatcaacccttctacgcatatatatatacccacttctctgcatcccatatatacttctaatcatatacatctctcataatgaccaacatatctttctttaatcaacttcttgataaccataatacattgttcaccttctatttaaaatcccatatattttcaactgtaaattaaaaatccacttttaattgcttgccaggcattcatagttttgacagaatatagacagcacacattaaaataaacaattcctcccaccttctttgcatcttacttccttgtgctctctaacctctatcatcaccccttatttccactacccatctttttacaaatttatacacaactatccttatattatattcctcgtactttcaatactaaatatttaac

SEQ ID NO: 78440 - DNA, 563 bp, Arabidopsis thaliana landsberg
  unsure (1)..(563): unsure at all n locations
tgtcgctggagatggagaaagaagtggctgtggattaaaacgctaattttggctacaaactcacttggctcttgtaggagaacagagagctagccactgaggcattgttcatgaagaacgaagctgttgggcttgctaggtgtgtgcttaagatgagagatgaccactttcacaaggtctgcattctccagaaccgcatctactcgcttcaggcatctaggaactcagagcccgtctctgataaggtctcatacggatgctttggcctggataagcataagaccaaaaagaagaaggagaacaaaaccgaagagaagaagcctggattcaagtggttgaagaaactgaacaccattaacctgtttacaaagtgcagccttaacccatcggctgctgctccatcatgctgcactttcgacttgccttattagcttaatcctttgctgtattagtaaactatgaacaatgcatacatanctgtgtatgttctatcgccttattacgtttaatgcttttcagtgcatcgccctgatgcacaagttggtgtaccccgcatacaatct

SEQ ID NO: 78441 - DNA, 408 bp, Arabidopsis thaliana landsberg
cataggtgaattttatacgtatcatacctaaactataagattaatcttgatcttagatcatagacatatatcatgatggtgtgtaccctaagtttcataatcatttttcttaactatttatgtggatattattactgtactagataatattttatacagcttaaattaatatgttcattaattttacctcgctgtaaaccctagctagagagtatacaatatacatatacacacaaatggtataaaaccctagttttggctcagatgtaagtgtgcgtatacaatcatgcatcgtgatatatgcatctatacatgaatgcataggcggatacatttaattcattaatgtgaatatgaagggaattacatctttcagatgctttagtgttttttttccagaccatcttc

SEQ ID NO: 78442 - DNA, 307 bp, Arabidopsis thaliana landsberg
  unsure (1)..(307): unsure at all n locations
cgaaatttgcatgaattttttacgtttttgttgttaatctttgatgtatttcttccggggttgaaccatgtatgtttgataaggtgacacttcnctccaagctcctaccttttttcgaattttgtttttgggtcctttcttaattgcattgttgactctgtataatcattaaacaggaggctcttacaaacttcatactatgtcattgaatcgtactctactactctatcacgtatcgaagctcatatcaaaacacaggcctatttaaataaagtccaactgattttactttccgaccttgactttt

SEQ ID NO: 78443 - DNA, 438 bp, Arabidopsis thaliana landsberg
  unsure (1)..(438): unsure at all n locations
tgaaactcagtttctttgaagcttttaaaataaaaggatttttattttaaaaatgttccgaagcaaatgtttacgagctgtgtcttcaggctcagttagcaaatttacatgctggagaagtagcaaaggtctctctcatttcatactaatttttcaatctgctttagaaaatatccttctaagatctaaatgttgtgatgtattctttcacttccagaacttggaagcagaaaagcaggttagatttttccagggttctgtggcagctgctttttctgaaagggataagtcagtaatggaggtatgagggaattccatctcagtctaatgaaaagaagcaacatttattntgagaatgtattctttctaacttacttnttgatggtttcctgactttgaccanngccgaaaagctgaagagaatgctgaaatgatgtc

SEQ ID NO: 78444 - DNA, 466 bp, Arabidopsis thaliana landsberg
  unsure (1)..(466): unsure at all n locations
taagcaatttatggatccttttgtcgttgagagaaaggttgtttctatttattttacttgctttatgctagtatatcagatggaacacggttaggttggttagattagtaattttgtacgaaacatttgatgtttttcacttttttctttcttgtatgacatctagccaataaataactaatctctgaacatgcgagagcaaggacgatcattagcatcgtttgtacatattttagagcaagagcatgtaaaactctttcaactttatactttttatcttcatgacaagaagcagctagtttgatcacaactttntgacacgtctaaaaataatggatttaatttcaaattcgtaaagctcacacgtgagtagattatgagatattttaaagtactagtaccagatccttttaaagatcatcatgaaactcttatgtgtgaagatgacttatctagctcggatctc

SEQ ID NO: 78445 - DNA, 481 bp, Arabidopsis thaliana landsberg
taaaaataatattgaaatttgtaatttattcatacgataatcggattttttccgattttctataaaaataattacatttacaatatgccttcagtctcaattaatacgccatatcgtaatcacccggtaacacgccaggtgttactgaacctgctgaaagcatacaaacgtcctaacgacaagattcatgaaatgctgaaaaaaggcgagctggtcgcgctgaaaaaaggaatgtatatatggaatgacgcattgcagattgaacccttttctattgccaatgcattgtatggcccaagctatgtttctgccgaatcagctttggcatatcgggcattaataccagaacaggtatttgcctttgtaagcatgaccacaaagccatccaaaaagtttaccaacaaaataggaaactttgaatataaacacctgcctacaccatattatgcttttggcatcaaatatgaaaaattgggtgaag

SEQ ID NO: 78446 - DNA, 325 bp, Arabidopsis thaliana landsberg
tatcgaaaagaacaacaagctaaagaagctagagaagctaaatctacgcagaatactaaaaggaggtgtgatttttttgttcttctctaagtccaatttactttaatatcattttcattcgtttttgtatcgatatgttcagtatctcgttcgtttttattctcagggatgatttcctgtccaaaggattcaagctggtcttataagccaaaaacaagagacaggagctaaagctgcacaaggtaagtgaaaaagttgaccgtccttaatgggtctagcatgctgctgcattcttatcgcattccattctttccctgctctgctc

SEQ ID NO: 78447 - DNA, 576 bp, Arabidopsis thaliana landsberg
  unsure (1)..(576): unsure at all n locations
gtgtactcatacgtccatatttcatgtaggccagtcatcttgaatgggttcgtgacaaacaaatcattaatatattttagtctatcttatacaaacaatcattaatttggttttttttgtgttttttttgcttatatcgtacatgttctaaatattataaatgaatggttatgattagcaagttagaggataactagcattatgcccgtgctatgcacggacgtagaagttgttttaattgactactatacatttttttgacatattagttgttttatattttagaaaacatttaagaaagaaaaagaaaaaatgacacagtgaatttgaatagatgggatgagattaaatacacgtgtaaacaaatctcactctcagtttcatctcttgtattcaattataatcacgaattgtgtcattgtgatcgaaaacatggtgatttcatcctaataaccggatttagtggcctcataaaatgtttgagaagcttaaagatggagatcttgtgcatactctnttattgtgctattgttttcacttataactttcaaagctttttaagtctaacttattact

SEQ ID NO: 78448 - DNA, 601 bp, Arabidopsis thaliana landsberg
agcccgtaaacaaatgagctgaatcttgtgtgtgtgtccaatggattatgaggttatttattgttaatcaccgtggttggctatccatttacaaagaaatgcaacttaaacaaatcaggtctttgtgatttggacagaaataaaggataagagatatggtcagtattaaagttcaatgaaagcaaagaggttttaatttttttttagcatataattttcttcttctatgtaggttgtgttattatgtcatgtttggtatttatatcgaattttaatgtttgctttcgtttgcaggaatcgtaaaaattaggactctcaaatatccatttcctcactttatatggtacgtctaatgttattttgtattttctcttgcttttttttcttactattccaacttattggacactggcacagagagatatcaagtttatatcagatgatttggtgattttagttacttcatcagaatctaaattgggactgatacagtagaaaaattaggagcatctttgtgaaaagccccaagttgttttgccatgagattgtaatagtttaaaacgtctcttatatgtacaagctattttagctatgaaaacac

SEQ ID NO: 78449 - DNA, 571 bp, Arabidopsis thaliana landsberg
gcggcaccggtcgcggccccggttggcagcgcgcggcgggtgtttatctttccaaccccggcggcagcttcaccaggcgcagcttcacccgcgaacccccgcgcgtgctggaaagcaaggccagcgccgtaagtttcggcgccaaaccccgcaccgacctgaccctgggccagcgcatcttccaccagaagttcggctatggggtgatcgccaaaatcgaaggcaacaagctggagatcgatttcgaacaggcgggcaggaagcgggtgatggatagtttcgtgagcgtgggttaggctcggtcgggatgatgcgcgtgctcgaaaatccttatgacatgtccgggcaaggcgcttctttacgccagcttcccctcgggctcgatgcaacgcgcgaagagaatcccgactacctcacccaacagctcatcacctatatcggcaacaaacgggcgctgttgaacttcctgcgcagcggcctcgatcgcgcgcggaccttgttgggacaggacaccatctcgttcctcgatctgttcgcaggttcccgcgtggtgtcgcggatggcgcggcag

SEQ ID NO: 78450 - DNA, 568 bp, Arabidopsis thaliana landsberg
atatatatatatatatatatatatatagtagtattattatttgtgagcttgcaagacctacctaacccaggctgggttcacattagtctatgtacattaatcaagcgacgttaatcaaagtctatcgagaaattaactaaattatacgataaatcaagagataaccacggaactaaaggactgcttgaactttgtagcttccatatttttgaccgaaagtaaaaaggaaacatcgcaattagattttgaacttgttaagaatgctgaggcaagcatgacacatcaattcgtgataggaaaatttgtcaaatattgctacgtttttctttaaataagcaaaatcttacgttcgagctgagatacgttcaactcaaaaaattgatatgttaagaaaataaacaagactcaatattttcctgattctttcaccatcaaaagcaatccatatttcgcaatgttctcgatcgatatttttgcggttctttcaccatcaaaataaaatccatatatatcgcaatgttctccacatatatgtttgattccacttacacttctctttggtttggtt

SEQ ID NO: 78451 - DNA, 602 bp, Arabidopsis thaliana landsberg
  unsure (1)..(602): unsure at all n locations
ttattctatcactcattgtaatcttgaaacttttatattcgttgacttcgtaagcagaagacttagacaggatgcatacgcttacaaactaaaacgcaggttcctctctctttctttcacgcgcaattatttagtttttccacaagaaaataattacatttcattagcaaaattgtgtgaactcatcttcatacacttgaagataagaggtgacgtactcgtaaagacatgacaggactaggactaaaaataaaaactctggataattcgaaggcaatggatatatcaactcaagagtcaactggcccataggcaccttttcattatcttttcctgtcacgactgagtcagagcctattgaacaaatgttacggtaacaacatgtaagggcgttaatgttgtgtcagtaaatttcggtcaaatcacttctgttgaatctcttgcttctccgttcgcaatattctcatgagctgaacaaatatgagaaagcaaacgagatatttcactcactaatttgaagaacaaaacaggaatctcaacgtctctcctttacaaggctacacangttncagaanagacgtaacccaacagatagacatact

SEQ ID NO: 78452 - DNA, 568 bp, Arabidopsis thaliana landsberg
  unsure (1)..(568): unsure at all n locations
gcaggcatcacccgcgcccgcgtcatgggcctgctacgcttgtgtcggcttcgaggtgcgcgaggcaacgctgtcggtcgaagacttcatggccgccgacgaaatcttcacctccggcaactactccaaggtcgtcggcgtcaaccgccttgatggccgcgatttccaggaaggcccggtcacccgcaaggcgctcgagctttatatgagctgggcttatgggcggactgcaagcggcgaatgagccgtaggtaaggccgcaatcgccaagccagcgcccgcggccccctcatccggccctatgggccaccttcttcccgcggggagaagggaataccgtttcgcgtcgcgcgcctacatcccctctcccctcggggagagggcagggtgagggggctcacccactgccgtcaatttctcagggcgaaagcaccaactgcgcccnnnnnnnnnnnnnnnnnnnnnnnnnnnnnnnnncgtgatcccgtaatccttgcagggcaggccatccgagacctcgtcgctcaggaacttcatcccgagcttctcccgcaccttgatcgaagca

SEQ ID NO: 78453 - DNA, 621 bp, Arabidopsis thaliana landsberg
  unsure (1)..(621): unsure at all n locations
gagatttgcatatttgctttgagtatgaagttaggcaaagttattggcgaaaatattattttaattttggtaaattgaaacaaaaacttcaacaaaaaagatggtaatgttgaacacggcgtcgactcaccgcctatggccgaccagatacgtacactcttgatatgtttgttatgtaattcctcgactttggggatgagatgatagtgaccaaaagattataaacaaattaataatatttttcaacaattaagtgaattagaaaaacattagacaagaaaaatttatttaaggattaggtagttttagtttatcagaatcttcaagagagtgaccgtttttttagtcttcggatcatacccaatatttcttttcgaatgttcaattttaatactactactattattaattaattaatcatacacgataatcgtgtgtttaaatattaatggcggtgacagtattataaatatatacaatcaattagaatataacataagagaaagtctttggtaattaaataaccaaatgctggaggtttatttgtaaaaatatgatagcatgtaaaatagcatgcattntttttaaaaaaaaatacacagagttacataatttgttaaa

SEQ ID NO: 78454 - DNA, 226 bp, Arabidopsis thaliana landsberg
attgaggctaattcgcctttttcctcgggatggtcctttatatattttttgtcgtggccgtattccgggaagagaatcagccaagggttctgtatgggaacggattgtctcgatccggaacgccgacataaatagacggatttacccgtgaaagaaaacatcatagctgaggcgttcttataaatgtcaacaagagatctaggggaagctctcgaacaggaattgg

SEQ ID NO: 78455 - DNA, 558 bp, Arabidopsis thaliana landsberg
  unsure (1)..(558): unsure at all n locations
tctaacgtaaaaacgttagtcgatgtttttgcaaagaagctgctagaagtgaatttattcagtgcgtttatactttttcacttcgggttggcttgccttcacatatagcttttcatttttatagtcattctcatgagcgttttaaattcaacggagacaaaagcaaaagatagaaagagataaagcgaattacattcttttacatttagagcgaaaagatgatatgcttattcttaaatggtagcgctatccatctcactaaacattatcattaaatactgattattgattccgtgaatgtacggattaagctttatgacagtataatttctttaatcatcaaaatatgtgtcttcaaagaatctctacacagctgtattttatgtggtctaagatatttcttttttaattattgtttttccaactaatcctatatcctacgccgatcattttcctttttcatgaagctttatatatattgcacctttgaatgactgcatattcgccttctttcattttatgactatatatgattgaactgtaangagataacttttt

SEQ ID NO: 78456 - DNA, 545 bp, Arabidopsis thaliana landsberg
ttttttattccttgtattttcaatttattgtagactttatttttctaatctttccaaagtaagttgggttgggtttttgttttgattattcgatagcgatgatgagtttatgattctagcaatttatccaatgttatgtaccagttgtttggtgactttctgtttccgtgtaatgagtttgactagaatagttcaagtcatattttggttttatatacagatgtgtttgtatctttatgtaagttaatgaaatatatgaaggacatgttcatgtgaaaagaatcaggcaagttgaagtagaggaaaagaaaaaaaaaaaggatggcaagtcttttcttggatcactatcttatacttagaccagagcacaaattcttgcttttcttgtacaccatatatctttgatgctttgtgtaggttgattaaaagcaatcagacaaagacaagagtacatggagacatggttaaagttcatcagttgaggaacaatgactagagtacatggataccacatatttttatgctttgcttatacaccacacaca

SEQ ID NO: 78457 - DNA, 545 bp, Arabidopsis thaliana landsberg
taactgaaacccggttttgtttttctttgaaatactatctattgcattcatgcatttctttgaaataaacccagcaatcgctattttccatgatagaatatccttcattaaatcaattcctctgatatcaaacatctttactaactaaatttctctaactgatgtcaaataaattaaaagtacattctttaagtttaaaaatattgaaaattgatggtgtaatgaaaatttagtagccttagagcaatttttttttaacaaagccatttgaagacgattttgacgttgaaattcaacagcttacgttggatagtaagtagtgacgcacctacgaaaaaggtactacgttgtttgtgacaacgatacaaaaataaaataatctatatgtataagcgtttcatatcctatttaatattttttcttgtaacatgtgaggaaatgtaactatcgagcattacataaaaagtgtaatctaaggaaagtagtgaatagctgtgtaatgacgaaaacaaaagaagtgaatagctgtgtagtcaaatgtatgt

SEQ ID NO: 78458 - DNA, 559 bp, Arabidopsis thaliana landsberg
  unsure (1)..(559): unsure at all n locations
cctcacgcgcgaacctggtggtacggccttgggtgaggcttttcgctaagtgctattgcatcagtccatgcacgccgaaaccgaaacgctgctcatgttcgccgcgcgccgcgagcatattgcgcaggtgatagagccggcattgacccgcggtgcttacgtcgtatccgatcgctttactgatgccacctttgcctatcaatgcggcgggcgcggagtggacgcacagaaaatcgagacactggaatcctgggtacagggcggcttgcaacccgatttcacactgttgttcgacgtgcctgtcgcggtcagcatgcaacgcctgcaatcggcgcgcagcccggataaattcgagcgtgaaagtcatgtgtttttcacgcgtatccgtgaggcctatctggcccgtgctcatcagcatccattacgctttcgcattattaatgccgaccagccattggaaaaagttaataaagaagtcgaagaaatcataataagatcatcattattatgatttacccttggcanactgatatcttgaatcatgtggcgtccatgcgcg

SEQ ID NO: 78459 - DNA, 121 bp, Arabidopsis thaliana landsberg
aaaggggggaagaagacggaacaagggaagaaccgggaggggggaaagaccaaccggggaggggggggaaagaaaagcgaggaaaagacacgaggaaaagaaaaagagggaaggaacggaa

SEQ ID NO: 78460 - DNA, 608 bp, Arabidopsis thaliana landsberg
gattatttgccttataattcgtagtgtttgaaattgacacgcaaattgattatcttacaaaagagggaggattttgacgtggttggtgtgttcttcatttttttatcctagtttctattttatttgctccttcgatcttaagtaagttttctttttataatttcctttgttaatcacactaaactccaaaagccttttatatttttaccaagttaacaattaagtcattcaattttttgtttcttttccttattttatagtcattcaaattattgttacatgataatacggacggtgtttaggaaatcaagtggctctttcacgagtcacgacagcctaaattgattaaaagaggttaaagtaattcagaaatatttagggataaagatatagattccatctacaagactacaatccatcgattcaatggcctaaagtttcttttgatcgtaattttataaaaagaatatgaaactatgtacgaccattgcaaatgttcagtacgtgtatattcgtacagcgtaaaattggttggagatttagctgtaatttttttttattataatctttttgttaactgtcacttttaaacgttcaaaacgagtaaa

SEQ ID NO: 78461 - DNA, 514 bp, Arabidopsis thaliana landsberg
cgggcataacgtcgctgccgtctccgccattcgcgccgtcgttgcccgaggcgccagcttgtcctgccggtcccgccgggcctgccgggcctgccggtccccgcgccccatccgcacccggatggccctgttcgccttgcgctccggccggtcctgccggaccccaccggccccacgcgggcaacgcgagtcgtgccgttcgaatcgcaaccggcaaggccagtcatcaaagccgcccccatgaggaggccaaacgtcctggatttggtcaagttcatctgcttgctccttaggctttcgtccgcccggagccgagtcgaccagtaaagggttaagaaagtgttaaaatagagggatttttgagcatatttcaaatatttatggttaatattattttattaaccaattgtttctcggattgagatctcatctgaaaagtaaaatagaggattattcttaaatttaggcgaattgatactttgcgcctcgaccattggccgcgccccctgcgagc

SEQ ID NO: 78462 - DNA, 438 bp, Arabidopsis thaliana landsberg
  unsure (1)..(438): unsure at all n locations
aaaatatctatctctaatgataatgcgatttatcaaaaaaaaaaaccaaaataccatcatggatgtattttcctggatttattattgtcgttgtctcttgtctttaccgaatttaatctaaatggatgtcttcattaaacaaatcgaaagcgtttctaactttacagtttttcgttgtttcactgttatagaattagggtttatgtaactgtcctttacttgcttcaacttctcaaattaaacttcttttttgaaccacgagatctgtcaaaatgagattttatccacttctactgaaaattaagtttgaattgaacaatttctttagccattgatctaaacacatgcaaataaacggatctgggttttctaaaaatcacttttttctgtatgtagttgttnctgttgctaaaaaaattgtgttctgaatcatttttc

SEQ ID NO: 78463 - DNA, 594 bp, Arabidopsis thaliana landsberg
  unsure (1)..(594): unsure at all n locations
cgacacatgacactttcttttttattatgttgatggacattttcaatgattctctcttgtacatcgttggatatgtcctacagtatttgtctcagttaatctgtaaatctactaatagatcgcattatttagaattcgaacctcatacatttcggtatatattattaatgaactatgagccaactaatgaaccaatgagactttcacatccacattagttaattaaaaatcagatgcttttaaaaaatttatcagataatatgtgggtcaaaatttaattatgccctttgttaccttctaaatgtctagataatccatcaaattctagcaggacaacatatttcttctcttttgttcttgtatatggcgtgatattttattacttttgctggtattttttccaataaacgagtgcaattattttacattcgaaatcaatgtcttcaataaatgtgaaattgaatacaaatagatcatcatgtttcactatgaaaggccattaattctttcttatctntgttgaaggagttgaattactatttcaaggactgatgactaatcataagccatgttaaataaaaatatcccataaag

SEQ ID NO: 78464 - DNA, 552 bp, Arabidopsis thaliana landsberg
  unsure (1)..(552): unsure at all n locations
tattttataaaattagataagtgtaaaatagttattttgtattctcactaatgctaactttagtaatgtgtagtgtataatataattatttattgttattctaaacaaggccgactcaaaaataatttggaccttgtgccctatttttttttagaaaactaaaaattatttttaatttaaaaatttagtatctccatacaaaaaagtatgtttttcatacatatttattcttttcttttgtcccaaatatagataaaataaacgatcaatcatgatttcggtttttgtcttctccagtttattagtcgtcaactacatcctccatgagagattgccatgtcactctccgattctatctctcttcttcatgtcctcacgcttcagctcaccattcttgctaatagtaatgaattaaagatgatgtggaattaaaaacaaaacatataactagaaccaaaacgttctcattgttattccaacccgatggagaataacgaaccanaacgttccacatcatctttctttcaacaaacacaacctcaaacacaccac

SEQ ID NO: 78465 - DNA, 458 bp, Arabidopsis thaliana landsberg
  unsure (1)..(458): unsure at all n locations
cgaaaaaaaaaaagactatatatggggtttnnnnnnnnnnnnnnnnnnnnnnnnnnnnnnnnnnnnnnnnnnnnnnnnnnnnnnnnnnnnnnnnnnnnnnnnnnnnnnnnnnnnnnnnnnnnnnnnnnnnnnnnnnnnnnnnnnnnnnnnnnnnnnnnnnnnnnnnnnnnnnnnnnnnnnnnnnnnnnnnnnnnnnnnnnnnnnnnnnnnnnnnnnnnnnnnnnnnnnnnnnnnnnnnnnnnnnnnnnnnnnnnnnnnnnnnnnnnnnnnnnnnnnnnnnnnnnnnnnnnnnnnnnnnnnnnnnnnnnnnnnnnnnnnnnnnnnnnnnnnnnnnnnnnnnnnnnnnnnnnnnnnnnnnnnnnnnnnnnnnnnnnnnnnnnnnnnnnnnnnnngcggtaattagccttatttggtaacttgaaatgaaaatttgaattgacttcaaattttactttaac

SEQ ID NO: 78466 - DNA, 493 bp, Arabidopsis thaliana landsberg
  unsure (1)..(493): unsure at all n locations
gccttactcgcggngggctgtgccgcggacacgccgacggccacggccgcgacggcggcggccgccgtcaggcccgccgctgaacgcgtggccagcgtgcgccggcgcctgcggtccccgttctcgaagatctcggcgacggccgacggcatgactcgctggccctcgccggccatgtcccgcagttcggtggtgaggtcattcatcacgtatctccgggttagggctggccggccccggaataaccgccggcggtctcgctcaggtggggtgcacagcccgcgcggccgcgagacagccgcgccttgaccgtgccgggccgcgccccggtctcggccgatatctggtcgaccgtcaggtcgcacacgtggaacaggaccagcgcccggcgcttctgtggcggtacccgccgcagcgccgcggagaaggcgacgcggtccggagacggcccggcgatggattccggcgcggccgccatctatatcagccggtc

SEQ ID NO: 78467 - DNA, 508 bp, Arabidopsis thaliana landsberg
  unsure (1)..(508): unsure at all n locations
aatattgtaaccatatcatgatatagcatgcaaataacagtttcttaattctctggctcatatgtttcttgaagagtccactttagaacagaaagtttttcatcttttaacttggattcaagcccaatattgaaagactgttctgtagtcaaactgacaatctggttgctgattttggtttgaacagccttgaggagttccgcgttcgcgctctcttgaatcaaaggcacgcgataaaaatggataacctcagcagcaggtttctcaaccaagcttggtagctcatcagcagtaacaaaagaaccagtagaaacagctgctttaggtttattaggttgagcagaacatctcaagctaacagcttttgttcgattcagagacagccgtgaagttctcattctaacagaaccccacaattgactcattgagctccgctgcaaaagcatcgcttgtctattggaaccctgcaaaaaacactaactngttaaaacgaaaacattatggatgc

SEQ ID NO: 78468 - DNA, 548 bp, Arabidopsis thaliana landsberg
  unsure (1)..(548): unsure at all n locations
cgattccgaggtaaaattctgaattttctctgatccgtttcctttttgggatctgtgtatgtttttgttttattggaaagatttgttaggacatagacatatatgaaaaagcatgtgcatgcatatctatcaaatgacaaggagagagagagataggctaatgatatacataccatgtacatgcaccaaattaagcatgcatgtttcatgatgactccaagtacgtaccatgcatatatctctttctaaaattaaattttaaaaagtgatgatgatgatgatgatgatgatgatgagtaccttatcttccgaaggtttaggaggagctaaagttcgagaagtggaaggaagtccagatgttgaacttgagtttgccatgttattatgatgaggttgaagcatgagatgatgtttgctactcataggagactccggttgttgacnnnnnnnnnnnnnnnnnnnnnnnnnnnnnnnnnnnnnnnnnnnnnnnnntactgacttggaactctcctgcaatacatattcaacataatcatactcatcatcat

SEQ ID NO: 78469 - DNA, 596 bp, Arabidopsis thaliana landsberg
attaaaaatctcctttttaaaaatccattatttcctaaaaacaaacaaaactacttcaatgcatttatctgaaacacgaaattgagaaacatcaatcaaatcagattaatcatcgcttcgttttgaaaaccctaattcctcaaaaatcccaatttttatcccaattaaaaatcgatcgaaatcgaaatggaaacagaggttatgaaaattgttaaaacaaaattgaattcgagaaaagaaagaaaaagatcgaagctttaattaccttagaaggaggaggaaaaatggatccgagaataccagaagaggaaggagaagaagggttttctctggaaccaaaatgctcagaggttcacgaggaagaagaacaaggagaggaagacgaagctttcttctttcttccttccattggaattcgtcgctcgctctaaaaaaaacactctttcagctattatacgtatatgtatgatgtatctgtctatatacgtatgtgtaaatacggagagatatatatatatatgtgggtgtgggtgtatgtatcggtttatacgaagggtgaagttattgagagaattgtgaaaatatttgggagagga

SEQ ID NO: 78470 - DNA, 553 bp, Arabidopsis thaliana landsberg
aaaatggaggatatcaccattgtaatcttctttatttctttcttctttgtggtttctcacttttcgaatgggagtcattattcttagtttgaacaacttgtgggtgaaatttgttttgctagaatgggatagaaagtgagagccaaaaagctgagcccgagaagactggtcgtggacgcaaaagaaaggctgcttctcagtacaacaatgttggttccatttatataattttcaactactatgcatgatcttgtatatattgttttttctgcttgtttgagaaagtaacttacttggatgcttttttcttcaatcagactaaggctaagagagcggttgctgctatgatttcaagatctaaagaagatggtgagaccaccaactcagatctgacagaggaagaaacagtcatcaaactgcagaatgaacttttgtcctcttctcactggtggacagttaaaagtctatcagcttaaaggtgtcaaatggcttatttcattgtggcagaatggtttgaatggattatatctgatcaaatgggacttggaaagac

SEQ ID NO: 78471 - DNA, 594 bp, Arabidopsis thaliana landsberg
agttctgctctgatttttgggactaaaacagtttttgtgtctgtgtgaaagcgatagaacaaaaactggccaagggttttgacttttgtgactgtgaccgcctcctgagaatattttattttgctttcaagggttttgtgtaatactgggaagttgtttatgtttcaaccggataaatgtttgaaatgtgtgtggcattggactattgggcctacttttattttggcccatattagaagtctcattcggtcattcctcatcaaaagatatctgctaaaacatcatatacctaaaaaaaacttttttttttctttttttgctgaatgttaatcaaaactaaattgctctctgtatcacctccaccctctgagttttatatgcaagtaaatttgcattacaaggttcttgagctggatgcttttacagctgacaaagacattcaaactaacctcattacgtgatcatctacatggaaactcaaaatagcttaagtaacatcaaaaagatgagtttgtaatcagatgtttgtccatccaaataagctaatgttttaaaccgtgtgcaaaaaatactgtgaactgaattgttactaag

SEQ ID NO: 78472 - DNA, 607 bp, Arabidopsis thaliana landsberg
  unsure (1)..(607): unsure at all n locations
acacgtccaagagaattttacataaaatttccaaatgtgtgttaaaaactgaagaagaagataatgcttatttatcttctttctccgtgaaagaacagtgtactttcattccgcagcttctctatgttcctaaagagaaccaaaaagcagaaatcaacaataaagttagtattcataaattaaagagaacaaaataatgcaacaaaactgaaaaagagaaaagtgggtctgattaatctcttttgcatgaacgcaaacacttacaaaaaaaaattacttactttttcttacaataatttcatgaagaaattcataatcttcatcatctgcctcactaaaagattcagagcactagatcaacaaatagcaacattttataactaaataaacaaaccaaaagttgtattatcgaggggaaaaatacaactttaatattcaagaaagaagaagttgaaaagaaggagggccaaatcacgtacggagctgcctctgtttatgacacgaatccattttcatatctttaagatcttccgaccaaaaaaaaagatnaatcagaatcaagaaaatcttatatataatcactttcttaagatgtcatttatttaaa

SEQ ID NO: 78473 - DNA, 620 bp, Arabidopsis thaliana landsberg
aaagaaaataaaaacgagttaactatttctatttacctcaagatatcttaagattaacttaaggacaatacttgagtgctcttgtatataagattaacttaatgtatctgagcacagtttgtaatctaatagtttgtataagtactcaaatataaactcgagacgacaaaaaaagttatgcacaaagagtattattgattgtatatgttttaaagtttttcattgtctaccatgtactatatggtgattccttttttgtatttaattataatgtatgtactacatcttctttattggtacattgattatttctcaaaagcaaagttcaaaatttttagatgcacgttcaataaagttacattagtattttgaattaaggttgtttaaagggttttcaaaacaaaaaaaaaaacacgtatgccgaatttcgttggtctatcatatggagaaaagatcttcaatttggatagaccaacccgccaatagttttgaacattttgcaaaacattgccgattgttttggactttgggtttgataaagaaatttcaataagtgaatgtagaagactgtttaattagaaatgtttgtttgcatttactgatttcaattatttagtgat

SEQ ID NO: 78474 - DNA, 500 bp, Arabidopsis thaliana landsberg
agggcacaaaatataaagttaggatttcggaaaattatattcaattttgtactttcgctccttgttggaaaattatgcgcaaacgttaccatatattacaattttttaaaatgtctaaaaaagtaagtaaaatagcgattctgacttccggaggagatgcacccggaatgaatgccaccatccgggcagttgtacgtaccggagtgtatttgggactggaagtttatggtattatgcgtggctatagtgggatgatggaggatgatatctttcccatgggctccaaaacagttgcaaatatcattcaaagagggggaactattttaaaatcagcacgttgtagagagttttatacagaagagggccgggcgcaggcatatgccaatttaaagaaacgaggcattgacggactggtggttattggcggagatggcagttttacgggggccatgaaactgcaaaatgaatttggattacctgttattggactacctgcacca

SEQ ID NO: 78475 - DNA, 603 bp, Arabidopsis thaliana landsberg
  unsure (1)..(603): unsure at all n locations
cacacgaaatatgcatgttcaattttaaatgaactaaagcaatcggggtttaggagtgtagaagtgtataggaacatacccaacatagttttgacagagattctcatgggaagtggcttgattgattagtttttgaacctgaactttcacagacaaaccatgttcgacttcatgagaatctcctccgagcaagttattatgatcagcaatgggattgctcggaattgcagacgaagaaaaatcacgccctgtaagcttatgactcatacgtgccataacaactacggcacgctcatttaaaacttcattagcatctccaagcatatttacagcctgaaataatccaaaaatcaaatttaaatataaaaaaatccccctttgagaagaaaaaaacataataagattttcaaaagaaacctgaagaatctccttctctcgagtactcctttgaggctgaggaagatctatatcagcgggatcttcatctttttcgtcaggctcaacatcagcaggagcattggggttgttgttaccgagcagtgctaactggnggactttcattgaatnganaagacgccaattgattaaaggatcatgtacaaa

SEQ ID NO: 78476 - DNA, 574 bp, Arabidopsis thaliana landsberg
  unsure (1)..(574): unsure at all n locations
aaacgaggataagacccattctcttaaaacatatccgtatcatgtcctcgtcaccactatccatccgctcacctttttttaattctgattttgttaattggaccgaaaattttagttcccatcactaataataacgacttttcctcaaaatcaatttaaatagaaatataacaacgtatatccttaagttattttatattgacattttatgcatagtaataattacgctatatccttaaaccaagaatcttgtccctctttaaacaactttttcccgacaaataaaaagactgcttttttctttgaaatatggaggataatatcaagttatcaagtttcagacgatttttttagcattgacacacactgaattcaattcaaagtaaaaatctatgatacttgaatatacagatttcaaattgaagtgcttaagttaggagaataatattcctattcatacatatttttcataattctttaaaatcaatattgacattactacatactaaaagtctcctttgagattnttctaagaggatatgcacaacggatgaaaaaaaaatgcacttttaat

SEQ ID NO: 78477 - DNA, 154 bp, Arabidopsis thaliana landsberg
  unsure (1)..(154): unsure at all n locations
gcaagggggggggggaagggaggaggaaaaaggaattcaaaaaaagttaaaaagaaagagaaaggggggggaaaggggggnaaaagaggggggaacagcacgacgggccacggagcacaggagggggaaagagccaggggagaaaagagacggg

SEQ ID NO: 78478 - DNA, 599 bp, Arabidopsis thaliana landsberg
  unsure (1)..(599): unsure at all n locations
acatatcatctactaaaactagactagtacctagtttgtccttttaattttatttttcttcttgtaatttaattgggtcagtgggactctaagaatctatagaaaccacattttatatatatggtctcatttgaaacaacacacacataagagataatgttgaattaatgaatgtgcatgtgctgattatggaagggtaaagttagaggtatatatgggaggtcaatgatgcaacttggaggaatagttttgtgaatatgtccttttgttttcttgtttgtttttatatatgtagaatcgaataacaaaatagacaacaatcatgaatatgaaacacatatagcaaaggaaaaattaggagaggtagaatttaaactgaaaactcctaatacggaagtttagtgtattcctcatacaataaaaataaacaaatttaatagaaatggatagagattttattctccctcgggattgcttattgctgcgtaannnnnnnnnnnnnnnnnnnnnnnnaacaacccttacagtaattataaatttcgtttactattatatgaatacgatcatgaaaatgtngatttatgctaaaatatatcaat

SEQ ID NO: 78479 - DNA, 413 bp, Arabidopsis thaliana landsberg
atcgttaacgaagcagatcgaaatcgaatggtgtgattccggatacgtttgtgttgaatatgaccatcataagcttatgcaaagtgtcttgaggttgatgaagttataagagtgtttcaagagatggctttatatggctctgagcctaatgcttatacttatagttacttagttaaaggggtttgtgagaaaggtagagttggacagggtttagggttttataaggagatgcaagtcaaaggaatggttccgaatgggagttgttatatggttttgatttgtagtttgtctatggagaggagattggatgaagctgttgaggttgtggatgatatgttggcgaattcgttgtctccggatatgttgacgtataataccgtgttgacagaattgtgtagggaggtgagggagtt

SEQ ID NO: 78480 - DNA, 147 bp, Arabidopsis thaliana landsberg
ttggaatctctcatctagggtttgtagattatgagtctttatcgcttgtggctcatcaggaaggatcacaaagcgaataatgttcagcttgaggtctaaatggttttagctattttactggctctaaaaggctagcttatgctatct

SEQ ID NO: 78481 - DNA, 630 bp, Arabidopsis thaliana landsberg
atatatcctggtcagtataacaagtaacagaacattctaccagtttaattaacttgtacaaaagtattttgcgggataaaactccatcacatcaatatattcagagtaaattgacacattcttaacccttttacaaaaaaaaaaaattgacacattcttctttgtaacattgacaaaaactgagatttagtccacaataattaactacagaactaacctcaacgaactaatcaactgaaagttcttttattccttgaaaaattcaatggtcaaaagtttccagtccctagaccaacacagcttgcaaattagacctaattaaaccttcctcattctctcttttcccctaattttgaccaacaaatattgacttagaaaaaaaaaaccattacatataaatataatctcatcccaacccaaaatcttaaaacccaaatcaatactattgacgtcaaccaaaacaaaaaagtcactatttttgcattttacaaaacatggtttttttatggagaacgagatctaacgagaagaagataactccgggtttgagttggccggaatcagaaccggagtcagagataacaattccaccggagtttcaatgtccaatctcgatcgatctaatgaaag

SEQ ID NO: 78482 - DNA, 588 bp, Arabidopsis thaliana landsberg
  unsure (1)..(588): unsure at all n locations
gaggtgatcctttctgtattttgctttccatttctatctttgtccctctgttctttcttgccaaatttgaaaatgtacaaggaaaatataattttctctgataaaagtgataattgagaaatttctggtggtttttgtaaatgacaaaagaaaaaacatggtaccattacaatctgacaaactggttctatcgaattagttagaaaattgttgtactttgaaaaatgcaaaggtaaatggttttagaaaccttttttcataaagagattcatgaaaaaaataaaatgaaagagatgtaccatttttagattattacaaagagctaaaacgtctaaacaactgctattatatatactcgtatcatcatcttaccacgagattcacaaatataaatgggcctagtattgttgaatagaattaaaactatattatgggccacaatatacataacacttacttgaacctacccatcaaaaaatttatatttgaacttgggcttagggaaaatgttnttgttgaaaagtccaaattatatcattaaaacttcgtttacataaccacatatgtaaaataaaattaaaaaccgtc

SEQ ID NO: 78483 - DNA, 606 bp, Arabidopsis thaliana landsberg
ggaatctcccagccggagatgacagacgaggcgcgtgatcaccacgcgacggctggggaagtcatttgcgatgtgttcggcaagtgcaggcagaagatcgcgagtgtggtaggtcgggctaaagaccgcaccgttgattccgtcggcgagacagcttctgatgtcagagaagccgccgctcataaggctcacgatgtgaaggaaacggttacacatgcggcacgtgacgtggaagacacggtggctgatcaagcccagtatgctaagggtagggtaacagaaaaggcccatgatgcgaaagagggtgtagcccataaagcccatgatgcgaaagagagtgtggctgataaagcccatgatgcgaaagagagtgtggttcagaaagcccatgatgctaaagagaaggtaagagagaaagctcatgatgtgaaggagacggtagcccaaaaagcccatgaatcgaaagagagggcaaaagatagagtgagggagaaggcacaagaattgaaggaaacggctactcataagtctaagaacgcgtgggagagagttaagaattgggcgcgtgagttcgggtcagccacagcagcgacgttgagtccgact

SEQ ID NO: 78484 - DNA, 457 bp, Arabidopsis thaliana landsberg
attaaaacataaataaacaggggcctgaagaggtacacgtgtcttcagccaaccaacacgtcatctttctgatctagaatgcaacgaagtcgtttggaaacaaactatatcttcgttttttcctctcgtgtctttatcggagttcacagtagcaaaagagaaaagaagttcacgcctaattacgactaatttttaaatccagaggagaccccattcattgattgattgaataaaataattcgtaacgaagaagcaatcattatcattctctcgatttctcatactagcgataatagatcgacgctgttgatcgcatgtggtagttcccttttggatcagtgggttttgaaatggagaaagttttgtcgcccgcttcctctttttcacggaggtctgctaatcttgaagctttccccaggaaattaaaaagaacctaacacgggttgctctttttttc

SEQ ID NO: 78485 - DNA, 477 bp, Arabidopsis thaliana landsberg
gggatctacagaatggaagggccgttttagccaaggttggtattttgagggtccttgaaattgtttatttttggattaaacttccaagtctaaacctgaattctggataaaaaaatgaagcgtcccaaatttgggaaaagacttattcggaatattctaagtaaattgatgtggatcagattgtgtgcacgttctttaactgatcactttcaatttcaaggtggattaagatgagcgaatcatccagccgtaatcgaggctttgatatgttttctaattttgtaaaccctaggaaatcctgagtgcgttttccgggacaaaagtggacttcaacggagtgctggagatactctatcgaaacgtgcgggcatcgacggacgaatcgaacatgcttactgacccagtcaccatcttgcctgacactctttttgcactgcatctatttcagcaggtgggctttattttacaagatcaatt

SEQ ID NO: 78486 - DNA, 290 bp, Arabidopsis thaliana landsberg
  unsure (1)..(290): unsure at all n locations
agggacgcggacgcccagcgcgaaggcaataacgcccctgcccgaaacccgaaataatgggttaacaccggcgaaccggcgcgcgaggccaccaggagncaaaaagcaccgcagccgccgcnggccgacccagaagagngcgnggccggacaaccggcgnaaacacggccccccggggccaaagcaccccggcggaggagcccacgacgaaagaagaaccgaacgcccgcccccgcacgcagggggaacaacagaaccgggaagacagccggacggggacgaaagaagaa

SEQ ID NO: 78487 - DNA, 473 bp, Arabidopsis thaliana landsberg
aagcaactctcacattacacaacgtgtcgaggatcgccggaacaatattgcatcctgcactcaaacgcatgggcaagcttgcggtacgaggtctcaagaatgcattggagaatccacattcggtaactgccagcgctaggacatcaacactggcccacaaacttctactgcctgccgcgatcaactttaccgagcggggatacttatcgatgccatacaaagcccatagtcgctatatggacggtaagacggtagtaatcaccgggccaaccggcggcattgggtttgctgcagcgtgcgaactatctcgtctcggagcccggcttgtccttgtcgggcgtgacaagcaacgtcttgaacaagccgcaaaagatatcgaagcttttgcaggcgctgattacggcattcggctgattgaagcagacctcatggagtccgagcagttgcgtcgcgctgccgatctgatactgagt

SEQ ID NO: 78488 - DNA, 568 bp, Arabidopsis thaliana landsberg
ccatttattactgttcatatttttcagttaaaatatacaattttaataaataaaattcaagaattaaaaatagtacttttttggtttgtaaatttatagtatcaattaattcttggaaatagattggtggtggccgacttcacgtgaggagatgccctcattggacagtcattttgcttttgagttataaatttgcaattaataaatgcatttcacccacttgacaacaattttgtttatgtttttttagtaaaagtttcaaacatatttatgtttctcgatcataatccaacggctccaccttgtatgattttatctcctccacataactaaaggttggtgtttctagataatcgattttgtactagctgaagtattaaatttccaatacctttcttacgagttatggctcttttaatagcatgcactaatttaatttttttaatgaaataatgatatggctgtaaaaattttcaaaaagacagaatatcgtaatcccgaaccaagagaccatcaaggtctcgcatatagcgagcaagacgtgtgatcattcctgtggatagaatca

SEQ ID NO: 78489 - DNA, 600 bp, Arabidopsis thaliana landsberg
tagaagaggccttccgggtgatcccggccgagcatctggaagaatgagaaaaaattcgggcacgcgaacgtcctcgcccactctttgataaaaagtgggtgaggatacccgcgctccatattccattgatattacagcggcctgccggggtctttgatggaatcctccttgccggtgaggtcggctctcgtggccacgagatttttgagagcgtcgtcctcgttggtgtggttgaggcagagcacctgtgccacgcggttgttttcatcaaggcctatttcagcaaagtcggcctgatcgccggtggtgacaccgcggatgaggcggcgcttgaccaggcgggcttcgccccagccgttgagcatcagatcgaaaacatcagaaaagaagttgttgacggcgtcgtattttttgtcggcgccggccatgttcgcgccggcaagtcctccggtctggacggcattgtcccagtggtcgaggtggcggtgtttgccgaagagaggatcgaagatggcgcagcagtcgccggcggcgtagatgtcgggaatgttggtgcgggcgtagtcatcggcgaggatggcttttttcgagacgatgggt

SEQ ID NO: 78490 - DNA, 621 bp, Arabidopsis thaliana landsberg
cccatctctattttagagataaaaatagagatatgttgaagtgaaattaatgtaaaaatagagtattgagataaaaatagagagaagttaaaaacaattaaacccaataaaactagaatcaaaccaaaccaaaccaaacatcctatttccaagaattattttgagagaacgaaatgaaaatgctctcaaccaaccattgctactcaagacctctacatattacaatctgcattaaaacatcaagagaatcctagactaatgaatatgttttttgagcatttatgtttattttgtcaacatcagattttaatcaacaaaaaaaagttcaatgtcatattttggtttttcagtatggcgatatatataatcaaaagcgtcatataaaattgtaattctcgcccattgccaatacaaaactacacaaaacgagcatcaccttttaccaattaagtattgaaatgctattatctaaaggcaattaatatgagtcctccaatgtaatggttaatcaatatattcgcgaattgtgcttagaaatgaagccaaattgaaaaaagtttgtcagtattattcgtgaaacctaccatttgttgattaaaaaaacgttttcaacgtcaaatt

SEQ ID NO: 78491 - DNA, 511 bp, Arabidopsis thaliana landsberg
  unsure (1)..(511): unsure at all n locations
aggacggttcggccgatctgcgttatgtcgtcgccgcggcccggggcatcggccgccacttgcaaggcttcaaggtggtggtcgacaaatcgaccgtaccggtcggtacggccgatcgtgtgcgcgccgccattcaggaagaactcgacaagcgcggcagcgatctggggttcacggtggtttccaaccccgagtttctgaaagagggcgcggcggtcgaggacttcatgcgtcccgaccgtatcgtcgtgggctgcgccaacgacgaaggcggtcagcacgcgcgcacgctgatgcatgacctttacgcgccgtttcagcgcaatcacgaacgcatgattttantggacgtccgttcggccgagctgaccaaatacgccgtcaacgccatgttggccacgcgcatttcgttcatgaacgaaatggccaacctcgtcgaagtgctcggggccgatatcgaactggtgcgccagggattcggttcggatccgcgtatcggctatgacttcct

SEQ ID NO: 78492 - DNA, 298 bp, Arabidopsis thaliana landsberg
ggaatactcactgggatctttgattttaaggtctaccaacttaataataaattatatatttgtaacgtctctgatttattaaaatcacacatgatgatgccggaaaaatataaattttaattggtattttgaattatatttagaatctctttactagagtctttgttggtaggaaaggttaccagggtaaaaaaacatatccatcaaatatggtaatataagatatatagtaggattcaccgtaccttccattctatccgtaggatgggatgttcacgtcactttgtctagtggacct

SEQ ID NO: 78493 - DNA, 401 bp, Arabidopsis thaliana landsberg
agaaggaaaacggtcagctaaatcgattgcttgcggtggccgttacactcttgttattgtagaatggaggtccggtgatatttgacactcaatctcactggtcactgaagaacttgagaagagaagatatcaatagatttttactaaggaaggcaaaagaagagtgtatctatacaaagaaagagggaaaacatgcttatttcaaatttactttttccctacaaataatctttagaaaaaataataattttgatttctagggaaaaaaatttccaataattttgatcaggagatgtagacattttagtttgctgaaaaccttgaacaaaagtttgtgtgttacaatcttttaaatcaattaagaaagattgtatcatgtgccagtgaaaacattgataagt

SEQ ID NO: 78494 - DNA, 564 bp, Arabidopsis thaliana landsberg
  unsure (1)..(564): unsure at all n locations
ttctctggaacattgaggtctctcataaaacaagatttttggttttaaaatttacccttgattgcttctgatctggcgtcaaccttagccccttttgattcagaagaaaatctccatcgtgaaatgttccactcgcagtcctgttttcaaattcaatgaagtttcacagaatcaattcaaacccagaaacaatggatcaaatctaatcgattcttgtttacaatctcgccaaacaaaacagatccaagtaaagaaaggagaaatcgcgaaacttacaggaaggaagagattggggattcttgagctggaacggagagcttaagctgcttcaagttcgatttgatcttcaccattttttttctttggtttcttccttgggattatcgctctctttctagggtttctatctaaataagcaatttcaagaaagtgttaggaagtggagagaagacgacgaagcaatcaataacggactaatttatnttgaacgcgtaagaccgggaaaagaacacatttacattaagaaaaacaagaattatatcttttgggctgtaagatttaaat

SEQ ID NO: 78495 - DNA, 399 bp, Arabidopsis thaliana landsberg
actgaaatgagtacaaccgaaatactgttcttcttcctctccgcacttgctgtattcagcgtttttatgttgctggtgagcaaaagtcccgtgcacagcgtactatggctgaccgtggtgttctttgccatctccggtcattatgtattgctgaatgcacagatcctcgctatcgagaacctgatcgtatatgcaggcgccatcatggggttggtcctgttcgtgatcatgctcatgaacctgaatgcggaaaccgaaccccagaaacatatctggatgaaactggccggcgttatttccgggggctgtttcctgatggtactggtatcgcttatccggcaggcgagcgatatgcaggcaaaaacggtgctgatgaaaacaggtaatatcggtttgatc

SEQ ID NO: 78496 - DNA, 494 bp, Arabidopsis thaliana landsberg
agatgatgtgtgatgggggtcgatgtgttagagttttatttgtgtttttggaggagtcaacagagaatgaggatgatgagattgatggtgagccatgtgaggaagaactgagagtagaaaggaatgtagctccgtttgctgaagaagatgaggatgaagaagagtttgactaccacaatactcctcctaattctgatgatgaaggcgaagaggagacattggtgagatgtaagcgaggaagtggttaattgaagatgtaccaagtgtttgaaagcttatatgagttccaagaagctttattggactattatttaaagactggatataacatttagttaacaagatggcggaaagacaagaagttagcacagtgtggagtacaagatgctgaacatctgtgtgattggaggatacattgcttgtacgaagagtaccttgtaagtggcacgtgaagacatttgagcatgaacactcttgcttataagatggaaata

SEQ ID NO: 78497 - DNA, 588 bp, Arabidopsis thaliana landsberg
  unsure (1)..(588): unsure at all n locations
ctcaccatctcctccacctctgttactgcttaccttgcatcatgcgtgagacactccctcctctgccttccaatccactttcttcaacccatccctccttttttttcacctgctgacgggatgttagaaagcagtcttatttgaggcgaagtcatgtgagaaagagggagctcactgagccctcagctagctatctcgcgttaggaagcaaggaaaacctgaatctccctggcctcagaggagggaagctaccgttcacagatacagaatacacacatgttctgggtcaccaagtggccatgcgagctatccaatatatattatgagtccatctcaagtatataatataaatccacaacccgagcattgagaataactgctcatcgagtctccttcacgttggggatatggagtcaatctcgagatccgaaatcgaaaatactgcattatggcggatctgggagagaacccaacgtaaacattntgttacatacagggcgtcggtagggtaacgagattgaaggagaaagcaccaaggttcaaggaccccgagcgaaggaagtaattngcgtagaaaattccacgacg

SEQ ID NO: 78498 - DNA, 528 bp, Arabidopsis thaliana landsberg
  unsure (1)..(528): unsure at all n locations
gggtgaatcggagaggaatttatagccgatgaaatngatcgtaggagagtccggtggcgagtagattcctaagcagtcgtgatcggacggtgattcgacgccggaccatttgatcacgactatgtcgccggatcggtttaaggtttggggagagattgaaatcgtggctttggaataaacagaggagattaagaggaagaagaagaagagagtgttaacggcggcgatcatgatttacggcggaggatggtggttagtcaaaaagtcaacgtttgttttttcagttttagttggttttggggttttggtgataattaagaagagttttttgagtgattatgaagtcattgtttgaaaccaaacctgatttatgacttttcaccttcaaaagactatgctattttagatataaaaaacatatattatggaacctaattatttattcccaaattacatgttatcaaccagtttaattgtcaaaacatacaatatttattggtttggaaaccagaagtgtcattaatttgt

SEQ ID NO: 78499 - DNA, 365 bp, Arabidopsis thaliana landsberg
attcaaaacactacacttgcttcatgagggggtgttcaagaaaagtgcggtttaagcatgggtttaaatgttcttatgaacggatattacaccgcgtatatgaatatagtggtaagatgatttactaactattacccgccatttcagtgtgaaggtgatctcaatgctagaattttacatgcctcctgcctagatggagatcattgaaagctctggtgacagagagggggttgactgtgatgaggaccgtcatgctagctggcatagaggggagagatccggttctttgtgagaaaacatccactttcaggcgacttgaccacatccatcattacctgtagtgggccacgcctcattgaattgac

SEQ ID NO: 78500 - DNA, 341 bp, Arabidopsis thaliana landsberg
  unsure (1)..(341): unsure at all n locations
cgcagcnacgtgnngcgcgaagggcgttgcacgcacggttttaagcgcgcaggcggcgggactgtgcgcgctatggtcaggataaccagggtcaggcgcgtgatcaggacgccattatcggtcgaaccgaaccgcgggtgatggagactggtaagcgcaatggtgagggggagctgcaggacagacaacacgatgccgcacgcgaatacattgggattgaggtgcattgacccggcgtgtgacgactgaagaaggcactagcagagacctacgtgcgcaacaggcgcgtgaatcagcacgatgcggtcgacgcgctgagcgaagagctgtcgccggaaagc

SEQ ID NO: 78501 - DNA, 486 bp, Arabidopsis thaliana landsberg
atctgggacatgataactgcactgtggtgttagcggaaagaattaatcgcaggtaggatctttgtctggtcaagcaagtttgttaaaacctttactgcttaatctataatattccctctcttatctaaaatctatattgacctattcttttggttactcttcttcttctagttgtgtctttcatcgccgcattaggcttcttgctgtatggaggaaggtctgtgtttttgttattttcatatgtctcatcatcaaaatgtctgcaagttcttcattggctttactgggccgtcttttcttatgtgtttttttttatgctatagattgcttttcatgctaagaaggttccctatcgagtcaaaaggaagaaggaagaaactccacgaggtacttagattcatatatctgtatgtgaataatttgtcttatatagttccataaaactttgaacccaaacatttctaccttcaaaaattcgtctctttt

SEQ ID NO: 78502 - DNA, 316 bp, Arabidopsis thaliana landsberg
ggattatatattattaatcaaagattaattgggacattatatatatatgtaagattgaaaaatacatattgtgttttcaaatgatttctatctattttaaaaattttttatgggaaatggtaatattttttaggaaagtatagaggcaattgcaataaagattcgcaaaaaaagtactaccgtaaacattccgctgaaaaaatcgcattttttagaaaatttcccaatacttcgagaaatccgttggggaaaggtcatatttgggatcggtcagatttaattttcaattttagagattagattaaggtaagaatca

SEQ ID NO: 78503 - DNA, 585 bp, Arabidopsis thaliana landsberg
gcgctccggccgcgtcggcgtcgcccgccgcggcgggcccgccaggcgtgctggcgccagtttcacgccttttcggctcaggcgggccggcccggtgcgccgaccgcaggcgcaccgcgtacgcggcggccgacaggaggaacagcgtccccgtcacggcgagccagtgccacacgaaggggtcgggggacaagcccgtcgagttctggtagtcggtgtgcagccgaaggatgagcgggaaccacacgatgaacagcagggcggacagcccggccggcactcgcaggtagttgatccacggcaccgcgggcaccttcggcgcgcgatgccgggccgccgccaggaccgaccagtcggcgatcgagtacagcggcatgagcacgatgtcgtgccccacgaccgcggccgcgaaccagatcaggatggccaccggcttcgacaccaggagctgggaggcggcgtatccggccagcgcgaagcaggcgagcagcacgagcaggtgaagcggattcgcgccgtaccagcgcgttatgcggcgcatgtcagctcccgaaggtcattttcgtcacccattagatctggtgc

SEQ ID NO: 78504 - DNA, 507 bp, Arabidopsis thaliana landsberg
tttccagccttcttttcttcatgagaagagcggtcagacttgacagttttgatttctttgaccttctgttgagagaaaccctgctgttgttcaatagaatatgacacgttgcatgagtgagcttgttgaacaagtttattatgcttcgggttctgtctctattttattgcctattgaaagaagatgttcttctcaacatccggagctgacgctccagtgctagacctgatggcatataatatttgatttctgcaaagggaatgctagtttgatcagaagaagagttacagaaaattgatttgaaactttgaagtgctgataaaggtgaacgcttactttgtacataggcattattgcttggcgactgcactgtggaagaagcagatagagctgaagaactcattcgagatgctttaacatctttaatggcgggtccagaagattcatgacctaccaactctttctttacaccttttagaaccggttgttgtcgagatttttcaaact

SEQ ID NO: 78505 - DNA, 540 bp, Arabidopsis thaliana landsberg
  unsure (1)..(540): unsure at all n locations
atcgntacgaattatttcctcgattttagaatcaaaaaatataagtccgattctttttttgtatttatcttcacagttcatttcgacggtcgtataaatcgtttactcggtaatttattggcggacggtgggctcttccattttcttattttcttaaaacatttttattatattaaaatataccatgcgatccacgttagttattttattatataaaaaattaggtcccgctatttgaaagcgaaaatgatagcatgaccatccgtaggatccatcatcgcgcctacaactagatgactttataacacaaatgtttgtcgccatgctaatttaccaattaattccataagctttatttttgtcttggactcatttgtttcattaaaacttatttaattaactttacgaatcatgtctaacttctctgtctccaatacattattgttgtaaacaaccatcaatagaactcgtagcttaacatcgttcaacgctttccaaaccaactaaaagttcttatgtatttattgtcaattaaaataa

SEQ ID NO: 78506 - DNA, 541 bp, Arabidopsis thaliana landsberg
  unsure (1)..(541): unsure at all n locations
acaattccataaacgtaggccggctatcaactgacctaataaaccttcgttatggttgttgagcataaatataatatacgacaaagatgatttacaatcagtggttgcatgccgagcgcacttcttgcaggactacccaataccgtacagtactgaaaagaagttctggattacttaaaatcataatagcttcctttaagtcctaaatcctatctgagtgggcatgatctatgtgcttctgaatatgaaagaaaagcagctaaccatgcagctacttccccatcacctaaagtaattattgcttcacaaacctcaaagctggtccgctcacgttcaccacaaaaacacccgcacttaatgcgctgatatctaaagcctttcgatcgaccaattttccggctgcnnnnnnnnnnnnnnnnnnnnnnnnnnnnnnnnnnnnnnnnnnnnnnnnnccttttgaataaggctgacgatagggctaaattcaatttatccattatcgtcaaccatcttgagtctgtaataagcagttagcattaat

SEQ ID NO: 78507 - DNA, 569 bp, Arabidopsis thaliana landsberg
atatgcattagtcttcgtagaattagcataccagtaaaaagatttttatttttataccttatcacttcagcgtgggctttctcttatttgcaggcccataaagcgagagagtaaaaaagagataaagtcgctgcgagcgaatcaagttcggataaggtccaatcacaacacagccacgtgcgaatcccaggttattgaacagtaaaacaaacggctcaagtggctcactccaaccgttctcgttaaggcaaatcaagttctgtttctttttctgacttttgataaaatttcgatatttttcctaattatatagacgccgcctgcgttaaatgaatttgttgtgatgcgagcgaaactaacgatgtacgaagcaatcaaagacaatgatgatgatgatcatcaatggcgagagaaaaaagacattgagtctgctcttcagatttctcgttcttcctctcttcctcccgacaaagaacgattagtttctcttgatgtctttcgcggtcttaccgtcgcagtaagttgttgttctaatcactttctaatacgtgatcaacaatgtaattaga

SEQ ID NO: 78508 - DNA, 300 bp, Arabidopsis thaliana landsberg
cacgaggaccccgtcgggcctgtccaccatcccgacttcgaggttgtcgaaggccacgtcatcttgggggtccggggggaccaaatccaggccgatccccacatcataggggactatttcctccctccggcggaggccgatcgaccactttaatacaatcaacgcttgtcctaagccgacatggaagcccgcccatattgcaccgtatgaacatccccatccagcgaccatgcctgcgggtaatatccggaccaagatgtggcaggcaatgtacgactctaaaggcacatattagcgcca

SEQ ID NO: 78509 - DNA, 528 bp, Arabidopsis thaliana landsberg
tatgagctcaatatggacaggtgcaataggcttcggattggttatcattcctgtaaaaatgtatagtgctacggaaagcagccggctcgacctggatatgctggataagaaggatcattccaacattaagtttatgcgtataaatgctgaaacaggaaaggaagtggtttgggacaatatcgtaaaaggctataaaatgcctaatgatgaatacgtagtacttactgacaaggattttgaacaggtaagcgctaaaaagagcaaagtgattgaaattacagactttgtgaaagaacaggagatagagagcatgtattatgaaactccttattacctggagcccgacatatccggtgcacgtgcgtatgccctgctacgtgaggctttaagaaaaacgggtagggtaggtattgctacttttgtaatgcgcagcaaagaaacgcttgcagttttacgcgccaatgaaaaagtaatagtacttaaccgtatccgttttcaccaggaaataagggatcctgcggaactgga

SEQ ID NO: 78510 - DNA, 568 bp, Arabidopsis thaliana landsberg
  unsure (1)..(568): unsure at all n locations
ttggccgtccgagcagcggccttaccgtctacttcaacgttagtggtgccaattcgaccagtggctatgccaagacggcatccgatgggacagcaagcttcagctataccggcaagaatgcgggtgccgatacaatctcggttaacgctccgcggatcaccgatagcaatacatcggcatcggtgaactggtcggcagtaaacgcgccggcgaaggtgacgctgagccccagtggccagcgatccgtcaccgggcaggcggtttcgctggttgctacggtaaccaacagcaatgacaatcctgtcagtggagcagcggttcagttcactgtcaccggtgcgaatccaatgaccaagaccgtgaacaccggcaatgacggcaaggcgaccttcacctacaccggcaacannnnnnnnnnnnnnnnnnnngttgcaaccgctggtggtaaagcatcgagtgcctcgacggtcaactgggtgagcggccaggccaagctcgcctttagcccgtcaaccgggaccggcgtagttggcaactcgattaccgtgcatacgacgctcaccgacgc

SEQ ID NO: 78511 - DNA, 417 bp, Arabidopsis thaliana landsberg
gcctttgccctcgtcagccgctcccccatgtgttcggccaacaaggtcgctcattcccgcgtctacgcccagggcctgaccctcgccgtcctcatcgtctcggccatctttgagatgaacgacgccaagtctggcagcggccgctggcagacggtcatggtcattgatcccgatgaccccgagcacaagcacctcatcgagaagaggattcacaaggaggagtacgagggacaggacctttggaagggtaagttaccatgatatccaacataacgagcttgcgactaattgagtaaaacagacatggttgtcgctgaggagcgacgattagctgcctagaagtcttccgagaccaagatctaagcgaccagaacctctgagcaattacatatgctcgaataccaactttcttatcga

SEQ ID NO: 78512 - DNA, 523 bp, Arabidopsis thaliana landsberg
  unsure (1)..(523): unsure at all n locations
gtgtatttaccggggttgaccttgtatatccgtgataccaggagaattttctgcnnnnnnnnnnnnnnnnnnnnnncctgtcctgccagttcggatgccgactccttctgaggctagtgatgaactaacacgaccaaagcatatctaccgttatgagccacagcgcaaaaggttgttgctagcttatcaagaacaacatccgcgacggactaccagtcacgatcgagttcttgacacgagggggcactagaagggcgccgtttcggcagaagaatgaacaacatccgccaagaaagaaacaccagacgaacaaggtatggtgagaccgatctcgatcccggctggccggtcgccgggtctaccgacttcaaaacgtctgtgtgtggaaattggatatgggagaatggcattcctcgtggttcatgttgccgtcctaccacgttgcatgtcgagcgagctctcgagccctcggttttgtctcagctatcattctctagctctgtctctgccctcgggacatctc

SEQ ID NO: 78513 - DNA, 438 bp, Arabidopsis thaliana landsberg
  unsure (1)..(438): unsure at all n locations
caggccgacactagacctgcattttcatcacnncctganttgnnactcgaccgctaggagcggacctgcagggtggcctgaaaggcaatgtttgccttctggccggtaatcatgacgtccgacaggctgacattgtcattgcccatggcgaaatccttgcccattttttctgactgcaattgcatattgttgacctggtccagtgacgctttcagtgcgtcactgaagctgacctggctggtgggactggctgtagcaggtttctgcacctggctgagtgccggagccgcctgggtgcccaggccttcgggtttctgtgctgctgcacgtaattgtgccagcatggacgtgatgcgctgtgcatcaataccgcctgcgttcatgtggtctcctttcgtgatatcgggatggtgcacccggtgatgacaatggtagcca

SEQ ID NO: 78514 - DNA, 506 bp, Arabidopsis thaliana landsberg
  unsure (1)..(506): unsure at all n locations
gcataccaagctttagattttggattgagcaagtctctggaaagcaaaaattttccagtttttaaggcgttagcttgttgacaggagtacaaagcctgcagcagaacatgatagactctccaagcctccttctgcacctaggagaactcannnnnnnnnnnnnnnnnnnnnnnnnnnnaacagaaggaccctggtatgtactagattcacttatctctatcttctggtggatgctgttctgttccacctgaagttcatctgaaatattccataaagaacgattcttttccaacttagaatgaagtgaatgtgcatattcttctgatacttggagaaggatataacccctttatttttttatgaatgtttgcattaatctcctttggaagtttcctattttagttatttatatgacctttccatataatcggagcgtaataagatggctctttcgtgtatcgatcaggctttttctacaggaggaactcccgattacattgcccctg

SEQ ID NO: 78515 - DNA, 336 bp, Arabidopsis thaliana landsberg
  unsure (1)..(336): unsure at all n locations
aatggcaaaaaacaccactatgtcaaaacctcgatttttgtttactcacattgtcttttttgcccataaggacatagcttgtgtgcatggggagagaacctttcattctgtatccttctgaatccatnnnnnnnnnnnnnnnnnnnnnnnnnnnnnnnnnnnnnnnnnnnnnnnnnnnnnnnnnnnnnnnnnnnnnnnnnnnnnnnnnnnnnnnnnnnnnnnnnnnnnnnnnnnnnnnnnnnnnnnnnnnnnnnnnnnnnnnnnnnnnnnnnnnnnnnnnnnnnnnnnnnnnnnnnnnnnnnnnnnnnnnnnnnnnnnnnnnnnnnnnnnnnnnnn

SEQ ID NO: 78516 - DNA, 582 bp, Arabidopsis thaliana landsberg
  unsure (1)..(582): unsure at all n locations
caagcttcatgtctagcgagagaagaagctgatcagataaggcaataccagaaacagattcaacgaaacgcatcacagattcaattgaagtagtctcgctgcattgaaattcaaacgagtggccattctcagccacacaaagaagaagcttgccatcatcggcgaaactctcagtgaagcttccgctcatcgtaaccaccaaaggacccaaaaatcctcaaccacagaatcaataccccaaagttcacagccaaattaagaaaggtgactcacctaatcaaattaggaaccaaaataggcaaggctgccaaaatcaaaagccctccaacacaaaatcccaaccacgaatctgtaaaagcacagagcttttctatatcctcgatccttgaccaaaatccagattcaccaaaaaccctcgtcgaatctcggagcttttgatatgtttcacagaagacctttaaaccccaagtatccagacctgatcacgaccaggatacacacaaattcagaatccagcgttagctaatgttatcccanagtacccaccacgaaattttctcaaatctcgaatttaagcgaaat

SEQ ID NO: 78517 - DNA, 574 bp, Arabidopsis thaliana landsberg
  unsure (1)..(574): unsure at all n locations
ttgaggctgctgttcgatcaggtatttattgatcaattcagatcagtgcaaacaatcaaacattcacgaaacctctttgcctcgttgctagattggcagtgcacttaagtacttgcactcaaagcattacgtctgccaccggnnnnnnnnnnnnnnnnnnnnnnnnnnnnnnntggtggacgatggtggacaagtggcaatctccaaactactgctgctcgactttggcaactcggtcacctacagtcaggcagagttcgaacgtgcagaagagcggannnnnnnnnnnnnnnnnnnnnnnnnnngccagtctactaacccatttctgctggaagcctatcacttcgcctgcttgctgatgttggcagccacgtttgactccatttggaagagtgctgatgatatcagagacaatttcagtcgtcagtgcagcagtactgcaagtcaacttgatcggcttctgctgaagatgagcgcaaaaccatatcacatctcaattaatcgggcgataagttatcttggtgaaagaagctcatgaattatatggttttaactttgaacaaattgtaaatat

SEQ ID NO: 78518 - DNA, 528 bp, Arabidopsis thaliana landsberg
  unsure (1)..(528): unsure at all n locations
agaagccctgccctatcatcagtcgaatacgcttgttgccttgatgggcggcacactgggcaatattgaaacgcatgctaccctagacgccgttcagtcacgtttgaaaggcatcnnnnnnnnnnnnnnnnnnnnnnnnnnnnnnnnnnnnnnnnnnnnnnnnnnnnnnnnnnnnnnnnnnnnnnnnnnnnnnnnnnnnnnnnnnnnnnnnnnnnnnnnnnnnnnnntcctcatccgcagctgcgttgagcgtgctgtagataccaagcagtttatgtatgacgttgagtgggacgagatgacaaagcgtctagctcttggcctacgctcaactgccgatcaaatnnnnnnnnnnnnnnnnnnnnnnnnnnnnnnnnnnnnnnnnnnnnnnnnnnnnnnnnnnnnctcctatcgctatgacacacaaatggtcatagattgcgccaaagccgcaggctggaacaagcttgatatctggagcgcgtcgaaccgctcgcattatattttgtttaaatccgaatagcgctc

SEQ ID NO: 78519 - DNA, 595 bp, Arabidopsis thaliana landsberg
aggtggcagcggttttcagtgcgcccgggccagtgccgtccgcttgtcgcgcacgctgttgaacgcgaagccggctaccagcaacagcaccacgatcagctgcgccagcaccggctgccagctggggaagatgccgaggatgtcgatgtgcggaatcggcgccgggtctacgccgacccagccggcttcctgcagcgcggccacgcccttgccggccagcaccaccgcgaggatggcgatcagcgccgagctggccttgaagaacgcgcccagcggcaggcggcggctggtgcgcagcatcacccaggcgaccaccgccagcaccaccgcgccggccacgatgccggccagcatccagtgttgctggccttcgttccacagtgcggtgtagaacaaaatcgtctcgaagatttcgcggtagacggtgatgaacgccagcgcaaacaggaaccacagcgagccgcgtcccatggcctcgttcatcttggccttgatgtaggcctgccagcggccgccaatactcttttggtgcatccacaggcccacgcccagcagcaccacggcggcaaaaatcgacgacaggccttcggtcagc

SEQ ID NO: 78520 - DNA, 229 bp, Arabidopsis thaliana landsberg
gcaacccatgaccagcttctccgattttttaatggattggataatgggtttgggaacaaagtacaggtaggccgttccgccatcgttatacggcatgtactccaatccgcccatgagtatttttttatcgttcaggagcttgtctatactgcctgccgaagagttgttcgaaagcaggtctgcaataatatcgaaagcgggcatatcgggatcgttgttttgggcaagc

SEQ ID NO: 78521 - DNA, 1566 bp, Arabidopsis thaliana landsberg
  unsure (1)..(1566): unsure at all n locations
acttaaatctcataaattaaactaagctaggagtataatatacagtggtttaacaaatacatgacaatactgacctaaccgaatttatattccaattttctttcaaaaagaatcatcaatcataataattttgcaaacagcaccggtcaagtaactattaaaaaaggtgtagtggcaccacgtgtgttttactaatgaaccaatcaaccatttagttccaccaacttcgtatagttctcgacttctaatttactaattttgttttaacanaaaaaaatattattgtttcttaccaagaaatttttgttcactaatcattatttttccgtaaccagagatataaacagattaaaaattagtctttccaccaatcgtattactggcgctagattttttttcttacaattttcgaccacaactttatcttacgcaaaaaaaaacaaaaaaaaaatactaattctgtggaggagaaaaacagtgaagactgaagacaagaagcatcatgatttgaaaagactcatacaaaactcgatcataaaaacagtgaagacaagtatgaagtatggtatgaataacaaaaagactaaaatgattttgtttgaaactgttgtaggtgagaaatttggacatgggacttgaccgtttggtagttggtgaagcctactctcgtgagctgtgtcccctcaaggcattgattttgcttctcttataaatatggaccccaaaacttattttggaagtaacaaagacccataccattcttattattaaggtatggcgacacttgaaattaccgatatagccctggttcaaccttctcaccaaccactctccaacgaccaaactctctctctttcccatctcgacaatgataacaacctccacgtcagcttccgttacctccgcgtttactcctcctcctcttcnccagtcgccggagaaagcccctctgccgtggtatccgcctctcttgccaccgctctcgttcactactaccctcttgctggctctctccgtcgctctgcctccgataaccgatttgaactactctgctccgctggtcaaagcgtgcctttagtcaacgctacagtcccctgtacgcttgagtcagtcgggtatttggatggacccgatccaggtttcgtcgagagattggtaccggatccgacccgggaggaaggaatggtcaatccttgtatcctccaggtcactatgtttcagtgtggtggttgggttctaggtgcatcgattcatcatgcgatctgtgatgggttaggtgcgagtctgttcttcaacgctatggcggaattagctcgcggagcgacaaaaatttcgatcgaaccggtttgggacagagaacgtttacttggtccaagggagaagccttgggttggagctccagttcgtgactttttgagcctggaataaggactttgatccatatggaccagcccttggagacgtcaaaagagactgcttctttgtgacccacgattctttggatcaaatgaaggctcaattactctaagaaatcggttctgaatttcaccactttcgaagctcttg

SEQ ID NO: 78522 - DNA, 669 bp, Arabidopsis thaliana landsberg
  unsure (1)..(669): unsure at all n locations
gcgagggcttcggcttggtcttggtctggttggccagcacgggcagcgaggcgagcaggcaggcggcgagggcaagtgcggtcgggcggaggcagggcatggcgatccaggtccggtggtggagcgagaggggacgttagcgtgatttcccgaagcggtcatccggatttcatgaggcgcggatcgccaccaccggtgacacccgcgcggcggaacgtgcaggcccccataccgccagctggcccagcagccacagcagcaacgcgccgagcagtggaacgtagagcggcatgtgcggcagcggatagagcatcttcatcagaccgaggttcgccagcaccgccagcaccacgccgagcactacgccagtgctcacgatcaggaagttctccgtgtggaagtagcgcaggatgtcgccggtgctggcacccagcgaccggcggatgccgatctgccggcgccgctggctgacccagaagctgctcagtccgacgatgcctgcggcagtggccagcagcagcgagccgcagacgatacacatcaggatcgccacgctgcgatcgctggcgtaggtgcgttcgcgggtctgtgccagcgtctggacgttcttcaccgggnnnnnnnnnnnnnnnnnnnnnnnnnnnnnnnnnnnnnnnnnnnnnnnnnnnn

SEQ ID NO: 78523 - DNA, 481 bp, Arabidopsis thaliana landsberg
aaagcctcgaattgacctgacgtgttcgcgcgtaaggccgccgccgctgtttgcatcccgcactagctattcgtcgtcttcgacgtggctcatcaggatcatgacgtgaccggggcgagccgctgccatacctggagcgggcgacgttcgcgggaatttgcgagcccagtttgcggccaagttcagttcaggaatgatcttgccgaagacgtacagggacgccgaacatccgcagtaccgacgcgggcagccagccggacgaccgccgatgaccacggcgttaccgttaccgtcaattgacgggcgcgcgtgtcgtgtctgaacctgcttagcgcctttccagtccgagcaaccgcgttgatcacacgtcactggcgcggtgtggcccatgttgcaggaggccaagacgatcaggccgacgccgacgcctgcgaacacgatgggacgcaacgtatcccaagtgagcgcgttaagcgtttca

SEQ ID NO: 78524 - DNA, 599 bp, Arabidopsis thaliana landsberg
  unsure (1)..(599): unsure at all n locations
ctgctttggtccaaagtatgcaaccagcacgaaatgctgcgaatttttgatccgcgcctggcagaaaagccgtaactgagggagaattctttcagccgcatccttcgccttgaatctagctacgcccgatttttttggccgcgctatttctccgccctttctgatgatcttttccaacgggaaaggcaaaaacctacccatccactcaatgtggcgttaaactacgggtacggtttcctctaccatgccatagagtggcagtgcctggcctccggtcttgaccctggcattggcattattcataaattaagaaaaaatcggccaagtctggcttgtgatttaatcgagccgcttcgttgttttgtcgagattgaagtggttcgccacatccaggacatgaaagagccgaaacggatggcggtgcattctgccgaaatgtttgaagagcaataccattatcgtaatggctcgtttcgcgtccgctccattatcaggttaatggtngattccttatacgctcgttgatggtcaggaaactnttcacccattcaagctcatgctcgtgatgcttgcttatgacaaccctgagcagaagcatc

SEQ ID NO: 78525 - DNA, 623 bp, Arabidopsis thaliana landsberg
agattaactcatgttttcaaaactacacaaaaattcaaaattattaaaaataccacaaatctagtaggtgtatttggttgttgaaagtttaataaggggggtaccaaatgattttagaaccattactaaatttttgaaacctttattaaaccattttttctttgattaaggttttatggggttttaagttatttttttaccacgtaaatctcgtaggctatctttttagttatttgtttccggttcctatcttcaagattcagttcctatattttatgaaacgttttactcaaacgtccagcaaatttttttatatacaaattgtcataactcgtatgtataatatttaaatcaatttttatgcatgactttattttggaaaagtcgatcttaattagtcttgaaaccaagttaattcaaggtaggatgctcgattataattagctcataacaaatacggcagttttcttaaaattgttttgaaggaaaagtattgagattacaaaacattattagtttgaaagtagggcgggactaaaactggtccgatacgtcacgagtttaggcacattagtatatagcatatctaagaatctgaataattatattatgaataatagttc

SEQ ID NO: 78526 - DNA, 427 bp, Arabidopsis thaliana landsberg
ccgaccctgggcatgtcagtcagctgctgagtttatggccatgtctcgctttactgggcgccgctcgcgcacaatacccgatcctgtctgcgtgcgcctgacatagatgtaatccagcacatgcctgctaccccgccttccttttgtagggaccaccagagctcgtgagagtagtctagtgaaacaactatggagagcgctcctcctcaagtgatggcggtggtgactgaatccactctcctaggctatccccacgcgtccataaccctcgaacacgcattcctgtggacactgccaaagatccttcggccctgaactcttggctctaagcccttcttgctccaccctcaaccataagaccaaaactgtaactccaatatctcactctaggcttccagaatgcagatgcggatactgggattatgct

SEQ ID NO: 78527 - DNA, 329 bp, Arabidopsis thaliana landsberg
actgggctcacaccctacgcgtcgcgagcaggcgcccaagatttatgccccacccaatcattacaacaaccccagggccgatcgggccgggacggtatagctctaagccgcgaagacgcaaacggacaggcatcgcccaatcatgccatcaagtcgtgcacgcacccaaccgatcgttgccgatcgctaatcacagatcccatttgaacaaatgcatgggcttggtcagcgaaagtcacaagactgtgttcctgcaaagacagtctgctacaaatacgaagtgttgctcaatcaatgtgcatacatctccatcagcaactgccacagtg

SEQ ID NO: 78528 - DNA, 471 bp, Arabidopsis thaliana landsberg
ccaatcgcactattttacctgatgaaacagaaaagcatgaaacaacctttgtcatctacatcagaaacctataatatcagttaaaatcgtactacattattatatatcccaataacaaacatttatattcataatcggcgaagttggtagagacatcaatataactacgccaaagccatgtgttacttcaacttgttcaggtggtacctttctcttctatgtttttgttctattctactttaattaaaacatgtataatatgtcaaaaatttcctagagttggtaaatcaaatttctttatattttttgtgattgattgcaaattataatactcgagaacatatgttcttagataaaacctatgatctttataaatgatacatattattagttcggattttagaatttggaattttgacaaacttattaaaaaatcaaaaaaattaaaagaaatttcattttatacaccat

SEQ ID NO: 78529 - DNA, 139 bp, Arabidopsis thaliana landsberg
actgctagtctattaagttcttctttacaattgtgtactaaaatatggcgtgatggatgcgctgtgcctttatatgtttttgaataacactgtatgttcttgagcgagtgtaattatctgaaccttggtacaatgaaat

SEQ ID NO: 78530 - DNA, 554 bp, Arabidopsis thaliana landsberg
ccgggatcttttcatcgtacgcgttctttaccgagcccgaaatactgagggtatcgatttacggtcctgtcgaaaaagcgaggtgcagatccctgggctccccgccgcgtagatccttagccggatttccctcggtgagatctttcactccctcacggaagtttatgttgtaagtagtactgtctctccagggaagttcaggtgtgatgattagtgaataccctttcaatttgaactcggtcttttttcctgtggatggtatgatcaggacctcctcctttggattgttaagctgaatggcttcgtcgaattcgatcgtaatctgtttgcctttgaagttccttgcattctcttccgggtggtactttacgacagtcgggggaatagtatcctttggcccaccctgtggtgttgtttgtgtggcacacgacattgccagataccacaatggaaaaatgaggaaccggatatacctcatgacccggcgatatagatcaagcttgaatgattgtcttttcccgctttgagggtcgagataaaaccacgggcaaatg

SEQ ID NO: 78531 - DNA, 462 bp, Arabidopsis thaliana landsberg
  unsure (1)..(462): unsure at all n locations
gtaaaagtagaacctcctgcgggaggtactttactgggtggtctggcgggccttgtttctgtcggagaggacaggaaacaccctgtatctgaactcagtggagggcactgatcttttcttgcggtannnnnnnnnnnnnnnnngttactcttgacgcccgttactgtatatatctgagatgaggtgcatctggatactacatagccatgactcattgctgggacttggcatggtcaatacatcacgactagattaccgtggacagctatcctgtaatgctcacaatcacatgaacttgttgggtgtgaggacagaggaaacgtcatgacttgatatatatcacgacgatgcacgttttgatccaagccacgcacagaacatgcgaagaacgatcaaagttcattgtccacatgctcaggtcggcaggttactgctgtctgtggacgtgtactcaccatgagt

SEQ ID NO: 78532 - DNA, 427 bp, Arabidopsis thaliana landsberg
ggctctttgtctccgatgttcaagctcaagagctttttgagtctccttacagatacagatacatagaagcttaaccattaattatttaattgttctcactccatacagaaatcgtacgggggaacctttgtacaattttgactaaagcaaacaaagacctaaaagctaaccgagctctcccacctagacttagcagctcattgactcgaccgagctctcccacggttaggaataaaatagagtctagtggacgtgaagaaaacaaaaagaggattattaatcaatatttctcagctcataagtaggtcaagttttgacatcataaatttaaaattgttgatgttgggtcggtggataaacggtaattaagatatttaaatttagtatagtaaacattataatagtggacttacttaaaataagtaga

SEQ ID NO: 78533 - DNA, 521 bp, Arabidopsis thaliana landsberg
aagacctggccaacctctacgatatactagacaacatagattgtgaccccctgcctacattaaaccaacccatcaccaacgatgacctccggagggtgccaggcaatacgcctgttctacaacagcccttggtgcctaacttcatccagtcgacaccgcaacgtgttggtgacaggatagatgcttgggatgcgcaagccaacgttggcgtcggcataggacctggggacatcaccggattcggtcctggaggtgtccactatgcacctggcaactatggtctcaacaactacgacaataaccttcgacctcttcaaattaaacccgaaattgactcaagaccctaccaacccaacaacgcctacccagattttgggctagcaggacgcaatgggccggcgtatactcctatgaacggctggcttgaaaccaccgacgcccgtggacaaatgcagcttacccctactcaagtccacttgcccgtcgatgatgtatgcaacgcataccgcagtgcacctgct

SEQ ID NO: 78534 - DNA, 426 bp, Arabidopsis thaliana landsberg
  unsure (1)..(426): unsure at all n locations
aggagtggcgctgtgaggtctcttcctattaaggacatcgatttgctgagtcagattggtgtcgtcatagatttgaatatgttgattgggtagagaaggatcatagaattcttgctcattgannnnnnnnnnnnnnnnnnnnnnnnnnnnnnnnnnnnnnnnnnnnnnnnnnnnnnnnnnnnnnnnnnnntcatagcctactaaatagccaatagcagcacgaggtgctagcttagctaatctaggtagcttattgattcgcacataagctttgcattcaaagattcggacatgtgagaggtctggctgtatctgtagccaatgtggtgctttatcgccgtgatatctagcaagagctttatatggagattgccaattaattgagcggtgaggaatgcggttttggatataaacgggagtttttgc

SEQ ID NO: 78535 - DNA, 162 bp, Arabidopsis thaliana landsberg
agagcaacacccggaaaagaaccggatacagattgataatggaaacgatcaagcaaatttagataggaaactatggctaaaaaagcaaaccagcccgaaaaaccgaaaaacgacgggccccatgaaagaggcaaaacgcaccccaacagggaaaaccacgaa

SEQ ID NO: 78536 - DNA, 511 bp, Arabidopsis thaliana landsberg
  unsure (1)..(511): unsure at all n locations
ggccgtcgccgggcgcgtcggggcggtggggatcgagcagggtcatggccgttcctccgtttcctcgggcggcgggcgactgcgtggccggatgtctcgcccacggggacgatgactccaaaaacctcgaatggcgaggggttattccccgccgcgtgacttgcgcggcgcgacgcgctatcgcgcgcggcccaaggatcgaacatgaaactgaccctcgaacaggaggccctgcgccgcaggaccttcgccatcatcgcgcacccggacgccggcaagacgacgttgaccgagcatatcctgctggccggcggggccatccgcgcggccggggcggtgcgggcgcggggcgagaaccggcgcacgcgctcggactggatgaagatcgagaaggagcggngcatctccgtcttcgctcggtgatgacgttcgagcacgacggcaagatgttcaacctgctggacacgccggggcacgaggactttttcggagacacctaccgcaccctgac

SEQ ID NO: 78537 - DNA, 670 bp, Arabidopsis thaliana landsberg
cgcatcaaaactgatcaaggcgatccgcgccgacaatgatcggattcgacgcgagatgcgtgctgagcgcaagctcgtgcattagttactacctacctcgctgaataccggcgtacccttctcgttcaagatcaacacgcgaacggggagcggcacaatggcggggaagtcgcgcgggcctgggattcacagtcagaagaatccggctgcagcaacagagcacgcagaggagttcttcaagctgcatgcgcagggctattcccagcgcaagatcggcgagatgttcggcttcagccaggccaccgtccagcggcggatcgctgagtggtgcgagaagatcatcatcccgcgcgtcgaggagtaccgcgcgatcgagaacgccaagctggacgagatctacgacctcgccgctgacatcgcgcgcaacgccaaggccgacaacgaactacgcctcaaggccctcgaccgcatgacgagagccgcagaccggcgggccaagctcaacggcctcgacgcgccgatcaaggtcgacgccaccgttcacgaggtcaccgagcaggagcttgagctccaggagatgatccgggaggccaaggctgcgaccgctgcagaggagtctgcgctcccgagccagcggtgaagaccgtcgaggacctggtgtgggagcggt

SEQ ID NO: 78538 - DNA, 562 bp, Arabidopsis thaliana landsberg
  unsure (1)..(562): unsure at all n locations
agaaactcgattgagacaaatatgaatcggggacatgtgtctaatataattggaggctcaataaattatcaaattatgtggtggtgggagcgacatgtttgagtggtataatcgtaaatcacacgctggtttaagattctgtttcattctttctctctgataagagtgagacttctgttttgtctttcgagccattcccatgtgccttgtctccgacaactttctctcttcccttctctcttcctctggttcacatggaacttcaataacatttacttctttaaggtttctcatctcagaaaaagtcaggtgggtactactaaatttggattttcgttcacttagaacagttctgtttgatctttgattcctcaagttataacttttgtttttcttttatatcttatgacatgataatattaggtcttaaatcatcctcttctcttgatcctgttggaaaattcttcgatttggtggttatgttgcttagataacctaaaaaggtatgaatnntgagctctggtggatacttaatctctgtttttatcaatagaatttgata

SEQ ID NO: 78539 - DNA, 260 bp, Arabidopsis thaliana landsberg
  unsure (1)..(260): unsure at all n locations
aaacacaggaannnnnnnnnnnnnnnnnnnnnnnnnnnnnnnnnnnnnnnnnnnnnnnnnnnnnnnnnnnnnnnnnnnnnnnnnnnnnnnnnnnnnnnnnnnnnnnnnnnnnnnaagatatagacatagatgctatataaaatgggattatcagggcgcaaaaaaaatatcatacgaaaaaaaccaaaatataaagagcaacgcgccataaaaagggaaaaccatagaaatacaaataaaaggggctcgaaaaaacaaaa

SEQ ID NO: 78540 - DNA, 589 bp, Arabidopsis thaliana landsberg
atgatcttgatcatcccgacagggttttgcggcaaggcgacaggtatggttacgattacctgatgttacatgtttcttgccaatggctgggcacaggcaactattgcaggtcgcagatgcgactggatgcttgctgcgcgtcttggttatgttacttattacagggatgggctggtaagaacgggaacctttccggaacaatcattgggaagatcggtggtatatgaatttggagagtatacgctgaaagccggcgttacatacaagatcgatggacggcattacctgcggttagctgttgcctgtatgaataaagcaccttcggctgataatgtattcatctcaccgcgcatgcggaatacagaacaggaaaccatagatatgcagcaggtgaggagtgctgaattaggctactatatacaggcgccgcggctcagactcagggcaacaggttatgtcacaaagtttacgaagggaatggatgtgctcagcttctatcatgatgcttaccggtcttttgtaaactatgccatgagcggtattgaccggttgcactatggtacagagatgggtatgggatggaaaatat

SEQ ID NO: 78541 - DNA, 201 bp, Arabidopsis thaliana landsberg
aaaagacgaaacattgaaacgaaaaccggtccacgtttcttcatggcccatccattaaagctaacacatgctccactcactgcccctgcctgaccatttcaaaaactataaacattataaccaaacaaccataaacaaaatgagaatgagcttataccacgaaaagaaccacatgaacataccaggacagaaaaaccaaac

SEQ ID NO: 78542 - DNA, 614 bp, Arabidopsis thaliana landsberg
gtagtatgatatagtagtatctttctttttggtcctccatagacgaacaatttagacgagataatctaggtgtgaacaaagagaacggctttcttctccctctttattgttagtcaataaaagataacttataaaccaaaacatagcttatacattaaagagtctttacatcgacattcatgtatctgaaaagatattaaaacaaaatattccgtgactatattaattggtacatataaaaatccaaaaacatactactaaattcgaataaataattatgtttagggagcttcacttatttaagtatagcatctatgactaacctaattactacacaactgatctacacaaaataattaactgaacaaaatacttaaattacaaattaattaagcaaacggtcttctcttgttagccaatcctatttaagttacgaaactagggatagtatgtgaaatttaattcataattaaacatttagtggatgaattaattgtaagagatatataattactattaatttataagattctatgttaggttgaatatattagaagagtccagctcataactcttgtgcccatctccacaagtagtttgtgaagtcaaacaaa

SEQ ID NO: 78543 - DNA, 567 bp, Arabidopsis thaliana landsberg
  unsure (1)..(567): unsure at all n locations
gcgagccgagattcactgacagtggcagaatattctgctggtagctgtcgtaccaggggaaaaggggaaaaggcgaatgaaatagaatgggatagcattcggacgagcaaagcgactggcggaaattgctatctttggtttgcagtagcaaagcgtactgaacacaaacaaaaacggcaaaaagggcttgcaacaatgagctaaccaattgaacaaagctnnnnnnnnnnnnnnnnnnnngaaaaagaagtcgacaatgacagnnnnnnnnnnnnnnnnnnnnnnnnnnnngatttagaagaagtaatacttggccaattatatacaattattattatttgatatatctttttaaacatttaatgattgaaatcaccatttacaatggttctacaacgtaaacagaatcggtaattgtcagcgccttaaaagtcctactgacctcgtgatgtaattaggaaatgtttgcacaagttattagtgattgcacaaaaaataaactgccacccgtcatagagttcaactgcgtaagtttttttcacccagtgaacggcaaaaatcaacaaa

SEQ ID NO: 78544 - DNA, 416 bp, Arabidopsis thaliana landsberg
  unsure (1)..(416): unsure at all n locations
gaagtgatttctacatttatcacaaaaaataaggattagcagaatacaagcataactaaatgggagagattgttaaaggcgaaggggtcatacgtaatctgtggatggcagggagcatggtgttatattcatggagtaagaataccaccagccttaggaacaactagcnnnnnnnnnnnnnnnnnnnnnnnnncagtgaacactgctatgtcatcaacgccttaaaatgaacgtaaaacatgtcctatacggtcatgcacgcactatatctaccgttacaaacaaccctaatcgggcggcattggcgaggccgaaactcgcacatggtcatgcttatgattttcatagacaacacagataagagtctaaagaggacgcatgaatctttgagctctaagacagaatatacgaatcta

SEQ ID NO: 78545 - DNA, 569 bp, Arabidopsis thaliana landsberg
  unsure (1)..(569): unsure at all n locations
aactacaaaatgtaaaacttaagcatatttgtttatgggccataacttatgggcgatattaagaaaatggaattgaaatcaaataaggaaaataaaatggacaatttaggtccgcccttgtgtgttattgagttggtggtaagcggnnnnnnnnnnnnnnnnnnnnnnnnnnnngcgtaaagaagttaggacttgtgaaatacttcaagctatctaaagtgagttcatggatgactcatttccctcgttaacattgactctacatctatccagtatccacattatcttatatttgggttgcattttcgtcctaagtatttgggttcaaatattccatagtagatgattttactatcattattattatcttttaccaaagttcttcatttttatgtattggttctttcatttttaagcattggtttccttcacttttcatacaatagagactaaagacagagaaataaaaacaccccttttattgattattttttattagcctaaatttaataaacttttgtttataactctaaacatttntttagtgaaatagaccctaactataatta

SEQ ID NO: 78546 - DNA, 558 bp, Arabidopsis thaliana landsberg
cttcaaggccagataatatatccgacattgttgaaaggtaaatagtggcgtcaatctttgcatgtgccttatcggttcaagtgtagcctccgctaatttcattacgaaataaggtggatcagcagtaacgttaatctcgtaaacagggacaatgttcttatggttaaaattacgttggtatttggcttctttaatgaatcttaatcttgcattatcttcaaggttaggattcatcgaagggtgtaaagcaaactgctttttggcgtatcgctttccagtatcaatatcttcaacttctgttacaatcccaaatccaccctggccaatcctcctgatgtgtttcaaattcattaaacaagtataccaaattttaagtaacatactctcttccagtatttatttggagctaatggtttggtaaactattgagtttgaggtttgttttactcaattaaaatttttgtgagaataaaaaaggcgcccattgggcgcccttatctgaaacaacaatatatcaatttatactttgcattagttcatcttttatatccaattcgc

SEQ ID NO: 78547 - DNA, 507 bp, Arabidopsis thaliana landsberg
ctcgtcttcttccgcgtgcccctgcctctttcggccttcatatcgctgctattgtggatcggcgcaacaatttttgatgctcgtcatcaaccgcgacggcgatgtctcctggggtgcccatgtcggcggcatcatcgccggcgccatcctcatcgtcctcttccggcggcgcggcgttccgcttttcgaccgggagatcgtcacgccccgcgccgttcgcagcaccccggcaatccggcgcactgtggcgaccgaagacggcacgccataagcccgcgaccacaatattgacgttcacgtaaacgtaatatatttccgttctccaatttgtctgtctgcgaccggcaagcgttgtgtttggaggaaaaacgcgtatccatgtcgccattcgacaatcggagcagcgccgaagcgcgcattttcttggcgaaagagttgaaggaaggaccccatgaaaattctcgtcccagtgaagcgggtggttgattacaacgtgaagatccgcgt

SEQ ID NO: 78548 - DNA, 633 bp, Arabidopsis thaliana landsberg
  unsure (1)..(633): unsure at all n locations
atttaaaaatatatctaatttatgtggcaaaatcttgatacatcatcaaagcttctaaaatgtttttaagaaattggtaacgaataatagcagagtaaaaagtgatatcatatgtttcgaggcttatgtttttcaaccccaaattttacttactataattaaatatatgtttttagcaaatatagatgatcaaaagttacaaaaactaatgagctaaaccccaaattaaaaataagaattttatccaaaatataagaaatggagacaacgaaagcttaggagggggtttgactttggtaatccagcttttgtctgtacttatgcaacctaatcggtattataatcatagtgatttattatttgtacaatagattagggtccatattttatcattaactttatacaatcatttttacttttgtcgtttatacgatatattcaataacttaactttgccactaattcaacgtcacaggtatgacatgtactttcatctttgttatataaatgacaaaagcgaagttcttttgtctttttttctttgtaggattgccaaacaatcatatatgcaattattngtacatatnngtttccaaattatatataattctctaatcttattaaagttagctt

SEQ ID NO: 78549 - DNA, 536 bp, Arabidopsis thaliana landsberg
ccggacactaggttgtgggtcaatcgtgttggattggttgttaagcgaaataggccccgtcttcctataagcgtattgattatcataaacatacaccaacgcaatctttttcactccgacgttctttaagttaatctcgttgattcgctcttcgtctttatagctaaaaatcagtcgatgttcgatattcttcaaacttctgcctccaatgtgaatatcttgtgaatatgaaaactgccctaacaccataagaaaaagagcaattaccacctcatatatattcctgttttaaatctctatcgagcttaaattaactatgtaattttcaacggcactttatacgattccacttcaactcaattacttatgaaactgaattaaagcaggttacagccggatactattcctaaagattgcaaaataatcggactaatttccgatgcgagcattagtttccttaaggaatcgaggttagtgctaccgagagcgaattaatcctttcttggatctaatataaaagactcgtagccattttc

SEQ ID NO: 78550 - DNA, 534 bp, Arabidopsis thaliana landsberg
aaattcgtattcatttgttttacttgttatataataaatggttagctgttggagatatatgtttatttgaatatggttttgcaggcgagaaaattctaccatttccattttgttcataatcgttcctaggaacctattttgcctctcagtagccctgacttttcacagtaggggtctagtcacattataaccaagcatctccactctgatcttctgttttgacccgtacagtaatacaatcaatacgcgtttacaatatatgcatgaactctctcatgtaaatcagtggcatattcatttagtcatttatcttcttagttgtcttttgatcaatgtgtttactagcattatgccccctgttatgcttgggagaaaattacatattagttacaatgtataaacgactttgaaccatttatagcaaaagaacaaatatcgactttggattattggtgaagttctaacaaagactatcaatccaaactaaatttaataaatttctatttaccaagaatctcaaacctttaaaaaatc

SEQ ID NO: 78551 - DNA, 291 bp, Arabidopsis thaliana landsberg
  unsure (1)..(291): unsure at all n locations
gaaggggttcgaaataaattcaatacagacttattttttcacatttaaaaaaaaaaaatcactctgtgaaaacatgcaataattttatctcttactctaacgctcttcatacgaacagcatttgacgaatccataaagaacctcttcatccgtagacgactgacaccatnnnnnnnnnnnnnnnnnnnnnnnnnnnnnnnnnnnnnnnnnnnnnnnnnnnnnnnnnnnnnnnnnnnnnnnnnnnnnnnnnnnnnnnnnnnnnnnnnnnnnnnnnnnnnnnnnnnnnngaac

SEQ ID NO: 78552 - DNA, 552 bp, Arabidopsis thaliana landsberg
  unsure (1)..(552): unsure at all n locations
tgatgttcagatcatgcatcatcacatctaccgctgcagttccggaatatggctcgactggatggcccagggagcccagataaaaggaaatttaatggatgacaattccacggatatttttctggaagtggaccatggacccatgctgatcagtaataatatcttgctgtcgaaaaacaatcttctgatgaattccagcggtgccgcatttgtacacaatttgtttggcggtaaaatcaacgtgatatactacgatgccagattaaccccctatatgaaacctcattccacctatgtagtggccctgcatgacaatcccagcgggaacattcaatttatcaacaatctgtttgtcgggggtgcagatgtcagccagtatagctatgcgttgcttcctgtagtattcgatggaaacgcctatgcgaaaggatccataagagcgataaagaaaaagggacaggataggttcggtgaaatgaatagccatgcaccaaagcaatgaaggaaatacaagcacatgccgncctggaaacanatgcatccatagatact

SEQ ID NO: 78553 - DNA, 414 bp, Arabidopsis thaliana landsberg
tattctagccacttttgctaattatatatgtacttatttacaatttcttactttttcccgccaactatttataaattcaacaattatacaagtatatttaaattttcgaataatgaatagcattataataatattgaataattgggtcgactagaatagaaacccactcagtcgtcgattcatagaacaaaaccgaaacttatagaaaaatatatttgctacattatatagttttcaagaaattatcaagtggcactcacaagtttaacttttgcgtagtccgattcgagattccatattgatttctatatattggacgcgtatttttttcgcttatctaaatatttgcatcttatataagatattctaagaaattagtgtgtggtttgctcaagttaagatactttattacaa

SEQ ID NO: 78554 - DNA, 326 bp, Arabidopsis thaliana landsberg
  unsure (1)..(326): unsure at all n locations
gatgcccgcacatcttcggtgcacgagcgctgnnnnnnnnnnnnnnnnnnnnnnnnnnnnnnnnnnnnnnnnnnnnnnnnnnnnnnnnnnnnnnnnnnnnnnnnnnnnnnnnnnnnnnnnnnnnnnnnnnnnnnnnnnnnnnnnnnnnnnnnnnnnnnnnnnnnnnnnnnngaccattagactcacgcgccaccgtctgactggccgcacgcgaccacttatgttttgagggcatagctatgacacagagtgtgcctccatttggagccgctctctgggcccacagcgaagcagcgctatacccctagtagatcagccaactgctg

SEQ ID NO: 78555 - DNA, 363 bp, Arabidopsis thaliana landsberg
actattactactacttcggttgggaaatctctgcgaatcaaaactcgaaatctctctaacaccttcagggttcctcaacattctaatcttcatagaattaagacgagaactaactaaaccagtcgaaacatgtgcaaaggtgcttcctttagggtttaaatgaaacttaactggtaaatacgaagactttgagaactggagacaatttttgattgttgtttgttgtaatgaaaccctaatcgccattggaaagccttggcttcttgttaagttacagtacatgatttcggagtaaacagaagagaaaaaataaaaaaaaatccggtgggataggtgaatttttcaaacgaagcgcaattggat

SEQ ID NO: 78556 - DNA, 524 bp, Arabidopsis thaliana landsberg
cgtactggtggtttgcttcctgatccaaagctaccgggatcatttttcttacaggaattgattgcctatgcaacgggctttatcacgccctgttattttccatactatgtatataaagcgttcggtttaaagaagctaaaatttcacgcttacaagggtatatatctattcttgattttcccctattgtatttttgttattgtcttttggtttacaggggcgctaaaagatgctcaaaatctgcttataattccagtattgtatgcaatttgggtgataatttctttggctaaagcgatcgcgtacaaatacaacaatgactttactaccattgaggcccggcaggaactggttgtactgctctttagtttaacgccctgggtaggactgccgattattacctattttaatttggggcaggcagttgaagcattgatcaccaacattggatttctgcttttgttcgggttacaagtgaacaggcatattacagagttgcggaatgaacatgaaaaattgataga

SEQ ID NO: 78557 - DNA, 593 bp, Arabidopsis thaliana landsberg
ttccaaaatacatttactgttaatatcttgacgtatgtacataagtttacgcaaacataagtagagtagatacttgtgtaatagtggttgagaaattttaaaagttgtgtttaatatatcatcttgcatctcatcaaaggaaagactgaacctattacaatattttgttttgctaatgatatttgtgaaaatcctccaatatatagattatataaacgactaggatttgataattctaattctaacgtcccttaagggcttaaagcaatactagagagtacaatagatgtcaagtttgatcaaatgttagataggagatggtggggagtgacatccccttggctttttagttgtaaattgttgttctcattgtcttcttccacaagtgaatttgagaactcataggacaagactttgatccataacctttctgatcatcttgaccacgaaaaacctttatgaacattgtcaaaatttggtatttttgtgtcccggtttggtatgcatagagatggttagggtagagagtatgcatctggatctcaaatttttcgtatcatatccggacaaaaaatgctatttagaaaagtcta

SEQ ID NO: 78558 - DNA, 580 bp, Arabidopsis thaliana landsberg
ggggaagccccaccaataaaaccgcccaacttccaaccaataccgtacagataagggagttcatggtcagcagtcagcacatgctcaatgccacatatgcaggaggggttgcttatcacagcgcgaattgaaacccgccaagctctggcggtgataagcccagtgtcgggggtagtcaggtgcttcaactcaaccttagcgatagtgtgttgtactgggtacttcaaactagactcaaaatgtagaccaagagttaggtcatcagtactaacaataactaatccaaatccccctcagttcttcagtgtcgaatgcgtgcactgtaaaacgaatgttcttgattcatagagttttaactacggaataatttcgtccaactaccgacggacccccaagcaccagtatcgcactactgattcagaaccctcataatccatccatcacgtgtatcaacatcacacacctacaaaagcaacaggcccgaagcaaggatcaaaggagattccaattcaaccagtctcccacagaatccgaacggacgtgattccaaacactcagattccacagagagcgagggaag

SEQ ID NO: 78559 - DNA, 421 bp, Arabidopsis thaliana landsberg
tatagaatcctcgcttgtgtaagccattctttgaaactatgcctgaattctacgatgtctctaatcttattgtatatagagatctatctcaagatgttcttcgttgtctgaatctaattacataccaatacaagaccataagatcaacggaagcttaaaaaaagtcactaaaaaattaattaagatttctgttaaagaaaatacaaaatggaccccaacagcataaacaaagacaacatagtattaagagattagtctacatagcaaaagtacaacaacaacaacaacacaccatgaaaagaacacatccccttctcttacccagaatcctcctcttggcctcagttcactcattagattcaccagcaaaaagaagaagtaagaccgaaacaagccggatttaacatctattcaatgttgc

SEQ ID NO: 78560 - DNA, 378 bp, Arabidopsis thaliana landsberg
tcacatgttggcaggtattttaaagatgaacgcatcagacagttcatggagtttcctgtattgttcttaggggccatgcccgataagatacccgctttgtacagcctcatgaaccatgcagatatccggggtggaacatggtaccctcagaagggaatgtatcaggtagtggaagccatgtattcactggcaaaggaaatgggtgtacaattctgtttcgggaataatgtacaatcgctccctgtaaacaatgcgcatataacttcggtagaggctgtgcaggaccatacacctgtaacgtatgaagccgatgcagtgatagcaacagcggattatcatcatatagaaacatccctattggggaaaaaataccgaagc

SEQ ID NO: 78561 - DNA, 559 bp, Arabidopsis thaliana landsberg
  unsure (1)..(559): unsure at all n locations
aagcaccagcggcaaaccgaatgttgtacattacccttatgtgtagctgccggtgtcatatcttccttggcagggaatgattgcagtgcggaacctgctgccagtacggctgatccgcccaggatgtttttaatggnnnnnnnnnnnnnnnnnnnnnnnnnnnnaatgatagtgaatatatgctgtttacagttattgctatgttataaagcatgatggccctgcaatgctttatgcgccttgtaatgcctgttcatgatagcatagatcactacaaacannnnnnnnnnnnnnnnnnnnnnnntggccacctgcataaatgtatcggaacccgctgctgcatcaggattggctgaaccggcggcaacggctttttctttaaacccatcataccacctgcccatcatcggcacgatcagtgaagtggagaacatgcctgcaccacccatcagcgacaacccgagtgcacctgtattgggcaggtattcagaaacatacccgagcatggtgggccagaagaaacagatgcccgcagcaaatacgaatgcagctccgaatg

SEQ ID NO: 78562 - DNA, 555 bp, Arabidopsis thaliana landsberg
  unsure (1)..(555): unsure at all n locations
atctcttcttcacttatataactgaaatcaaaacaaagcttttgctttttgattcaactgtagtaacttttggttgggagggtgttgcagatacttttcacatcagagcttaaagatggcttttgagatggctcctgctgatccaactttggacctcaatatgcaattgtgagttattgttagaaaaaatgttactaagtttatgctctggactttctgaaatcatgtgattgaaatcttggcatcgttatgatgaaagggttttaagattatatttgtgcatactctgtatctgcatgcacgtgctttagtttctgtttttctctccgtttggtttgatatgctgtgcactttttctaactaatctgatttccatgaggaataattgcatggtaatttgcatatttatttcatactccttgcactgttggttgtagaacaaagcttggacacggcttactatctgngaagtactcaatgcctgcaactcaggtataactatagtaggaaatatttttgctgtatgcatatatatatgtatatgatctaaaccac

SEQ ID NO: 78563 - DNA, 546 bp, Arabidopsis thaliana landsberg
atctaatcttttggccttttgaagatgccgtgaatatattttagcatcaaattatagatatatcgacttgataaaaccgatacatcaatacaaatgaagaaatattagttttcgtagttggaggaaggtttaatttgatcatatgatttgggcctaagataatagcccattaagtataaccaaaggcttaaaactaacttagtcaaataatccgaaatttggcgggtcaaatcttttaccgtacgaatcgaaaaaacaagacagcttggatcaaaggtgaacattcatccttccttacccgacaaatttactcaaaaatccgacctaaagttttgatttttataatcaaatttcctcgaattgctcgacaaaagtttattcctttaccatcacaatttgtagtttacccagatccttttctcctctgttttttctttcgcattgttatcttcagtgtctgtctcattgttcccttttcccagaagctgaaacaaatcttcttttttttttttttttttggttctgtgaatcttcagatcttgatct

SEQ ID NO: 78564 - DNA, 111 bp, Arabidopsis thaliana landsberg
ggaaggtaatggtggaaagagcaagcttcgacggcatccgctttaatccaatgttttctctattccaaagccaggatctcatcaacaattgcggaatctaccgaagaacta

SEQ ID NO: 78565 - DNA, 602 bp, Arabidopsis thaliana landsberg
agatctgcctgagtaactattcgggacaaaccgaaacccacttgcgcctgattcagaaccttttgttgttgagttagagtctcactgatgactgagatctcctgttttaaagagacgattctgtcttgatgactgcggtccagagggttggactcgatttgggattcctgggggtggtgttagcaatctgtgtttatttctgcaggccggcttaccagtgatttgagatactccagatagatttctgaaatatccaaggtggaacccttgacatcctgtaatagttgaaaagtgaccagtgacgcaaactcggacggcgggaaaacggtatacttggacaatcgcacatcagacatgttctgaatgactttcttcatccccaaatctatgagacctgtgcacatgaccatttgctcatcgaaaacctgcatgtctttcgcaagaaatgctaacgacaagagaagatgaagccagcctcttgttagctcttcaggaatttgaatgctggatcggtctgagatgggtacatgggagactagatctcgaaatggtgtgatacttcgattgatcaatttaagccaatcaacaagttcaatacaatc

SEQ ID NO: 78566 - DNA, 381 bp, Arabidopsis thaliana landsberg
agtcaaaaattcctgatatttattgttcattacattttattttcttagtttattgcggcctgttgtggaagagaacaatcattataacattttatataatgagaaaagcttattgcaattttcctatctagtctcttgttctcgtgaaattgtgtcttgaaaacagtttagcatcaccgttcatgtttagtcaagttcatcttatggtcttcaattagaagttgtttaaatattgaattctctaaaaacagaaatatttttaatatgtgattaaaatagagttaaagagtcaagtgttggtcctattggctgtgggccgtagtggtagggtattcgtgatatagatctgtaagctcaaatggtagagcgctcgttttcttc

SEQ ID NO: 78567 - DNA, 573 bp, Arabidopsis thaliana landsberg
tacgccttgttattagtttttatcggtacgactaaatattcagacatcagttcacgtttcaaactattctctttacatagttaagaaaataaaggcatcaaaaagattactagtaatgtttgtgtctactttatacatacatatgtcttgtttctttgtgtttttcagaatctgatctcttcgggaacgtttgtttaatttgtttcagcctttgaagatatggtgaagaatcttaaagtggatcctcttgctaaggtcactgcctgcaccacttccatggtaataaagattctctcttctctgtttattacagatgattcatatgttttggttcttaggatgatttatcagttatgtgtttttgtgttcctttcgttttgcaacattaaaggtttctgcaaaagagaattagaatcagtctgaggcagagccatcatattatgaaactcttgagacatatcaaggcctgccttgtccttatggtggctactatggatactactatccaggttttgcttctttttacacactgatactatataatatgtactcaattttgttttagatgatcat

SEQ ID NO: 78568 - DNA, 297 bp, Arabidopsis thaliana landsberg
cgggcccactcttaaggcactccggatcaataacagtgagattttattcgtgtatcgcgggggatccactatttgtagagcgggcgctattgaggcggagctccaattctaactatagagggttgtattacacaatactgggcgttggtttacaaggtcatggctgggaagactcatgcgacacccaaataatttggcttgcagaacatattcatttcgtgagatggggatatagcaaataggtctggaccgaataggacttccaaacaattgagcacacatgaatggggaatggga

SEQ ID NO: 78569 - DNA, 345 bp, Arabidopsis thaliana landsberg
  unsure (1)..(345): unsure at all n locations
nnnnnnnnnnnnnnnnnnnnnnnnnnnnnnnnnnnnnnnnnnnnnnnnnnnnnnnnnnnnnnnnnnnnnnnnnnnnnnnnnnnnnnnnnnnnnnnnnnnnnnnnnnnnnnnnnnnnnnnnnnnnnnnnnnnnnnnnnnnnnnnnnnnnnnnnnnnnnnnnnnnnnnnnnnnnnnnnnnnnnnnnnnnnnnnnnnnnnnnnnnnnnaaacaagcaggagaaagaggaggggcggaaaagggggggaaagctatacgaaacaggacctcccgaactggatcctaaagaaccacaagaatccttaaacagaaaggcaaggaaaccgcatccccactcgagacggtgag

SEQ ID NO: 78570 - DNA, 593 bp, Arabidopsis thaliana landsberg
  unsure (1)..(593): unsure at all n locations
gattattgagtgtttaactataaggagaaagaaaacaacacacattgttgagaagaccctttttgttttcgtcattattgctgcatatatgttcaattaccaatctcatcttgatttgttgtctactatcttcttactgtttcggttatatttaatttagatttgaactgtttttatcactttatgattattgttcaacatcatattcttaaaaacatgctataatacacaaatatttttattttattttgacaacttatacatacatagacacacacacacatgtattactaactcgaggtcggatggggtttacccaaactatattttatataagcatatatattctttatatatatttgtatattcgcttggctttcnnnnnnnnnnnnnnnnnnnnnnnnnnnnnnnnnnnnnnnnnnnnnnnnnnnnnnnnnnnnnnnnnnnnnnnnnnnnnnnnnnnnnnnnnnnnnnnnnnnccgaatcacagcttggttctttctctcactgtctcgtaatgccttatccccgctccagtatagacctgtgccaaaaaaactttgatctattaaaaactgctttatccattaaaa

SEQ ID NO: 78571 - DNA, 108 bp, Arabidopsis thaliana landsberg
cttaaatgctggaatctgtacggtaactgttatgaaagcgtggatgctccccacgctccttgtgtaatcgatgactaaaatactatcagccgagaacgcgcacctgct

SEQ ID NO: 78572 - DNA, 583 bp, Arabidopsis thaliana landsberg
tgtagataataaaaaacactgtcaaaatagtagaaattaaattatgctactacaaactcttaatttttccttacacctaaaccaaattactttttttcttctatactaatataacattactaataataaatttccaaaattaaagaacttataaatgagtggtatttattttagatatatattattctacgtggtgtttaaaacatacatatattcatttctaatcttgtattttcgttactcgaacattacatcattcaaccgaattataacttttaatcagcacaaaaatacaacacaaatgaattacagaggtaacgtaattaagtaagtaactttacgaattataaatccaacgtgaaaatgataaaatattaatcccatcgaaattcttctttttcaaagaaatatgaaacactctaacgaaacaaggcgggttctctaacaattcctctgtggtataaccgtaattctgaggctgttgctgatccaacccgtttttatccggatctaatctaacccgacccggagactgattattcttcctagtctttgccccatccacccgactactctgattcga

SEQ ID NO: 78573 - DNA, 376 bp, Arabidopsis thaliana landsberg
  unsure (1)..(376): unsure at all n locations
ggatgatgtctgggtctcgagtgccactgtgggtgccagctctgcactcctgttaggatcatttccaacttgtggcgccttcaggatgagccctgttctgagtcctgacaacagcaccaagtggccagaatgtacatctctggtctcgcgctggcccctgagaatgctccttaattgggacctgatgcgctctcctgttggtcactgatcatgtgcccaaggcctttacagagctcactgcccatgggagactcatagccagctatccttgccttgccttccaacggccatcttgtctcttggacttttacaacctgtaggaagagctagtggagtctatgtgnnnnnnnnnnnnnnnnnnaagcagaggattttt

SEQ ID NO: 78574 - DNA, 347 bp, Arabidopsis thaliana landsberg
catcttacttaaatgcttgtgtcattgtcatgtgcgttctcgcaattttactctactatgaatacctacattgatattcacgacacttattacgaccattctgattagctgtcacttgccggggctaactggtcggtaaaactaaagctatggccggacttgcaccaatcctgacagcctaggcgagaacagatggtatcatcatacgtaaattcggtgagtttggttctcaacagctgcacattgagcgactggctgcgtaccatttgctggctctctacctatgcacaggcaatacaatgcccgatcggctcgatgactggaaaagtgaacgggagcgacaacag

SEQ ID NO: 78575 - DNA, 619 bp, Arabidopsis thaliana landsberg
  unsure (1)..(619): unsure at all n locations
gttgtccctttcatgtagtatgtctacggtctatcttttataaatcatgttttcataattttcatttatttcttacatgaaaattgatgccgagttttgatttttagtttaatttgaattcgtgtcctagacatactagttatatagtatatattagaacatcacactttttatcaaaaaatcattggttttaaaatcttaggactaatctagctaattctaaaataactcgatttttttataactcgactaatctagatctcgttgcnnnnnnnnnnnnnnnnngactaatctagctaaaataactcgattaaatcctttgattaccgtacgctaaattaaattagtgcatcatataggtttgtgtatagcaaaagcatcaaagggagaagaaaaaactagtggagaactaagagatgtaacaccgcaacgaggagggccttgcagctacgacaatttatgccacaaccattgtcctggttgtaaaattactcaatgtgtcaatggagaatgtgtttgcttaatctgttacacaccaccattataattaagtgttaaatcgcatatgtaactcttagaagcataatnnatataaattgatactattcaaacttcgtat

SEQ ID NO: 78576 - DNA, 559 bp, Arabidopsis thaliana landsberg
  unsure (1)..(559): unsure at all n locations
caccaattccnnnnnnnnnnnnnnnnnnnnntattcctgctgctcccgcctgctcaagtcttcannnnnnnnnnnnnnnnnnnnnnnnnnnnnnnnnnnnnnnnnnnnnggcccaggcacgcgcctgttgggtacgtgcagcaagcattttatccatactttccctggtggcaaactctttccagttataatccgggcgaccggttggctggttcattgagatcaaaacaaatttgcctttagcagcaggcagccactccctgaaggcnnnnnnnnnnnnnnnnnnnnngacgatgattacatccccggtaacggtctgaccacctgtagaaggactccacgcaagctgtgtgccttcaagggatcttactctgggcgaaatcatatcaatatgagtaataccccgctcccatcctcttcattcaccccattgctcgttctttgccgttatttcccaggtctgatattttgccactgcccagtcgttagctttcttcatttgaggcgtgccgactaaacgtggcccgataccatccagcagttcgtgcgcgagtgtctg

SEQ ID NO: 78577 - DNA, 493 bp, Arabidopsis thaliana landsberg
agggtagtcttggattaaaacttgattaatactgacattaaattcctacatagaattttggtatttttcatgtactgatttaagttttaaccatctaaataacaaaccattatactatatactaataaccaatctagcataaaatttatattaaaaatttaaataagtaatctaacacgtcaatcgcatgattcccataaaacagtccatctacaacgcatacgtacaattttataaaattaagagttttattacctatagtcgtatactatttttgtttaattttatgcaatagtttcaggcttaaattaaatatatttattcttaatgtgtggctcaagcattagactccaaaggtactttcactgtttccaaataattaggttccatttgagaaattgccacaaattaatcttccaaagttgtgaagtataaatatggactcgaattacagttttagccctacatccctttgtttaatgacgatattcag

SEQ ID NO: 78578 - DNA, 474 bp, Arabidopsis thaliana landsberg
agcatagaagagaacagcggccagacgggcaaggacgcgcaggagaacaagattacgttgccacagcgagaagcctaccaagggcggggcgacgaccaacgcagggccaggatggctgcagagctaagcaagaagcagcaggcgaagaaccacgccgaaacggctcacgaccaaacagaaggcgaagagcacgacgatcagccccccggcgggacgcggggcaaagaaccggcagccaacgacggctgcccaaggaccggatgccaaacaagcgcacagatgggcgggagccacaagatcacggccgaccgcgccgacgagcgagcggaacgcacagacacaggggacgggatcccccaaagaaaaggggaaagacaggccggtcgaactgggctgtggtcccaacttaggaaacgacccgagaggggaaggaaaacagggagccgaagcacacgaaagagaccgaggcagaca

SEQ ID NO: 78579 - DNA, 540 bp, Arabidopsis thaliana landsberg
tcatttttagccagagattgttcagaaacaatgcagagcattcattactcctaggctgtatgtatttattggcccgaatctagggggccttaccaaattatgaatgtaatgtatcccataactcaatcaatacaggatcagaagtttctgctgttagcaatgtagtgggagcaaattctgtatatttcggttctctggaatgaaaaaaaaaaaaaaaccaactctacagtcacgtttttttatcacattatttaaaaatattacatggactatttacatacagtagaaaattacaaacagttcccaaacatagtcttttatgtgtgtttttcagcttgggggatagaatatgttgaatagtgggtttttacctgtttgctggtaactttatttaaaggggtgtgtgtgtgtgtgtgtccgtgtccacatgtgtgtgtccgtgtccacatgtgtgtgtgttgagggaatgcatacctgcccgtgcataggagccgtaagatgacatcaggtgcattcctctatcactgtgtctctgagggc

SEQ ID NO: 78580 - DNA, 494 bp, Arabidopsis thaliana landsberg
gataactaacttgaaatcgacaagtaaaccacaagaaaaaactatattatttgtttaacaattagaatggaacacaagccgtccatagctatctaatttacacgtagacaatgactggtaggtaggaggattaacaatgaacaatattgcttgtgacatttgacttcgcaactgaaaagtgacaataatacggtaggagaacaaaataatacatcttaaaaatttgattaacataatataatcaatatcctttatcttacaaactctttggagttaaactacattgtttaatctttggacttgatcacaattattttgtccacgtaacaatctgcatgttcatccaattccaatcacactcattcgaatattcgattgtaacatttcaacgtaatgggaagataaaatatgttaatcatactattatttttgggcaaggttcggacacgtgtcaattgaaaaaaatgaagaaaaaaaaatgtctgagcccgggt

SEQ ID NO: 78581 - DNA, 126 bp, Arabidopsis thaliana landsberg
gcacgcgtgcgtaagctgggatcctatagagcggccgacctattttttcggtttatgcttagagaaaaatgtggtggacatgaaaggagggagcattgggatcagagttggcctcctgtattcaaa

SEQ ID NO: 78582 - DNA, 423 bp, Arabidopsis thaliana landsberg
gtgctaggggcttcgtcctggccgtccaccggttcgaacaccgtgtagcccaggtcgatgtgcaggtggtcgtccttcttttttcggcctggccgtacggtcgcacccagacgccggggatgacgcggcgcgcgatggccgcgtacttctcgatctcttcgcggctgtccaggtaggtgtcgccgatgcggtagatgttggcggccgtgccccagcagtggcgggaggcatggcggctcagcgcgtgcccgggcgagcggtagccgccgttggccgcgacgtgcacgtaggtgccgacctcgagccggaacagctcgagcgcgccggccagcagcagcaatgcgcacgggacatagcgcgggaacgagcgcatgggcgctgcttgccgcacgttcacgccgatcagcttccacagtttgaagt

SEQ ID NO: 78583 - DNA, 224 bp, Arabidopsis thaliana landsberg
  unsure (1)..(224): unsure at all n locations
caatcaataatgggagtgattaacaaataggcctggctctatcctgcttaggagtgattactnnnnnnnnnnnnnnnnnnnnngtgctctatacatgcaaatgggcctatagcgccagataataccacacatgctaacgtaacatactccaacaccaataaagaagcaggatgccatacatgacagagagcctggtgctcactggagctattgcttttttatta

SEQ ID NO: 78584 - DNA, 620 bp, Arabidopsis thaliana landsberg
atgagaaagctactgactgggggctttaggcaacgcctaattgagctagtttggtatctgaagcttgacgcaagatcttgacaccatgaatttcagtaggaatctcagaatcggaagagacagatacgattgcttctttagggtttagcttcgtggtgatgaaagaaacgcaaacgcagactgttacgagaagcagagataacgttagaaaatgattacccatttggattttcacaactttgagtttcgaattgatgaaaacgaagccaaagatttcagctttttctatagagacggtctcttcgagttctttgaagttggtaactttaccaaatctgagagctgcaaagaagtttttttttactgttttgagaaaaaaaactgcaattggtgcaaatcttaaattagcgcaactaattagcagattaacctaaaaattatttttggagccgtaacttaatttttttttagaatttaataccacccaggatttaacccgtatacatacggaacaaatatttattatatataatatatattaattttatagtttagttagattaaactatgtaatttatattatgtataccaaaaattgtgaggtaaaaataaataatttt

SEQ ID NO: 78585 - DNA, 555 bp, Arabidopsis thaliana landsberg
aggcacgcatgctgtagcagtgccgtctgtaggctttgccccgttgatagtaagtttactattgaatatacatttgcctacctgtatcgtgatccccaagtaactataagatatagctgccaggtccataatatgattttggaaaatagccaggtaaaaggggtaatttatagaagtcaaggggcggattatgaagtgcggggcgatatagtagccttaggagcaaaccctatttttaattcccatatattgttggctgctggtgataagagctattatacaggtagaggaatatgcgagcagcggggtacgtatgttcgcttctattttaaggacctcgacaacgttggaggaagctctgttattactacaaacggctttatgctttatgacggtcttcatcggaaggaatatgccgcgtgcttgatagagaataataatacgaattttatcaggaacgaaccaggtgaatggaggaaaatggcattaatgaagtttatttttgaagatatttcaaatgataataacagagttgcggtgagtgacgaccttttg

SEQ ID NO: 78586 - DNA, 458 bp, Arabidopsis thaliana landsberg
ccttagttttgtcaatcgattattgaaacaataacgatgattgaatgttggtggactcagtatcagaaccaactttggtcggagtcggagagatgcatgggggcacatgtctcgggtgatataaatagaaagtgattgaatgatgatggtgtaatcagtggttttaaatcactgatgtgttcctaggtcaaaggaccgaattactatatacgtcacttgtaaaatgttaccgaaccttaaagacatatactttgtcttgtttatttatctatacatatacaagagctaatatgttagaaattccattccacacagttttagttatttatctaaacagcaagattaattggatggcggtgaaaaggctatatattatattactgtttgcaaataataatatatatattgttttcccctgatgagagaacaagttacgtaaaaaaaagtcatgaaaatgg

SEQ ID NO: 78587 - DNA, 554 bp, Arabidopsis thaliana landsberg
  unsure (1)..(554): unsure at all n locations
tctatactatttttctcaaaatagccataataactaaataatatataacctgaattattattacacttcaaaattgatatcctttatataattaaagagagttattatgcttatgtggcaagcctataagttttctcaagatttttatttatttaaatctactattacatttgtcaaacacattttcttatcctcattttctttaacccacttaccaaacacacctaaatttcttccaatatatagagttatcaaattttgaattttttttcaactttccttattattactaaattaactatttcaaatttctatatattaaatgcttagattttgtttaatgcacattaattagaatataaatcattcaattatatgacctaaattaacaaagtttaatactagaaaaaacattagtctacttttttttttggtaagaacattagtttacttttaaaacattcttttatttttttcccttcaacagacatccattctaaaacattacaaccaanataaaatgtcatagtaaacagaaagatataaacctaact

SEQ ID NO: 78588 - DNA, 355 bp, Arabidopsis thaliana landsberg
  unsure (1)..(355): unsure at all n locations
nnnnnnnnnnnnnnnnnnnnnnnnnnnnnnnnnnnnnnnnnnnnnnnnnnnnnnnnnnnnnnnnnnnnnnnnnnnnnnnnnnnnactgggactcttttgttgaaggtgggaccggcgtgttctgggagactatatggtttactgcattgccgatgcgactgtactagacattggtcggggtttttctgtacctctttatctggacaacatggaccatcctaaactggcatgatcgttcggaaccgatgctgcctgaacgcatacgtacctacgagccattttttgataggagtgcggctatgggaaagccgttccggggagttttacctggtgtgctccttagtctcgcctaggg

SEQ ID NO: 78589 - DNA, 561 bp, Arabidopsis thaliana landsberg
tacaatcatctatatgtgacgtatacgacaagaatttaactgtacgtacgatacccttataattattattcacttagatttttgtttgtactttagaagaatctgaagaagggtcccggcgtcaccatgcatgtatggtcactccttaaaccagagattcgtaaataattatattgtagtttccattgttattgtcgatttatttatggtccccaatgttctcttggagtcgagggaccatacatttagcttcaaaaatcttacgattaggaaacgtgtgacaataacatttgttttgttagctacaattcctaatttcctatgatttgtacaataatttaaagattaacacagcttgtgggatgcacatggaatttgtctaatagaatttagttccatcatatttgcatacaaacaattgtcacctattaatactttcattattactttcgatgaaacattgttattgggtatataaattaaagccccgccctaaagcccatttattagccacgtgcagaacttattatgttttcacttataatagaaaaaaaaagatca

SEQ ID NO: 78590 - DNA, 507 bp, Arabidopsis thaliana landsberg
  unsure (1)..(507): unsure at all n locations
agaaaaacattggagggtggaaagccttcttgtcgctttctcttatcggtgaagtaattacctaaacccatgacgcttatgtgatcctatggtcgnnnnnnnnnnnnnnnnnnnnnnnnnnnnnnnnnnnnnnnnnnnnnnnnnnnnnnnnnnnnnnnnnnnnnnnnnnnnnnnnnnnnnnnnnnnnnnnnnnnnnnnnnnnnnnnnnnnnnnnnnnnnnnnnnnnnnnnnnnnnnnnnnnnnnnnnnnnnnnnnnnnnnnnnnnnnnnnnnnnnnnnnnnnnnnnnnnnnnnnnnnnnnnnnnnnnnnnnnnnnnnnnnnnnnnnnnnnnnnnnnnnnnnnnnnnnnnnnnnnnnnnnnnnnnnnnnnnnnnnnnnnnnnnnnnnnnnnnnnnnnnnnnnnnnnnnnnnnnnnnnnnnnnnnnnnnnnnnnnnnnnnnnnnnnnnnnnnnnnnnnnnnnnnnnnnnnnnnnnnnnnnnnnnnnnnnnnnnnnnnnnnnnnnnnnnn

SEQ ID NO: 78591 - DNA, 270 bp, Arabidopsis thaliana landsberg
tccagactggcgtgtcctgaggattcttcttccgcctacttaaaacagctattgcttgtctacaactctctttgtttctgaacaggctcagatttagtactgttttcttgccttagtatccatcaggttggctggtcagaacgtttgccagctgcaaaggaaactgcaagaggtgtgcctggcatcttcctgtgaaacaccaacaattttgccacggaggaagtgatcccttgagttcactgctgattccacatgtataaggagcagctg

SEQ ID NO: 78592 - DNA, 564 bp, Arabidopsis thaliana landsberg
agcggaaaattccataacgtgttttgattaatggtttgattgatttggaagaaatgaatagtggcaggttcttttttgagcctgaaaagcaaacccaagattgagaagtgatgcaactgcaaagtcatgtaaaaaatgaagagtacaattcatttgtgtacagtttttttttccccatctagatacttaccgttaaagtaaccaatagtaatatttcatttttatcccgacaccaatagtaatattatttactaattttattattactcaaaagaaaacaaatgacttttttggcatgtgatagtacagtaaagggaaactcaaatttcaacaatcacttttcttcatttgattttatcccgtctgtgtagatttttttggcccttaatatacatgagacatatgagatttatcctcgtttatcaaaaaaaagaagagatttatcctcacatccatacaattttcattattgtgctcttttgtgcacactaatatacaatgttttgcttgttttggatttgtgtagtttaaacaaggtgtaactaatggaaacacatatgtttt

SEQ ID NO: 78593 - DNA, 534 bp, Arabidopsis thaliana landsberg
aatcgcactgtaagaagcgcgcgcatagcatcgagttcgccgcttttaatcagggcgaatatttctcgatttaaaacatcgatatttcgttgtgctgtgcgaacatcgtcgacgggctgcaacgaccctccggcaagttcattcgcagcttgctgcagtattttatacagctcctgccgtgcatcgttgtatgcgatttcctggctgatatttgcggaacgggccgcatggtcaaccgcctctatggtctggtcttcggcggcgacaagactgccgcttaattcgttggcgacgctgtctctgcgtatattttcgatcatctgctgatgattatagaaaccataggcggttatgcagacgaatgcggcaaaagtgcctaaaacggcaattgacagaagacgtgtcgggaaaacggccacatcttcttcattctcgtcgactatctgacggtaaatgatgacgggcatcacaatgcaaagcatgacgccgacaatcgccgcgatgagcgatacgccattattggttcccatgctc

SEQ ID NO: 78594 - DNA, 597 bp, Arabidopsis thaliana landsberg
  unsure (1)..(597): unsure at all n locations
aggctagaaacaacatgggggcctgattctcttgtgatgtccaacaagggacctaaaaaggtccatttattcttccataagctatagggaatgccagcaccagtttcacaaacaataaacgaatgggacataggtctcaacttacacaattttttccatatccaactcccagnnnnnnnnnnnnnnnnnaagcttgagtacccaattaaaagcctcctaatccatgaaatccatagagatccaacagctgcagaagttaaaccatatctgtgtaagaccaagtcctccacttcccttaggaatacaaataatttaaccaaagaaaaagatttaccaatttgaacaatacttcaaggttcaaactagaagaatctattcatagattatccgtgatatgaagtatgaagaagtaaatgctagattggtaaacattagatgatattttatttaaaacattcataatatgttttataaaaattgttgtcacatatgtactttatttattgatcaaacgaagataagttggaaacccactccataaattggattgtccaaatatgtggggtgtttagcttatgctcgaaactcttatttaag

SEQ ID NO: 78595 - DNA, 450 bp, Arabidopsis thaliana landsberg
ccgataaaggagaatcgcgaaagtgatgaataatagaagattcacgtttcttataactggaagtcaaacttatcaacaagccctagtaatgatggataagtagaggggtccgtgctctattatattcgagaatcagtacctgcatgctcagaaccctagatgccctacatagtgcttgagaaaaacccagactttgatcctaaacaataatacgcttctgacgatcgagagtttgattcacctaatagcaagagagtatattgaatgagcttttccataataaacaaattcattgtgtgactatcgaaaacaacactgattccatgcattaaaagccaaagctgccaaacccttggatgcataaagaaactgtacaatataatagacttatatcggagaggcactgtagcgctatagtaactacacacattacacaaacctacatatatt

SEQ ID NO: 78596 - DNA, 350 bp, Arabidopsis thaliana landsberg
agagcgaaggaacgaagcgagacgagcacacgcaagcgaactcataagaacacacgtattagaccgtaaaccggcacagcagcaaaaagggacaaaagaaggaacggggagcagaaacaagagggggaaacgaacaaaccaaaacgcacaaagagcaaagcacgcgggagaaggggacaggaaaaaacgcaggcgcacgcaggggcagggggaagaaaacagagagagaacgggccagggaggaccgaaaaaaccaaaaaagaggacggccaaacaaggagcagacgcgaggaagcgaagcccggaaccgcaacaaacaaggaagaccgggcaaaaccaaagaacaagcc

SEQ ID NO: 78597 - DNA, 365 bp, Arabidopsis thaliana landsberg
tgctccccgggttcttcatggtgaacgtcatgtcgctgcccgagccagcctcgttgatgacctgcccatttaccattgcctgatagatggcgccgatgggagtgtaagtcatgtggctggtccaggacaccagcgcgtttcacaccgtcgcccggaacgtactgatggccgtgccggcgtcattgatctgcccggcgtaccccggtgcgggagtgcccagcgtgctataggcctggctcgccatcgtgcacaagttacggactagctcatagaacgcctggcccgtctggcccttgaacgacgaatcgtcactgccaaggttttaaacaatgttgttgaacctcgcccccgggtaaccaaaaaac

SEQ ID NO: 78598 - DNA, 393 bp, Arabidopsis thaliana landsberg
agcccaaacgcagtaaacacttttacggatgaacagaattttttatcatcacctcctgggtgagggggatttggttggtatgcaacccctacaatattacattgcgttgatttgtagtggggcctgtccatgcctgaatccaacaatacattaatgggggaaatgcccgattgtatgccaagattctaactgtcggtttctgattaagaacctgaattataaaaccaggtaaaacctacatacttacttatcatacatgttttttattcttgttgttcagttgactggacgcgttgcgttggaatctgcgccaaatcataccatggtttatagtaatcactacccaattatttttgcgtgagttttgctgtaaaacttaactgcctcttactt

SEQ ID NO: 78599 - DNA, 479 bp, Arabidopsis thaliana landsberg
tgtaattagttttgattttgatggaaatgtcgataaacaaaatggtgggggccttttactcttacgatactttccttctatcctttcactctttattactcggcgctatcgagttttgtcgtgttcccattttttgggcaaaattacagaatcaataaatggaggaatatatagactgtcattgcgaacaaattgacaaagaatattaaagagatttgggtatggaattggacaaaaagtggcatccaccaaaaaaagagataaagataattaatcaaacggtctatggaaacagacggttataaattatgaacttgaagagattagagaccatttgaaattttggataatatcaagcttatatctccatgttcttcaattcttctgctatatcattttgagggatatttaaacaatttgttttagtacagtatcattgaacaagcaatcaattcattatatatttggaatctaaagat

SEQ ID NO: 78600 - DNA, 430 bp, Arabidopsis thaliana landsberg
  unsure (1)..(430): unsure at all n locations
gatggtgctggatgccacggccaactgccaggcaccggtaacgcgggagcgtctcttcgggtggcatgccgcgctgttccccaccggctactccggcctcaccaggatcaaggtcggcggctggcgcgatgacgccagtggccccatgcaagtggtgtccggccccatcggccgccagcgggtgcatttcgaagcgccgccggccgagcgtcttgaggcggaaaccagccgcttccttcactggctcaatggtgcatcaaacgagccaccactgattaaagcggggctcggccatctgtggttcgtcacgctgcatccgttcgacgatggcaatggccgtatcgcgcgggccacnnnnnnnnnnnnnnnnnnncgcgccgacggcagcccgcaacgctttacagtttgtcggcgcaaatccagcgcgaac

SEQ ID NO: 78601 - DNA, 487 bp, Arabidopsis thaliana landsberg
gccctatgaaacgaattgcctatggggtcgcaggcctttgtatcggtctcttcttgatgcctcatgcggtgatggcaggacccatcataagaagcggcgatctggtctccgtggatgcgacacaggcactcaaaggcgatttctatggtctcggctctaccgtaaccctctccgggccggctgaacatgatgcatatcttggaggaagcgcggtcacggtcaatggtcctgtatctgaggacctcgtggtcgcaggaggatccgtgcaggtccatagcgagatcgcagacgatctccgtgtgctcggcggtgaggtcacgttgtgcggtgaggtcaagggagatgtggtcattgttggcggcaccttcacggtactttccaccgctcatatcgatggcgacatactcttcttcggaggaacgctgatcgtggaaggtgatgtcgatggcaccatacacgggtatgcgcagactgcccgcatcaatgc

SEQ ID NO: 78602 - DNA, 387 bp, Arabidopsis thaliana landsberg
  unsure (1)..(387): unsure at all n locations
gggcatattattaatcaaaatcaaacgcaactttaaagatgcgatgtttgatcgaacatttcttatcgggggggctttacatgggatgattgatgtgcctagaaaccgtcaattattaaacttattggtgaaaacatgcacgaactgttatgcttatttagcatataatatactgatatgtgtcgagagaggatatattgatacgtcgtgaattctcgagataatgtgaggaaaaaaaaggctacattgcnnnnnnnnnnnnnnnnnnnnnnnnnnnnnnnnnnnnnnnnnnnnnnnnnnnnnnnncactggaaatcgaaatggttttcattatgacattattggtgaatattgcggtgtcacaaccggtagaaaacattactataa

SEQ ID NO: 78603 - DNA, 488 bp, Arabidopsis thaliana landsberg
  unsure (1)..(488): unsure at all n locations
gcttttgctggtggggcctcctcacgcttttcangaactttcgccgccgttgacagcgcggggggtattgggaaggctaaccacggtgcggccaacaaaggcctcgacgtcgacggcctggccctcgacctggccggcctggtcctctacttcttcatcgggctcttctcgctcggcattggttgggtcatctagcaagcccatcgtggccagggcgcgtaagcccacgggcaacatcggagcggaaatcgcttcaaggagacggaagctgctccaagggctacgcggatccgatctgaagccaaggagggaaagccctgggcgcatgccaccttcttacccggccgctgcgagggccggcgcgacaatcagccttacccgtgagcgcgggcaacgcggagtcgaaagccatatccggcaattgccgaaccgagaggcctaacggagtggctaccgggcggaaaggaacctactcaagggtactcacg

SEQ ID NO: 78604 - DNA, 412 bp, Arabidopsis thaliana landsberg
  unsure (1)..(412): unsure at all n locations
tgccaaaaagagacaacncgaggccaggccctagattgtaaacatcacctcacaccacttatacttatgaccaacgaacaagcacgagagcaggctcaattcattacacgagaacatgcagccgggaactacaagaacaaaaaatcccccacattacaaaacaaaaaagaaaagccaagccctagggaccaaatagacaaaacgacaaaaggctaaactacgaaacactttgtacatctatacggcaactaaagactggaacaggggccaccctataagcctcccagctatagcactcaactaaataaacaaggaatagctcctacagggaacctccctaaaaaaagacctacggcgaaagaaatcaaaatagcaaaccatagctgaaacaaaacacccattttaaaaacac

SEQ ID NO: 78605 - DNA, 523 bp, Arabidopsis thaliana landsberg
gaaggcggcatgccaagctcatgaaatcctcggaggattggtgcagatttaccggctcgggggccgcgtctggcattgctttacgtccataaagggccgtcagtatcgtgtgagcaccaaggaaaccggcttggagcaggccaaggcttttgcagaagactggcttctcggtttgcgcgggaaatcggcggcgggtattttgaagaccgaaaccaccttcgtggaagccgccaagaagttcgagcaggaatatgcggccatcaccgagggggagcgcagccccaaatgggtggagggtcacagcatccgcctgcggctccatctggtgccgttcttcggcaagatgggcgtctcggaaatcaatgccggtacggttcaggattaccgtgtgcatcgcattgccacgtccacgacggggagggcaccggcgcggagtaccttgcatgatgaggtcggcacgttgcggcaggtgttgaaaaccgccattcgccataaatggctccagcatcttcccgacctgtcg

SEQ ID NO: 78606 - DNA, 505 bp, Arabidopsis thaliana landsberg
gagatgctgaacaacgcccatgtgatccttgaaaagacgggcagcaaatggccgttatcggcatcgaaaactggagtgcaaaagcaagattcccaaaatacggtgatctgaaaaaagcttatgccggaacagaacagatcccttttaagattttactttctcatgatccctcccattgggatgcgcaggtgaggccggattatcctgatattgatctgatgctggcaggccatacgcatggcatgcaattcggcattgaaatacccggtttcaaatggagccctattcagtatgcttataaagaatgggcagggttataccggaagggaaaacaatatttgtatgtaaaccggggttatggatttttgggttacccgggaagagtgggaatattaccggagatcacggtgatagaattggtgtaagcaatgtattgcttaccaaagcatgtggataaacggcagacaggctaagttacattttaattactttttactttttccgt

SEQ ID NO: 78607 - DNA, 382 bp, Arabidopsis thaliana landsberg
  unsure (1)..(382): unsure at all n locations
ctgactggttaccatgancggcagatgtctctttgcgctttttactgagcgcatgccgagggcttgtttgagggtgctatcatgcttaactcaacgacagggggttgtgatttactgttctaaagtttacatttggcttttaatttatattataatgaaacaaattagttttttctttctggcatgtatgcttgctgggctaatgactatgcagggtgcctttgcccaatcttaaaccgtaagaagagcagattttgatgctaactggcgatttcatttaggagatgttcctgaagcaaaggattcgggatatatagatcattcatggcggcaattgaatctgccacatgactggagtattgaaggggcttttagtaaaaat

SEQ ID NO: 78608 - DNA, 489 bp, Arabidopsis thaliana landsberg
  unsure (1)..(489): unsure at all n locations
cctcttcttctatttacagttagatacacgtatcttacttgccttttattgacgcggcttgtgttcagcgcgttgaatcctcatccacttcaactcctcgtttctagctctcccccttctcaagctgcgccaacatgtcactaagtggcgtgcagatggaagtccttcgactttttaggagtttcttaaaggaagttcgctcccggccgccggaatctcgacctcaatttctggaggtactttatgctcgcttccgccaggactccaagatcccaaagtacgcctaatacatgtctccgattgcggccgaacactcccgaaggaatccagcaaatctacttctctacaagggagattgactcanattaacgctctttactttgttttcatcgctgtgtccgtatttctgggtgttcgtgctcctttgcaggtcaaactttcaagctatcgagtaccagttgggacctggaagggcgccgctacagcagt

SEQ ID NO: 78609 - DNA, 279 bp, Arabidopsis thaliana landsberg
  unsure (1)..(279): unsure at all n locations
gcaccgcgcgagaaacaaggcgtcgtgccgccgaggtgatctctggcgataagtccgccgcgttcgatccgatcggattgcgaattgcgtttacaccgaccctgaggtcgnaccatcggatactccgaagagggaggccaaggccaagggctacgaggtgncatcggaagttcccgctcgcggccagtggacgcgcgcgcacgataacagaccgacggattgatcaagctcgtcgtgacgcgaagaccgatctgctgctgggcatgcacatcgtcgcgc

SEQ ID NO: 78610 - DNA, 420 bp, Arabidopsis thaliana landsberg
ggttctggaatcaaaaatattgtttctgtaaagattaaacagtataatatcactacaatttagctttttggcatatttgcctctttcttttcaagtgaaatatagctttatatatttaaaagctttgaaacatgacagccgttgttacgtttacaagagtaaaaagtggataagaatcctgtatctttttttttttttttggtacaataaataacttctatcaatagagatgaaattaagtcgaatctatatatactttgaactttgactaaatacattgactgttttgttttttttttttggacaagaaaatccattgacttggaaaaatcttatatcctaagaaaatttccaagataaagattctctctagcttttacttttgcaattacagtataagttagagaggtgggcatattt

SEQ ID NO: 78611 - DNA, 577 bp, Arabidopsis thaliana landsberg
  unsure (1)..(577): unsure at all n locations
ttggattctttttctcaattttttacaccatttcttaccaaaaaaacaaagaacaagataacataccattaacaaattctgtaacgtaaagtaagttagaaatttgttttgactttgttaacacacacaaaaagatggtcttttgttttgttatataggcatcatctaaaagactacaataatacgaaataaatacaaaatattagtataatgcttcctaaacgcgttgtccgtgtattggcttatttcattaagtctctatttttattttattttgtcgaccattaagtctcaatttatttttatttttttgataaagaaatctatttattttgtctcaaactatataattggtcctcacatattattattgttacattgacacctagaaatacgaaacacgtcttaagatgagactcaagagaaaatacataaactaaacacattggcaacacataaacaagaaaaacattctaaaagaagaagacacatataaagcatataatatgttntcagtgccaagctaatcaatgtcgatcaaggccggtcttatactctccttcatgactctcttata

SEQ ID NO: 78612 - DNA, 333 bp, Arabidopsis thaliana landsberg
ttatgaaccaataagaagtcttttttttttaaagggtactgtgccaaatcgtttctctttttctgacaagaagaaaaaacacgtggaagcgaatgatgggatgagcttaccggatggtaacatggaaagcctctatcatactgatagaactaccacaagccgacacatgtcttgtgcctattggctgagataggctgaaaatttttcttttgacaaaagccgttaaagaccatgagagtgggtctaacaacaaacacgagttgatgacgcatactctcgatatttctctaatcgatccatacgagacctgtcaatttctgatttgaaaaacac

SEQ ID NO: 78613 - DNA, 362 bp, Arabidopsis thaliana landsberg
taacataacttttgtgtcgaaaatatatacttttcctgttttagagtgataactaatttaaaaaaaaatgtggagaagtacaaaagaaaagtattgcttccaaattcgagaaaaagctgtaatcacgcccttgtgtttaattctcaataaatcacatttaaaagcgatttttaaacttgttttaacggcccagatattgccacgtaggataacgtattccgtatattctccatttccgaaccatccgaccaggtcgcatcatatgttgtgaaaaaatcgtattggaagaaactctgttttagttagatccaataatattaacccccttggaatgaatgaatccaatctttttttaaactccg

SEQ ID NO: 78614 - DNA, 542 bp, Arabidopsis thaliana landsberg
cgctcccagcgcctgcagcgccgcgaccgggtcgcgtgcgatatggtctcccgggcgcaagccgctgatgacgggcacctggtcgccgacgcgcgcgcccagccgcagctgccgcagcagcaggcggtcgccctgcttcacgtacgcgccgctgagctccccgcgctgcgccaccgccgaggccgggatgcgcaccggcgccgccccgccgacctcgccatccgcggcgaacgacaccttcgcggtggtgcccggcgccggcggcggatccagcgccggcagccgcacgcgcacgttgacgctgtggctggcggggtcggcggcggggaacaccaccacgtccgccggcgccatcgcgcgaccgtcggccaggcgcacctgcgcgcgcgggtcgcggcggatcgcatcggcggcgccctgcggcaccgcgacctcgatccgcagcgccgccggcgcgtagaccgaggccagcggcgtgcccggcgcgacgcttttccccggttcgaccccgcggcgcgagaccacgccggcgaacggcgcgc

SEQ ID NO: 78615 - DNA, 500 bp, Arabidopsis thaliana landsberg
gcaatcgtataatttatcctttctatacttagcctagcttttctaacatgcatgaggtaaagtacgcaccaagggtccaaggtccatgaacaagcagagctattaacacttttagctccaacttccaagtaacaactttgcaactatatattcaaaacgtatatcgactgatacatattagaccaccattcatttgttgtcacttgtcagatcaagaggtattcatgcatccatttgggatttggtataaattaaaaaaaatgtttgtttgattgcaatatggaaattaaaatggtggatgatatataaggaaaatgtgaaaaagttaaagaggaaagattgggtcaacaaaatgaggtcaaaggaagatcgaaaaggacataatatagagaaatggaggaagaagaagaagaaatttggtcagtcacgagaggcttattaaattggtttcacgagaaattgattctctgtgtttatctaaagacaatgacatctttctc

SEQ ID NO: 78616 - DNA, 414 bp, Arabidopsis thaliana landsberg
aacatctactgattatttcaacttctcataaatattttcggatagtaatttggtactgtatttaccatccaaagacacgtgctgcaaggacaagacacgtgtccacaagggtgaactttgtcacgttacgttgaggcaaataatgtgatatttgatattacaaatcacattatttctttttgatatttcatccctgtttggtattacagattttaagtttttttttgttttcccttcataaccagttaaagtaagtttgctagttgaagacgtaaaaaacaaaatagtcggattcgattggcactatatgatattgtttttctacacgcgtctaacaatcaattagttcattttagaacgttatatatttgcaaaatttctgttaattagtgtcacttttgcgtgcatttttag

SEQ ID NO: 78617 - DNA, 607 bp, Arabidopsis thaliana landsberg
  unsure (1)..(607): unsure at all n locations
gttacgtccgtaagaatttgtggtgaagtaagtcagaatgttttcccttgtgaattccaaaggtgatttttctgttacaggccctcttgagagcttgagacccattctgaaggaagaaacatatcattaggttaggataacgtacgccgcaagaaaaaacacttatcatcaaagggtttattatatacctgaagaattgatcatgaagttgaggaagagattttcaggttcccaaattgagggaattgggaacccgagaaggaagaagatgtcgcgaggtaatacaaaaacgaaaaacttcaactttttggagaaaatgggtttttgttacatgaatagagataatggtcattcatagaagaaaacgatgaacaacgatgcaattccatttttggagctcctgaaatttagccaagcttccctttaaatttaggtttctctttctactcttattttctctatctctctctctatctgtagcagttagttttggcgggaatgtagaatgttatataagatgagtgatcantttgagttttcaattctaaagcttttttttttaacaagtaaagattccattagtactatatgctaatatatttctttt

SEQ ID NO: 78618 - DNA, 484 bp, Arabidopsis thaliana landsberg
  unsure (1)..(484): unsure at all n locations
cggtgacctacgcccttgacgggcgggaccgtagccgccagaatcctacacactgtaggtttatggtatgggtagaccgtgagcgttatgggtgactggttgtcgatgccgacggcggagcccgccgaggactatgggttcttcgggccggtgtcggtgacgtggcgggtgtggagttatccgacgtcgctgtcgatcgggtttcagcgtgctgtggtgatcgaggagttggatccggcgttggtggcttcggtggataccaccagtcagatctatgagcggtcgcggacccgttatgaccggactttgcggtatttcgcgatggtggcttttggtgatgcgcgctccacggctgaggtggccgaagtgttggtcaagatccactccaaggnnnnnnnnnnnnnnnnnnnnnnnnnnnnnnnnnnnnnnnnnnacgattcggcgtcgcaactgtggattcatctgaccgcgtggcactcgattc

SEQ ID NO: 78619 - DNA, 579 bp, Arabidopsis thaliana landsberg
atggtgttaggtgttgagatattccatgttaatttttaatctaaaatctatggttatattcacacactatttatatttcactatttgaacactgataagattttgcttttttccttttttgactaaaggatacaaatttagtttaataaatacacgaactggaccatttccgtattacccacttcggaatttttgcctctcatctgaaaagtctttgttgacctagacaaaaactcacatcatcatgacatcatcacgattagacatacgtacgagtatgtttcaaatacaaagctaaggtattgtctgaaaattttaatttataatacaaaacaaaatctatgagtattatctctagttctttggataattggtttcttccaaacaaaaggatctcgtaaatcttattgccgcagtggcaaggaagttggtacactaacttgaatgacaaaataagaaaagatcgaaatttcaagcacatcgcgttaattttcaagaatacccttcaaaaaggggaaattgacaccaattattggccttatgttctccaaaattatatggaaagaaatgctatgccat

SEQ ID NO: 78620 - DNA, 295 bp, Arabidopsis thaliana landsberg
  unsure (1)..(295): unsure at all n locations
nnnnnnnnnnnnnnnnnnnnnnnnnnnnnnnnnnnnnnnnnnnnnnnnnnnnnnnnnnnnnnnnnnnnnnnnnnnnnnnnnnnnnnnnnnnnnnnnnnnnnnnnnnnnnnnnnnnnnnnnnnnnnnnnnnnnnnnnnnnnnnnnnnnnnnnnnnnnnnnnnnnnnnnnnnnnnnnnnnnnnnnnnnnnnnnnnntcatttttttatttttatttatttttttatttttttcttcttttatttttttttttttccttttttctctattattttttattttttcttttatttttttt

SEQ ID NO: 78621 - DNA, 105 bp, Arabidopsis thaliana landsberg
tgatggcatgcagactagtaacgctcttttttgaggtgacccgggatacaatgcttatctttagaacatttctaccgtatacggcgtgatggatggctcccaaca

SEQ ID NO: 78622 - DNA, 558 bp, Arabidopsis thaliana landsberg
  unsure (1)..(558): unsure at all n locations
ttcgcgcgcagaaacgtttttgacctatttttgtcactaagcgacaacatatgggagattaatatatacatttttttgtaaaaaaggtgaaaaaatgggagatggtataaaaaaggcagatctttcataagatattcgcataaacctagttttatttgctccctactggtggaatcaatcacctacccatacgttgtcgacagtccactaagactaataatatatctgacgaataaattcaatcttccaacgaatatgaaaaattcatacagaaaaataatcaacatgtcggctacaagagtgggaaaacgtagatggggttttaggccctttagtgatatactgataggataaaactcagggcccattaaacccaaaaagagagaagaattcagggcccaatatgaattactaattggtattttattttcctgaagaaataatttactnnnnnnnnnnnnnnnnnnnnnnnnnnnnnnnnnnnnnnnnnnnnnnnnnnntctttctctaggagttaagcgctctctcactggtgtctgtctcactaacctctttcaa

SEQ ID NO: 78623 - DNA, 443 bp, Arabidopsis thaliana landsberg
actccaatccaaaacaaaatagaaatttagattcttttttattttttatatcactagtttaatagtactaacatggagaaaatagactgctggaattaattaagtactctcttgtttacgaattcaatcactggagaaggaagacttgttggttacaccaaaaagtctcttcttcaatttctttaattcagaggcagtagtagtacactcagatataaaagaaaccaaaacgatcggaatcttcttccacttgttcttttaaaagattaaagcttttttttttctcttaaagcaaaaaaaggaaaactttccctctcgcgtctctctcttttgacctcacattcgctgaatcactcttctggttttttttttttttttttttctttgccctagatcttaaagacaaggaggatcaaattatacttttttgagatctgggttcg

SEQ ID NO: 78624 - DNA, 129 bp, Arabidopsis thaliana landsberg
ctgacttcatttagaactaagagaacatcaaataggctcttaactttctctgtcaaacaaaacagaagaatgattgtgtctgagaattatttttttgtatatgcatgcaaagttcattatgccgtctcc

SEQ ID NO: 78625 - DNA, 400 bp, Arabidopsis thaliana landsberg
cctggtgtgcggcctcttgctgatttgtgcgaggccgtaacatgtcgggcacgttggtaagacatcggagtactaccggtaagaaggtgtgccttttctacgtacgcagaatgttggctacggtgaactggtgctcgatgacctcaagttcattacgcaggattctcatgagtcgctgaagaagtcgcagattaagtccggtgacgttctggtcactcgtgtggtcaccgatgaaatgaagggcggaatagttcctaccgagcttgggcgggccaattgtgcaaacgtgattcttattctgcccaaaacctgagctgagccccaaatttctctgctatatgagcaccgctcctgtcgctcattcttacttgctcgagaggcggatggactccgcacaaca

SEQ ID NO: 78626 - DNA, 514 bp, Arabidopsis thaliana landsberg
  unsure (1)..(514): unsure at all n locations
ctgcttcggaatgcgatatttgaagtcattgcgggtgtctagttcgataagggttcgggtgccgcggcgtcccatgttgccgagcgcttccgatgccgtctcagccatcgaataggtctttgaggcgaggacgtccgannnnnnnnnnnnnnnnnnnnnnnnnnnnnnggcgagggccttgcagtgttcgacgccgtgactgatctggcttgcggcttcggcgattttaccgtcacgatactgtgccgaccaggatgccgcctgcgatccgccgcggttcgcgcgagacagcggctgcatgcccgcgaacgtcgaaattttaagggcctcggcttccagagcggcgagcggccgtgcaagctcacgggcaaggaccgcaatcagctcgatgctggcgccttgcgcgtcggcttttgcttcggcgtgatcttcgggaggcgacgcatacgagagtgcctcgtcgttgcagggttcgcgtgcaagcttcctgcatcgcggacacaattcatcgagt

SEQ ID NO: 78627 - DNA, 550 bp, Arabidopsis thaliana landsberg
  unsure (1)..(550): unsure at all n locations
tggagaggaacgtgaagatcggtttatatatatgttcttacaccaacacctctgcccttgcatcagttttatcataaataacattgtaatttgtctcttaatcatcaggttttgtttcaatcttttttgcagagttttgtggctatacaaaatcaatctcttatgttgctttggttgacgagttaccgaaactcaannnnnnnnnnnnnnnnnnnnnnnnnnnnnnnnnnnnnnnnnnnnnnnnnctaagaaatttagttgtgatttgattttgtaatccaatcatctgtattttcttatactactatttgttattacattttggttaaacaaaataaaacattaggtatgttatctatgaccatatagtgtttattttctcttttgaacttatgttacagtttattttcattatcttttattacttataattaatatcacattttattgatatattatttattattttgaagtgttgtccatgcatagcacgagcctaatactagtatatatataatctataatccgcattacaattaacttnttttac

SEQ ID NO: 78628 - DNA, 453 bp, Arabidopsis thaliana landsberg
  unsure (1)..(453): unsure at all n locations
gggcaaagccannnnnnnnnnnnnnnnnnnnnnnnnnnnnnnnnnnnnnnnnnnnnnnnnnnnnnnnnnnnnnnnnntggagtggggatcaattatgccgccaaaattcctcttcaagctcttgctaatgcaatgcggggacaagaatcagagaattcccaggatgcaataccggttcttgatatcatattgaggcaacatgctgctatacagtaagcgtcaagtgtatatatgtatttcgctaatctcatatatttgtctttctaatacctatggtacaaattgcacaggttgcttgcttgtgcgacagtcttttttccacaatgatccaaccaactgtgaaccggttggtggttacatcttaggatgtaggggatttcactccacttgtagaacaacccagggtggcatgtcacttaatatgggtacataaattcacttgcacttgatgtt

SEQ ID NO: 78629 - DNA, 497 bp, Arabidopsis thaliana landsberg
ggaaccgcccgcgtattggccggtaaattgggattggcagcggtagaggctttgtttcaaaacaaaagcggggtcatgggggggggaattaatggcgagatagtggaaacctcccttcagaaagtgttcaaacgcaaggccgtccttggcgttgaaatgatgggaaaaataaacgtgctgtccgcctgattttttattcagaattcagaagccggtttttttcgcagctctccaccacgctaccgactgcagcggtaatggcttcttcaaaagtatttcctcttttgatgacctgcatgttcttcgcctggcccatgataaagatacggcagaccttatcatgggtttttgcagcaaggtcctgtttgagcaatacatcggccgaatggattgcgggacaatgctgaatgatcttttcgagttttttatccaggaacttcaacaaggtcttgcctgcttcaacgtgcagtgtcttaatagtcgttttatgagaattt

SEQ ID NO: 78630 - DNA, 495 bp, Arabidopsis thaliana landsberg
tcttcaacattatcttcaaaaaatttttacattaatgtatatatagataactacaatataatacggttttcatagtaacaaaaatatatatctatttatatatagatattttcgttacttttaaaaatatatcgtacaatgcagtttaatcttaattcaaaatactgcaaattaattaatgatacacaaataatcaaatgcttttaattagcctatcaatagagtattaacacattttttttccttttttttttgtgtgcaagctattatacatcttgatatgcaagctattataattaaaacaatcataaagttagatcatttctcacttctccaattatatatgtatatttcaaaagcgtaacttaatcataatttcgatattatttcatttacaattcataaatttggttatcttttcgttttaatattttctatagtaaaagaatatgaagaaattgattagtaatgctataatttgatttttatttacat

SEQ ID NO: 78631 - DNA, 450 bp, Arabidopsis thaliana landsberg
gaacatgcgtccgcggcgacggtccaggcactggtgaaggatctgcgggccatgccggttgtggatctgttgcaggatgacggcgtgtggcgcgcacggatggatgcgctggtcgatgtcggacgccgggccgtggtggagctggcgttgctgctggcgttggtggcggtgatggtggtcggcaacggcgtgcgcctggacattcgcggccgcgcggacgagattgccgtgttgaagctggtcggcgccagccatgcgttcgagcgtcggccgtatttgtacgcgggattgtggtacggcctggctggcggtagtgtcgccagttttttggttttggtcatggaaggtgcactggccggtccggtggggcggctggtggccagttaccgcggccatctggccgtgggcggactggctggatggcaattggcgctggcgcccgtgctggcc

SEQ ID NO: 78632 - DNA, 486 bp, Arabidopsis thaliana landsberg
aatcatcttgtttatcataaattcttggtctgtttagtatttgacaacggcccggatccgctttaaaacagcgatgaacgataccgtttgataaaaggctgcaaggtaagaggattttaattggcagggactaatttctcataaaaatccatatattcttccacatcttcatcatggtttttattgaaaggaagcaattttacctggtcttcctccttcatggtttcgatgagctttttgtctgctttagcatcgccgatagctaccgcatccgcgaagtggcaggcgcctttattcagggcggcattggtgccgggagcataaagttccaggtccttttccttgatctggttgctgatacgcgctttgggaaggaatgcgggccctaatttttctttaaatgtattgccctgaagcgtgtagatgctatgtgcattggcaaaaacaggctctttcttgtaggcccgtattaaatacatggggatc

SEQ ID NO: 78633 - DNA, 528 bp, Arabidopsis thaliana landsberg
acatatatagagagcacatcacattacaacacaacaaaactaatgaaacattttactaattataaatacaatttttaattacgtcgatttggaggtattaattaattaccggaatagaaaaatatggctctaccacagccatagtgttactctcagcataagtatcacaacaaaactcattgtaaaacgctcttgccttccttaatatatggcttatggaacatttcatgtaccacaacaagcttaatcgagcaacatcacgcctcaaatctccgtatttggtcgcggttatggacttaccatctttgttcgagaccttcccgtgttcttgttgattcgtctcctcttcttttacgaactgatcttcaagaaacagtagtggattagtaagtgggtgtgaatttatcttattatggtagatttctgttagcgttttgccagaaaagaccttgttcaacatgttttcgcttatggttttggatggcttgggtttgttattattgcgtcgacgagattttgtggtggata

SEQ ID NO: 78634 - DNA, 7197 bp, Arabidopsis thaliana landsberg
  unsure (1)..(7197): unsure at all n locations
aattaccttgcttagtggcttcttgaacccaagctcttctgctgctgctatttcttctttctcctttctttgtgcagcaagccgctcttcaaaactgtaacacaatcagctaagtgatattatcagagggatactactggaatctattatgcacacactctcacacatactttagagaaaccaaacaagtaacaatgatttaataggtagctcgatggataagaagcaagggtacaaggatcaagtaaattacctgttgagaaaaaacaatgctgttcttctaactgccgtcaaatctccagttggtacaagcactcccatttgaaccatagcttgaaggacctgccacaagaaggttaattcatatatatttaagtatgagctcaggtcgtatgcggcatgtcggtagaagactgaaagtgagaacaccttagagactataccttatctggatccttttcatagacgccataaaatgcctccaacaaaccttctctaatatttgggctaatactgcaagtgtaaaacacgttgtacagaaccataagtttaacaagttgataaaaggagatcacatttcttcaccatattgaaccgaagcagtttttcacatactaacagagtcatgttgtagcataataaaatgtagtaccttcccatcattccaaagtcgtaaaatatcagccgcccgccattgacatcatcaactgctatattcccagggtgctgcagaaagatacataagcaaattagattgtagtcttttcgtattggtacaccaaattaaagattgttgacactttagtgtaaaaaaaaaaggatagagacttacagggtcggcgtggaagaatccatgagataagatttgctccaggtaagattcaacagcatatcttcctagcctgcattgtaccaagttatcaatcaacaacaacgaaactattttggattcaaagagaaataacaaatataagtctgggaggaagatgtaagaaaatacaaacctttttcgatcaacacctaactgatctaaggcttgtatcttgttaatcttaatcccagggacatactccattgtcaggacctgcaaagaactcaatgcataactattgcattcgagcttaaggcttcataaatggtgaactaatggtcataggtaataataatacctgaggtgtagtgtattcccagtagatggatggaacttttacatactctaagtctttgaagttattagcaaacaactccgaattagctgcttcttttgtgtaatcaatttcctgaaaaaatatagcacattgttattactgcagtagttagaggtcactcaagttgggatacagaaaggaagatttgactgagcttctatgcaaaggacaattagcaacaaaagcacactcaaaatcaaaatcattttcctttttctctccggtaaaatggtccaaaacttattcacaagaagtgataaaacattaaaccacatcatcatacctggtacaatacactggcacattcatcatagattgcaacccaatctctctttgcaccatctgattttgggtccaccttttggagatactcagcgatcacctaaatagaagcataacaaagtcattgactcagcagaacatcatgcaaatagcttcagaagagcggataagaaaatcacgagataaggacgcttgcaacatggaaaagctctataatgactgtggtatagagacactaaccctcaaattcttaaggtcaatatcaaagagatccttcagaccaggtctctgtactttaaggacaacctcttgacccttaagtcttgcacggtgaacttgccctatatgaattaaaaacaaaaaccattaattttattatcatctcttgcaaatttatgagaagattatcacaaagacgtttaccaagactagctgcagctataggttcataatcaaaacggtcgaaaatgtcctcaacagaacctccaagctcctcttcaacaatggataaagctgtagcagaagggaaaggaggaacttgatcctgcaaagcataagatcataaaacttaaaaaagaagagcctcacaggccacaagtacaaattcaaatagaataaaaagaaatcaaacctgaagttctgacaattgatcaacatactcttgaggaagaatatccactctagtagagaactgttgcccaattttgataaatgtaggacctaatctcaaaatgttttctttcaaccacttagccaaaaccttccttcttaaaaccttcttctcttcagtcattcccccttatacacatgatttttcaagaatttagacaaaatgagaatcgtcctaatcctagacgtaagcaaacaaaaacaagtatcaacctttataagagaacttcttattgcttaaccaagtcctgaaaataaactgtacaacaaaaccccaaatctccaatgttctttgaatagttgagtaagtcttgaatctattccatcgaccaccaggtgtaacagaaacctgtaaaacaatattaaagtagcaaactttcaaggaattgaatcattaaacaaaacgatattgattaaaagtacattactttatacctcaacttgtttttgttgagtgttgttcttaaaccaagcatcctcttgaccaatatcttctactctcttcttcctcacttcttcttttctcttctttgtcacttcctccgtttccaccgttacacttccgttcacatacttcaccaaactaccgttaccgttcaaacgagcacttccgttaaaatctccgttgacggattttctcgcagagccgttaccgtttaaacgtgcacttccgttgtaatcaccgttgatcttcactgcattatcacgatcttcaacagcgacattatcgtctttagaagctctgattaatctcgtacgaatccggagattgtgattgtagcttaatcggtttctgggtaagaagatcccggcgattgaaacggaacgagtgattgttggagattgtcttgagttgaaattgatgtttggtaaaagcagagacgacgatgaagaagaagaagtcgccattgatggtaatacttcggaagagagatctcaagttaaaccctagtttctcatggattatttgcgtacaagagattttgaagaagaagaagaagaaggtgaagacttgttgtttgttggcactttgcagtgagaggttttttgaggttcatgacgaaccacagagaatgttaaaaaaaaaaattatgataaaataaaaggggtggatatgaaaaggacacgtggcataagatgagattagtgaaggagatgttcttgtgttttgattggttgtgttaagacacctcatcgtgttatttatcggagccacaaacattgtgcgattttttttattgttcctttttccaaacacttttatggtccatcttcaaaccaaactgattggttcggtcctaaactcgactacttggtatgttaatctggtcctaagctatatgtatgacttttagttcaattaagtactgaaccgatcctattcattgaacagaaagcacctagaaacatcaaattatcgctaaaaatcgagtaaacatattattacctatttaattgacattaacatatacattgtataatttgaagaattcattgaacttacaagttaattcagatatttggtcaagtatttttcctatattaagctaattatgacgaatttttaaaaatacaaattaaatcagaggaaaaagttggaaattcgaaacttttcactagtcacgaagcgaccaaagtcttacaacttaaatacttttctcaaagttgcaaatttaccccataagttatattttaaggctatggaagccctcctcctccctccttcgccggaaccccaaaatcaaatcaccaatccggcgaattcaaagccaaatcatcaatctggtgacgtacataaagatgagacgatgatgatgaagaagaagaaggatacgaatccatcgaatttggaaaagagaaaactcaagggaaagaagaaagagattatggacaacgacgaagcttcttcgtcctattgttctacatcttctacctctaattcaaattctactaaaagggttacgagagtggttcatagattacgaaaccctatgcggttaggtatggctcgacgaagcgttggtgaacgacaagctgaaaaattggcgaagcctctgggcttttcacttgccgcttttgctaatatggttcgatcaatttccaaactttgatctttattgcatcacataactgttttgatacgaaattggctttgctggtacgggttgttcctatagttgaccttgcgtgaatactaggttttggttgtgttgaaagttttgatctttagatagtattaaatacaaagtctttcaatttaggctttgttgattcaaaactggacagaggagaggatctgaatcagagtcaaaaggattgaatctgaattttcttctctcagtacttgcgtgaattcttcaccctgaatcgaagagaggatcttctcctcaaattataatcagagtcaatcaatagaagctgaagttcttcttgggggtctctatgatcgagcttcaatgtaacattgcaaatttaaattgtcttctctctcacttgccttaaagcttgagcctttctagtttctactcggatttgtagttctgattgtgatttcaccaaatttcatcctacctagccgccaaagtcattgacttgcatatgctctgtagttcttactctgtttctactctgttttattgttctctaggttattgcgagaaagaatgccgcaggtcagaatgtttatgttgatgatcttgttgaggtaagtagtatgaacttcaaatgatttcttctcagtttctgttcaatctttcttttgccatcgttttggtagtgatacaagaacttcattgattatgctctccagatctttgctactcttgtcgaagaatcattagccaatgtaagctaaaatccccctctatgttttccgcatttttatatttatagactttctgattcataatgctgtggttacaggtttatggtaataagcttggttcctttgcgaccaactttgagcaaacattcagcagtactctaaagatccttaaattgaccaatgaatgtgcaaatccacatcagtcaaacaataatgatggtgggagttgtaatttagatcgctctaccatagacggatgctcagacaccgagctatttgagagggagacttcatctgctacgtctgcttatgaagtgatgcaaggcagtgcatcagcaacatctttgatgaatgagcgtgcccttgtcgaagagactatacaactctcttgtgtccctcctagaagttcagcgatggctttgaccacagacgaaaggtttttaaaacagcaaacacgagcaaacgacctaaagaccgtggagattggtcttcaaataagagagttaaggtgcaaagagacggcgctaggattaaaatttgaatcaaacaacctggggaaagcggcgctagagttggatgtttcgaaagctgcattcagagcggagaaattcaaaaccgaattagaagatacaagaaaagaagagatggtcacaagaatcatggattggctcctcgtaagtgtcttcagcatgttggcttctatggtacttggcgtttacaatttttcaataaagagaatcgaggatgctacctcagtatgcgaccaatccgaggagaaaagttcgtcgtggtgggttcctaaacaagtttcatcgattaactcaggcttcaacaccttcatctgccgggttcgagtttgggtgcagatatttttcggtgtgttaatgatcattgtcttcacttactttctaaacaaacgatcatcaggtacgaagcagacaatgccgataagtttcatcgttcttttcctcggtatattttgcggtgtatcgggtaaattgtgtgtggacacattgggcggtgatggcaaactctggctaatagtttgggaagtgttttgccttttgcaattcgttgcaaatgtcttcacattggctttgtatggtctaatgttcggtcctataaacgtgactcaagagaccagatcgaaccgttgtaacagtatgtttccatattgggcaaggcgcagtgtcgtgtatgtggtgattctgtttgttcttccagtcataaacggtcttttgccatttgcaacatttggtgaatggagagacttcgctatgtatcaccttcatggtgggtctgactatgcttgagacgaggaggccatctttgtattgtaatttattgtaacgatttgggttttttaatcttattttattttatgggtgctgttgaaacaattgtatcgctattacaaagttatgtattcgagttatatgtttgtattgttgtcaaaagaaattaaaattatgcttttcgatatgacaaaatttcatgggtcaaatggtactttatcttatcaagtttttggataaaagtgcaagtcagttttgatttggaagctggtttaaattggattgaacaatttgatttttatgtttgacagcaattgaacagtttgattaaattgtaagtattatgaatttatgatgatggtgatatcatatatagaagaaaatattatgatattgtgggtgggtcaagtgggtaaatgagcaggattctctaatgtcttaaaaattcgataataataatacagagagacctttttcttttattttctccatcctcttaatcggcttatcggatccgaatccggacccgaaagcctgaaaacccgacgattaattgcacgatgtccgatgctccgtcgtcttccccggatgccacggcgtcgcactggtgctatcacnnnnnnnnnnnnnnnnncgttgaaaccttagatgactttgtcgtgtgctgcgaatgtaacaaaggtttcgtcgagtcaattcaaccgactcccgccgcttattcatcgccggcgccaccgcagccactttccccagatctgaatgtagaagactccagtattggctcgcatttcctccagatgcnttgcttgttagcccacgcgccttctcagcgttcaccaccacgacaccttgatgttttatctacgaagatgattcttcaggttggagctcaatagtagaaacgaaatcgacgatgacg

SEQ ID NO: 78635 - DNA, 438 bp, Arabidopsis thaliana landsberg
  unsure (1)..(438): unsure at all n locations
atgtgtttcagttgcttgtaacgttccgccataaagaatagctttagcgggaaagcatactgatccggggtttggtaaaatttgggaaggaagggattgtcggcaaattcttccagtatcagccttgcattgaaatgcnnnnnnnnnnnnnnnnnnnnnnnnnnnnnnnnnnnnnnnnnnnnnnnnnnnnnnnnnnnnnnnnnnnnnnnnnnnnttgctgggagccaaaattaaccggcatcagttctctgtgatggtttttttttgcacatccagctcgtcaggacattcagccagtaattgccggatcgttttatgcactacagggtgtacaatatcagcggcgatctcgcataatggtgccagtacaaacctgcggtattgcattggcagggtggggtaatgttaataaatcaaactgcagaacatgaccgttta

SEQ ID NO: 78636 - DNA, 551 bp, Arabidopsis thaliana landsberg
  unsure (1)..(551): unsure at all n locations
tggcctctagtagggcagattgataatcaggcggatcatctgtggacatcattgccagatcgaggggagctttgttaagaataaagtgattgttccttatcactgctagatttcatcaaaattaggccatgttgaggtttaatcaatggcattgaatgcatcaaacattgcgccatcttaattatccttttacaccaaattccatcaaaattagcaattgtgtgttttaaaaactcggttctcaaggctcatcaaacaagcattgagctttatctttatctatttgcacagcttatttgcgcttccattgttgatgtttaaataaaataatttaaaactaaattttttcattgaatgctgctaatcagatagtagtgtttatattttgaattcatggtcaataagtaagagttaatgagcttttcagaaagagaatataattattgatttttagaattnttccatcaatttataaaactccaaatggctttagagtcgtcgcgttattatgggcagtttggtacttaaaatagatctctcccgctatgtct

SEQ ID NO: 78637 - DNA, 540 bp, Arabidopsis thaliana landsberg
ccacctacgatctcgtggtggccaatatttttctccaattctctcaagctgatggcggccatgctcagtgcgcgcgtgcgcccgggcggccggctgatcctctcgggcgtgctggaacggcaggcggacgaagtggccgccgcctacgcgccctggctggccatgtcggtctggcgcagcgaggaaggctgggtctgcctgcatggcacccgcgccgacgccgccagctcccccgccaccccttcctgattcgacaccatggctgccgccaagcttgtcacgcgttgtccggcctgccgcaccgcgttccggcttgtggcggaccagttgcgtctgcgccagggcctggtccgctgcggacagtgcgataccgtcttcgacgcacgcgaacacctgattgaagtgccggtaccggccgctgcgccacggagtctgccgcgtcgacaccagcgccggggccgaccacggccgggccaagcgtggccgccgcgcttgcccaatgccagcaggcgcaagccagcgcgcgcgcgcatgcacagg

SEQ ID NO: 78638 - DNA, 618 bp, Arabidopsis thaliana landsberg
  unsure (1)..(618): unsure at all n locations
tggtgttattgttcactacaacaccacttaccaagaacacctcaggagcacgccatgaacaccatatacattgatttccgncgccgccgccgttctgatcacggccgccgtttccacctcgctggccctggccatgcatggccagccaacccaacgcatcgccatcgacggccccgtgaccacgctgccgaccgtgaacgtgatcgccaccccgctgccggcttcatcttccgtcgcgaaccaggcttgatcttttttttgtcacaggtgttatagttcaatacaacaccggtcaccgagaacaccgaaggagagcatcatgtacacacgcacgctggtttccatcgccgcctccatcctcatcacggccggcatcaccacttccctggccttggccatccacgggtcacccacccacttcgccgtcaacgcgcagaacgtgaccacgctgccctccgtcaacgtgatcgccacgccgctgccgaccaccgtcagcacggattcggccgaacatgtcaccgtcgccacggccactgacggcagcttcctcgacaccctggccacggacgccagcgtgcaagtggacagctcgcacctggccatgccgtactatgcatt

SEQ ID NO: 78639 - DNA, 599 bp, Arabidopsis thaliana landsberg
  unsure (1)..(599): unsure at all n locations
aaactaacttcagagttgataagcgtcatacaactgaattacatatgtgtcccaagaaagattttattaacaatgcggtgaccattgaactacgtaccatcaatccgttgcgagatgcaaaccttatcaactatatagaaactttggtatttatgtatatattaagagatccaatgaaagttacgtacgtgatttcttggagctttattagaaacttagtagagtcatatatagacgtgattcaaaaggaaagggatctagtgaagaccttcttcacggctttccatgtgaatgaagaggttctaataagtgacataggaggtcttatactgaatctcggaggcgttgtagaatacgtataaaacgccgatgatttatcggtatcaaatgaagttttaataatagtgtcttcttttacgacaatgcaatcatcaacgctctctggattattattctcctcttcctctacattccaaaaccgagcttcttttcgcttctttttcaccatcgcttacacatcgagtttgttacanatcccccacaccgtcaccttctgattgtagtagtctactttcactgaatatattcctgattattcg

SEQ ID NO: 78640 - DNA, 604 bp, Arabidopsis thaliana landsberg
accatccttcacatctaaccttctctcctccttgatatactatttcattcccactcctgtgtgcagctttgcggtctctctgtccctctagggccatctgtaactctcaccccacccccactccttataattcaagtttctgaactcctgctccctctccctttgtatttgtttagcacatgctgttctggctgtgtgtaggtcatgggtcttgtggactttaaacaatcactcccctgaagtcctcatgaagcaccctcagatagcccagaatgagagagcaagtaggtgctggggttcatgtgcctcttatctcactgtgaatcacctgaattgttatcgtccgcttacagctgtgctctctcctgaggactcggtgatggccacctggtcccacctggtacctggcacagagcagacactcagcatctgttgttgggtgtcggcaagagcatgagcttgaaggtcatgagacagatgctctgaggcacagtctttactcaagcatggggaggagttagtgtttcacggaagcctcccaggcccatactgctgtcactctcctcacctgacccatgtcattacagggtgggcgtacttctct

SEQ ID NO: 78641 - DNA, 586 bp, Arabidopsis thaliana landsberg
ctcccagagaacaacataactctgtaaaagggaaactctattttgttctggtaacttcaatatttcctcgttttatttcagtgttatattcttttattcgatggtcctgaatcgaacaggacccaccgatggaacagtgagaatctgttttcttatataaagacataatttttccagttcgttgtgtttatcctccatagaaataatgtcggggttggtttttggaattctctaagtgttgtttattgatttttgtttagttttgctgggtttactgttgaagttttgatttttttggcatattcttttatttgatacttgtttgattgttacatgttcctgattatctttggctgcttgttaattaacacgatatattagctagtatttcgatatcttttctcaaatttttttggcagttattgtaattagtatatgtaagctcttacgacattcctctttaggaacttttctttttcttgaacaaccttttttggttgtgaaagttttaccttttttaaagattcgaaaccaattcaggttttgcttgtgtaaaaaagatctggtcttgagaggaagttggttt

SEQ ID NO: 78642 - DNA, 513 bp, Arabidopsis thaliana landsberg
attttaagtaacgtagatatatagtataatacataagataaaagataaaacaagttgtcaagttttgtctttatatatagcatttaaaagatttctctaacccatttaatcattttgccctttttctttcccatatatgcatatgcgcgtggtatccacatatttctctataaaacctattacatgttagtgtaatatttattgtacctatcaaggtttattttccaagatcatttctcgtcacaccttagattcaaacaactaattttattataaaccctaaaatactataacttgatgctgttcatgactaatataaaaaacccttcatacaatataaaatttctttagacatacaatatattatactattacagatgcaatgcattattagttacaaactattaaactaaatatcccccgcctctctcttgctatataaagaagatcatttacacatctccttaagcatattaaacccctcgataaacacatacggtcacacatatttgt

SEQ ID NO: 78643 - DNA, 461 bp, Arabidopsis thaliana landsberg
atagctacgtctaatgaatgatagagccaactagctattagctatgttttttctaatgtgttagaaaagagaccgaaacatgttggttttattcaagccaactcagcaatgacaacaatgctactattgtcatgattgtaatatgtggatgtaaacatatttaataatattcccaccattaggaacttagatattcataaataaaactgaattacaaaatatagatgtgtcttttctatacaagaaataaatctagataagaaatgaatattcttataacattttattcaacccattgaatttgcatttcactagaaaattataggaaaagataaggaaacaacatctttcaattcacaataaaaggcacgacgataaaagttgttttccaaaaggagagatgaggactgatatgttaatcttgtctggctattaaggaaatttatatgataagctatttt

SEQ ID NO: 78644 - DNA, 163 bp, Arabidopsis thaliana landsberg
accgcactgatcgggctcgaggccgtctattttcagcagccttggtacgacaccgtgtgtatgaaccggaccgacgtccacggcggtgaagtttgcgccgcgctggtgtcggcgctgatctcaccacatggcccccaggtggcgcgcatcgagaccctgcggg

SEQ ID NO: 78645 - DNA, 600 bp, Arabidopsis thaliana landsberg
gaaagagattttactccgtagagatcagtgaaatatcattgcttttttcatacaaaaaaagaattaaatattattgcttttgactttagtttacggaagatcataagttggccgggtcgatcaagtcgatcaaacacaaaacaaaagtcacgattataaacaatccactaaaatcatatccgtgaactactcctgctccaaaccaaatcttgaatgaaatggaagaaactcatcttagcattttaatttaatagtatatgatttacatgatttgaagaccagacacctattgatgaagcatatattatatattatttttatttttttgtatttctagtgatatttaacacattttttattttgccactaaaataatgttatgtggatgttccacgaagattgaaacatgattgatgatatgggtgtctctgtctgaatgtatgtatccaacctttgatcggttcaacttttactattgttaagtgttttcgatcgactatttcaaactttggaataaaattatatatgaaaacagtgtgcaaaaatatctaagatatttaactcaattattgctaaatagattctgaccagtatgcacat

SEQ ID NO: 78646 - DNA, 613 bp, Arabidopsis thaliana landsberg
tctcccagggctctgctagccatccttctcagttcttgccctccaggcgaagttttccatcactctcatatccctattttacctggagcccatgaacacctcagacatatttattttttcctagtcacagcttgactttcaactgtaatcctgtggaccccactgttccgtcttccttaagaagccaaaataagaagatgtgaaaacaaattggagttttgttgtgtttctctgcccatctttagtgacagcattgctctctgaagatctcccatgttcctaggcttcgtccaggtacagaataatgaggacgcactcagttctgactcaagagagtcagaaggaagggagttgtgctttccttaacagcccacccaattgctgtaagaaggagctgggcaaaggttgggcctggggagggagaagttagggactctacttaccatgaagccttgtatagcttagctgccgcttcttgtacccatttcttgatttcctcaggactttctgcctgagccacagtgtccaacatggaaagctctgtgatgggtacttagggtcatgttcaacaccaaaatagaacaatgatgtagagcttgctgatattaaatga

SEQ ID NO: 78647 - DNA, 434 bp, Arabidopsis thaliana landsberg
ggtgtgcctcatactacatcatcacgcagtgttatttctatcaaacattatatttttgcaatacgttacagtttacatgtttttaacatgagttctcttttgtttgcagataatgatggtgaacatagttatttcactcttacatattgatgatatccgtctcagttctacgcaaagtgcctcctcggcatgtttttctgaaaaaagtaacacacctggtttggatcctggcgatcttggtacagaaggggaaaaggaaattgttatttctttcacaaaacagctactcgatgttttacgccgcaatcttccatcacatccaattgaacaagagtgtcagctggatggtaattacagtactgatggaagacaggctttagaatggagagtatccatggctaagcgtttcattgaagattgtgaatggcgattat

SEQ ID NO: 78648 - DNA, 486 bp, Arabidopsis thaliana landsberg
  unsure (1)..(486): unsure at all n locations
acaggcgatacctggcaaaatccgggatggtaaggagaaaattctttttgtaaagacttaacgatattaaaatgaaatactataaaataaaaaacatactgctgtgcctgactgtattgtttacagcaatgcggcaaaatactttcgcacaaagcgctgcgcctatgctttcgggtaaggtcaccgatcagttcggtaacccgttatacggagtggctgttaattcagggaatggagcaaatggaacatccactgataaaaaaggagcatatacactttctgttgatgatggcagcaccacggttacgttcnnnnnnnnnnnnnnnnnnnnnncaacagaaactattggagaaaaagaaacgatcaatgtacaattgcagccggatgcgcacaaattagacgaagaaatacaattaggctacaatagccagcgtcgcaggcattttacaggtgcggcagcaacagttacggngtcagagctggaga

SEQ ID NO: 78649 - DNA, 192 bp, Arabidopsis thaliana landsberg
attataataaagaaacacgaacaggagcaattggtaagtttatgtgaccaaattttaatgcatttggtatttttaaacttgaagcacctactctttttgttcatgtatttatatactaaatacttctattgttacattattattcacggttgattttatgacttgaatgataatggtttttttttttatttt

SEQ ID NO: 78650 - DNA, 593 bp, Arabidopsis thaliana landsberg
atttggcattgcagagttcttacaacattcatgaattatttaatctcactaagccacaccatatgtagtgtgggcagaatcttcacactgtagatctagacagtgtgtgaaaaattacctaatgtgtggttgggcgcttaccataagttagtgccctctcccaggcaggccgatgaatacttacatgcagagacaagagatgtaaaaccactgccatcataaggatgctgttcacataatgatgtaccggcttctgtttcggcatttcctatacacaactgactcagtcttcagagcaaccccatgctgtagacactctttttaaatttcagctttaagaggaaagactctgagtacatgtatatatacatatgtagtttaatatcacaagtagtgtacatacacatctccatatccatatatccaatcatccaatgagtgcttgctatgtgtcagttccttcatgcataattttaatcttcgggacagttctgttactcagaaccttagaaggtccgctaacttgtccacatccacacacttagtagtggcgttatatttgaaatagcccgtgggcctttcccggaggcatg

SEQ ID NO: 78651 - DNA, 472 bp, Arabidopsis thaliana landsberg
tgttcgacacgaccgatccagcagttgctttcgatttaggcgtaatcctcgcttgcggcagcggcgcgagcggttgttggccagtcgcgttcaccgagagcttccaagttgctcgaatcgagtgtcacatggctggcatcggtgacgacgcggcgtcccatcagtagggccgccgtgacgagtgcctgtcgctcggtagtgagtttttgtcccccgttggcgaccagaacgacgttcgtggcagccagaagactggcgagttcggtgtcgcgcggaagcgtgatgctgtgtgcgtgcgtgttttcgacaacgtggttgttgacgaccagcagttgatcgtttggcaggttgcgttccagctcggtgacgatgggttgcgccgcgatgttgtcgacgatcagcaagacatgacggacgccttgcttgcacgtggtgggccaagggtgagaacgggtggcatcgaaaatctggt

SEQ ID NO: 78652 - DNA, 524 bp, Arabidopsis thaliana landsberg
aacaaaagttttggttattttcttttgttgccattcattttttgttttttgctaacttgttctccgatccgggatgcattttaagtagataagtcgcatttacatacattttgtttgtctcctcgatacattttgctagcttgttcacctagatacattttaagtatataagtcgcattttaagtataaaagtatcattgcgttgcgagtttttttttccattttaaaggctgggagctggagacgtacatgtgattttatttttatggtaaataaatttaatacgaaaacaaatttactagtacttattaaattgttaatacgtaacttcgtactttatactatggttaaattggttgggaaaagatttttttgtttgttaagttccaagaatttgtttagaaaaagttatgaacttatacgcggtttgctttaaaatgcttcactttttgctggccaataaataaatgaccttcactttgcatgaatacagattgtctatatcatacatacattaaattgct

SEQ ID NO: 78653 - DNA, 158 bp, Arabidopsis thaliana landsberg
  unsure (1)..(158): unsure at all n locations
tcgagattatgcgaatacaagagatgtagaaacatatcttgccaaaaccaacnnnnnnnnnnnnnnnnnnnnngtgatatatgtactaataggaaagggttttgtaacccttgtatgtgtacgatctgtaacaagttcgattttaacgggctaatact

SEQ ID NO: 78654 - DNA, 518 bp, Arabidopsis thaliana landsberg
gacgaaaatactacaaatcagtctaatgtataaaatatttctgatagaatgttctatcagaaagataataaaaagtggaaggtgactgcatttttatagccaaaccgagaatttttccggggttacttaaatagtttatagtatttaatatttaactttaattttagtttggttttatcaattgtatgtgaagcggtaatagattaacatgatcataatcatatttagatatttttaggtgtgttgactttgtgtatgatggtaggtcaaagggtcatatatagattactttggatctcggtgataaagcttatacacacgcaggcaaatcgatcctttttctcggtacaatatacaatgcgattgcaatttacaagaaattagaatacgtttttccacgtaaaacaagtaattatatgccttattaattacaaatatctcaaattaaaacttaaaaaccattattgctttatttgccacccaagacaaatgaattaaaaaaataagaaaggatgaac

SEQ ID NO: 78655 - DNA, 572 bp, Arabidopsis thaliana landsberg
cttcttgtgactaaaagcatcaaatgagaatttaccatggtaagcacccattccactttcaccaactcctttgaatttcaatgtgtgaagtgcaagctgcaaaatatcggatgatgataacgcttttgtgtaatgataaaatgctactagtgcaatgtattttagctagtgcctttcttacatgaacagctatgtcattgactactatgcctccagcggagactgtcgctgcgaatctctctttcaacttcttgttatgtgtaaacaagtatgccgcaagtggcttatgtcgagaacgaatcacgtcaaagctctctttcaagttgttaagctgaaaataacaaaagagagttaaaatttgccttcaagagatgaagcagagcttacatagaatgaaaaatagttcctaccgtgaggattggaaggagagggccaaatatttcttcactcatgatcagagaatctaatggtacattgagcaagattgtcggagcaatttttcttataaatggaggcaaaagattaacataagtgaaaaatgtgatgatgagaatataaagagaggaacttac

SEQ ID NO: 78656 - DNA, 405 bp, Arabidopsis thaliana landsberg
gctcgctttcgtgatccggcgtctgctcggcagcgctgcacagcgcactcatcgactggatcaggttcttgatatcttgtgtcaggcgcgccccagtctcggagaccgcttgcatgtaagccgattgacgcatcggttcctcgcgtcgcttcgcctcatagaattccccgacgatctgcgtcagcagcttgacgtgtatcgtcaacgccggcgtctgcggccatttggtatatagcgacaaatggaagctctggaactcgaaatccgcccggtggctgcccttgtagacatatgtgccatgtccgtcgtccgtgatccaacttaagccgctgacccatggcagggtcgagatctccagcatggcggactgcgtgaactgctcggcgctggagtcacgctcctggt

SEQ ID NO: 78657 - DNA, 572 bp, Arabidopsis thaliana landsberg
gaccgtttgccttggtgccgaagttgccgcgggagccgcgttggcaaacgtcggcgtgaccagcgcggtctgccccatcgcgccggctatcgccgcgctcaacccccaacgcttcgcgccgcgggcaagcctgcctggacccgggtttgtcccaatacacgtcatgtctttgtctcccgatggatcattgcagtgtcattggcgcatgcgccgccgatgtgcttcacggcggcgcgtgcgtcctggtggtcggatacgcgttcagaaatgcagccgggctcccagcatgtagtagcgctcggaaaatcccgtggaaattctctggtcgggccaggtgaggtaatactgctgcttctcgttggtcagattctggccctggagataaagctgcagatgtgaattcaccttgtacgtcacgcttgccgccaggaacgcctgcggcttgaggtattcgtcaaggcccgacacgccaagccagttggtgcttatcagctccttgctgcggtaattcaaggcgacgcgcgcctgccagtggttgtcctgataccagacgatgaagttgcccgactttt

SEQ ID NO: 78658 - DNA, 544 bp, Arabidopsis thaliana landsberg
ctcgacttcgttgatggttggccgatgcgttttgcacgaactcttgctgcgggctttagcgaattcttcccccgatcagggcgtatgccataggtatttctcaaggtgggagtttgatgaggggagacactgtgcttcccccaatagcggtatttcccggagcaatccaaagtccatggtttcggcccttcctacccgtttagtaccggggttgagggtggcacgttgcgtccgcctaggcgctgtcaacttggatgagcaatggtctgatccgctatcggttaataacgggtcatggcggcaaatctttagctggtgctggtgcaccgccgtcctatcatgtcagtggaagatctggcaggtagcttcaattcatggtcagggtggaccacttggcggacagtctgcccggaaagctggcagaggcaggacaggcaaccaccagctccaccctgatccagctagctgagttacccgttaccgtcgcgctcgatcttcctgcgtatgcgctcttgctgttcccgtgcccgagcgttcatgtcac

SEQ ID NO: 78659 - DNA, 439 bp, Arabidopsis thaliana landsberg
  unsure (1)..(439): unsure at all n locations
gggcaactggaatgtgataccttttggaaagccatttagagtctacgacgaaagaagcaagacattgggactgggcattgactttttggggactgnnnnnnnnnnnnnnnnnnnnnnnnnnnnnnnnnnnnnnnnnnnnnnnnnnnnnnnnnnnnnnnnnnnnnnnnnnnnnnnnnnnnnnnnnnnnnnnnnnnnnnnnnnnnnnnnnnnnnnnnnnnnnnnnnnnnnnnnnnnnnnnnnnnnnnnnnnnnnnnnnnnnnnnnnnnnnnnnnnnnnnnnnnnnnnnnnnnnnnnnnnnnnnnnnnnnnnnnnnnnnnnnnnnnnnnnnnnnnnnnnnnnnnnnnnnnnnnnnnnnnnnnnnnnnnnnnnnnnnnnnnnnnnnnnnnnnnnnnnnnnnnnnnnnnnnnnnnnnnnnnnnnnnnnnnnnnnnnnnnnnntt

SEQ ID NO: 78660 - DNA, 306 bp, Arabidopsis thaliana landsberg
  unsure (1)..(306): unsure at all n locations
cgacaccnnnnnnnnnnnnnnnnnnnnnnnnnnnnnnnnnnnnnnnnnnnnnnnnnnnnnnnnnnnnnnnacttatctaccatggacctgggataatataactgcacacgcccaatgtcgcgccgaatacttgcattccctatataccacactaacatcgcttggtgatccatgcttgttaacttggcaggcctgtaccacctatgctagacgagggtaaacatctttgtcataacccttggccgggattataaccaacgtgacttcatcaagagaggggtgccatgggcatgttaaacacagagt

SEQ ID NO: 78661 - DNA, 522 bp, Arabidopsis thaliana landsberg
aaattttatggggaataaatcagattgttaattttgacctaaatattgatgttcaaggattgtttgttttcctgaccctttgatgcaacagctctcgtgtctgcaagaaagctattctgagaagaatgagtacgaatcctgcaattgaaccaaaagttcgcaaataggaatctgttgaaggagatgatattgggtcaagaaataaagccgacggtttctttgctattcctctctacttatcaaagcttgtggctttatatacactggataagtttaagaagaattggtactagtaatgagaattgtgtgttcgcaggtatcacatgccgcattgtttcatataacatattagctcaggtaagaaataatcaagctttccaatctctcatatgctttgagatattttgtagcttaatatttggatgaattttgtagatgtaaacgatcttacgaatatctgagctagatttatagatacagacagtgcttttagctctttccttggtcagagctttttatcta

SEQ ID NO: 78662 - DNA, 259 bp, Arabidopsis thaliana landsberg
tggtgaatatggaaaaaaagtgtccaggtggaatatttggaaaaactgatattttacctgacaaggctatacgttgcatgttcgagtcacagattactctggaccagtgctaggcttgatctatgatacagatgagactaacaattatttgctggatcaacagactagaactacctcaaaatgtgagcttcataccatctacgagagctgacacacactacctatgatgggtggtcggcatactctgtgacgagctata

SEQ ID NO: 78663 - DNA, 597 bp, Arabidopsis thaliana landsberg
  unsure (1)..(597): unsure at all n locations
gaccctcaacttttgatacctcaaacttctgctttgtgtgagtttgaccttagcaacattcacccaagattctttaacgacttgctcaaaatccatcttttcagtattaaaattggaacgatacataaaaaaatcttataaaacgagactaaaaagtattatcatagtcattcattaattaaattaaaatcaattgaatctatttttacaaatttcaagtaaattttaaacataaaaaaaaatcatgtaatgaggcgaatatacttttttaaacatcaatttattggattataaattatttacgtagttattaaataaaacagtccttaaaaaaatgaaaggataatagtaagcaaatgtgactgtgtgggcaagtactttacatatatgtattttgcaatgcatgtgacgatagtatgatattttagggccaactagttagacattttagactttttgggtcaacaaggtacatcgngatgtgactttgtattgagaattggtatcccttagatacatttttagatatgagagctggatctgagattgggggtagagacatgggcagacacaagtagtaaggaggaaatactactc

SEQ ID NO: 78664 - DNA, 500 bp, Arabidopsis thaliana landsberg
taccttactttatataaataattacgttaattcattttaaaaatatataagaaagaatagttaatttaggttagaagaagattattaagaagcacacgttccaaacacaaagaagaacagaccaaaaagaagaaaacaaaagtggaaacagtgttgaaagagttcactcttgttcttttggtttctttctctttaagccgaatcttgtgtttttctttttcagcggaatttacataagaggacattgctatcccaagttgagaagtagcaactgtcaaccctacggactaaatatttgtgcatacatatacgatgggtagtttcttggactagctagaattaatatgtgattataatgtttctcaaatatatatgaaatcatcgatggatatgaacataaatattctggtgaggacaggtgcacatgattctatatgctgacgggtatcaaactcgatcatgaatcagttttatttgtatgaaaaacaaaaagtatctgg

SEQ ID NO: 78665 - DNA, 454 bp, Arabidopsis thaliana landsberg
atacctgtccagtcgtcgaaggtggttatttcaacggcgtgcgtgcaaataccaggttggtgacttgagaggctttgcatcgcttcagcgtggcggcgacttcgttgagcgtttctccggtggtcatcacatcatcgacaacagctacgtgccggccttgaacctgtcttgccgcttgtggtttcggggcaaaggcctgacgaatattgccatgccgttcgtcgggatgcagccgtgattgcattaatgtttcgcgtgtgcgcactatcaaattctggtgccagtgggaatgcaagcaggcgagacagcggcctggcgatttccagagcctgattgaagccgcgttccgtcaggcgtttgtctgccactggaacggccgacagaagatcgggcatcggtatgtccgcttgccgtatcgcctgatgcagcagacaggcgaatagcggtgcgaggg

SEQ ID NO: 78666 - DNA, 483 bp, Arabidopsis thaliana landsberg
aagaaaagagcatactatagttacagatgatctttggttataaaagtcgttctacttaggagatggcttggttaattaggaaacaccaaacctactttatcatgaaagtgatatataacgtcagtttttgcttggaacatgctagaatttaatcaacctcgcaaacataacgatgttcgcgtttgattcaggtggtgcgacctgcttttggtagttttattgagactcaagcaatgacattttcttattgcggtatatcgccctcttagcttttcggatatggcggtaaagggtgatttagaggggttctttgctagtcacggggaaggttgttccttgtcaccatacttatttgttctggaccaaaacgttttgtctcatttcttgaatcgcgtagcacagaacggaaggattggtatacatcttcttatttacacttaagctttgtcgaagacatattagttttcattgattgctccctgc

SEQ ID NO: 78667 - DNA, 613 bp, Arabidopsis thaliana landsberg
acctgcataatcaaaagaatattccatgtcaatatatattaaaaattcacgattttttcggaaaatatttgttgtgagatgtaaaaattttacacaaataacgtgggttttttatttctttggaatatatggaagtttaagttcgaaggctctatatgttccagaagcaggatatacaacaaattaaattcatttcttttaaagaaaacatatctctaaaaatgtcgaatccaacatctctacctagaaaatataccattggacaacaccaagtcggtaacgtagttcctttcataattacaaatattgtataactctttaataaaaaatcactttctccatacttaagtttaaaacgactctaaagtgacaatttacaactcgatcgagaggttaactcaattctttgactattaactccatacttgggatatatttggttttgtagactaattaagtaagtttcaacaaaaactaaagaatagtgatcatgatgaaattatgaatactccaataaaaaaaataaaaaaaaagttgagacctaaggacaatataactcacaagtcacaccatagcagagggagaaagccttatttaccaaaaagcaaaaacc

SEQ ID NO: 78668 - DNA, 618 bp, Arabidopsis thaliana landsberg
  unsure (1)..(618): unsure at all n locations
gcatatcatgtactaggattttcacaccttgagattacctagaatgaaactaagattcttttcaagattgatacatcgaggaacaaaaatcgaaacatagaggctacaatattatatcataacgtatatattatgatttatgactaaaaaagaagaatagagaaccccagatctaacgtttaattaaaagcatagtccattttgacaaatacacgccaccatcaaacgcggtgaccccatatgcatacacacatcatagtaacaatactctataaattttggttgattttaaagtaatactacaatactttagaaaagttaaatgaaggaatttagaaatgaaaaaaaaaaaaaaaagtcacaaaaagagaaagttatggaaagataccaaagcaacatcgtagttaggcagcaccttgatttcagctttgactcaccgacgttttgcgccaatagatttttcttcttacattcttcttcttaagcagtacgtatatcgtanattcgtaatcatcacgtcatttataaaatgatagctaacgtaacatagtcaaacatgctttcaatatatagcgacgtgaaaatcatattgtgggatttaatgagaaaattgacatc

SEQ ID NO: 78669 - DNA, 1698 bp, Arabidopsis thaliana landsberg
aggatctcttgttgacaagtgtggttcatcgtgagttgcttcatacatcggatcgtaaagataagaaaagtaattgagctagacagtattctaaactttttacgagattttagagagaaaaaatgtggataggtttgatgatgattcttcgttgaggagtggtacgttttttttacctctcctaatagtttttaagaaaactctatgatcatgtttaattttcatatatgatgattctatagtgttgttttgctaatgatggagtgattaatagtaagactgcatgtgtgttttgcttcaatgttatatgtcaccatggatatggcctgctttcttttttctttgtttgacttcattgttatagctgttgctcgtgggtttctcatgtatttctctattttaattttgtttcaaagatacgttaaacaaaaaaatagaaagaagtaataaatatttgtacaatagaactcctaaaattttaaatgggtcgtagattttttttttttttctctatatctagctattataacattagataagctaattgtgtggtgaccaattatataatgtgagaataaatataaactagtgggttctttgagtagaaagtatagagaatattccaacttttggaggttgtctttgtctcttagtacttagatattatattaaatgcaacgaaaaggaaaatgtatattgaaagcactcaagcatattgttcatcgatctctcgacgtgtagctttcatagtcaagaatatatatgtatccagttaatcatttgtcaaatcatcgtaataaaagactaacaggtatagtagtttggaaaatcaaatctttttactttagtagttttttccccaacagaaaatttagtagtgttcaattcggtcggttattattattgaaagctataaaaataattctttatataagacttttgtaaatagtaaacacacattctttaagtgggaaatttgatagggcacacaggcatacaattagctacttgcacaaaaatgttaccgtttaaccttaatgtgcaaattatcgttgttaatgttttgcacgtaaagatgattgagttgctatcgtagtttaaccctaatgtgcaaactataaatcaaaacctatttaattttcataaaaaaaaaaaaagctcttaatttattatagtaattaaaatccatgaaacaaataaacgtttcaaaattacaagatggaccaaatagaacgaattaacaacaatttccccttttgaccagacaatttccttttgaaaccaaaattgtatttatcttttccaacgaattttcctttgaagattaattatttagtgtcgagttccttttttttttacttttggacttctaaagttgatatcttatgatcaacttgtttaaagctaacctggtttacctctgcacgcgcagccactaaagcacacatatcttcagttacacataaatataaatgtatgcatgcatatatagaatccattgattgtgaaagctgctgatcttcatgaaacaaacttcaatttttataggatcgtaattgtaatatgaataaacacatatactaggacattaaggatttcattagtaagaaacctaatgtaatactagtattttatgtgtttgacaaaaaaaaagtattatgtgtttgtgatcatttcaacaaactattgtttttttta

SEQ ID NO: 78670 - DNA, 401 bp, Arabidopsis thaliana landsberg
tcataacttaggttaaatctgagagtgagttaataaacaaaattcccaaatcttaaacttagactagagttctaaccaaacaaatcttgtaacaaactatttaatcttagatttgggatagtagtgttcgaaggtgcgagggaatctagaaagtattacgagtggtccgtgttgtgaactttgcatgagaacacgcaaaaggacacgttaagacaattcattagcttatgtttataataatcatcacataaactattagtagttaactttatttgtttatttaatcaaatgaaattaaccaaaaccagttatactaagcataaagtactcatcacttttttatatgttttaagtacagcacatttatcgctggaagtgttttcactctagaaccacaatct

SEQ ID NO: 78671 - DNA, 411 bp, Arabidopsis thaliana landsberg
ttgctgcagccggcctgcaggctggcacccagcagcgcggcgaccacgcccagggcggcatacaccagggccatgctagacatacaccccggcaatatccagccggccgggcactggcgccattgcccagaccagcccgggaggatcggcagcatcggcagcgagcagggggtaaaagccagcaacaggcccaggccgagaacgccagcaggctccaggccaggtgccccttttgcagaccgctggccagggcctggtcactggcttgttcggccgccggcggcacactgccgcccaggtcgatcagcgtggtttgcggcgggtagcacaggccggcgtcggcacagccctgccagcccaggcgcagctggccctgggcatcggccgggagtagcagttcgagttggtcgc

SEQ ID NO: 78672 - DNA, 358 bp, Arabidopsis thaliana landsberg
tttatagtgtctttaacttgtatctgggcctaaaattatacttcaaatttgcctattttggtttttaatacaaagtgaggatgacgaccaaaaaaaaataaaaaaaattcaggctttgcacaaaaaaaaaatcaattaaattcaggcttagtgagaggcgaataaatcggttcatctcttagaattaaagatgaccttgggaggttgacttcaaaattttaagaattgattgggttataattgtttgaataagacggttcatctctaaagttgaagattgtgctagatagggtcattgatacttgtggcatactgattatgagaaagttattaatagacacaaataatttggctttag

SEQ ID NO: 78673 - DNA, 473 bp, Arabidopsis thaliana landsberg
atactcgacacgtgcagccttgcttccctcaagggacatcatgggctcttcacagaccgctccacgcatcacagggaaacatgtgccgagcgctgtgtattgtgtaagctatgcccacctctttttcgacctgtctctccttctctttgcgcttcttttttcgccattaaatcctccgccgtaaccaattgccgctatcattgctgtcccatcgagatggctgtgggtgcaactaccagcccagcaactccttctcgatcttggccacgtcctcgtctgtgagctcctgggcagcctgggcttcggccttggtcttgtcgaatcgccagaggccgccagtcttgtcggcgtctccgtcgactggcacgctgacgaccttgccgagctgctggaggacgtcatccttgccctcgacggcagtgaagtattggcgctcccaggtacggtcctctgagcgctccttggcgcgcatg

SEQ ID NO: 78674 - DNA, 504 bp, Arabidopsis thaliana landsberg
  unsure (1)..(504): unsure at all n locations
ttcgcgcctgcttctcgacgcctcttcgccccagcctgcgtctggcatggcaaggcgtcacgcatccgcggtggacgatcggcacgttcctgcggacgctggcgctgcagggcgttccgcatttcgagaattcctatgccacgcgcggcgcgccgatcatctcgtcgaacgtgatgcgtgatttcgggcggagggaccacctgaactggacccatctcgagcgcattcgcgcgtgctggnnnnnnnnnnnnnnnnnnnnnnnnnnnnnnnnnnncgatgatgcctgccgtgttcatgatcttggcgccgatggcttgatcgtgtcgaaccacggcggacgccagctggacgggacgatgtcgcccctcaatgctcttcccgagatcgtggcgcgtgtcggcgacaggacggtcgtaatgatcgacggnggttttcggcgcggcaccgacgtgatcaaggcgctggcgctcggcgcgcgcttcgtttttgtcgggcgcccgttcc

SEQ ID NO: 78675 - DNA, 555 bp, Arabidopsis thaliana landsberg
  unsure (1)..(555): unsure at all n locations
gccaagtagtctgtaagagtcgactgtgctttgttacttccatacccgttagttaacgaacctgtactgtggttatagtacaggaatgcgtcagttggaaaccccttggccgcagcgcttaatgactgacttacatccttctgatttgatgtgcccgccagcatggtaaagtcgtgtcttttattgatgttaaatttgtaagtaaaatagttttcaaccaaccacctgaatgaagtgtatgattgttcagcagccaacccgttgtttgcagcacccgcaacgagggaacgcggagtatattgccccaaagttgtctggctgaattcgctgcctgcattcaaatggtatgtcaggtttttcaacnnnnnnnnnnnnnnnnnnnnnnnnnnnnnnnnnnntttgttgtctgaattgttagttggctcaataaggttagcaagtgcattgttcttaccgctatacctgtagtaagtaccatcggggttatataccgggatatttggctgcgccgtgagaatactatataaaggagcggttatatcgcccgtatacgat

SEQ ID NO: 78676 - DNA, 428 bp, Arabidopsis thaliana landsberg
acgacatcatatattcaactaacgagacaactaaacaaaccaagtttcgaaaatgtgttgaactaattaatctaaaacataaacactacaaactagtaagtataaacaattttcatattacatatcacagaacaatataaagaaaataaataagcactaaaccaaactaaaatcgaaccgtaataaacccaatccatacataacaaactctcaatttcagtttgattaatatttttcttaaactcaagaaaaaactgaatcaaacccaaattgaaaccccagctttaaaacactcctaaaataacctataaacaagaattaccaaaattaaaacatctagaagaaaaattatcagttttgtctcgttttttattcacagaaaggaatctaaagcacaaactctaattcttaatcctcctttttttgga

SEQ ID NO: 78677 - DNA, 576 bp, Arabidopsis thaliana landsberg
  unsure (1)..(576): unsure at all n locations
attattccattattgtgacttaccatagctctcgtannnnnnnnnnnnnnnnnnctcggtctagtttataagaattaaagcctttgatctttttgtactctttccaccacttcatgaaactgctttcctctaagaatatctccggcgaaacctcacgttttgtgattatctcccacacgtatccctcaaactccacgagttttctagtcaatacctctctcacatcgtctctcatccccacagttgtattcaactgattaattacaatcaacgaatcctcaacttcagcccaaaaacaagaatcaaacgtcaaaagatcactcaaatctctctttttgcatctttccttttctattaatatcgattccattccaaaccatttctcaagcataacatagtggtgagaccttcccgtagttcgatactctttccgaccctcgaggtaatattcagcaatatcgagtggttcgatcatccgtctgtaattgttccccgagaatagaaaccgtctcttgagaatcgatgcatcgctctgcggcctcctctctacttcttcaactactgatttccaaaaac

SEQ ID NO: 78678 - DNA, 542 bp, Arabidopsis thaliana landsberg
  unsure (1)..(542): unsure at all n locations
tctcggtaaaatccggcacattatccgcgcgtattgctggtgggtatattgatggccattttnnnnnnnnnnnnnnnnnnnnnnnnnnnnnnnnnnnnnnnnnnnnnnnnnnnnnnngtgctgtacatctttggtgtattcctgttatataccggttacaaaatgtttgttagcaacgatgaagaacagttcgatccgcatgaaaccaaagtataccggtggatgcagaaattcattccgctgatcaacagtgatgtggatggcaaatactggttaaagcaaaatggcaaaagagtgtttaccccgcttttcgtggtagtggtattactggcggcgatagacctggtatttgcgctggattccatccctgcggtgatgggtatttcaaaagatgcgctggtgatctatacttccaacatatttgcggtgctgggtcttcgcagccttttcttcctgttgcgcggcgccgtatccaaattcgattacctgcagcagggtattgcgatcgtgcttgtgtttatcggngcataaatgctgggaga

SEQ ID NO: 78679 - DNA, 609 bp, Arabidopsis thaliana landsberg
agcatcttccttattgtttgcttcatatctgtatcacccattactgctttcccttctaacattcttttttataaaaattgaatatgattatttaactctaaagaaatatctaagagaaccaagttagtttatgcaagtatatattgtatgttaatatttctatatatactgaaaaatgatgggatgatgtgtgtgtgagagtgaagctccaagatagtggtggagattatgttggaacttacatgaagcgtctttttttttacttgtcgtagttttatcagtcacatggatttgcatggaccgttccatatgtggtcaaaaccaaatcattcaatcgatttcaaatatgaagtacatatacacatctatattcatttatatgatcataaagtggttgtttgccatcattttaagaaaattaccgtaagcttgggctgttgtgcggcatgttgtaaaaggaaaacacaatgtgagtggatacgattgaacaagccatataaaaagtgcaagcaagattacaagaagcaaaacgagtgaagggaagaagacaggacacaaacatatgtggttcttctttatttcgaaatgaatttcagcaatgaaaagaaa

SEQ ID NO: 78680 - DNA, 577 bp, Arabidopsis thaliana landsberg
aaagaaaaacactttccttttcttctggaagttttacattttctttcgcctctgtaaaatgatatatttgtaaaaagatactgaaaaaataagtaaaataacttgaggagatagtgacattctttattagaaaagaaagaagacttattgaacatagaacgcaaatcaaaatttacataaaccaatatatgaaattaaaattgtcttcttcgttttgcactttggagcgtttaacagttgtagaatccattagtctcccataattaatatgtttaaggataaatggttaggcaatttcgggagtttcccaaaggtttttctccgatatgactacatcgatgcaaaatccgaaatgcttcctctaaatacttgaaacttggttcgatccttaaaccctgcaaatctttgtttaaccgtctgagtccctgtcaaggaacggtaacggtacggtcttcactgccctaaattggccgacattgtttaagtgctcattctccactctgtaaataccgaaagaaagattcatgttcaataacatccaaaatcaagttttaataacctaggtgaagttttttta

SEQ ID NO: 78681 - DNA, 236 bp, Arabidopsis thaliana landsberg
acagagagaaaggagggacgccggcgaaagagaggacagggaaggggaataggaacccaagaaagaacaggggagcagggggggacacaaagaggcaaagggaccaaaagagaggacggagggcaaacaaggacaaagaaagggggaagataacccccgacacgacgacgaaaggaagggagaagaacagggggagaaagcaaacaagaaccaaggcagccgaagacagaaaaaaa

SEQ ID NO: 78682 - DNA, 400 bp, Arabidopsis thaliana landsberg
acccatatggatggaccccccccatcctatttatgacgtttaacagctacatgataattggggaggaacctggaatgatttctgcgtattcgccaatcgtgcattcttttgacgcaggaaaaatcaaataacttgcattgagcgaaggaatccaccaatattacatttacggttctgctcttggcaaccatatgtatattaaaagaaacaaacacctacctcatgctggagaaacactcaatcttttaccaaccagatccagcttaactacaacttgaaaacgctcttatctagtattcaatccatagatagatacatactcatcctaaacttctttcgacagagcttaaaaaatgatcagcttgaactcctgattcaccattcggactgtgttacttga

SEQ ID NO: 78683 - DNA, 113 bp, Arabidopsis thaliana landsberg
caaaagcccaaaccgaaagaaacaccagcctaccccacccaccaatctaggttatgacccccaaaaagcgaccccggagcacgggaagaagaagggggaaccccccacaagga

SEQ ID NO: 78684 - DNA, 359 bp, Arabidopsis thaliana landsberg
ctttggtaaatgatgaccaggacctcgcaggccttatacctccactcggcattgatccggcatttttacatccatagcgcaaaattacccactggtggctaccgtgtgagtgtgggccgtgtctaattcccagtgtgggtggacatactcttccaccagctgctggtcattgtcttggtaagctatcgccttaccaactcgctaatcaggcgcgggcccatgccaaacggattatctacttttggtactcaatctacggagtattaaccgccgattacagatggtgttccccttccaagggcatgttcttacacgtatcctacccggccgtctctggaaacatccattactgtacgact

SEQ ID NO: 78685 - DNA, 547 bp, Arabidopsis thaliana landsberg
  unsure (1)..(547): unsure at all n locations
aagttaagactttacacagcaggagctggagttattgcacacgttgcagatagtataaaacattaagagtcttccacgtttattacggccaggtgtataaatcgtgagcatttcgagtgtttgacccgttaatgctgagtgtgctacgacatttgaaccattcctgtgttttgcttttaccatacagtttgggagatcggtgcagatcaagaatgttcgcatctttgcttcttctattttttttcttggcgaaatcagaagaagtacaatccaattcatctgtacatgattttcttgtattagcttgttgatgatacaacacttgaaagatgttattatagattaaggtttcttaaagagaaaagttatatatgttcaacctctactcttcaaaataacagattcagctgaagacatttgtttctagtcaatttggttttggaatntttcttaattcaaagacaattgtgcaaaagctttcatgtgcggcttagaattaatagtcatttactactaataaaactttcattttgggtctagtagataa

SEQ ID NO: 78686 - DNA, 599 bp, Arabidopsis thaliana landsberg
  unsure (1)..(599): unsure at all n locations
agggctgctctatggaacgcatgatcatctgttcccacttataataacttctcaacagcagccggccttcttcatctgtgccgagttctttgggaggtggcagcacacgcaacgcgtctatcctgccataggcataaaagaaattatataccagtaaatggtcgccgtcttccacgatccgcgccgcatagtttccctgcggcaggatgatatcgttgtgaaaagaatgatactctcccataaaatcatccgcaaaccagtaacgtaccttgatatcttcacggatggatcccagcagatnnnnnnnnnnnnnnnnnnnnnatacacagggacattccacatcatcatataccctggggttgagcagcggcggcatcagttccgcaatatcatgcgtgatctttaccagtcccacgcatccgcgccgcgataccggcccgcccagtgtacgtgtgtctaccagcaggtacacttcccctatatgcgtaaagcggaagggatcgcggaagctcagccatttcctcgggttgtcttccagcgtttcataataaatgcctttaggccctatcgggtacatgcccttgctcttcttctcccaa

SEQ ID NO: 78687 - DNA, 566 bp, Arabidopsis thaliana landsberg
aagactcataaaagttgtatttggtatattaagaaaaagagtaaaaaatccatataaaggagattaaatctaatcgttatgttaacaaaaagattatgtttaacgtacgtgatattaagtatctttatatgactcatgtagttatttataaacctaaaaccttacgactttctttgtgtcaattgtcaagtcttttgtatcttcctgtaagcctgttacgtgtgaggtaacgtgtccatcaatacttgtgtcctagcgaactttgatcgatcctcttcactttgatcctatcttgtttctatactgaaattcttagatcaaaatatagtgtgacataatctgaggagtaagttagattcaaatcttctggtcgatagctgtaaattcccttgcaatgttttctatgactctaattgctagatctgcgctggttgtatgaatttttgggataatttcgattatttttctttgaacttatatatcttgaattcgtttattgagatttaagacttgtattgattttcaaagttgtttatattgggagtcgaacattaatctattttctc

SEQ ID NO: 78688 - DNA, 339 bp, Arabidopsis thaliana landsberg
ccggagcgtcggcgcgccgaagatcgccgaccgctcgccaacgaagcccgcctgcaccgaaacctggccattgtgcgccgtggtcagcttgggcgcgacacccgagccggccaggtccttgaccgcgccgtcgacggcgatctctcacatggagccggaggcccaatgcgcgccgtacgcccttgcgaacgcctgtagccgcaagccgttgggcgaccagactaggctggtgggcaggaggtcgggacgggcgaaggggtcgcggacctcggcgctggccaaatcaaccaatctctgtctactgcggctccaggaggtggaaggcgtgacagtgtcggt

SEQ ID NO: 78689 - DNA, 194 bp, Arabidopsis thaliana landsberg
taggacgactgtcgcatcgaccgcaggacctattatttcataggccgcggcgactgcagataaatctttatgagggccaccgaacggactgaaacacttaatgggcgtacccctaaggctcaagattgcactacccctttacctactcatgctggatgaactgcgtttcccacagtttctgagctaatcgccaa

SEQ ID NO: 78690 - DNA, 140 bp, Arabidopsis thaliana landsberg
  unsure (1)..(140): unsure at all n locations
gancaaaaaaagcacgttacctcggagcaagaaaacagaagaaaccgaancncggaaaacgacaaagcacacagcngaacaaggggggagcagcncgcgggaaccagncgaagggccacaggaaacgganaaggagaggg

SEQ ID NO: 78691 - DNA, 496 bp, Arabidopsis thaliana landsberg
  unsure (1)..(496): unsure at all n locations
agtttggtggagttgagtaggaccccgggatcttgctgccgctcacggtcatgtggcacgcgaacgtacccactccggtaacggcggcgctgatgtcgccagcggcaccgcccaggtaacccttggtcacgcccgccgtggtggtcgcctggctggcgacgaggtggacgggcttgttcagcgtcgccgtcacatcgaatccgaggaagctgcaggggttcgacgtggctccgaacgtggcactcgtgacattggcgagcgaagccgggacgccggacttcccgtttccggagaccgttcccgacgcgagcgccgtcccgggcttgcaggcgaggttgatgccgcccgcgtccagggtcgccgacgtcttgttgctgccggcgaacgccgtgccgttgggctcgttgatggtccaggtcncgccggcggcgagggccgggccggcgccgaggccgaccgcgcccatcgcggcgactccggtaaaggccatagaggc

SEQ ID NO: 78692 - DNA, 549 bp, Arabidopsis thaliana landsberg
  unsure (1)..(549): unsure at all n locations
cgttgttagcataaaagaatattctgttgctgctttacgcgctttagtggatatttatcagcttgaaattgactgggaaaaagccattcnnnnnnnnnnnnnnnnnnnnngtgctacaaaaaaaagcatgcatcccaccattgcacattactattgtgaattagcagaagttgcgcgtgcgaaaggccagatggagcaagcggaccaatttgtaaagcttgcattannnnnnnnnnnnnnnnnnnnnnnnnnnnnnnnnnnnnnngctgatttagaaattaaaaaaaatgaattcaaatccgctttacgcagcttgaagcgcatcaaaagtcaaaatcccgattatctttcggaagcaatagatactttagcttcttgttatgaaaaactaaatcaggaaaaaaaattagtcgcttatttaatggaagttttaaatgaatatccgaaaattcctgtggttttaattttatcggaacgcatacgccaatggaaaggcgacaaagtggccgcgaattttgtcgcggatatataagacgttatccttcgctc

SEQ ID NO: 78693 - DNA, 366 bp, Arabidopsis thaliana landsberg
  unsure (1)..(366): unsure at all n locations
cttcatatgctgccgaccggcctgagcagaccaattccaaaagcatttatctaggatttgtccagtcnttaccgagccggccatacaagccataaggccgggcccaaagattgcttcgtctaataagaacacgtacgggtaaagacacacctttgaagaccggactaagacaccgaaaccagctccgttgcaccagaccagaccagtcctcatgaagtctaatcgaaactgtccgaatccaacagacctgtcccaactccttcacaagggactagttcagcccgagaaaaaaaaagagaaggtattcctcatctgattagaacattgccaaactaccaactataagaagatctagctaggcctctt

SEQ ID NO: 78694 - DNA, 600 bp, Arabidopsis thaliana landsberg
atactacggccgtaaggtcctcgatcacgagaatgcccattacgacccgcgtaaatttctgggttttgaggcctcagttcatcgaatgcacggaaaatgatggtggtggaggaaatagcgataataccgccgagaaataggctgtcggttttgctccaaccgagcagctggccggtaatgaaacccgttacgagcatcatgaatacttcaaaaagtccggtgatagcagccgtgttgccgactttgaccaactttttgaaactaaactccagacccaggttgaagagtaggaagattaccccgatttcggcccagatttcaatcgttttaatgtcggtaatggtgggaaacaggtggaaattgggtccaacaagtaacccggccagaatgtagcccagcacgattggctgcttcaatttcttgaagattacggtaataataccggccatcgtaagaatgagcgacaggtctatgattagttgcggaacgtgagtcatgaagggtggatcgttgatggaaaattttactttagatcaataaatacaaaaagccttcgacgaatcaaaggcttctgtgttaatcttatggagatttaacctc

SEQ ID NO: 78695 - DNA, 122 bp, Arabidopsis thaliana landsberg
  unsure (1)..(122): unsure at all n locations
ggacaacccaaccacagacattgacccgaacgttgagcatgatgtttctgttttttgacaaagacactttcagaggnnnnnnnnnnnnnnnnnnnngtctgtcaccgacacgtgggaaggga

SEQ ID NO: 78696 - DNA, 488 bp, Arabidopsis thaliana landsberg
  unsure (1)..(488): unsure at all n locations
tctgctgggttgaggnnnnnnnnnnnnnnnnnnnatattcatggctacacgaacaaatattttctttttttggatttagttgttaatagttcgttggctcatatgtttatgagaaatgggaaatcgcaagatggcaaaatcgatataagaccaacgccggattgcaatttggccgcatggaatacactcatgatggggaacgcgcaaaacttgttgtccctgatacctcgctttatttgtataagatgannnnnnnnnnnnnnnnnnnnnnnnnnnnnnnnnnnnnnnnnnnnnnnnnnnnnnnnnnnnnnnnctgacttaccgattannnnnnnnnnnnnnnnnnnnnnnnnnnnnnnnnnnnnnnnnnnnnnnnnnnnnnnnnnnnnnnnnnnagttcattgatcagcatgtatttaaaatgtggtcgtctcggagatgcagcttaagctttctcggaacgtgaagatgaagatgaagtgactgtg

SEQ ID NO: 78697 - DNA, 313 bp, Arabidopsis thaliana landsberg
  unsure (1)..(313): unsure at all n locations
tttctttttgccttagtcttctttttgtcacgtttcagaaagtttctatanctcattttgttttccataaatagaaatttcctgccatttaaatcaaaataaactaacgttgaaaaaggtttagatcttgaaacttctgttcgtcttcggtttaatgttttgcaccatcaacaaatagtccggtctgaaaagtttatggatgtaatctctataattcactagacaaaaataaaaataattaaaaaggaaacaaagtatcattttaatattacaaattttggcaacggtctgactcttatcataagggattatt

SEQ ID NO: 78698 - DNA, 501 bp, Arabidopsis thaliana landsberg
  unsure (1)..(501): unsure at all n locations
cgagcagggtcctgccatcttgagccgacctgcgcgcgtggatgccacaggatgcgcaggctggctatacacgggctgtccgcaagcgcaggcaagttcttagttagcgcacgcgatggtgagctcgaacagcgacactgcaaacaagcatcnnnnnnnnnnnnnnnnnnnnnnnnnnnnnnnnnnnnnnnnnnnnnnnnnnnnnnnnnnnnnnnnnnnnnnnnnnnnnnnnnnnnnnnnnnnnnnnnnnnnnnnnnnnnnnnnnnnnnnnnnnnnnnnnnnnnnnnnnnnnnnnnnnnnnnnnnnnnnnnnnnnnnnnnnnnnnnnnnnnnnnnnnnnnnnnnnnnnnnnnnnnnnnnnnnnnnnnnnnnnnnnnnnnnnnnnnnnnnnnnnnnnnnnnnnnnnnnnnnnnnnnnnnnnnnnnnnnnnnnnnnnnnnnnnnnnnnnnnnnnnnnnnnnnnnnnnnnnnnnnnnnnnnnnnnnnnnnnnnnnnnnnnnnnn

SEQ ID NO: 78699 - DNA, 467 bp, Arabidopsis thaliana landsberg
cctgtttttttatataacaaaattgtaaaaaaaaatatcacatattgtattgtcctcgaattctatgttataaaggtgttagtaatatatgatccatttttgtgtatttcagacttgacttgttcatgttttcaatccttttatgtaacggaaagagggcatttcaaactgttaacagaactgattcaacctcacttgtgatttcacagtaaaaagtattctcaaacatgtacaatcaaattgtacacagtgataatgtttctatttcaattgaaatgatttatatctggaacatatgaccaaaacagtatggcaaaagccaataagctctgtttgctggttgctctaaaactttttgtaaagccaaaacaaataaaactaactttattaagaagatgaaaaaagcaagacaaacacatcagtggtaagggacatgcttttatgatgattgttcattttgccatatt

SEQ ID NO: 78700 - DNA, 663 bp, Arabidopsis thaliana landsberg
  unsure (1)..(663): unsure at all n locations
aaactcgtgagaacacacgtgatgcatataagaaatgccatacatcgccccaacacaataaaaatctgataatcaattgtaatatcctatccaaaaataattctgtaccatgccacatgtgatgcacataagtgacacgagggtttattaggaatagactaactcacctggtttaccatttttggagctctcccataaacttcaaagacaagtcgaaggagactaggtttctgaaaaaagagattcatcagatctaggggaatctttaaatagaaaataactttgagcataaggagcatctccaaagactacgcagacctttttacacaaagcaaagaacagagaaatcagtctctgagcttcagaaattgatataactgaaacttcacgagaagtttgtagatcctgctgagagggaatgtcggagtttccagaccctagagactcagttgtcaaagttatctggctttttgcctgaaaataattgtcagataatcaacccacanaaattcgaggttacaaactgaagtgcgttcattgcaaaactaggtaaccctcacaagcgaaaatttagagtcttacgagaacaggncgcaaaagtactgacatcaataagttctatagactaatgagccttatacatacatttaaagagaactagct

SEQ ID NO: 78701 - DNA, 590 bp, Arabidopsis thaliana landsberg
atctggaattttattgattcattattgattttattctacgaatgtgaagtacccagcgatatattttttattattgaccttgttagctagtgaatcaataggtttcatcaaagttatagtgaatattgactaaatctgatcaaattggaatctatagtgattttttttttaaaaacaaaattgattgtcaatagatataagaagtaggttttatgtgtgtttaattatagttttttcgagaatgatctaaagtattgatcgctgatgttgccaacaaaagatgattccgtataagataagtgtattaagtcaatttaaatatgtgatcttgatcagtgcaagtttgatggtcttgaccattccaagtgtttttaatgttgcagctaaagtgtcaaagtttaattcttttcgagctgaaacatatagtttcaatgtcatctattgagctattcaaaaccatgaagcaaagttcaaggtttttgaaattatactcttaaaatttttgatttggtgataagaaccgcttatatcctgtaatagtattttaactttgtaccaactttggcaatatactattcttgagtgtgata

SEQ ID NO: 78702 - DNA, 352 bp, Arabidopsis thaliana landsberg
agctgcttttcttaggtactgccggtcctagtaacaaccgtcgtctccgttacggccttttaaaggcggtggttgcacacaataatgggcttgagctcacgaatcaccaggtctctctctctctctcttcctagagattggattttgctcttttctggaagatcggtgattaaatggcgacttatcctttattagcttggtgcttttagttgattatccctcgaagccggttggctttaggattgggcattgctcaagttttgacttttttgcgtaacaatgtatcgttttgcccttcacagtttgaattttgcgacacgggttgtgatgaactggtgaacttgacagccct

SEQ ID NO: 78703 - DNA, 459 bp, Arabidopsis thaliana landsberg
taattgcttctggtacctccttgcatcagccttatgtacaaactccagatattggtatgcctggctttggtggccctagggcactcttttcttatccggtaaggaaggaagatagttttatatttatatttacagaaactagacttctagttcctaactctgtgaaaaaacagagtgccacatcttacgaaggttcgagggtgccacctcaagtcactggaccaagcattcatagtcaggcacaacagagagcatctatcattcatacttctgcagaatcttctatcatgaatccgacatttgaacaaccaaaggttgttaccatgtcttttattctaactaccttctatactctttttttggttgaatactaatttatatttacttttgcgacttgaaggcagcttttttaaaacctttaccttttcaagaggctctaacagattgggtctgtgcata

SEQ ID NO: 78704 - DNA, 482 bp, Arabidopsis thaliana landsberg
gacacgctgtatcgcactgtcgaattgccattcacgcaagtgttgtttgaagtggaacgcatcggcgtgctgatcaacgctgacatgctggcgcggcaaagcgatgaaatcgctgaaaagctgcgcgacatcgaagcacaggcgttcgagttggcgggcggctcgttcaacttgaattcacccaagcagatcggcgaattgctgtttggcaaactgcaactgcctgtggtcaagaaaaccgccagtggcgcaccttcaaccgatgaagaggtgttgtccaaactggccgaagattaccccctgcctgccaagctgctggaacaccgcagccttgccaagttaaaaagcacttacaccgacaagttgcccaaaatggtgaacgccagaactgggcgagttcacaccaactacgcgcaggccgtggctgtcacgggtcgtctggccagcaacgacccccatttggcaaatatttcagtgcgcac

SEQ ID NO: 78705 - DNA, 416 bp, Arabidopsis thaliana landsberg
  unsure (1)..(416): unsure at all n locations
acnnnnnnnnnnnnnnnnnnnnnnnnnnnnnnnnnnnnnnnnnnnnnnnnnnnnnnnnnnnnnnnnnnnnnnnnnnnnnnnnnnnnnnnnnnnnnnnnnnnnnnnnnnnnnnnnnnnnnnnnnnnnnnnnnnnnnnnnnnnnnnnnnnnnnnnntgatcatatgaaagtacctttccctactacgatgtacttgtacggatccacctaagacgcttctcatttatagcctccttatatttacttccaaacttttgtgtcacaaagggcatctgttaaccataatctannnnnnnnnnnnnnnnnnnnnnnnnnnnnnnnnnnnnnnnnnnnnnnnnnnnnnnnnnnnnnnnnnnnnnnnnnnnnnnnnnnnnnnnnnnnnnnnnnnnnnnnnnnnnnnnnnnnnnnnnnnnnnnnn

SEQ ID NO: 78706 - DNA, 135 bp, Arabidopsis thaliana landsberg
  unsure (1)..(135): unsure at all n locations
actatggaggccgctatgacagtggtaggtgatgactggtggatacanctcctcctgtttcctgttccaccagacttcacacaccaccatcctacacttttcctgtgccaagtccctaacttctaccagttttca

SEQ ID NO: 78707 - DNA, 561 bp, Arabidopsis thaliana landsberg
  unsure (1)..(561): unsure at all n locations
gccttatgcatatcattttttacatgtttaaacaatttttgtattacatatagtatatatttgttttggggttttgcatttacactacccaaatgtcgttgtatcctgaaaatataattagtatattttttaaatacaaaaccatttcatcaaaattattaggacgagtagaggaagaaagaaaaattataatatacatatattacgtatatatatatgcagtaaagaacttataagaaactaaatgcagtggataaaatcgaattatccgtcgataaaaaaaactgtaatgagaaagtcatccagttatattattataacatgcaatcaattagccgatgccaacctcttaattctgtcgttttcaagttttataaaatcatctttgcgtagtcgaaagtggactaaaattggttgcaaaaactaaaaagtatatattggcataagttaaatgtgtttatgtgcataaaaaattatatagtcacggtgatgtttttgtataagttggaatgggagatacagaagaattcgccgnctttcaatgattgagcatctaaaatt

SEQ ID NO: 78708 - DNA, 364 bp, Arabidopsis thaliana landsberg
tattcacctggtgggcattgagaatatgataggcacggaaataaccgtttcttccattgaataaagatatacatgcactttaatatcgcatgacgtcacgggcgatataaactgtgcctcgccggcacaaccatgaatatttgataggcaaacagctacagagagcctgtgtccgcgatagaacgtgatccctattgggataaaccccatatcatatacgcaggaacacgctatgaggtttactactttacttggggcgaagaaagttgaaactgcatgaaccattgggagtggaccctgtaccagcaaccaatgagcaaacatatactgcgcgtggggcgataattccatattgctgcgaacc

SEQ ID NO: 78709 - DNA, 580 bp, Arabidopsis thaliana landsberg
  unsure (1)..(580): unsure at all n locations
aatagtaatacccangcatgaattagatattactaattaaactattaaagaactctacctacaaaactgtctatatatttccctctttcgaattacgtatctgtgtcaaagattgtcatcaccaatctacatatttttattcatcagtaccatacacgtatatataatatatctatttcaaatataaaaaaaactttggaaaaataaaaatggtgtttaaatcagaaaaaacaaaccgggaaatgaaatcaaaggagaagcaaaggaagggattatggtcaccagaggaagatgagaagcttaggagtcatgtcctcaaatatggccatggatgctggagtactattcctcttcaagctggtaattctaataatacatatcttgagattattttttaatttggtgtttgaagaaaacatgcaacattatcttttcattttatatttagtctgctatttaattagaaatatattttttcactttgttaaataaatatttaggctctttcgatatttgtcatcgggtttttatgtaaactaattggttttcacataatgtatacgatngcagaagaatggga

SEQ ID NO: 78710 - DNA, 448 bp, Arabidopsis thaliana landsberg
tgaacatgtaaatataccttataggctatggacttttgtgtatgtgggggaagactcaaactattcgtggaccttgtcttcaaatggctgcagtcatatatcattaatgacaactttatctaaccttaacatcaaatcgattgaaaacaactatatttatctacatacatgctcatatgactctataactgagaagttgagagctcccatagagaattactcacatcctattcggccttgacgaaaatggaaatgcaattcatcatggacctaatcaatgtcttctataatctatgtgaaaaccataactgttttgagtagtttagatcatatactatatgacactatactcagctataagcatcgcccgtatatgccaatcgcttagtatggaaaggtcttactgatacgctctaccatggaactgacatttcacctgaagtgacac

SEQ ID NO: 78711 - DNA, 376 bp, Arabidopsis thaliana landsberg
ggccatgcaagaagatgttgaggttggacccgatatttaccttttggtgcttatccaaataccaatgtggaggtgaataagacgtatacgcatatatatactacctctattaatcacactattttattatatggcacgattacaaaattaacattgcctgtctctatgtataagccgaactcacgactgagacggtgcatattcactctgactcgtagtgggtgtttgaattatgtatatgaagcactatgttagataggcgtggccatctagcctgctattatatgacgttggagatgacaatacagatcctgacgaaagggtaagtagactgagcgaattacgaaatttcttatataataattagaaagtacaa

SEQ ID NO: 78712 - DNA, 579 bp, Arabidopsis thaliana landsberg
atcatgaaaacatatgcttaattaagttttttgtattcatattctttatctggatcctattgagttgggatgtgtttttcatacttaagttattgtacatcaaatttgtgatttctatcaaacagaatgtcaaaaattgtctactcactatcactttatctattatgttccatataattttggtcttaagttgtaattataaatttaatccctctctttacagtttaatcgacctaatttacactgcccatgcatatgttaagtggaaattctgtatttacttattttgaccaacaaaattaatgatctaaagaaatagatggaatcatattttgttgaaagaaatagcttaatggagtgtataatagagtgatgacaaaataatttgatcaagacatatgaatagtacttgtttgtattattcttctctcaaaattaattttgatttgtttatgttagttgtagatgataaaaagaaaatatagttaaaacgaccggttagttaatataattttctttaataataataaagatcattggattttttgggtgatataatgacaaaaaaaaggatttttg

SEQ ID NO: 78713 - DNA, 539 bp, Arabidopsis thaliana landsberg
  unsure (1)..(539): unsure at all n locations
aaattttatagtggctatatttaagaaggaatgtgtaagactaattcttagaatatctatgaaatgaatctaatttgtcataaacttactggccggcctattgtaaaaaaaatcacaagtcttattcaccaaaagaaaacaattcaacgattactattttaatgcaaagcatataaagattctccagaagatgctctgtgtagacaaaagtcagagactttaaaagaggccagaaacatatcatctgcttcattctttttctgcaactagtttctcttctaagaatccaagtacaagacaaaagacaagagtccgaggagacatggagaatctggtgggacttcttagaatcagagtgaaaagagggattaatcttgttagtcgtgattctaataccagcgaccctttcgtcgtcgtaaccatgggttctcaggtatctctcttatgttctctgttctctgngttataaagatcgtgttttgatcatctgaggtaagatagattagcccattatactccgtagattctaattttgaaaa

SEQ ID NO: 78714 - DNA, 523 bp, Arabidopsis thaliana landsberg
  unsure (1)..(523): unsure at all n locations
acattcttcagtgttgtttcttctaaattttgttctactaattttcaatattgtctgtcttaggacttgttgcaggactcatacatttatcatattgatagtagcagaacaaatttgatcaaaggcactttctgaaattctgatttaatacaggattgccctctggtcttcgagcaactaaggtaattgtatgtgattgattatacacatcttttcttgaatgatgaaaatattatttctgatgcatttcttcatttgaaatttgcatcatagattatatattttacgatatggtagataccactgatgcatctaagttgattctatgtggagctctaattaagatagcaatgtcattgtctccctctcatctttcactgtcttgcagctgtaaattggtgtcatcaatgaacgaatttagccacctaaacttacatgtagtggttgatgcctaagaaaacaacaattaaggcccacacaatttngttcatataatactagagaatgactttactttattaaa

SEQ ID NO: 78715 - DNA, 382 bp, Arabidopsis thaliana landsberg
gaagccaaaacccaagagaaacagaagcaagcctgatgcttttcccatttgtttattctcaaatcaagctaaattacaaggcaaggaacttaatggtgattccactactgccttcaagctttagcagcataaatacatggcagtggatccttggagctcaaaaattcatacctggaaacaaaactgatgcaagttgacaaattgagaacacacccatcaaaacggactcgacttagtgagaattcaacgattaaaatcgggtgaagctccagatatgcataattgcgggcgcaatgaatagatcaattagagtgtggaattccagaaaagtactagatctgaacgaagaagcagccacgttcatatatcagaatcgaatctt

SEQ ID NO: 78716 - DNA, 351 bp, Arabidopsis thaliana landsberg
ttcgtcgaggtcggattcgccacaaagcccacttgttgcaagagggttgttcagtagtaatgttggtcatagctcagaggaagatgaggaggaggaggatgaagaggaggagaagtctgatggacgtagtagctgtagaaatgatgaaacaaagaagaagagacaagtgttggatcttgagctttgaaagtctgcatagtgaatgatataatctttaccaacttatgttatatatgctcaaaactttgagtttgttcgggagtttttgtagatgtaaacatgagagttgaaataaggaagaggattttgagcaaaaagtagggtttgtttttgcaagaggaaatagataga

SEQ ID NO: 78717 - DNA, 576 bp, Arabidopsis thaliana landsberg
cctgtatccagcatcaacgattcataaacataactcgaaaaccacttacttagatcgttctttctaggttttgtttgtgctgatttggaaacaaatttaatgattgatattcatccagctaaagtaaagagattctgttacaaaatacaaactatacttattttttaaaattatttatcaactacgattccaaataaaattcaagaatctgtaatttcaggtttgaaaataagccttgaggaatcgacattgtatatggctgggttaagagatatagacaaggaggaaattctacactcttttccttttgaatctgtttgtcttcccatccgttatcttagtttcccgctgctaactaggaaatgacgaggaatgactacactccacttctaaatacaaagaaggctaaggtcgcgtggagttgacgtttgtacaacaaaagctgaaggtggtctaggcttgcgatcattaaaggaagcgaaaataaggttagttatctaaaactgttcatttggagaatactgtcagccaattctctttggatacaatggttgcggctctatgtactacgaaagg

SEQ ID NO: 78718 - DNA, 591 bp, Arabidopsis thaliana landsberg
gatctgacgaacaaggcattggtttaggttccgggattttaatctctttctccctcagatccttggctctgtccgtaacttcacgaacaatgttcttctcttgtaactccagcttctcaagaaccttctcactctctttcacaacggattttatcgattccagctctgtgcttgctgctccttgtggtggtattgggaagaaaaacggtggctgcatcggtaattcagccactggattaggtttcttctcttcatcttggtttgttttctgtttgctctgtggtgagactttaggtttggttttctttgccctcctctttggttgatcgttaccttcagctagctgattgatcagcttagaactgatctgaatcgagaaatctcccataattacctggaagataaaatacatccacacaacttagtaaacaagagtatctactcaaaatctaatgcgagtctcaatgtgaacatctcacaacagagcttcttcacattaacgattcacgcaatagatttttgaaattctctgcttatagtatttcaaagatcttcaatttcacgaatcaaacatcgaaacccgaagcaaac

SEQ ID NO: 78719 - DNA, 510 bp, Arabidopsis thaliana landsberg
aaatcttgtattgagtataatatagattttggtttaacttattaccaccaactaaattttgtatagggaaagtgatttaaaataaaaagaaaatcccatgaaacatagattttagttttttttttaaagttgacaaaactatcaaaatctatagattccctattttgtttttagaaaaaaccattcttttcataattgattggttataaagtagatttttggaagaaaaaaaaaagtaaaaaggttaaaaaccaaaaacaacttcaattcaaggcctaaattaaaatcctaattcgagtgggaaaaggatataactaattaacccttctcggtacaattcgagagctactgctccaattcatcggctattaagttgcttcgatataattcgaacgtatggacgatggaggaggaggagaatgaatgtgtgatttgcatggatgggtacacacaaggatcaataggggctaaattgcgttgtgaatatacagttcaacattctgttatttt

SEQ ID NO: 78720 - DNA, 508 bp, Arabidopsis thaliana landsberg
tctctatcctttagaatcccattataagtgttttatcaggtggtctctctatttttcctctatttttaaaaaaacttattttgcttgttcaaaatattaaaattactagaatagctaagacgtgtatatgtattcatgtaacttttatggttaaatagttttaaacagttgtaatataacatcaatgatagatatctcaccaaaaaaaattatacataatatgaatgacgtaatgttttcaaataacttgactgttgaaaaagaaaatttcatttttacttgtaaatttcgttttatggaaaattagtgtatatgtgcgtgtttgtttatatgttatttctattatatgtgcataagaatgagttggaacaagtgtgaatcgcactttatactttgttctcattattattggtgtgtatctgtatataataagaagatggatgatatcaataattagatttccatggtatagcttttaaagcgagcaatatgcggagacaagctcatg

SEQ ID NO: 78721 - DNA, 376 bp, Arabidopsis thaliana landsberg
atacaacacataactgatagcgtcttcaagattctggacttttatagtttatccagcattactgagaaaagatgtaaactacaaggtacacagaaaactgatgcaatggacagaacaagtagccaactttaagacaacattgatcatatgaaaataagttggtgataacgattatcaaagaaccaacttaacttgttgggaagaggctacaaaggttgtactttattgacctgtcatatgtgcttccctttgaaaatttcacttttggcgatgaccatgaaagtgcaaaagacacagtgcacttgccatgagctgctacccatgccgaagccgagactgctgcacagatagtgactgcagctaatgaaggtgtgct

SEQ ID NO: 78722 - DNA, 251 bp, Arabidopsis thaliana landsberg
acaagtggaaggtgggacatatgaaggattatgatacacagcttacctacaaaaacagaccgtgaaccctcctcttcatctatctacggctctaaccgctccggactacacatcatttatgatttctccattaatggattgtgtatgaattgaataaaagaacattgtgttgggtggggttagggagaatacatgactgctgaagtatattggctgtttccattaatggccacaagatatatatcgacaat

SEQ ID NO: 78723 - DNA, 348 bp, Arabidopsis thaliana landsberg
tcataatgttgacagctaatgagcttaatgagaccttgaattatgttcataagtttatgtacgtacataatgaacataattcaaggtctcgtttgttttgccaacaatataatgttaaccttttcgatttctcattttcatattgcatgcacaagactcttccttagtcgttgcttttacattggcatttgaaatgttatgtgtcaacagtgatacacttacataaaaataaaataataataagagatacacttagaaaatgagtttcaagggcatgcgtttgatctcgtttcatgttgtttaccacgagcttttatttcaatgcctacataatatagagattttgac

SEQ ID NO: 78724 - DNA, 386 bp, Arabidopsis thaliana landsberg
agagggttcgaagggctcttcaggattacgatcattcatagcatgtccaaaatgcgggtggaagttgtatcatagtcgtaatcaccatcaacatcatcatcatcctcatcatcaaagtagttgttagctgccacattggcacgcgctggatcttgtcgtgtgatgtattcttcgttccaggttgggcagcgatttaaacaagtccccattatcttgttccatccacctccgcaattgtagcaaaactcatgcccgcatctaatgagaataccaaagggaatgtcagaatagttaaacatagatagaaagattgcaatccatcacatgtgctttagcttacatggccttgtttgataaggtttattgaggatcaatgtgtcgagaaa

SEQ ID NO: 78725 - DNA, 237 bp, Arabidopsis thaliana landsberg
cccaaacccagctttcgttcccttaattgagggttaaatggaaacttagcataatcatgggcatagcagattcctgagtgaaacctgtatcctatcacaattgcacacaacatacaagccggccgcatcaagcgtaaatcctgtgcagcctcatgactgagctaacaaacataaaacgcgttgagctcactgccctgcttccaaaagataaacccgaggcaccaactaccctaatga

SEQ ID NO: 78726 - DNA, 181 bp, Arabidopsis thaliana landsberg
tcttgcatagagcgggaaacttggttgtaccaaatttgtcttcagaggtgagtgacgtgacatcgttctctggaccggttaagctggcagacctgcaaagaattctgaacaacctctctggtggccctgttggtacaattctttatctctaggttctatttatcattaggacttcttctct

SEQ ID NO: 78727 - DNA, 450 bp, Arabidopsis thaliana landsberg
ctatataataaaccattgacattgtttatttattacacatcctgcatttattggcttattgcgatctttattaaatccaaagatacatactatatcgaagaaacaaaaagtcaagaaataattaaacgaaaataaatgaaggcatcaataaaagcttaccgctcacatgtttattttctaataactaatttttatttaaaaagcagtttatacatctaccaaatttatttcttagcataaatatatatttgggttttgacttttaagttctttctgacttctgagtgataaatcaccagtttgcaacttatatttgcctaaaccgcatgccaattgtcatgtatcgtatctagtaatggtattaatgacgacgatcccaaaatttaaattccacttttcaagccttgagctctttaaacattcatggtcaacttattacatggaaaaaaa

SEQ ID NO: 78728 - DNA, 374 bp, Arabidopsis thaliana landsberg
tcggagaaactgaagaggagaatcactagaagtaagagaagaggttttttaggactctttgtgtttccacttcaatctctggtcacaggagcttcgtattcttactcatggatgagtttagctcgcgaaagcgaatggcacgtgttgcttgatacctctgctttaggttctaaagacatggaaactttagggctttctctgttccaaccagatttcctcatctgttcttttacagaggttttaggtcaagatgatccttctggtttcggttgcttgatcgttaagaaatctagcttctacggctttgtcagaagaaccaacgaatccggagaatctcacggcagtaaaagcagagccatcttggaaatggaaaa

SEQ ID NO: 78729 - DNA, 417 bp, Arabidopsis thaliana landsberg
gtggaataggtttaagttagatttacctgaattttatggtactttacaaacagatgagttcctagattggattagcacgacggaagagttgttaacagtcaaaaatgtggctcatgagatgagagttcctcttgctgcaacacattttaaagatcgtgctttagcctgatggtaacaatccaataacagttgatatattcaaaaaactctcaataattactttttaaagtttgtaaattattattattaaataattacaatgtgtagaaaattaatccctgtagaacataatttttttcagaaaatcaatattttagaaaaagagtaagtactattgaatacattggtgcttcggatatatctctcattctgtcctaaacaaaaaaaaaaaaaaaaactcctacaagagtcaaagtc

SEQ ID NO: 78730 - DNA, 591 bp, Arabidopsis thaliana landsberg
aacgtttactcgattaggataatttatcagtttgtttctatttgtattttcattctaaaatttactattatttatatagtaacagtcatagatttgacaacttttgtaattaattaaattcttacaaatattttaaatttatagtcagagcttttacaattaaatttttacagcaaaaaacttatagtaaaaatctataatcatcatcttaattaatagacttcacagttcatttgacatagttatcatcaatttcaaaataaacaaacctaaaaaaataataaataaataaaataaaccattttaaggctggagttgttaaaaccaattaataataactttttactgtataatcattattcataagttgaaaattcttactattttttgttacctagaatatccatccattgacaaaaaaaaaaaagtattacccaaatactgtatccaatttttaaaacatatcatatgcctagtcatacaaagtattggtggattgagaacgtctaaatgtgggtcgcattgggacccaaaaaggtgattaggataacgagagaggccattgagttgatcaagttggatcgactttgc

SEQ ID NO: 78731 - DNA, 565 bp, Arabidopsis thaliana landsberg
ggtcagctatatatgaagagatggagttgatcacttaacttattgtttccaaacacaaatgaataattttctataccaactgggtagaagcatctattagggagtactattctttttgcttttggcacagagaacaacaaactttatacgatttttagagttaagctctttgaaataaaaccagtcggataacagaactttgaaatgacgcttacttatagccaaagtttcccatagggaaaaaccctaattaggctaaaggaaaaataattttgtattgaaatgttagaaaacggcgccttaatgttttgagttaatgttgtgaaattgcaaatgttagaaagttcagggttttctagacatattagtattttattttggccgttgacaatatatgggtttcgtttctttaactagtatccacttgatcagaacgtgatataaaataatattttggaacttaataagatgtcaagggtcgtgttatcctccagaaataggaaaaatggagaagttttttcatggagttatatgtgtgttcatcatcacagttgcttttatacat

SEQ ID NO: 78732 - DNA, 530 bp, Arabidopsis thaliana landsberg
  unsure (1)..(530): unsure at all n locations
agttttttttgtcactttttaggcttttgcatgatccatgcatgaacgatctaaaatgattatctgtttctttcgtcataaacctttttttttatttgtaagaaataaaaacgcgttttcacgtatcccgacgtctcttcctcctcacttaccttacactgtcccctccggcccatncttcttttttttttttttttttcctttttctaaatatcaaaatctaattcatttgcacatttctttgttttttgttcaaatctttataataacccatctattagtctgtactttttttttttctttctaattatacttactttatgtgtgtgtgtgtgattgcacattttagatgtaggtctagtcttctaacgaaataaatcggattgaatctagctaacctcttattatctctcagtcaaactgtcgagttcactaaaatataagccacttactgatatataattaatttatcagcttgttggtttaattaaaaatctaccatggtttttggcttaattttaaaacctttt

SEQ ID NO: 78733 - DNA, 535 bp, Arabidopsis thaliana landsberg
  unsure (1)..(535): unsure at all n locations
nnnnnnnnnnnnnnnnnnnnnnnnnnnnnnnnnnnnnnnnnnnnnnnnnnnnnnnnnnnnnnnnnnnnnnnnnnnnnnnnnnnnnnnnnnnnnnnnnnnnnnnnnnnnnnnnnnnnnnnnnnnnnnnnnnnnnnnnnnnnnnnnnnnnnnnnnnnnnnnnnnnnnnnnnnnnnnnnnnnnnnnnnnnnnnnnnnnnnnnnnnnnnnnnnnnnnnnnnnnnnnnnnnnnnnnnnnnnnnnnnnnnnnnnnnnnnnnnnnnnnnnnnnnnnnnnnnnnnnnnnnnnnnnnnnnnnnnnnnnnnnnnnnnnnnnnnnnnnnnnnnnnnnnnnnnnnnnnnnnnaactattattcttttttacccctaaatgggaattaaagtttttttcatttaatatttcccctattccaaaaaataatgaatgtgggtcttttttagcgcatttttgatgcgcgctatttgaaataaccttttccttgctatatttttcgggcacacacccccttttaattaaagggattttaccttggtttaacc

SEQ ID NO: 78734 - DNA, 550 bp, Arabidopsis thaliana landsberg
  unsure (1)..(550): unsure at all n locations
tcacggattttgcaaacagacacgggggagaaaagggctgaacgtgctactgaatgaaactggggaatttaattttacagaggtcgcgtgacaatggcatacgggggannnnnnnnnnnnnnnnnnnnnnnnnnnnnnnnnnnnnnnnnnnnnnnnnnnnnnnnnnnnnnnnnnnnnnnnnnnnnnnnnnnnnnnnnnnnnnnnnnnnnnnnnnnnnnnnnnnnnnnnnnnnnnnnnnnnnnnnnnnnnnnnnnnnnnnnnnnnnnnnnnnnnnnnnnnnnnnnnnnnnnnnnnnnnnnnnnnnnnnnnnnnnnnnnnnnnnnnnnnnnnnnnnnnnnnnnnnnnnnnnnnnnnnnnnnnnnnnnnnnnnnnnnnnnnnnnnnnnnnnnnnnnnnnnnnnnnnnnnnnnnnnnnnnnnnnnnnnnnnnnnnnnnnnnnnnnnnnnnnnnnnnnnnnnnnnnnnnnnnnnnnnnnnnnnnnnnnnnnnnnnnnnnnnnnnnnnnnnnnnnnnnnnnnnnnnnnnnnnnnnnnnnnnnnnnnnnnnnnnnnn

SEQ ID NO: 78735 - DNA, 5473 bp, Arabidopsis thaliana landsberg
ccgatgattaatatgtccaaatgtgtgggctggtcattatttatttataattagcatttagcagttgctaatcacctaaccatagtctctctttacttttgcatcattttagattaaatagtagtgggtgaagcttctattctttctcttataaagatattttgtatttatattcctgtaatagttatcttgtacgtatttatttataactccatctggttcacgctcaggttgtcatgtcatattgatgctctgctcttacaacataccatttatattcataattcatgtcatgaattttacaaaaccatgccaactttttgtaaaaggaaagaaaaagttaataaatagtggctagtacgagagtaaaagcagtaacacatttccttacgtacatttgagtggaatcaaaatggtaacagtgcatgtttgatattaggatttaaaatttgtttatgtcaatattatcagtgtatggttgaaaaatgggaaaagtgaggtaaaccaaaataataaataaacagaagaggagcgtcatgaggatttatagaaagtagataacgttgtaatccgatagataagtaaatgattagtataaagcatatgactatgagacgagtgattagttcattggagggtgaacaaataatgtcgtcgatggaaaataaataaatcacattactaaactaatcaactagaattatgaggatggagacattttctcgacgtggggtgcacttctgtcggcacaaaccaacttagttataagattaaaacacacttttgtaaaatgttttgttttgcagtaagtttttttctttttctttcacttcttatttccctttttacttgtaaaatcgtgtgcatacatatataaatggatagtcaaagatggtatttttgtgtggctaatgtttgaggggttcgagagagatagaacggtgtagctacgttatggtttcgtggtgagaccactttctctgacatggagacagatcaacatcacatgtatgctacctgctcctattaattgttcctctttactaaaaccaagagagaaattaaccactattttttacttcttttgtaatttgattttgagataatttgattttcttttgtatagttactgttgttaaaataggtatataaaacccttaatcgtttgcccaaaaacaaacaaagaaatgtgtttactaattagggcaaaaatgaggaatgttattatattttgaacattaaatactttttttcccttttggtcttaaaacttaaatacaatcttcttttgtctttatacgttcgtcattcaataaaacatacactcgatccacaacacatatgttcacatgctttgtgctcccacaggccacaccaaaatcaaatctcaccaccactcatattatcctctcacatagctattaaccttctccacgaccattattgagttcaatgtactctttccttcatataatagaaacgttttatatataaaatttaacctttcaagaatccaaaaaaaaatcatatatatacacatacgtgacaccttacacgcatgcatacgttactaaaacgcaccgtgacaaaactcatttggagtccacgaatacgtatagaaatcaaaaacacaaaaatttcccgccaaaataaaagatttgaagagaaaacaaacacgtgagacacacgcctccgtcacgtgaagtcacacacaaggaatcaaaaatcttaaaaatccaaacaaaaaacaaattatatatacttcgcaacttgattttttttttgtttgatgatgaagctgaggaagggtcccatgaactgctgcgatccattaagacaaagagctcagaaaaatctccactcacaaatcttttgcagacgctcccctgtcttatccatcagtacctgtgtgatgaggactctaatgcaaatactcttctctctctctctcacacacacacactcacatgatcatatcttttctctaacacgtgtgtgttacactcacttactcattttgctttcttgggaatctgcaaagccattaatgtgagcttcgtctctcccaaccaaccaaccaaccccaaaacccaatttttaccctttccataaaagtaattgtaaccaaaactcttattccttccccttggttggaaaactcttaattactttaactcagccaataaacacttttacttttcttcatcactcccttattactatgtacttgttaaaaaatatactctacttaaacagaagagggttttttttcttctaggttttgtttccttggtcctctactttcactccccaaattttaattagaggtagatgtttcatcacctacccatgaatagccacttaattttctccttttacaaggagaagaggattcatcacttggccttgttaacgtcgatgatgcccttacactcactcgaagctttgctatcacttttggtgtatttaaccggttattctcgatggccatcgctttcatcagtctatagcatctcactatcttctcctgaaagtcaaatataaccaaaagacattaattagcaatctgttactcccttgttccatctaaacgtgatataacaaatcctactttgctcaatccgtcacaccaagtctcagggctctcgtggggattgacaacagaggatagagaaggtaactcgttcgctacacagagaatcgcggctgcagctatactcgatggccagtactcaagaaagctcgcttctgtactaattggtcatgtgttagaaccaacccaaaaatgtgctacctaaatgacattatggatcatatatcatacaaatattacgtaccttttatgttggagagtataatctctgtagcatgggagataaagaacccgagaaaggtacccgaaggatcgatcttgtaagcaaagaagctaatgaaatcaaacggtgtaaccgatcttagtctccaatctaacacacttagaacaagaagttccattctttttatagtttttgcttcaaataaatacttcactcctgcaacctacattacattatacagagatacataaattaaagtttcttaaaaaaacagagtaaattcagaatgttaaagaaagaatgataatatatgtttacctgaaaatcaaaaagagaaggaacgagaatttcctccatctttgcagctaaagacaagcatgccactgctaaaagttgcattggccaaccactcgtttcctattttacagaaattaaagctgattaatataatcattgattactatatactctattaagtttaattacaaaattaatttaaaatattatatagtagtaggagcgttttaacactatgattacaaagttttcaataaagccgatatatgaagtggaaagtttactgcaaaagtatactattattatgtaaacgtcaatgtaattttttatcgaaaatataaatttcaataaaataattaaaaaacgaaaaaaagttccccagcccgctcctgttctatcgtttacgtacattccaatataagattaatttctactaaattattctataccgattataattttttgctctaataaatttttagtcgttttcatttttttctgaagaaaagtcaataaacaaatcgatccattgaaaaaaaaaaagggaaataaaactgacttttttgggttgttatttgtcatatcaatataataaaaaaacagagacaatagaattaactaacgttgacgtttttaaaacatttaccggtaatcgacgagcgtaaagaaaccgatccatatagttaacggcgaggtacgccgttaaaggctgaaagttataatacgcttgtacctgtaaaccaaacaataccacactactgtaaaaaaaaagattctctgcatgtaacgattcgatcagcgtattttagcgtctacacactctccggcggcgtattttagcattgaaaaaaatgagaggtagagaaaaaaagtgaataggctcgccttgagaatccatgcgacggaatcttctctagcggaagcatcgagagatcgagtttgaaatctagagagataatcatgtccaggaacgaagtgacgctcgtcttcgataaaacaagcgatagaatccgcaggccatgaatcaacctcggaagacgagaaatcaaccgttgactcaccggaaaacacaccggagtcttctccacaaaacaaatccatatcgttagagaatgaaacagacatgtgtagataatcactaaaacggtaactcctcattctctccccataaccggagatgaatcaaaccggagctagataaaccggtgagatctagaagaagcgagaagagagaagtgaaatgtgaggtttttgaattttgtgtggagagaagagtgaaggtttaacacattcatttgtttggatatataaacaagaaacagatattttttgaggttttaataaatttttatttaaatgtgtttttatttataaaaatggtgttgttgcaaatgaaacagagagacggttaccgtttccgttatgcccgagaaaacgggactgttgtcactgttccatcaatcgagacggggctggtccgttcgttcattgggttttgttttgagtttttttatttgtagtttatgtttgtgttttttgactaacatgcgctaaagtgaaatgcgtaggttaggaacaaggagtggtgtaattacgtaatacgtggcaggttaagacgttgcatgagtgagtacattacagctaatgtacgtttgtttgcatattactcgtgaagagagaaggccgtacgtgtaatgtattaattggtgacgtgtaatgtattaattggtgattagcttaatgggcctggattatggaacattttctgtgatttggaccattttgttggtcgcttagaaagaaacattttttcgtatttaaaatttggactttattactattggttaaaaaataaaagcatcgaaaaataaatcaaaattttacagaggttttaaagtcatgacgcttaatcatacgtatatatataagtatttgatttgctaaaatgcaatttttttggttattgtttgctttttatgtgattagatgtaaaactcctgaaccattttaggcacatgacaaatgctcaatagatttgaggccattttagattcaatgatgattttttaatcgaatgtaattaattgatgttttgcattatagtgcaatttttttgctgttttcttgaattaaccgtatgataaatcagttttttttttgtaatatcaagtgagggaagaagattccaaattttaagattggttatctaattatcttgaattataaattagtagtttaattgagattggttaatcagaggaaagcaaacagtgctctggagcgtgtgggaaagagtagtggaagtccttttcgtagaaccggagattttcttcacattcctttttgtatcgatatgtcat

SEQ ID NO: 78736 - DNA, 489 bp, Arabidopsis thaliana landsberg
actacccattattctgacggcccacaaagaaagccacgattatgtactccccatataataaatgtgtaatacttctcatgtatttgcgtgacggacttttaatgaaaataaatgttctcgcccaagtttgatttttttttttgtcagcgctcttgtttaagttaataaatcatttattcatcatacatatcaaatatatattagatcggtctataaattgaatttaatatatatttatcgacaaaatttgaaatgaatatttaggaagtatattatatctcattgaactatatatatagaaagagaaaacgaaaagactatttacgaaaatgattggattaagatatgttgtttcacgatgaagacaagggaaaaaaaccctcaagttacatgcctttaatgctcatcacatgaatctacttgttaaaataacataagtacaagtgagttaaggaacaaagaaaactaattaccttaactagaaaagat

SEQ ID NO: 78737 - DNA, 461 bp, Arabidopsis thaliana landsberg
cgacacatatagagaatggggtgagattgtatagactggcattaaaagtggcccctgttgttgtggtttgacggctctgtggttaagagcaatggctgctcttccagaacatcccaattaggttccagtccccacatgacagctaccaatctgtaccagggccaaggtgcggaggttcgaatatgcttggaccagggagtggctctattaggagataatgtactcgtggagtatgtatacccttgttggaagaagtgtgttactgtgggggatggcaagggaaacactctttctaaccacattgggagtcagtcttgtgtttacccttggaacacgaggtagaactgttaacatactcagcaccacacctgcctggaggctgccatgcttcctgccttgatgataaaggaatgaacctttctttcaatttagaagactgccccgattaagtgttttccttt

SEQ ID NO: 78738 - DNA, 377 bp, Arabidopsis thaliana landsberg
  unsure (1)..(377): unsure at all n locations
gcgnnnnnnnnnnnnnnnnnnnnnnnnnnnnnnnnnnnnnnnncttcggcgttgtggagctgccgatcgagggatgcctttttgcgatcattctgcgagtttttcagtcactctttggagctctcaaggttcgatgacgagacggctaaatgacgcggggctgggctcggagcccggcggataattgaccttgatgccggatgcgcctgcggtgcagggagtgtcttgaaagcggaccttgccggccttcacgcatttgtatgccgcgccgaacgcgaggccagggcagattatcaacacggcggcgagtgcacgatattgcatgggaaccctcccagtattacccgcgcgaatactaaaactggggcgccgaggca

SEQ ID NO: 78739 - DNA, 424 bp, Arabidopsis thaliana landsberg
tacactttaagtgaaagtaaataatataaaacgattataattttgaataaatatccgaagtctattcattattgttttgttttataaaataataccgtttacaaataaaatttataatgatttgcttgtccgatgaaatgtgttaactactaaactctatggacgttcattgagaaaaaaaaaatataacgttgaatgtgatggagaaatgaaaagtccctttgagtaggaaactcagttttctagtactttggtttgcactttaatttgttacaagtctacatcagaataatccaacaaaactattgtatatacaaaaatttacacgagtgcaaataatcaaatacgctgttaaccaacgtatagtgttagtaatatacaatgtttcttgtaggaacgtaaatcaaaagagccaaatgctaaa

SEQ ID NO: 78740 - DNA, 289 bp, Arabidopsis thaliana landsberg
  unsure (1)..(289): unsure at all n locations
caacagacggcccaggggggaaacgagaccgacggcggcagggcccagcggnaggaagagcaccgcacgccagcgcggggccccggagcgcccccggcgggccaagaaaaaccggaggaccgagggccgcacaggcccggacgnacacaggaccggaccaggncaccaaggagaacagcggccgggggaaggaacaacggaggcaagggaagcccgcaaaaaggagccgcaacgccaggaaaaggagggggcccgagggccgggcncgggggacccagacccgaacccg

SEQ ID NO: 78741 - DNA, 381 bp, Arabidopsis thaliana landsberg
  unsure (1)..(381): unsure at all n locations
gcatcggagttacaaggaaatgagtagttgactgcatcatatggagagccaaatgtagtttaaaagagaaactggaatgcataccacgtaatctatcgtaccgcagacgggcaaactgttaccagtgaagagatctgatttgtcatcgattaatagctatgtttacatattgatcttgggtgatgaaaagaacgcacactcttacctctcaggtttataacacagacaccaaagtatggtttggataaggtgaatgctcatcgggaactgagagaactaaggttatatatatatagaggagagagggagtgcgagggagtgtgagagagataatgnnnnnnnnnnnnnnnnnnnnnnnnnnnnnnnnnnnnnnnnnnnnnn

SEQ ID NO: 78742 - DNA, 344 bp, Arabidopsis thaliana landsberg
  unsure (1)..(344): unsure at all n locations
ctaaacctgagtcgtgaccatcgccacagtatcaagactccaaccgagtcaggactcgctctctcctngtttacagcttccaccaccgatctgacgtactcgtcaccgactcgctccttcgcttgtttcacgagcatcgtcgcgtagcttaatcctttctccgtcaagtctttcacggtggtttgagcacatccgacgacgaatgcgttcccgtagaacccactgggtagactcggtttgactccgtctctaatgttgacgctaaacaaaagctcaaggacctgattcgatggcaagtttcagtgatctcgcccagctccgtcatacatgtgcagagagttcct

SEQ ID NO: 78743 - DNA, 611 bp, Arabidopsis thaliana landsberg
  unsure (1)..(611): unsure at all n locations
gatattgaaattacataccagtactggccgtcaggcgcaaccctcaccatatgtggcgattcattacccgaagtattcccaacatcaatataacgcatcggcaataacgtttcctggtcaaaaactgtaacaacatcacatccctggttcgcaacatagatttttttacgttcannnnnnnnnnnnnnnnnnnnnnnnnnnnnnnnnnnnnnnnnnnnnnnnnnnnnnnnnnnnnnnnncatgacaacttcttcgcgcgacaatggcgtcccattataaggcattgtaggaacatgcgactgtcctaaatcagaaaaagtattggtatataaaaaaaagtagctgtaatcataacggaaaggaataactgccgcactgcctgtgccgcctgcaaacaatttatcccaaccctgtaatgacaaacctgcagcggcacctttgctggcatccgtatggcaaccgggagtagcacatttcgtaaaaaccagcttaccgatatcgtcaggataattgttgtaatcaggaatgcctttatcatttttgcaactgccaagaagcaaaaggataaacacataaatatagaaaacactttttttcattttaacttattc

SEQ ID NO: 78744 - DNA, 516 bp, Arabidopsis thaliana landsberg
ccggcagcgatacaggctgtcgtgggtataatgcaggcaggggatgaccgtcaggtccggccgcagcgtggagtcccggagccagtgctgacccaccagcatgcgggcgtattcccctattgtcattccatagacaatggggatgggctgcatgcctaccccggaagtatatttcttctccagcacggggccgtccacataaaaaccgttcgggttgggacggtccaggatgatcaggggtttatgatagcgggcggctgcctccatgaaccgctgcatggagctgatataagtataaaaacgggtacctacgtcctggatgtcatacaacagcacattcacatcctgcaggtcggccgccgtgggcatattatgctcgccatagagggagaccaccgggatccccgttttttgatccaccccgttggccaccgtagccccggcatcggccgtgccccggaacccgtgctcgggcccgaatatcttaacgatgtgcacccctttttgagcagggta

SEQ ID NO: 78745 - DNA, 539 bp, Arabidopsis thaliana landsberg
ccctggccgggctggctgttggcatggtatagtatccagttctcttttccatcgggtgatgtgaaaaaggagttatgcccgggtgcatatacaccattttctttcgattgtttgaaaacaggctccggggattttttccaggacgccggatccataagatcgctgcctgcctgtgccgtaagcatgccgtgtgcgtataaatctgtccagcacccgcttgcagaatatgccaggaataatttattgtcctttaccagcacttcaggtccttcattcacatttacatgcggcgggttatttttatcatggggatcgccatgcatttaccacggcagctccggactggatatctgtgcgcgtctgccctgtaccgtgcagggattgctcatagcagcgatctaaatgtactgctgaccgttctcatcttctttccacccggaccagaccaagtatactttttcctgggttcaaaaacagaaccgtctattgaccatttatcgtctggtgtaaccagcttgcctttcttgatccactcacca

SEQ ID NO: 78746 - DNA, 545 bp, Arabidopsis thaliana landsberg
tatatttatactctttgtaagaattattacataattggttattttttttttctctttttcaatactggaaaggtttttatttttgcgtatgtaagggaaaatccgtacagtataaatacaaacacaaaatgcacaaaatttatgaagaaattaacttgattttggtatgagttatgtaaaaactttggaaatttgaatatcggaggcgaatgttttcttttctttcaagtaggcacggttctgaatagtatttagtaaccataaggtttgtaataaaattagagaaaataagaaaaatcataacagaagatgctcgagaggtatttaaaatatatatggtgttgagtatgtgataacaatttacaaatgtcttgtgtattacaaaagtctatgacctctcaattacctataattttttgttcacgatatatgatcaagtaaataaccctaaagagcaaattcttgctgcttaaacaacataaaaaccataaaaaccgttgatgtgtgacttctaattgtacttagttatcttgtaccatcaattt

SEQ ID NO: 78747 - DNA, 264 bp, Arabidopsis thaliana landsberg
  unsure (1)..(264): unsure at all n locations
gcgnnnnnnnnnnnnnnnnnnnnnnnnnnnnnnnnnnnnnnnnnnnnnnntgtcattgcccgagaacaacaatttcgccatgccctaggccaggcgcctcaacggaaaagacatcgacatgcgtcatgccatcagaaaattcagcacactgttcgtactagtggccatcgccatcggcggctactacttctatgcgcaaagcaagaaaccgaagcnnnnnnnnnnnnnnnnnnnnnnnnnnnnnnnnnagggcaatgtccagca

SEQ ID NO: 78748 - DNA, 451 bp, Arabidopsis thaliana landsberg
tggtatttgagtttagtgttatattatatttgaaagatttgactatctactttttattgttgatcttttcttcaattatatattataatatatatttttaaagagtacatagctatgtttttattttatttttttagagatggagagaaagatgaagcagcatcttcatcagatgtgaaaaagattgagtttaccttgttctatattaagaggtgttttaatggtcttgcgcaattctctttcaaaatgaaatggtttgtactttgtgccattacgattgatatgctctactggtatcaaggattgagattggaaaattttaggtgtcattaatcaaattgattgcgaatggagaagatttgctgtttggcaaaacttatagtattacaactcaggtctatttttatttttcttaatatctagaagctcaataatgaagaatttttttttt

SEQ ID NO: 78749 - DNA, 535 bp, Arabidopsis thaliana landsberg
  unsure (1)..(535): unsure at all n locations
ccccgatctatgcatgtacacttccaaacagatatataccttacctatccttacatctgcaaaccattatcaaccaatctcgctcacaaagaaaaaaaaaataaacacccaaaaatgattttcctccagaatctacccgtatcttctctccacatcacttcccccctttccttagcctctcttctcatcttcaatctcactctgcagctgctccaggatttgctctcgagaccgcaagtgggcttccagaccatccacctgctcgcgcaccgtctctagatcatccgatatgctcttcaggtttccacccacggcgctcttgcccttgccctcttccaggtctctcagctctcgtcgcttatagtccagaagctggtccagctccctcttgacgagcgccggcttggaatcgcgcttcccgcccttgcgtctctctgcaatctcttctacctttcgcatcttctcttccaagtcttgcagctggcgcttgagtctcacttcctcccagtcctccgtcttctncgtcgagaagtcg

SEQ ID NO: 78750 - DNA, 2316 bp, Arabidopsis thaliana landsberg
gcggcgggtgttcttcattgccgacagctatgaatatattgatgtttgaggcgatgatgacactgaggggcgggggacattgatgttatcagtctctcctttgcctctcctcctcgttgcttctctccctggaggtaatttatacttgtcagctccaatctttcaaacaaaaattgaatccttaagtaaccattagtgagaaacaatgcaattagttatttcattaactatgtcaatgatctgtggctttgtgacacttgttgaagtcaaaatatttctctgcctgtaaatgaattggatcaagtctgttgtgacaagaaccctgttttgtaagtttacatgagtatgctaattcatgtctctattggcagccgaaactgtaagatctgtgtttggacccgttgtggagattgtaaaatccttgaatctacctgattggcttgttcattggggacatccagggaacatggtatgattgattacttactagcttccttctccataccaatttcatgcttctttaacttttgcctcatctgcaagattccacaagctgtgtactaaagccagttcctttagaacttgttcttgttttgttatgaatattcatctgtatttgtgtgtgatgggttggatttgtcatatgttttctctcaggcagtggtactttttgctatgggtggctatggaacatacctaggcttccggattcgttattctgatgacattgtaagactatttacccaaataatctgactatagtagtacaagaagcgttgttgtttaaactgatttcttcatttgccttgaaattttcaggaggagaaggcaaaggcaaaagacctgcacccaaagcttctagccggaatgtttttctttttcgcccttggagcaactggtggtgttatatcccttcttacttccgacaaacccatcttcgaaaggtatatttttctgacctagtaaactctcatttactgattccaaacttgtacaaacaacacttatgctatctagaagatctcttttaacttagtaatgagatatcaattgggcgactgatatggttgcgaatttgtgcaatgtagtccgcacgctgttacaggacttataggtcttggcctattgacggttcaaacaatcttaccatctttgttcaaggtaaagtacttgcacgatcttgcaatgtgaagccttgatgatttattaagttataggatcaagaaactcgttgaatgtgcaggagaaacccgaactgaggaacgtgcacgggatccttgggagcgggataatggcgcttttcctcgtccatgctgctttcggccttcagctcggtctcagtttctaattattctttactgatctcttctcttatgtttgtattcttcagctgcaaccacaaccatttttttctttaaagccttaaaatttcaataaaagaagatatatagagaaaaacgcttgtaaactaatgtcttatatatatactaaggatgtttttattggctgctaatctgctactactagtcacatatacacaaagaattttacttcctagagtttttattttatcttcagaacaccaaaattaaactaaatttcctacaaacaaacataaggcaaatttagcttctccaaactttattaaaaaaagttgattaaatgaattaaagagtttcaaatgcggaaattaaaataaacaccatcaccaaccaacatctttatataatgaaaagaaaaactaattaaatccaaagaataaataaatttattttattttcgaaagaatctaaaccactcctccttgatttgatgccagcatggtccatgtggtatccaaaggatccggtttcgatatataaccaagatctaattacgatgtcaaaatccgggtcgggtattgtcgggtattactcttctctctcaccagccacacccataccaacgacaacggggttggtgagattacattagttgtctacatctcaccgtccattcattcttcattaaaagatcaacggtctaaaaacatgagaatactgtagatcataaaacacgtgatcagagctccggcaacaatataaaccgaagagatgtgaagcacgagagaagagcgggcaaaacaaacagagagcgagtcacgcgccgagttttcctcacttgttctcaataaatctctctctctttcttctctatcgctttcatttttctcctccagatctcgattccaatctctctccctctctacttccttcaacaggtttggtttctccgatccatcgtcactctcttcgttagatctgttcatttttgctt

SEQ ID NO: 78751 - DNA, 583 bp, Arabidopsis thaliana landsberg
  unsure (1)..(583): unsure at all n locations
gcatcagtttgtggtctcttgaagcactgaaaacgcaagttcgagtcttgctgacggcaaagcatttctttttgccatttcttcatgatttgaggcgttcagcctgcatgggtcatgattcacgatgatgtgcatgccatgcatgtattgttccctcatctccagcttagtattgaataatcattatatcttttggggccttactttgtgaaaagtgttataagtattgttgtaaccctcagcttgagatagcatcatggggttgaagtacaggcactgagcaactccgtgatatcagcgagatcatccaagccatattcattcttggtaaggaaaacagaataaactcgtagtattatccgcattcaatattctagagaagcccttcccaccaaacattactaaggaggcagttgctagagcccagaacgagtccaatctgatgttggcatttggaatcgggccttcgccctgtacaggcaccggtaggtagaacacatcgccctatagggctaagcagntgaatattagcgctcactatattgaattaaacctaatggatataatgcacgtaaagatgtca

SEQ ID NO: 78752 - DNA, 495 bp, Arabidopsis thaliana landsberg
cgaaaaatgcaaaagaaaacaaaagatagctcatggtgacgatgcctataaaaccattaattattcttcttcccgtcggggtacttgtgcatatattatgaaatcttgaaaaaaacgaccatcccatcaaaccagatacccattttctagcataaaatggactaatatagaaaaatacaatggctaataaaagtcgaaggcggtgactaatacatcgagaaaaactcaaacctttgaaaactttagaattcttataaaataataaggaaaatacaaagactcaatagcgagagattcactacaattttaccatttcccgacttaatcctcatatccggcacacttatttacaatcaaatccacacacacacacacacacatgttataaatatacacatagacacatatacacattactcatttcattcatttactcaaagaagtggacgtgaaaaattagaaaaagagatgaaagaaaacattctttaccaaatg

SEQ ID NO: 78753 - DNA, 388 bp, Arabidopsis thaliana landsberg
  unsure (1)..(388): unsure at all n locations
nnnnnnnnnnnnnnnnnnnnnnnnnnnnnnnnnnnnnnnnnnnnnnnnnnnnnnnnnnnnnnnnnnnnnnnnnnnnnnnnnnnnnnnnnnnnnnnnnnnnnnnnnnnnnnnnnnnnnnnnnnnnnnnnnnnnnnnnnnnnnnnnnnnnnnnnnnnnnnnnnnnnnnnnnnnnnnnnnnnnnnnnnnnnnnnnnnnnnnnnnnnnnnnnnnnnaggcttcaaaaagtaaatggaaatattccatagccctgcttaattcgtcagagggcggactttgggctttccccaaaatggtcacatgccaagattggtcttgtggcataaaaggaatgtgagaattgaggtttacccaaataaaaatggggttatgatttcagagggtttgcaac

SEQ ID NO: 78754 - DNA, 511 bp, Arabidopsis thaliana landsberg
tgacggtagttcaaatactgcgttaaaaactcacaagtccttgctccctaattcctataaacgatgctcatattaatttcgctacccctacggttagttagaagatccacgcaaaatgtgtttttccacattaacagagaccatttctattcaaattttaatcttttcttttcaaataattatgcttggttttgagactaaaataaatttaattgaatgagctttcaaccgttttcacatgaaagcttgtttaattgttttagaacaccggatatttaagtttcctcgaatatttaacgaatttcggaagaggatatgctttttggaaaaaagtggcaagtctcactatatatcttacactaaaatagaatactaataataagattaaaaagagatgaatacattggagatgttctaaagcattcgagctaaaatttaagtgttttatgcaccgagtttacgtatttgattctaaatccgatattacaatgcaaccacacgagggtttact

SEQ ID NO: 78755 - DNA, 512 bp, Arabidopsis thaliana landsberg
aaaacatcacgcacgtatcaatcttcatcgtgattctatcacctccctcatcaaatgatgctatgagcatccgggggatgttgttggaccaaaacccccaagtatgcacaaattgtaagtattttaaatttttaggattttttagtccttctttgcgaattgaatatgataaaaatatggttagaagcgtggaaataaatggaaggaaatgaagactgaccttccaaatcattaaaccgatatcaaactgtcttccattataagaggacctcggggaaatcgctgcaccaattgcaattttattgttggtttgtacgaatccagagcagagtaaattgtagcacccagttgcttggtatgcatcagtctgcttttccaaattttcaattcaatatattatttttccctcatgatattaaataaataattcaagcaaaaagtttgaaaaaagtcgtgattgatcttaccgtccaatatgtgaagaatcttggataattatctccgtatagttc

SEQ ID NO: 78756 - DNA, 594 bp, Arabidopsis thaliana landsberg
ggaagccaaagataatgctgagtatattagatggatggagactgttaaatcttatgttgagcaaaaataatttcttctgccgaccacattcttaagcagccaatgaatgttcccttggatatatgattatatggcttagatggacttttattggcatggttcttagtttccagaggtaatgtgacatttagatctaatatggattagttgcgagcatatatatgataatgattatattaaagccgtattgcatgtagccatgtcccgttctcaatgcagcaacatacttccacagatagaacgttacaagatcagagaaacagatggttgtactgtatgtgtggtatctccaaaataactcaacaatttaacaagctcgtctagacggcaaagacagggatgaaatttgctgtacacaatatttatgtttttgatctttagattctttactagaacaccgataattgcagaacaaattaacatcatgggaaaaccagacgtggcccaacataaagatgaaacgaaagaaatgggcaaattctacttggttatccagtaaatgaatatgagaaatgtgcatacagccgcaactag

SEQ ID NO: 78757 - DNA, 521 bp, Arabidopsis thaliana landsberg
  unsure (1)..(521): unsure at all n locations
annnnnnnnnnnnnnnnnnnnnnnnnnnnnnnnnnnnnnnnnnnnnnnnnnnnnnnnnnnnnnnnnnnnnnnnnnnnnnnnnnnnnnnnnnnnnnnnnnnnnnnnnnnnnnnnnnnnnnnnnnnnnnnnnnnnnnnnnnnnnnnnnnnnnnnnnnnnnnnnnnnnnnnnnnnnnnnnnnnnnnnnnnnnnnnnnnnnnnnnnnnnnnnnnnnnnnnnnnnnnaacagagggaaattagaatcaaagggaaaaaaataggatgaaaaaccaaatcattagtaatcaggcggggtcctcctttctttctttcaaaaggggtttttctacccctaccattttaaaagaagagaactccacaaaatatttttttaaaaaaaaaatgcgcctctctcacctcaaatatatataatattattaaaaaaacaacagccggtttctacaaaaaatttttttaaaaaataaattacacacccctgggaaattttttttttataaaaaaaaaaagggctccccctattttt

SEQ ID NO: 78758 - DNA, 625 bp, Arabidopsis thaliana landsberg
tgatgtgtaccatcgtaaaatggcgatgatgaaaatctattgaatgtataagtactaggtacggtagtgttggtgttttgtatgtgtttctgtcctgtatacacaattatgtgcatctacgtatatctgaatcatacatattgttctctcttacataaatctaaattgtctaccttaactattatctaaattcttatctcatttgaataaatgatatacatctccctcttattaaatgatgtacacagatgaagtaaaaaaaatgttgtatacagtatttctaaagtaatacatacattttatttgttacaagattatggtatgtttcacaagattacgcaggagaaagaaaaaaagagaagaatttggatactctacttctcacaccctccacaactttagaataaattagtgaaaaaaagttaggaagatgttataaagaaagaggagatagagagactacacttaagtcgccgattttacagatacagagaaaaaacaaatgtggtggtcaaaaggcaaaaaaatggtcggagttcaacgaggaagaaatttcaaatagtcaataggctgtggttaaggcaatgtcaggattcgtgagcaagttagaatgcatgtgacattt

SEQ ID NO: 78759 - DNA, 583 bp, Arabidopsis thaliana landsberg
acaacccaagagaagagtcatggtaataatacatattggaatgggatgttcattaatacaggaggatcttcatggtgaaaaaaggttaaaaagagctcatgaactatcagctttcttctctttttctgtttttttctcctattttattatagtttttactttgatgatcttttgttttttctcacatggggaactttacttaaagttgtcagaacttagtttacagattgtctttttattccttctttctggttttgcttttttcctttttttatcagcctttttaaaatatgtatttcataattgggtttgatcattcatatttattagcatcaaaatcgagtctatgttcatgagggagtgttaacgggtgtgagggtagaagaataagtgaatacgagggcttcgtgtgtaatcagtgagatctgcattcatcgtttcttctatttgtagaagtatttctgtaatttattcatatttttcaacaaaaaaaaaaaaatcatctttatatccaatcattatccgattgaaattaaaattgtgttaaccctaagcttgaatagattgttttaaattgttgaga

SEQ ID NO: 78760 - DNA, 563 bp, Arabidopsis thaliana landsberg
  unsure (1)..(563): unsure at all n locations
aacgaagaattgtccaggcggatggtggcccgcacggccggcgcatcgtgcgattcaaagcggaactgcttccagccccgctgcgacaggcgcttgaggtagtgttcgaacacgtccatgcctgccaggccgtgccggcggctttccttgtcgcaccagtagtaggccgacttgtgcccggcggggtacaggatttcctggtatttgtcccgccccagcgcggcttccacggcggtgtggttgttgacgaagaagtggcgcggcacgtacagcatgggcagcgtgtcggtggtccacacgccggtgtgttcgtcgacctcgatgggcactaggggttgcatgagtttcggctcctgggcgcatgcgtgcaaaccccggaacgagaaggctccggggggtggcatgcagtgggtttcaatagggtcggtcagacgctccagacgtcgtcgtagaaacgcatncagttcaggcccagcaccttctcgatgcgcgacgaagcccagcccgcctgctccatggcccgggtcaggttggggaattcgccgatggtgcggatccccttc

SEQ ID NO: 78761 - DNA, 563 bp, Arabidopsis thaliana landsberg
  unsure (1)..(563): unsure at all n locations
tgtgtctcagaagatctgtagtgcaaaggtgagatacgtctatatattctnnnnnnnnnnnnnnnnnnnnnnnnnnnntttttgtgtggtacatgttatgataaattgaaaacgtttaatctatgcatttttaagtacatgatctaacagtttatagagataacttgagaaaaccaaaacagtttaaagataagttgcatgttttcgtacattatatgctaatgaaaacagttatgttgaatgttagttgctgcatgttgttgtatgggttttttcatgatgaagtggttaaagcgttatatgttgccctaataagccatgggcctattcaaaaacaatatgggcttattgattattttaaattgctatcggccagcttgagcaggtacttgaaaaggcccatgaatgtttacggagagtacaacacgttgacacgcacaacaacagaaaaagaaaacacaaaagcttatcaatcaatcagatctttaattatattatttggtcggtttaagaagtgtttacgtggttatcaacgttcacttttgaattgattatacgaaacg

SEQ ID NO: 78762 - DNA, 271 bp, Arabidopsis thaliana landsberg
tttgatattaaatgaatgtcatggggtgaggattatatttaactacaatgcctacataatcaatgacactaacaactaagcacatacataaccattaagtataatacatatactaaaaaatgaacattatctaacacatttaggcactaagtaataccaaagctcaaaaactaccatttatcacatctacactgacatacataagccataataaaccatctacaactgacacttctatgactttactaaacccatcctatataaatatccg

SEQ ID NO: 78763 - DNA, 576 bp, Arabidopsis thaliana landsberg
  unsure (1)..(576): unsure at all n locations
aaatgcaacttgaaattccgttggaaggataatgagggtcgaaaaatttattttctgttcgactttgaagtgaccaccagtgaaaccatcaatgattatttccgccgggtgtgcaaggaagggttgctggaacggttcaatgggccgcacttccggcaattgatgagtgaccccaagtgggaaacggaccttnnnnnnnnnnnnnnnnnnnnnnnnnnnnnnnnnnnnnnnnnnnnnnnnnnnnnnnnnnnnnnnnnnnnnnnnnnnnnnnnnnnnnnnnnnnnnnnnnnnnnnnnnnnnnnnnnnnnnnnnnnnnnnnnnnnnnnnnnnnnnnnnnnnnnnnnnnnnnnnnnnnnnnnnnnnnnnnnnnnnnnnnnnnnnnnnnnnnnnnnnnnnnnnnnnnnnnnnnnnnnnnnnnnnnnnnnnnnnnnnnnnnnnnnnnnnnnnnnnnnnnnnnnnnnnnnnnnnnnnnnnnnnnnnnnnnnnnnnnnnnnnnnnnnnnnnnnnnnnnnnnnnnnnnnnnnnnnnnnnnnnnnnnnnnnnnnnnnnnnnnnnnnnnnnnnnnnnnnnnnnnng

SEQ ID NO: 78764 - DNA, 562 bp, Arabidopsis thaliana landsberg
  unsure (1)..(562): unsure at all n locations
cgcgcatagctggaccagccggccggttcgatcaccaccctgatcggccaggacgaggtaattgttcatcagaaccagctgntgcagcaggccctgaccaatcagactgcccgcatggacaccctgaccaagcgcgctgatctcgccgatgcccacatcaaggatctggaggcgcaactggcgccgccaccaccaccgccggcctcgaccggcagcgccnnnnnnnnnnnnnnnnnnnnnnnnnncctgatgagttccggacagacggatgatgccgggcgcgccttcgaagccttcaccacggcctggccgcaatcgacccagacgccggaggcttggttccgcctggggcaggtccgcgccatgaagggcgatccgtccggtgccgtctcggccttcgccacctcgctgaagggctggcccaagacctcctgtgcaccggaagcgactgtgcgtctggcccaggcgctgaacgacagcaaccgtccggccgatgtttgcgcctcgctggcccagttcgacaaggtctatgccaagcttgccaccaatgagatgcgcaatc

SEQ ID NO: 78765 - DNA, 577 bp, Arabidopsis thaliana landsberg
  unsure (1)..(577): unsure at all n locations
aattgtaaaaccgtttgtcttgattagagatatggctactatagtatacattaagattgtttctattcttttcatttccattatacttatacatgaccaacatgtccccatgtcgataatcgaaaaccttcctttagaattagaatatatatactactatagtttcatgcattgtatataactgtctgagcaattataatcaaggaaggagtgggggacaagctttcaaagaacatattaaaaaccaaagacacagaacataaattaaactattaagaagggggacagctttgtcatagcaatttatagaattttttagggaagtgtgacaatttgacccattatattgtctgactagtattaattttgttcgtttcaagtaaactcgccagggcaatcaaggtttctgtctaatttctcgtttacatacacattagcatcgttttaactacaatcgaaatttagttgacaaaaaggtacgtagtagtatccacttaattggaaatttcttcttttcaaatttgaagattaattaagggacgtacgtctcaaagtnaaatanaaataaaaataaact

SEQ ID NO: 78766 - DNA, 572 bp, Arabidopsis thaliana landsberg
ggagatcatggccgggcccagcgccccggcgatcgcgtcccgccgccggcgcaggaggatgagcttattctccctgagatcgccggtgtccggggccggctccaccggcgggagggagctgaccagcgcctccacggccagttcctcggtcgagctccagcgccggtagaggggcgcccggcccgtccccgcccggcgcgccaccccctgcatggtcaggccgccgaagccgacgtcggccagctcctcgaggacggcgcggtggatcgccgactccagctcccgcccccgccgccggtgcgcgggatcgtgatcagcctgatcaggagacacttgtgcatcttatttggtgcgggtacactctgtcgataagatacatccatgactcttatcgagaggtgaacgacatggtccgacatgggctggaggtgtgggccgtggcgcggtcggatccggacctgactccggagtgcttccggatcgtcgaggtcgacgtccccgaaccgggggacggggaggtgctcgtccgcaacgactggatggcgctgagcgcggtgatgggcaacctgatg

SEQ ID NO: 78767 - DNA, 602 bp, Arabidopsis thaliana landsberg
  unsure (1)..(602): unsure at all n locations
caaatgcttaatataacgttaaacattacggggaaatagacgttcgatatcgattaacgtaaagttgaaactgtttcatgtgaaggagaaaaaagtcgtcaaggatcattaggagggaaataacgagagcgtccttgagggcttaaagtgattctcgattgcattattgtaggtataaaagagaaggggatgatgaagggtattattctcttctgttgccccccaataaccatttgttccaattctgtccttcattcgtgttccttcacacttagctccttgttggatttcgaaatctctcatattatccgtttagtttctattatatcttataatgaattcaaagtgtacactatatcacttttaataaagttatatgtggatatgggaaaatgtcaaaacaacttaccaatcatattaaaacatatgttcattcttttatagatgttaaaaaaacaatgtagtacaactcaaactataaaattaagacatttcttatctaaaaagtaataaaccatatattgtgaaattntaatttagtctacatataacctcttgtagattaaattgagcaacaagaaaaattcactgatttagagttt

SEQ ID NO: 78768 - DNA, 580 bp, Arabidopsis thaliana landsberg
  unsure (1)..(580): unsure at all n locations
gccatagaccataagatcgtttgatcattgctattatctttatgaggcaatccctcatgcatgcatgctgatctctcctctgccggcgccaacaggtaccaggaactgtccgataccgttatcaacagcctgccgggtatcttttacctgttcaataccgagggaaaatatatccgctggaacaaaaattttgaaacagtatcaggatacagcggtgaagaactggcgcataagcatccactggatttctttgatgcagaagagaaaaaggtgatagcagaccgtatcagcgaagtatttaccactggcaggtcagaggtagaagccaccttcattacccgcgatggaaggcgggtgccctattatttcaacggtattgcaatagagtttgaaaaccagttatgcctgataggcatgggaatcgacattacacagcgcgttaccgcagaggaagcattgaaggaaaagaacaccgaactgaaacggctctcagcctatcttcagaaggtacgcgaagaggaacggaaatatatggccagtgaagtgcatgatgaactngggcagatggcaacagcgctga

SEQ ID NO: 78769 - DNA, 481 bp, Arabidopsis thaliana landsberg
  unsure (1)..(481): unsure at all n locations
atatgtccggtaaaaacctaagggacaaacatgcannnnnnnnnnnnnnnnnnnnnnncttatgaagggagaaaatgggtataaggggagcggaagcacgctccatcaatctcaaaaccctatgaacagcctaaggcatcatcatttgtaagaccaagaccatagaaccactaacaacacacgggtaagattgaaggagagttcgggagatattagtcgctcaagggagaaaaagggtataagacgcacgcacaaacgacaccgaatcaaactctaacactgataatcaagacacgttgcgttgagaacgagactcattttgaccataatagcgctaacctaaccatagacagcgaaaaagctagttgtaccgtataacacagcctattttgagagacaacggggactactgtagtatatacactactcacatatcatctactattatgagaagacagatgctagatgttgcgacagattt

SEQ ID NO: 78770 - DNA, 522 bp, Arabidopsis thaliana landsberg
ttgttattatggtgatttgtatgatttcgtttggcattaaagagaataacaatattatcattaagtttctgcttcttataaactttgtttgttgacaaatgtaccatcttaagattctcaacaaattatttaggatttagttgaggtttctcttcttgaaacccaatattcttaaagaaatggttattaaggagttcatcatcaaaactagttcatgctcacgttgaagtgtacatgtataaacaaatatttttggtttataatgtacttgatttagctggttgatataatttatatgtctttttaagaagaaaaaaaatcatgaaatatgttacatgtttgaaatatggcccagctgaggccgaaccatccgaggcgtgaaaggactcaaggagcatgtgattttgttgcagtagaccgtctgctgaaatatcatgtgaaataggcccttatgttgtaaaaaccgaaaaatacgcccatactaattaggcccattatgaagatataaaggtaagacatttt

SEQ ID NO: 78771 - DNA, 447 bp, Arabidopsis thaliana landsberg
cttacttgcatctgccgctgttgcaacaatttacattatcaaacgaacatgttattaaaaaggatcggatgctctaagccctaacttctttccagatggaacaataggggcctgcataaagttccaattttctttaaaaaatatctatttaacatgaatttatgaataaaaagtccttcgatgctattctacttagcttaaccatggattttgtaggtttaccagatgatgccaaattttgaaaataaacaatcaactaattatatgacccacctatacatctaggtctcttaccccactgcgattaactaaacaatacatcaactaaaacgacacatgctaaataatacctgaaattttctttctaccctggaactcattgcaaaagatgaggaatattgcatcaccacggattggatacacccatgaataatcggagcacattgc

SEQ ID NO: 78772 - DNA, 564 bp, Arabidopsis thaliana landsberg
  unsure (1)..(564): unsure at all n locations
attcaattctctacttaaacgatacaattcaatattctgcaaactgatggataagaaaagtccttgaataagtctgatgaaagatataatgttgtagttgggacagcataggctgatgttgccaaatataagctagagcatatgcttgtcgatctatgcccgtaagtaaaagattagagaaatcaatctctatagttctactattgtcttgctgtgctggaatagcttgatagaaaattcaaaatatctgctaagatcagcctatatgaaagcttggactatgatgtcccgaaaaattcaattctctctacttaaacgatacaattcaatattctgcaaactaatggagatatgatattcaatactctgcaaattgatggagcataaaggttctttagtaggacttatatttaaagttagtttgttgtggctggggcagcataataatattcaatgttctgctcgtaaggattgtctaaagacaccccaagaatgggaaatacaaagntctgccgaatctcaactgaatacggatgagactatacgttaaaactctgcatacta

SEQ ID NO: 78773 - DNA, 616 bp, Arabidopsis thaliana landsberg
  unsure (1)..(616): unsure at all n locations
aggttagtccaaacttcaatacactatacataatatgtgatgcaacatttcattaatcgttgattcattctgacgcaatcatctacaagtaattctgagaagaggtgtacactactttttttatctgtacaacgaagtatgtgatttgtcttagctacgtaagtgggtttgtctttattttgtgccaaaacttcgtcagaacattgagttttaatagtgtcacataaaatttccatacattaataattagatatccattgtgtgtttcttaaagtgatgttaaactttattatgcacgttttatgagaagtacttagttatgcaaaattttatgttttggtaacaacaaatgatcgtttttagttgttacccttgttttttactaagaaattctatatcttaattaattccctaaacagtttgagcagtgaatcaaaataagttgtattagtttgtttttgtccagttctcatggttattatattgataaagcaataatgataagtatatataagacattccatagattttcttgatatatgcattgngtatcaaaacactaattacacggaatgaatatatgggtcatgcataaactataggaaaactgcatatg

SEQ ID NO: 78774 - DNA, 552 bp, Arabidopsis thaliana landsberg
  unsure (1)..(552): unsure at all n locations
ttgtggcttacaccttaatgagcatacgccagnccattacggctcgttaatcggcgccatngccggngctgntgcaccggtagtgggctactgcgccgtgaccaatcagcttgatctagcggctcttattctgtttttaattttactgttctggcaaatgccgcattttnnnnnnnnnnnnnnnnnnnnnnnnnnnnncttttcagcggcctgtattccggtgctgcccatcattaaagacctgcgctataccaaaatcagcatgctggtttacgtgggcttatttacactggctgctatcatgccggccctcttagggtatgccggttggatttatgggatagcggccttaattttaggcttgtattggctttatattgccatacaaggattcaagaccgccgatgatcaaaaatggtctcgtaagatgtttggatcttcgattttaatcattaccctcttgtcggtaatgatgcttgtttaaacttactgcctcctgaagtttatatatcgataatttcagcttaaggaggcttagtggttaattcaatg

SEQ ID NO: 78775 - DNA, 506 bp, Arabidopsis thaliana landsberg
  unsure (1)..(506): unsure at all n locations
ataattagaataacaccctcatattttttagaaagtgcgttagttgataaaggcggggttttgactttccgatttatttggccgccaaccttattttttttgttcttcctaaattccctttctccgaaactcctttcattgattacatcatcttcatcatccttcgttttttctctatcgatctaccagattctttnnnnnnnnnnnnnnnnnnnnnnnnnnnnnnnnnnntggaaggatttaatcggataaaagagaagagactgaatcaccacgggagaagagatcggtaaatcggaaaatcggagatgatggggatttctttcgccgccaaactccgtttccgatctcgatttcgaacttcttcaatcgattcttattgcttcgctcgtgaggctttctccgattgtatctcctccgtccatttcttcttcttataacctttatctttgtagtaacctccgnacacttcagctttctttcttttcatcttcaatctcacctta

SEQ ID NO: 78776 - DNA, 298 bp, Arabidopsis thaliana landsberg
  unsure (1)..(298): unsure at all n locations
gaacttaaaccgcaagcnnancccaaaagccnaaggggnnggtgcaggccggaacccccaaagacaaaaaccgagagggacgaggggcaaaccaacaaagcaangaaaggcaagaaaaacgcgggcgagcgaaaggaagccaaacaggacgggaagacaggggaaggacggaggaaaagaaccaaaaccccaacccaacccaaaaagccaaagaagggacacccgggcggaagagacaaggacaaagacccacagggacgcgggcaaaaccaccaaagcnnggagaagcaggaagaac

SEQ ID NO: 78777 - DNA, 489 bp, Arabidopsis thaliana landsberg
cccacgtgtgcacaagcgcacataacgcgtaccatagtgacttcatttgtctttgattaacccactctcaccatctgatcgaaaatttccaacgctgtgttatattgcacctctttttacatagccgtcgagcatagaactccaagtcacaacatctgtctcactcaattgatcaaacaccagtcttgctgaaacaacatccccgctcttggcatacgcatctaaaatagagttccaagtaaccaagttcttatgaggcatttcatggaacaacatgcgcgcagaagcttggtgctcggaacgaaccatacatatgaataagagtattacatatgaacaaatcccactcaagcccagatttaaccacggagcaatgcaaagacccaccacgttttctgttcgagagactagaacttgacttcataagaaacgggtaagtcatatgatcaggttataacccgaacctcaacatgtggatatagacgctga

SEQ ID NO: 78778 - DNA, 539 bp, Arabidopsis thaliana landsberg
ggctcccaccatggctttaccgacgccggaggcggccacggggtaggcattgtgcaggctttgcattttggccaccacttcggtggcatcgacggcggcagcgcgcacggtgaaatcactggaaacaaaacgttgaactttggccatgacataatttatcaaatcacttgggttgactcaactattaagctaagctctccgcatgcgcttcgttcttttccggcacgcccacaaaggcctccttcctttcgaagatcccgagctcagcctccccggcttcgaacaggcggtgcgtctccctggcctgctgaaaagcccgccggacaccgctttgccgcgcccgacccgcctgatggtttcgccccgccggcgtgcctcccagacattttatccgctggcgaaggagctgcaactgcccctgaccgtgcaggcggaactcgatcaacggcagaacaccgagagcggcgccgaattccgccggcgcgtgcaggaatacctgcagcgcctgccgcgggaatccgcgccccatgaggtgatct

SEQ ID NO: 78779 - DNA, 586 bp, Arabidopsis thaliana landsberg
agtcgttcgtatcttccctcgaatctctgatcttcatcttctcgtttcagagagagagagagactttctatatgtttgtacttaagtagtctttcatacaaagacgtttgagctgacgtgtagtgtaaacgacaagcaaaacgtaaactccaaatttacgcgtctcttctacattctcacagtatagaatctctctgaggcatttcgtcggggaaaagttaaaccttttgaaaatcccacgagctctgtccaaagatttggttctttaagtgattagtatacacaatttgtaactaaggaacctgaaccgttgaggaatgacgcgactcaccatctcctaaaaactcactctttaactatggaaatatggtgttgctctctctcgcatatcgtttggtagacgaaaggtcaaaacttttggtgttactgttagagtttgtgtgggtcaattgtcagaaccaaaaagccattgagtttattgtaaactcatgagtactataattacattgtctttagttatgctgtgtttgtaagtcaatcaagtttaactgtacatagatgcattgtttcagcaacgagacacgag

SEQ ID NO: 78780 - DNA, 473 bp, Arabidopsis thaliana landsberg
gcataaaccccaaatcacgaaaacgcccgaaaacgcacttaaaggacaagccttgtggacttttaaaaggcaatggaaaagggccaacgacctgcttatgtagacggagggctgtcctggggctttacgaaaagggatcacatgccgatttcggacagacggtcacaaacctatggaggcctcacggtctaaccgaaatgaaaaaggttaaacataaccaagggatgcaccgcgaggccttacagagaggtgacccatgctaacactactgtaggccaaccacgctaaaacgactatcgctgaagggatccgaagcattagagctggaatgaacccatccattaacatatgcaatgacaccattcatatgtttttgtcgaagacatgatttaccattcgtcgtgagtaccacacgaaacgtagggcaaccctaccaacctttaacgagcgatgacccatgtaaaaattacgaa

SEQ ID NO: 78781 - DNA, 554 bp, Arabidopsis thaliana landsberg
  unsure (1)..(554): unsure at all n locations
catgcgcaacggaggcggcattagcatacgtaccggcggttgtagtgattacggattacctgtaacagggcagggtcccggccagcccggcgtagctaccaccatagcaggcggactgaacttcaatgatctctggaacgagaaaaaaacggatttcaatgccagcgccatggccagtgatattgatctccgcaccaaccgcagcaccaacaggcgcaatgtattacccggtgataatttcacctaccaatccaacagcaattccgcgaacaggaatgannnnnnnnnnnnnnnnnnnnnnnnnnnnnnnnnnnnnnnnnnntccgcttcgctgcggtttgttccgcaacttacattccagcagtccgatacaaaatcactcaataactacaaatcggtagatgccaacggagcaacattgagtgatggggaaacgaataacaacacccattnnnnnnnnnnnnnnnnnnnnnnnnntgcacagttcccgaaaaggctggccaaaaaaggcaggaccatatcgtccaaccttagccttatatacaatgacagca

SEQ ID NO: 78782 - DNA, 543 bp, Arabidopsis thaliana landsberg
  unsure (1)..(543): unsure at all n locations
accactgctgaaagcaggggtannnnnnnnnnnnnnnnnnnnnnnnnnnnnnnnnnnnnnnnnnnnnnnnnnnnnnnnnntgttgctaacaacagaatgtgttatcgctgacaagccagaacctaagactgctgctccggcaatgcctgatccttcaatgggaggaatgggttactaatattataagtttagataatattaatagacaagtagctattggccgctgttatcttttggataatagcggccattttattggcgggtaggtctaaatttaccgtgctactggtccaggcctgcctccatttttccttaggtcattagtatcttgcgctgtatccgcaagtctgcacaataaacaaattacaatcagcgtttttataatcaacagccagcacacaggcgtccccattgcaatgcttctatttagcccattaacgaccgttaagtggaaaggaaagaaagccttgcaattaggacaagcgaatgatgtgctgttatttgcatcaataaacatttattaaaataggcttattttaaaaa

SEQ ID NO: 78783 - DNA, 241 bp, Arabidopsis thaliana landsberg
tagaacaagcatcatggatctgttaccaccactgtcagagcgagataaagagatgctctctatagctgtcttctcaattggccaagagacgctgaagagcggctacatcagccaactcagaagtggcaccttcaatatgtcaactcgtgaaagcaagttgcccgtcgccgtgaagatactgacactgcccagtggacgacgtgacccctttctgggccaaatactcggagatctacaccta

SEQ ID NO: 78784 - DNA, 439 bp, Arabidopsis thaliana landsberg
cattcactacactcgaacttggaataaagaaaagacaatgtatcttttctttcaaccagtatacttgagctaagcaaaagtaattaaaagagtttcacttgttaggttaaggttttataaagtaatcaaagagtaattatttcacaactcataaatgggtttcgtcaaagtaaaatagatagctagaggtggattggtctttagtgtttaacagccaaacttgatttgctgtcattaattaattaacgatttggatgcttcacatttgcttaatccaaccttacgttgtttccaacaccacctctgattattaaaacaaaataaaatatagtcgaatatgtagtggtccttcaatgtagttttttttaccaacaaatgttaacccaaattttataaaattattacaaaacttttctactattgactcattgtagaaatt

SEQ ID NO: 78785 - DNA, 559 bp, Arabidopsis thaliana landsberg
cttgaagatggtacggtaacccttggagtaccgagtgtattcgtacgcgattgggtctctgatatgttccagaatttgatcctgaagacccttcgtgatctcacaccccacgcccgcagcatcgaatatgtggtcatccagcgctcagatcgccgtcctgagactgctaagaagcaggtggtgaatgcatcactgccacttgatgagtattacatcaacaagaacgataatctgaacccgaaatacatcttcgataccttcgtagtcgggccgttcaatgaactcgcgcatgcggccgcgaagaccgtggtgagtaagccgggtattgcatacaatccactcttcatctatggaaagacggggcatggaaagactcatctcatacaagcagtcggtaatcagctgaagcgggtgggtaagaaggtgttctatgtgacgagtgaacgcttcactgtcgattacatgaattcgctccagaacggaacggcgaataacttcaaggataagtatcgtcaatatgacgtgctcatcatggacgatgtgcaattcctcatgaaca

SEQ ID NO: 78786 - DNA, 559 bp, Arabidopsis thaliana landsberg
  unsure (1)..(559): unsure at all n locations
acacgcctgttttagttgcaccttcatgtgcgttttaccgactgaattggcgagataagcttcggattatagtaacaaagaggagatgtgattcgagtcgattgatatagatacgaatctatttgttacaatagtaaaaaaaaatataaaaatatttcattttcaagaaataatgtcataagaagtcaaaggaagatattgtcattatggttagtcaaataaaaaaattgtaagccagcagttacgttcatacctgctttccgttgacttttataataactacactagtcttttgaaatactccattacctaattgcatttgttccaaaaatataccactactagtcttaacaaattgtaattagactaggaaataatttttatttgaccaaaattatattaagaaatttggatttttcttaataataatcagttgatagtaagattttatggattggaataattgatttcctttccaaaaataaacaatcatgagatcctttcataattantttacactcaagaattctttctattaggggagaaaacaatanaaaat

SEQ ID NO: 78787 - DNA, 602 bp, Arabidopsis thaliana landsberg
catcaagctatttttttctaacatttattttctcattttcttacaaagtgagtattttattagctatttaattagttttgagaaattttatttttgtgttcctaaaacatatttttctcctttataattttctatactaatttcgatacaaaataatgactcttttgaaagaataaaattttctatgtgtatttgagattttgatataatcgcattttcttttgaacgacaagaaaataatgttggaaataaaaaacagaagtaacagagccaattaatgaatgagttagggaaggagaagcagagcaatcggcgcattaatggcgaaaaacacatgccattaattctccttcttccccactcatttattgctcctctctcttatctctctctctgactctctctttcttttttttgtgtgctacgggcaattcagaaacattgatttcatgtgaggtcgtaaaaatcaagaaagtcagatttacacgaccaacatacagaaacccgtgacctgatttgattctacccacttctctaatctctctattatcaaagacgtaacatgggtttatctatagacacaccttcaatcatggggttga

SEQ ID NO: 78788 - DNA, 219 bp, Arabidopsis thaliana landsberg
tgttgttgttttgttcttagatatggtctcatgtgttctaggctgaatttgtacttctgatcctcatggtctccaaagtgctgatatatatatcagcacaggacccctgtggaagccagcttgtaggtaggacctgaaaatcagctgggatgtaaacatgagcctccacagatgtcaggtctcagccctgaagtgtccttcgtgtgtgtgtgtgtgtgt

SEQ ID NO: 78789 - DNA, 295 bp, Arabidopsis thaliana landsberg
  unsure (1)..(295): unsure at all n locations
ttttatttttttattttttggttttctgaggatttaacttattatctgctgctctatatagtatcttggataggggtattttggaaccccattttcttttaacggttaaatttttggggaatggcccatttttaagggagtaaggctatttttgataaaatagcggttcattcttagagaaaagacttgttccactcatgtttataacattcgtataatttttagccggaatatgctatnnnnnnnnnnnnnnnnnnnnnnnnnnnnnnnnnnnttttccaaatgtatcatttca

SEQ ID NO: 78790 - DNA, 467 bp, Arabidopsis thaliana landsberg
  unsure (1)..(467): unsure at all n locations
gaatgtgcggacacatattcacattcatccaagaacctgggtgtcccactttttgggaannnnnnnnnnnnnnnnnnnnnnnnnnnnnnntgccagaccaccttggaaaggcactgtcctcacggtcgactactatgaacgataatcgcatgacagactctcgtatgatgctcttatatcatgggccatgcacctgatggaatcaactatacactagtaaatgataatgaataaaagactaattacgtcaacacaccggaaccgaccgaagtgcgccgagttgtagcatagatggtaactaatgcattagagctattggacaaagagcaaccgccacattggcacatggatatatccgtaaaccagatgtatgtacttagaccatccatgtggaacaatagaagagaataagcagttggaatctacagatgtgtcagacacgatcttcataaacggatcacatggaa

SEQ ID NO: 78791 - DNA, 277 bp, Arabidopsis thaliana landsberg
cgccggccgccaggccgtactcggtggcgttcgcgcgggcgacggcatctttccgctctcccgggcgagcatcgcttgtccggttcgtcgcggcgctcggtcatgcggtcggccatctcgaagagagcctgcgccccgcagctcccggttccgtgaccacgcggtggtctcgaacgcccgccgggcagccgcgatggccgccttggcgtcttcgatgccggcgtcggccaacgcgccgagggatttgcctgtcgccgggttgaccggcgagcgccgc

SEQ ID NO: 78792 - DNA, 550 bp, Arabidopsis thaliana landsberg
  unsure (1)..(550): unsure at all n locations
tggaaagagactgcatctacatactaaaatacatttagatatatgaaaagagagaggattataggttgattattcttgttttttttttattagaaactgaaacccaatagcaatgtcacttgccattaagcatttcacattagttatataaaccgacaattaacaaaacttgccaaattttaggcaagaaaagacataaaatatacgtggacatcacatgtttgacacatcggagttttgttgttatggtcgtttcgtttgcatgtaaaatgtgtctttctcatttaattttcgtgctctgctcactttaaactataagtctataatataatgattctgtttactttattctaccattctcatggtattatatagcagaagaaaatctattttggtcaagtaaaatgtatacgatacaatacatttttggtataacaacgttaattatttccaactatgtatttttattttctcgcgagtaaagtgtcgaaaaaagaaatcagtttcagttttttttttggttcttacactttntctgaaaacaaaatac

SEQ ID NO: 78793 - DNA, 262 bp, Arabidopsis thaliana landsberg
tatggacttcggctaaaccattaatgcttacccaagctttacgaagctagtttagtgtcttgcacccgggcgtaattagacgtccaaggtgggacttgctgaaacaccctaaaccacacgcgccccatgctagtctaagcagagcatactcgagcgatgattcagagtccaggactcttgtcgtctagggcgagacaatcaaccctttgagaaacaagaacaagcctgatttgggtcttccacaaccacatgactacgggtc

SEQ ID NO: 78794 - DNA, 322 bp, Arabidopsis thaliana landsberg
ctcattttataatcgtccatacctcttgaggcaccaccaccaaaggcataacccagcatgatttcatgtccgcctttgatatattgttttacagatgagatcgacatatcgtaggtataaccaacaatcaggcttttgttcacctgcacaccggcagtaaaaccaaccgatgactggtggcggaaagaaacacctccgcgaacgaaatcgttccattcaaaaatggcattgacatcaaactgtatgggcgcaccgttgatataacggaccatttcattgggcaatgccgattctttggcaaattcgttgatcattactttgt

SEQ ID NO: 78795 - DNA, 101 bp, Arabidopsis thaliana landsberg
aaaacctaaagtccctcacgttgtatttgtttggaggatcttccgcgttactaccgctgaacagaatttaccggaaccgtctccgttgacggagaaagaga

SEQ ID NO: 78796 - DNA, 132 bp, Arabidopsis thaliana landsberg
ttattctaccgtaccgaccctatacactctgaccaatgctacggaaatggccacaccgaattggcttgtgctcatgtttgagatgcaaacgttatgaactttgaagactgagaacactatgggggagggggt

SEQ ID NO: 78797 - DNA, 417 bp, Arabidopsis thaliana landsberg
tgcattatattttattttgcgtatatctatataataaacccggccctgggaccattaaactaatgaaaataaaggtatctacctttttcatagagaaatacactaaaatccattcttgacaacataactaatctgcacattattactctcttatgactttagcttaaacaattgcttatgtgaaatatgattttcattgcttgacactcaagtgcatgcaacacattacgtgctatatctaaaatctgaaatatttaaaacacatgatgtctagaattgctatccctaatgactagtgaacatacctactataatcacaaaaagtgatatggctatacatatatatttaagcactatgactttagctactgccatgggatgtgacattgtctaaagatagattactgctcctaaatt

SEQ ID NO: 78798 - DNA, 217 bp, Arabidopsis thaliana landsberg
cgatatcttaaatccaggaccgtctcgttaaaatggacattaaaaacgttatttgctactttgtttacgtcttatgtgacttacttgaatcaaaactctcacatgatcaaatacatgagaactaaaacaaaattactcttgttctataagcatatgaatatctaaaaatcgtgacctcgttttggataacggaggtggtgaagcagatgcgagagac

SEQ ID NO: 78799 - DNA, 325 bp, Arabidopsis thaliana landsberg
ctgtgaatttattaatctctatctctgtatttggacttaaaagtgcatccgaatcccttttcttttctgactgatgaaatctgttactgctggcgtgtcaatggtgttctcacccaacctaacctggtcggggacgctaggaatgaatgtgaccttaaattgcgtcattctaatcatgaggcttggcggaaccactgtatctactgttgtcaccaccgcgaggatatcaccctacgagacgagagctctgtagagctcttcggcttttatctggtagctgggcactcttaataatgcttgaaccataatgaacagaagaccattc

SEQ ID NO: 78800 - DNA, 574 bp, Arabidopsis thaliana landsberg
  unsure (1)..(574): unsure at all n locations
acaatcagaaacagcaaatnggttaagacctacatgagttgtaacagaaaacctgattttcgagctttagcaatctcgtccattgggtgagcactcatcacatgaacaacatagagaggcgtgttaataaaacgagccaaacgaattgctctagcagtggcctctccctcgagctgacattgtcaaacaaggatcttgttttagtagcttcaacaaagctttacagaggcaagagcagatataggagaaaagaaaaaatctaggaggcagcataataaaatggaaaatgcttgacgcaaattaccacaggaggccttgaaagagcatgaccctctggacctgtaatgcccagttcaatcattcttttctgtccttcgaatactgcatctccattttcagcatgaaccatggccaaggcaccgagggatttgcatcttttaagtccttgtaggagtaggtcatcagctaccataagagatcctttatacgctaggaaaaacttgaagagttgatacctacaaaattagagatatatgcactcacgttcattctagcagggaaactaaagggatag

SEQ ID NO: 78801 - DNA, 565 bp, Arabidopsis thaliana landsberg
cgcgcgtgaaggtgaccgagctggacgtggacaactacctgcgcgagcagtaaggcaacaccgccgacccggcgctcaccgaggtgaacgtgcagcacattctggtggcgctgcccgaaaacgccacgcaggcgcaggtggccgcggctcaggccagggcgcaggcgctgctggaacgcgcccgcgccggcgaggacttcggcaagctggcgcgcgagaactccgacgccgcgggcgcggcgcagaacagcggcgtgatcggcatgcgcacggccgaccgcctgccgccgctgttcgtggacgccacgcgcgacctggccgccggcggcatcagcggcgtgctgcgctcggcggccggcttccacatcgtcaaggtgctggagaagcaccgcgtcggctcggccggaatgaccgtcacgcagacgcacgcgcgccacatcctgctgcgcccgggccccaacctgagcgagggccaggcggtgcagcgcctcgccgactacaagcgccgcatcgaggccgggcaggccgacttcgccagctcgccaagagtactcgcaggacggca

SEQ ID NO: 78802 - DNA, 512 bp, Arabidopsis thaliana landsberg
gtttttacctcaacaagggttgataaatccataaatacacaagaagagagcttttactttcactgtggtgatgaacaaaacaaccactgcaaagcagacgaaggcccgctaccattagggagtgatggaatttacatgtgctagggtccattgacattctgatgtttattaggcttttcatcagtccatcattgttgatccggccattttttccctcaaaggctctaaattcatgttgcatctacaccaacatagcaaatgggattcaaacatattttagctaaattttgtgtaaaaagtacttgaataaaataccatgtatattgttttcaaattgtgttctgagcatcgtatgtttgacaccaaaatgcatacacgtctaacgtttttaattaaagtgcaacttttagataaaacgttgtcgtcttcttgttcagattaagatgaaaattgcataacgcgatgcaattcagtagttacggttgctaagaaaaaataactgcagtgaggat

SEQ ID NO: 78803 - DNA, 281 bp, Arabidopsis thaliana landsberg
  unsure (1)..(281): unsure at all n locations
aaaacaaacccaaaaaaataaagctaacagaagaaacaatgcatttatcccagggcncaccaaacaaccgaggggattgaggaaacnngaccanccgcgcccaaaacacaggaaaagggacaaggagaaccaacgggacgggcccagacgccnaggcaaaagaccaaaacggcccncaaagaacaggggagccagagcccgaaccccagcagccgcgaccgggacaacgacaagaccaaaccaaagggcagcaaacacggngaaaaaagccgaagccgcgc

SEQ ID NO: 78804 - DNA, 565 bp, Arabidopsis thaliana landsberg
aatggaagcggaggttgattgggaaattgagagagaagttgattgtgaaatggagggagttgcttattgggaattgctggatgcgatgtcacaaattgtagatgtaataaaccggaatgctcgtaaagagagggtccgttttcacttggggctcaaataacatcgatgctatcaacacctgaaatgtcaaacacaaatgtaaaattcaattggccaccaacacacatccaaacacattaatgaaatcaatgcaaaactcaccacgaacgtagtcgcctcgctgcgtccattgcgtttgctggtgattgaattgttgagtgactgcaggaacggtgaatcgatttcattttggcacaattggggaacagggcaggcacctgtaatatgacaatgaaatgagagtattttggtgtcggaggttcataagcagtcacatgatccttctcctcaccattttcaaaacagcaagtgtttgcatcatcaggacaaattataccactgtcaccaggacacgagggtcgagctgtcctgttcgcatcctggtgcgccaacgtttgaggtgaca

SEQ ID NO: 78805 - DNA, 552 bp, Arabidopsis thaliana landsberg
aattcttaaattcagtttcttgttcgtttgtttcgataccaactgttttttgtgtgtgtcacgataaatttaatttttgtttagagagatctaaaaatgtgtcctgcttcaaagaaccaaggctagcttgtcttatgttacaaaggctttaataaaattaaaagtaagagttgcgtaaacaattggaggaatcttcaggttagttgcgattaaatatttctcgtttttctcttccttaaaagacaaaaaatgatataacaaaacagaagtatttagttttgattgccaaggcagcaaattctgtgactgtaaatcaaccgtttgaaagacatcaattgatttctattgtgtgatttcatacagacattctgtgatgagtaataacaattaataaaaaaattgacattcaaatatcatttcacgacagtagaaattgaaaacgtgggtaaacttttgactattgatgtacattctcaatcaagaactagtgttatatttaaagcagtctcgcatgaaatcagtgtcacttgactcttcattaacatattgaca

SEQ ID NO: 78806 - DNA, 575 bp, Arabidopsis thaliana landsberg
accgatcaaaaaacaaggccaccaaattgtggaacagtcaaagaagctggagatcatgatgtaagaactgcaccaccgggtgaagaataacctgcagatcgtaagcagcctcctgagcctgcaaacgtataaagtgcaggatgaggaagccgtactggtattgaaagaaagccagcaacgggtacaggccatgagctttattcaccaacgactgtacaaaacagaatccctgactgcggtgaacatgaaggaataccttaccgatctggccgaatcgctggtagcatcctatggctataaccgcgatgatttcgatcttcacattacagtggataaagaaatgctcgacattgacaaggcattgcccatagggcttatcatcaatgaactggtgaccaacgccctgaaatatgcgtacagcgatattcttcgcccttcattacacattaccattaccgaagaagacacgaaactggtttgcaccataaaagacaacggaattggcatagatgaacaacaatggaaacaaaagaaaaactcgtttggtaagcaattgatacggccctgtgcaaaca

SEQ ID NO: 78807 - DNA, 454 bp, Arabidopsis thaliana landsberg
  unsure (1)..(454): unsure at all n locations
nnnnnnnnnnnnnnnnnnnnnnnnnnnnnnnnnnnnnnnnnnnnnnnnnnnnnnnnnnnnnnnnnnnnnnnnnnnnnnnnnnnnnnnnnnnnnnnnnnnnnnnnnnnnnnnnnnnnnnnnnnnnnnnnnnnnnnnnnnnnnnnnnnnnnnnnnnnnnnnnnnnnnnnnnnnnnnnnnnnnnnnnnnnnnnnnnnnnnnnnnnnnnnnnnnnnnnnnnnnnnnnnnnnnnnnnnnnnnnnnnnnnnnnnnnnnctcgtagaaacaaggatagctctcctgattcggtcaactctttaaatacccttcggcctacagtgagaagctcacaaggatgcaatcttcgtgaatcttactttactatactcataggtcacagaatggactccctacgagaacatctgtagttcaccatgcctagaaccacgagaaaacggtgttttgctgatattagtac

SEQ ID NO: 78808 - DNA, 506 bp, Arabidopsis thaliana landsberg
cgccctggccgcgggtctgcaacggctgggtcactatgttcttcccatgctcggcaagcaggctgctgagggagccgggcgcgcccggcgcgttgcggtgcacgtgcaggatgcgcgccgcgcccgatgtttcgacataggggatttccgggaaattcaccgcgcccttggttgcgccgcccagggcgaagcgcacgagcttctcggcgaccttgcggccgatgttctcctgggattcctgcgtgctgccgccgatatgcggcgtgagaatcacgttgtgcatgccgatgagcgggctggccagcggttcggcgacgctcttgggttcgacggcgaacacgttcagcgccgcaccggacaggtgcacggtttccagggcgtcgcgcaacgcattgatgtcgactacggtccccggagatgcattgatgagaatcgagccctgcttcattgccgcgatggctgtggcattcatgatgttccggttgctcttgccgcccggacatgcg

SEQ ID NO: 78809 - DNA, 489 bp, Arabidopsis thaliana landsberg
atgactcttgtgatgtggtcgaggccaaggcccattttttttctaaaacacggcccatatgaagtatgtgatctagaccgttgatttgtaatgggactatataaaaataaaaacgatgatcttgagggccccttcttccatctttgtaaggttcttcgtgcagaggataaggttagctgtggttttttaatcatatttttctacctttgtagggtttcctcacttttttttatccactgttctttagttttcaatctgtcaaattcaaacagataacatttttcgtcaaaagaatcagtaaaaactaaacattgcgactatatcctacttgaatcaattcttcggctgattccgaagttttgtgacattcagatattctagggttttgtggtaaatggaatctaatcaccaaggcaacgcgatacaagtgattgaccaagtaacaaccatgacccatctgtctgacccgaattcgaaaaccaaaccggg

SEQ ID NO: 78810 - DNA, 454 bp, Arabidopsis thaliana landsberg
  unsure (1)..(454): unsure at all n locations
gcctcacgggctaaaagntatggagncataattaaattactaaaacaaaaaaggnnaaacataagagaggcgtgcaatacgagctatagagcacactccgctccagcatggnaatnnnnnnnnnnnnnnnnnnnnnnnnnnnnnnnnnnnnnnnnnnnnnnnnnnnnnnnnnnnnnnnnnnnnnnnnnnnnnnnnnnnnnnnnnnnnnnnnnnnnnnnnnnnnnnnnnnnnnnnnnnnnnnnnnnnnnnnnnnnnnnnnnnnnnnnnnnnnnnnnnnnnnnnnnnnnnnnnnnnnnnnnnnnnnnnnnnnnnnnnnnnnnnnnnnnnnnnnnnnnnnnnnnnnnnnnnnnnnnnnnnnnnnnnnnnnnnnnnnnnnnnnnnnnnnnnnnnnnnnnnnnnnnnnnnnnnnnnnnnnnnnnnnnnnnnnnnnnnnnnnnnnnnnnnnnnnnnnnnn

SEQ ID NO: 78811 - DNA, 312 bp, Arabidopsis thaliana landsberg
gcaaacttcccactcaaattttttatttattcgcacatgagtaatagtacgcgttaagagaaaccatggttcatacgacacgcttaccatatcattcttatttggtggaaacctaaacgttcatatagtgatcatggtgtagataccgggttttataccctcgaatgatatctaacaccctatgctctataagctcgttatcgaatgtacagaatccgccggccatgtttaacccgcatccgatcccgagtcctaaaggagtcgaggtgcatctgggtctgtgcagcaaggacatagcgtatagaatgtggt

SEQ ID NO: 78812 - DNA, 561 bp, Arabidopsis thaliana landsberg
  unsure (1)..(561): unsure at all n locations
aaaggcctcagcctaccttaccttatcaagtggttgaaaatgtangactatggcgacagcctggaaaaggagagtgcatggataaactgccgactggcaacactgagcctcgactacatgaaatctaattatgaaggtgagatacaggatttcgaaccgttccggctattgaaagaccggtgtgagaaaatcgtctaaatggctgattacaaactgcttcattccgaagacaacaggtcagagagccacgtgcgcaaataccgaaagatgctattggaaattattgaagtaaaaagggaggaaattctgaaactgagacaggagagaacttgctccaacgagctcatcaagaccaaggaacatgaactcgatctcgaagaagcatggctccgcaagttaccttaatgtcaggtcaattccactccactttcactacgttatcccggaggtcgatggaggtgaattactcgtttttttggcgtgtgagcgacactttaccattttggaccttcgatacctgctgagcgattacgtacttttggttttttttgcgataaataa

SEQ ID NO: 78813 - DNA, 503 bp, Arabidopsis thaliana landsberg
  unsure (1)..(503): unsure at all n locations
cattggccagctgatcgtgaccatcgacgcagttgacccctgcttatgtgtttatcccctttatgaatgggaacagatagaagccaagttgcgagcgttgccgtcnnnnnnnnnnnnnnnnnnnnnnnnnnnnnnnnnnnngatcggcaatgcggtggacctggagctcgacggcagtggccgtttcctggtaccgccccgtctgcgcgagtacgccaagctcgacaagaaggcgatgctggtggggcnnnnnnnnnnnnnnnnnnnnnnnnnnnnggaagcctggaacgcagtttcggcagccgacctcgcagctatccaacaaccgggcgcgatgcccgacgatatgcgtgacctgatcctgtgaccatagatagcggcttcaaccacatcaccgttctgctcgacgaagctgtcgaggcattggccctgcgcgccgacggttgctatctggacggcaccttcggacgtggcgggcacagtcggctgatcctcagtaaact

SEQ ID NO: 78814 - DNA, 552 bp, Arabidopsis thaliana landsberg
ctcgattgcatagaacgacgaaaagcacaattatattctatcaaacgcccaatactgaaaaacaaatctagaaatctcagaaggaagcttcagaaattaaccaacagaaacctagaatcaactaagagcgaagaagggaaattgcaaaaggcaggaagacctaggttacaacaattcaatcggctcggaaacaaagcaaaaattatcaaattaagatccatagaagaagaaaaaccgaattagacaaaaaaaacagattacgatcttgttacctgcgtcgattccaggtcaaaagtcgtcggaacgatgtcgagtaaaacggaaacaggaggccaacgatcggagaggattgaatcgtaatcagaaaagtcgattgttgtgcatctaatatataacacgtaaaggaggcccatatttgtttgttgttttcagttggacacataattttcttgtatttacataaagagcccgaatgtttctaaaataaatcccccccccatatttgtttgtatttacacatttttctagaccgcatgattaatttcctatgct

SEQ ID NO: 78815 - DNA, 368 bp, Arabidopsis thaliana landsberg
aacagcatgggaataatgcttgacgatgcaagaaattatgaatgatggcctgaaaagtagactggaaggcactgggaattagttttttaattccacgactgcacgggaacagcgcgaactttactggtggctatgtgtgacgaactcgtaagatggaaattcctctgcgcaggaagaacttagcaaagtgaagaatttgcttcatcttaaggaagtgagacgcgtgtgccgcacaagaagaacatgcgccagtgcacactaatcgatcggaacttgaggaggagatctaggatctgcaggagatcgatgcagtagcgcacgctgacagcgtgaaactataagctagctaggtggagaaagaagatgaa

SEQ ID NO: 78816 - DNA, 430 bp, Arabidopsis thaliana landsberg
  unsure (1)..(430): unsure at all n locations
ccacgaactgacccgtatcaataaatccattttcgacgtttcagttcttcaataacccaacactgggggattgttgtgaaaaagcaaaaaagagcggagcaaaagttcatttcatcgggctcgtttcgaatggtggtgcacacagctgccaggagcatttgcatgcgtcgctggacatggccaaaaagcatgaattaacccatgtatgggttcatgcattcacagatggccgagattgagatccgaaaagcggcctgagttttatccaaaagctggaagaacatatgaagcaatctaccggcaaaattgcgtctatcgatgggagatattatgctatggaccgcgacaannnnnnnnnnnnnnnnnnnnnagcttacgatgccatggtaaaaggaatcgggacaccgatctccaatgccgcataggcaat

SEQ ID NO: 78817 - DNA, 585 bp, Arabidopsis thaliana landsberg
  unsure (1)..(585): unsure at all n locations
aagaggcaagaccaaaacatgagacaaggtaagaaaagtgcatcacaccgcgttttttcaatagtgggtggcaaggccacatgctgtcatttcgacaccattaagtttctgccccgttagagccaagtattcccctgaacaagaaaacacagaaaactgcttcagaaacaccaaaatatctcagttaagtatttgtataccaatcacattcaaatctaaaatttgaccatcattttactataaatatatgcatagaatatggatctagtgatcagcctaaggtgaagttcacctaaataaccaggaagccgtgaaagataataggaagctcctgcatcaggatgaaaaccaatttggacctctggatgggccaacacctgcatacgaacagttgttcagaacatcttcaccactaaacttccaaagtacaagaaaagaaacagtttcagacaaagagaaatgggctactgataattgactaaggcaacangatatttaaaatacagagaaaatggctaggaaatttaactacttttcttaagagactctaggatcttatgtagtcactgactttgctttattact

SEQ ID NO: 78818 - DNA, 532 bp, Arabidopsis thaliana landsberg
  unsure (1)..(532): unsure at all n locations
ttgcttcatcattatatactacatattttgttctccactatgggttcttcttcttcatcctaggacgctgggcatgtggtccatgtggacgtccaggataacgtcgtccaggttcgttgggaccagggtctggatagtccatcagattctcaatactatttttaatctgtattacatcatttttttcccaccaacaattactaaaatttgatttatttattttaacaaaaaaataaattaattcatttaatttaaatcatgacatgttattatatagtctataaaatatgaaaattaaacgtgttttattttattgcttaccttgtctgaggaatattgatcgatatgaatagcaccaaggtcctccttaaaccctaagaaaacaaatagagaataacaaaagaatatgcaaaattaattaataaacggngtatatatttatgtattgcgataaaatatataattaaacgttgacangaaaaataatactattaaactttatgtgtgaaatccttaagaaccagactatgac

SEQ ID NO: 78819 - DNA, 519 bp, Arabidopsis thaliana landsberg
ttcctggtcaaactggtcatctgccatccctgtttacctttctaaccggaacgttgcacttaagggccggggcgttttatatggaagtggaacgacatcatgcttgtcaattcggctaccagtaatatctggattgatggtggtacattgaacatgtttggtggtattgccttttccaacacctcgcagttcacaatgagttctggtgattttaacatctacccgcagggatttgattatctcgcgagtggatccacggtattaaattttgcatccgctaacaccaccaatgcagttacgtttacaggaggaactttaacgatcgttgacccaccttctgccggaactggaaattccctttctcttccaaaccttgctggctacgcgtataacttcgatggcggcacgatcaatttcggttatggtagcagtaataaaaacggccctgcaagtgtgggctttactgttgatggaggttgtgtatacgcactcggaaatgtcgtattaaacaacgggacc

SEQ ID NO: 78820 - DNA, 538 bp, Arabidopsis thaliana landsberg
ggctagtcgcgcttccgtagacacactcattccgcgggcagaagggattttgcttgaactggagagcgaagccggtgttgagacgttgcagtcaccgaggagcccgccaacatcgaatccaggtccaatgtcgcgagttggagaggatggaatgatgaacaacaatagtcagcgtcgtcactcgcaacctcgaccgccgactccgcagaagcagcctgcagtcaccagctatgagacgcctggtcgggccggtacctacacacccgtccccgacgacgttctggttgacaaaatgtacgaaatgctcctcgagaagaaaaaaagtaaaacctgtagcattggacgggctctagacatgtttcaaggcaagcactgaaggaagtattgagtttctagaaatggaacctgcccggagggagatcaaggttcctggcgggcgtgaccaggtatgtgggccgcttgtgaaaaggattctcagagactcagcagtgaacagatattcctcgtcgacaatttctgttgcatgcggcagttcaag

SEQ ID NO: 78821 - DNA, 477 bp, Arabidopsis thaliana landsberg
  unsure (1)..(477): unsure at all n locations
cgctggagatggcgctgctcggacaggcatccgggttttcgctttttaatttcggcgatgtcggggtggagcagagcggctttggtgtcgcggtgttcggctggttcgcggtggtgggtgcggtgactgtggtgatggccggcggtgtccggcgtcgccgcaaacccgtcccgtcggagccgcgggtcgagccgcccgcggtacagcccgacccggactccggggaagcggcgcaggatggcgaggatgcggtgatcgacgccgtcgtcgccgcgcccgacgaagcgtcgcctgtcgagccgttcggcgatcccgaagaccagatgttcacccatgacgatgtccggcccggtggcaacaactcggacccaccgcgcgtgactgactgaaccggttggcgcgggctgggggccgnaaggccaggctccccgccgtcggtgcgcactcaccccgctaggctttcgacgtgcacaaaac

SEQ ID NO: 78822 - DNA, 354 bp, Arabidopsis thaliana landsberg
tacacatgcatgcgttaacactcgtgtatatataatatgaaacaacatatcttgcatcaaaataattcataaataacttgttgatctatcataattgcttgttgcaaaactggtctattattacttaactttacaaaccatgctctcgtaaaactagattctttgttcagtccatgcatacatttctttgaatttcagataagagagtaccaaaaaaaactcaatacatgtttaacaaaaaaaaatgtatatattaattgggactttaacttatatttctaacattgaaaagaaaatgtgccatctactattagagacaatggacaaacgtctggtttatgatatttttgtaca

SEQ ID NO: 78823 - DNA, 401 bp, Arabidopsis thaliana landsberg
  unsure (1)..(401): unsure at all n locations
acgctgtgctcacacgttacacacgacgcatgatttgcctgatgcatgggcagaaccaaaatacaggtgagcgagcttctccttggatgggctcggggccannnnnnnnnnnnnnnnnnnnnnnnnnnnnnnnnnnnnnnnnnnnnnnnnnnnnnnnnnnnnnnnnnnnnnnnnnnnnnnnnnnnnnnnnnnnnnnnnnnnnnnnnnnnnnnnnnnnnnnnnnnnnnnnnnnnnnnnnnnnnnnnnnnnnnnnnnnnnnnnnnnnnnnnnnnnnnnnnnnnnnnnnnnnnnnnnnnnnnnnnnnnnnnnnnnnnnnnnnnnnnnnnnnnnnnnnnnnnnnnnnnnnnnnnnnnnnnnnnnnnnnnnnnnnnnnnnnnnnnnnnnnnnnnnnnnnnnnnntg

SEQ ID NO: 78824 - DNA, 629 bp, Arabidopsis thaliana landsberg
  unsure (1)..(629): unsure at all n locations
cccttttatacctcaaatctggtcaaaatacctcggacatttcttaccttttccgtggcggattattatctcatgtgactggnngggtctatggttaatccgatataggcgannnnnnnnnnnnnnnnnnnnnnnnnnnnnnnnnnnnnnnnnnnnnnnnnnnnnnnnnnnnnnnnnnnnnnnnnnnnnnnnnnnnnnnnnnnnnnnnnnnnnnnnnnnnnnnnnnnnnnnnnnnnnnnnnnnnnnnnnnnnnnnnnnnnnnnnnnnnnnnnnnnnnnnnnnnnnnnnnnnnnnnnnnnnnnnnnnnnnnnnnnnnnnnnnnnnnnnnnnnnnnnnnnnnnnnnnnnnnnnnnnnnnnnnnnnnnnnnnnnnnnnnnnnnnnnnnnnnnnnnnnnnnnnnnnnnnnnnnnnnnnnnnnnnnnnnnnnnnnnnnnnnnnnnnnnnnnnnnnnnnnnnnnnnnnnnnnnnnnnnnnnnnnnnnnnnnnnnnnnnnnnnnnnnnnnnnnnnnnnnnnnnnnnnnnnnnnnnnnnnnnnnnnnnnnnnnnnnnnnnnnnnnnnnnnnnnnnnnnnnnnnnnnnnnnnnnnnnnnnnnnnnnnnnnnnnnnnnnnnnnnnnnnnnnnnnnnnnn

SEQ ID NO: 78825 - DNA, 272 bp, Arabidopsis thaliana landsberg
cccgtacttaggttgggtgggcgaactccgttggaaagccaggatccttctatgctgagcggtgtgtgagcgaggagagagagtcgaccagggggaggaacaccttgatggtccgaacggctactagtctgaaggcattaaaaagaggtggcacattacgctagagtgtgaatttccaacctgactctagcaaaccaaaaagaaatcccagaatgacgataccgctactactatgcccaagagaaccagctattgagagcagatctgtatgt

SEQ ID NO: 78826 - DNA, 517 bp, Arabidopsis thaliana landsberg
ataaaatgattttctgtgaaacaatcttccaataacattatttttgcaaagtacttttagtttatcaaattacaagttaaacggcatagcgtcagatataatctaataatataaccggttgccacaatgtaccaatttgttaattgactattaatgataaaggacaaacaaaatattcgccacacaaagaggctaaatataatttgaaaattaaaaaaaatctaaatgtgtgttacagactaacgaggaaacctttttaaaaatctatatcatgactaaacatatattattgctatgatgcggcattaaacgggctgacataacaaggtgctccaaaaaaattgaagcaaaaaatcaaatcatcacaataatatatgtttagtcataaaaaaaataacggttgattaacactatcaagttttggtccaatatatataactataggttgcaaatttgaatatttgatcacttcgaattgaagacgactacacattagaatttggatataaaaaacccg

SEQ ID NO: 78827 - DNA, 499 bp, Arabidopsis thaliana landsberg
aaacgggactgtggataataaatatacgggctagctcaatttgacaaaactagaagctgttaaaatttgaaggactaaagtgttaataaaagaaaagttcactagttgtcgatctcaactttaagataattttcacccgcctccattgttaccggaatctctctctttctccgccgaacttcttcgaatcaagtttccgtttatcactctaatattgttaaagtttccactgataccacgtaagttcactgggttatctttaatcctaagtttaagcttttggggctatagttctttctttttcattgtcaattctagggttcctcgctggggtctatatgttcgctgtgttaatttagggttttcactagtccgaaacgaaattttcgtgtttcattaagcttatatttttccttactaactgcctctagtttatagatgctattttctgcagagtaagctttaggctaagttgatacctcttatatgaagcagctat

SEQ ID NO: 78828 - DNA, 239 bp, Arabidopsis thaliana landsberg
tgttgaagagttgaagaagaaaggtatcgaatttttttgctaaggaagtggatgcgcttcgtagagccaggagtttaagagttgagtcgaagcctgtgaagaaatggtctgctagggattttgtgacgctcttcttcttctctgcttcgcgtctggttcttgccatgactagactcattctctgcgacagattcttttgctcttttgttcctatgccttagccgaatcctctggtttct

SEQ ID NO: 78829 - DNA, 620 bp, Arabidopsis thaliana landsberg
  unsure (1)..(620): unsure at all n locations
taatgagtttnnttttttttaattgctaaggaacacgaacagtgaacaagaaaactggtaacggactaaggtagcacatgttaatgaaattattgtatgatgatgagtgattgatttgagtttcgaaagttgacttgtattatgttctttagtgagttctgagatgtattactttatttgacatattgtttttggagattgggtaacaaatttgaaatatgcttacacagtacagtactctgatttgtgtccttcaatatcaaagaggtgttactggttggatacgtttaaattgtttccattggatataaagtagttcagattgttaaaaactaatttatttgtaatgatttgttattcattttcattttataatccactgcataagaatgatcatagtctcttacaatccaatccaatgtaacaacgatcaagaaaaatcattaatcaatagaggatgatgaattaacaaacgtaaatagaagaaaatcaagtagttgcataagagaaaatttaataggaatttttggactgcaaagaaggaaaacagatcaaggtatatgtatgtgatctttatcaaagaacttgtgttatgggatatatggtgaggcgatgaaagc

SEQ ID NO: 78830 - DNA, 132 bp, Arabidopsis thaliana landsberg
  unsure (1)..(132): unsure at all n locations
gaaaaaggncaaggaanncntnncaatcttcccagttcttctttttacatcaaaaatcatataaaaaatgacgattgtaaatttaaaacccggctactccaaatctaaccaataaccatcacattacaaatt

SEQ ID NO: 78831 - DNA, 440 bp, Arabidopsis thaliana landsberg
aaaatctcggctcactcactcacactactcaagctatcgtttttaagattctccggcggagcgattatggcaggtgagactatcgccgatctcttcttcttcttcttcttctgattcgaatctctcgtccccattccctgatttttttgatttacattagataggatcttcttcaccgagcttgtggctggcaccgaatccgagcaagagatggggagagctcttcttgctcttctacactcctttttggctcactctctgtttaggcatcgttgttccttacaagctttacgaggtctatgcgatcatcaaatgagcatcgcctttaagtgtctgatgtatttaggagacgatgagacagagttgaagtagctattcactgttctttatctgctaaattagatcaacaaacgccatgatatgatgtctcattgtttacc

SEQ ID NO: 78832 - DNA, 399 bp, Arabidopsis thaliana landsberg
  unsure (1)..(399): unsure at all n locations
tgcccctgaggaccagcgaccccacaacttctggatgtgattgcgcgtagtttagggccagggtagacccccacgagccgccgaagaccatgtgccatttgcttacacccaaatgtgtgcgcagagcctcaatgtcggagactaagtgccaggtggtgttttcgcggaggtcggcggatggcttcgatttccctgcgccgcgctggtcgaggagcacgacacggtagatggatgggtcgaagaagatggtgctgctgctagaggtctggccgccaggaccgccgtggaggaagatcactgaggttttcatcaggacgacagaaatacgcagagtgctagggacatttcacctggcttgccgttctttttgccatattgctgataaaaagtntgtgtatg

SEQ ID NO: 78833 - DNA, 511 bp, Arabidopsis thaliana landsberg
  unsure (1)..(511): unsure at all n locations
gggactgggcatcacctaaacctttcctttactgtctgatacgctaaatcggnatgggggggggggctgtccgctcaggcggtggaccggtggacccggcggtccgccgcgggtggtagagcgacaggcaagcgaggacacgagacgttcatcaacctcctcaccggggacgaacgcctacgcattcaggcagaagagcgccgacctgctatcgacgctctcgagcatcttcgaaaaggccgcctgacccggatgcgaggccccacggcctcgcatcttccactgtcgagccgcgaacatggcgctattcgccaaggtgccgccaatgccgcgagcggaacgggcatcagatcggcgccaggnnnnnnnnnnnnnnnnnnnnnnnnnnnnnnnnnnnnnnnnnnnnnnnnnnnnnnnnnnnnnnnnnnnnnnnnnnnnnnnnnnnnnnnnnnnnnnnnngcaataggcgattggcgcgtcatgcgcaagttgggcgcggtgcggggcgcgc

SEQ ID NO: 78834 - DNA, 488 bp, Arabidopsis thaliana landsberg
tattaacgagaaggaacacaacgatccgcttattgccattttcagcaatatgaatattaccagagccatcggatgctacaccagatggaaaatccaatgaaggagttgcagtagtgaagctagctaattgactgccagttgaattcaatatcacaatacgattattgagaatctcagcaatataaatattaccagaaccatccaacgctaaggcataaggaccagataatgaaggagctgtagtagtaaagatagctaattgactgccattggacttcaatttcacgatacgattacgatcattatcaggaatataaatgatttccagaaccatccattgcttcaccagatgcagaaaatgaaggattcgcggtattgaagatatctaattgactgccagttgaattcagtttcacaatacgataattgtgagtctcagcgacttgaatattaccagaaccatgcaatgctacactccctggaaaatg

SEQ ID NO: 78835 - DNA, 275 bp, Arabidopsis thaliana landsberg
  unsure (1)..(275): unsure at all n locations
ggaatccgnngaatcggatggctactcaattaaacaaatctaaaaatgacgtcattttatggcttggcagagttatgctcaaaacaataaataaagtgacgccaactaaataaaaaacaaaaagtgacgtcaaaatgattaagacatagtcatttgattataatatatgtttaggtcatacgtctttgttcctgccataaaaattacatttcattactaaacattttaagaatttttgtttgaatactaaaatatgagtggaattttttttccct

SEQ ID NO: 78836 - DNA, 122 bp, Arabidopsis thaliana landsberg
attctttgtgaaatattttatatatattatatttttcttttaccttccctcaaatacaataccttgtgttttgttattttacatcaccttccccccaattccctcaatttaatttataatct

SEQ ID NO: 78837 - DNA, 296 bp, Arabidopsis thaliana landsberg
tcaacaattaaggacattgtggattcctctgaaatttggggaatcaagatcctgtcccacgatctcggggaccaccgtcattattttggtctacaatctatttgacggtcaactgacatttctcttccagcctagccggtacctaacccctcaattgtctaccccagtaccccaaccttttcaaccattagggatcatactgctgcgagaacctgtacatatcaattctcaactgaacagcttttactaagagttcgcaaaaaactgatctttcgctacccaagccaaagaaccta

SEQ ID NO: 78838 - DNA, 556 bp, Arabidopsis thaliana landsberg
  unsure (1)..(556): unsure at all n locations
ggggtgggtcggtangaattttttctgcaattaatttttatttttaacaataaaaatttgtaacgggataggtgtatataacaaataaagagttcctctacttgtccctttaggatataataaagtcagatgttttaaaaagaagagttttctatgaattcctgtttcttaaaataaattttgtcaatatagatgttattttcctataaaaatccatgcatgatgttaacaaagactagaaaaattcaaaaattgaagattatcatatattatatcttgtcgtcgttgatgtatattcatcgaccaaattttggtctctacacatatgtatatattggcgtcgaagcttaaaagaaaaaaaaagtaaaaacccttatggcctatatataaatcttgtttttatggtaccaaaaccatattctaactaatccgaacgcaagtgatcgtctttgcttcaaatgtaaagctagataacctgaacgagtttggatgctggcatgctgcgaccttgaagacggtccattcggtttttatttgtacatacggacaacattaa

SEQ ID NO: 78839 - DNA, 592 bp, Arabidopsis thaliana landsberg
agatctttcaggctttgttgattcaaccctgcttatcctttatgtaaaagagtgagatacagctggaactggaaggaatcattacatcaaaaggattcagtcaataccatttgaagacaagcttctcagatggataatccaatgggtaagcataagaataagcattaatatcatccaccattgtacccattttcaattcttctccactcattttcacgtcttcttctgcatgagtgactgcaataacaaaactgtaaacgttacataaccaaaaaaagtagatgattattaatggactaaacactgtaagagattctcaattttcttcctttctctctactaaccaatgaaaggcaagatttttaagtagaagtgaaactatctaattgaatctacaagatattaaaagacgaacaatagaagcaaagcattacctggagaagacaatggcaagaacatagacaacggagaagagagaccaatgagcactaaatccctacgagagagccccttttccgaagaaattgatctcgtagacacaccagaacgagcaatcatcagctcctttgaggctgcatgatacttgctcgaa

SEQ ID NO: 78840 - DNA, 565 bp, Arabidopsis thaliana landsberg
gaaacaatcatatactattttaagaaaataaaatacaaagacttgccagttttaaaaaaacatatatatattttggtccagagacgaaaaaagacttttataattttaatacaattttaatattattattttttatttgtcggttcgtgtaaaagacaaacgtatacgtctattactcaatgggccaatggcccaagcggacgtgactcagcaagctatcaccattttaatacttatttatctatcaagatttatttatctattttgtaattgacatctgtgttcatcttacaaaattccttggttgatccctggatttgatgtcaaatatcactaatactattgattttccaatttaaatttcaaaagagtaaaacagtagataataatcataaatctcttcttttttttttgtaccaattttcattattagtttcccttgatatttaactaattactattccattagtcgaattgattagaggaggtctttaaaagagatttactattatttttaatttttgctcaacttcttcttcctcatgagtcatgactcattacatca

SEQ ID NO: 78841 - DNA, 504 bp, Arabidopsis thaliana landsberg
  unsure (1)..(504): unsure at all n locations
gggggggatngagtgtttcgcttgtctctatattatttttttttttatatacttctcttttaacttaaggtgggggtggaatgtaaaatccggtctgtcacttaattnttaatgggtacagcacaaacacattattgtgaagtcctactcctgaaagaaaaacaggacggtcttgacataagtaaaagtgtcaaacaatggctataaacgataagcttaaggcatctcctataagctggattcagtcttgtactctaagtctannnnnnnnnnnnnnnnnnnnnnnnnnnnnnntggagaaaattgcagtgtccttttccactcgactcgatttgttgggttcttttctcgcatgttttgaaccccataactgcttagtttctcttgtcgtttgctgctacttccattgccactcttttcattttcatatgcttgcctactcatgtgcacaaaacatttttatttatattcttacaacagattgtgataaatgaatgggtcaaa

SEQ ID NO: 78842 - DNA, 443 bp, Arabidopsis thaliana landsberg
  unsure (1)..(443): unsure at all n locations
annnnnnnnnnnnnnnnnnnnnnnnnnnnnnnnnnnnnnnnnnnnnnnnnnnnnnnnnnnnnnnnnnnnnnnnnnnnnnnnnnnnnnnnnnnnnnnnnnnnnnnnnnnnnnnnnnnnnnnnnnnnnnnnnnnnnnnnnnnnnnnnnnnnnnnnnnnnnnnnnnnnnnnnnnnnnnnnnnnnnnnnnnnnnnnnnnnnnnnnnnnnnnnnnnnnnnnnnnnnnnnnnnnnnnnnnnnnnnnnnnnnnnnnnnnnnnnnnnnnnnnnnnnnnnnnnngatccatgccaacatgaacactatatgttcttcctcgtccaaaacctctgacttcannnnnnnnnnnnnnnnnnnnnnnnnnnnnnnnnttcataccgtgacgtgcaagcccccgatggctactcccaccgaagaggctactgtcttcgagaacggatattaccatat

SEQ ID NO: 78843 - DNA, 403 bp, Arabidopsis thaliana landsberg
gggggtccttaattacacgtattctcacataaatcaatagtttgtttcatgactcattgcgggtggaatttcggtatggaggcattgagcttacgagttgctttgatagggatgccggcttatagcgaccagccgactaatgctaagcttattgaagatgtgtggaaggtaggtgttcgggatctggctgcttatactgaccccagatccaaaggaagagatcgagagatgagttggatacgctatcgaagatatgttggtgaaagggaaggctattacttaacacgctcggagatagactgaactcgtatgggaagtttttgctgatactataaactctcaatagaacattgcacacatcagctctaacattaacctgctaagcgaccaccttactaaaatg

SEQ ID NO: 78844 - DNA, 532 bp, Arabidopsis thaliana landsberg
aataccctggcctgcgacccgcagcggcaaagtacccgctgttgtcctttgcgtatggcagcctcatctatgggtgctgaagttttcagcagaccgacagccgagatcaccataccatttaagcaatacccgcactgcgctgcctgttcatcaagaaaactttgctgtacaggatgaagcataccctctgccgaaaccagtccctccagcgtagtgatggtctttttttgggccagggaaaccggcattgtgcagctatactccgcctttccatcgatcagcaccatgcaggccccgcactgctgcatcccgcagccaaatttaggaccgtttaaagtcagctgattgcgaagtatatacaatagcggcgtagccggatctacatccaggcgatgcatccggccgtttactttaaggacaacagtgctcatgttcacaaacaaaactatttaacgatcatttaaacttcaatgcataaaaaccacctgtctctgcaataagctcagccatcagtttcatcatgttttctttt

SEQ ID NO: 78845 - DNA, 534 bp, Arabidopsis thaliana landsberg
tgggtgcactcggggtcgccggctcgcgatcacccggtgggcggggcatcggtctctcgcaacgccggcggtgcgtcccgcatctgtttctgcatcatccggtgcgcactgagcacggcgtcggcccggtccgcggtggtgtgcagcgcggggctggccgcgtgagtcgagacgacgtgcaccggtccgtgggggagccgggccaggccctcgcgggcgacatcggccggatcggacacccgcattccgggtacgtcgaaattcagcccgacccgcgccatggccggtgtccgggtgacaccgagcaccagttcgagcacgtgcacgttgttctcgcgcagctccagccagaggccttcggcgtagatccggctgaatgccttcacgcccccgtagacggtctgccgcgccgagcccagatatccggtgagcgatccgaccagcagcaccccaccgtgccggcgatcgcgcatgggtgcggcgaagtgatggatcagcgcgagcggcgttgtgacgttcaggtcgatcacccgc

SEQ ID NO: 78846 - DNA, 528 bp, Arabidopsis thaliana landsberg
ttacccttctcgtacgagtgggctattttgggaatgatttaggtggttttaagttactgggtagtagtgcactgctgagcgatttctgtttctcctgttgaatgattgattcagaaatttgaaattcacatcgaaaccaaatcttaaatcatattggtagctttttttttgttttgtgattagatactgtttttttatagtattaaattcgttttggtgtgagtgatttagtgtttgggaaattatttaattaagtggttattttctgatttagtgatgatttgagaattttgtgttgtttatattctgggtagcgggaaatttgtactttcctttgtggacctttcaactattgaatgtggaagatttgctgataatcttagaaagtcatcatcatccatacgtaagagaacttttttttagcttgagagtgattctcacatggagaatgggttatgggaggttttaggttcaaaagggttgctgaagaaacatgaattcattaggattttggttcaatgcttatac

SEQ ID NO: 78847 - DNA, 353 bp, Arabidopsis thaliana landsberg
ctatcgctaccttaaatacgagttctttaatttttcactctaccgaaggtataactgagcgggaggaaggaaatacaactaccataccgtgcatcaactatatagtcgaaacacaaaacatgaacattaaaaaaaaaaaatagcctggagactaccgcggaccatatgggagggctggatacatgagaacaactgcaaaaaagataacgattactatgcagcgacatcataatcgaattaaccacacgtgttgttaatgaggctcacacgttttgacatgcattgattaagtatacgtaatcacgaaaatcaaatatgattacgaagcgaatgactcttaagcagaatatttt

SEQ ID NO: 78848 - DNA, 485 bp, Arabidopsis thaliana landsberg
  unsure (1)..(485): unsure at all n locations
aatgatttgtagattattagtgcgcacgagttttgatttgactcttggtagacgacaagcggggaacggtgtgatattttatccctgaaaaggttctttttatgttcgggaaatgcgaaatcattactcgtgtgcttccataaacagagttctcacaccaatacaaaagagaccatcaccgtgagaaagagaagaagaacaaaaaaagttagccatggcatcaagaagagtttcttcgctgctctctcgctctttcatgtcctcctcacgttctatcttctctcttagaggtannnnnnnnnnnnnnnnnnnnnnnnnnnnnnnnnnnnnnnnnnnnnnnnngtgtcttgataatgatcgagatcgttctgttctcattgtctcatgtaactttcatacggatcaatgatctccgagttattcggattgtgaggttacttgtcgatggatttgatgatcttggtctcatttagatcgaatctatg

SEQ ID NO: 78849 - DNA, 172 bp, Arabidopsis thaliana landsberg
aaccgactgtatctgtacttcgattttgaacaagtctgaccaaaatctgatttactttttttgccatatcgatttgacgatgtggatgactgtccctgtttgcttaccggcacagtaactgacctctaatgactgacaaggcgtgttctatccaaatcaatgaccaaccttc

SEQ ID NO: 78850 - DNA, 543 bp, Arabidopsis thaliana landsberg
  unsure (1)..(543): unsure at all n locations
aattcattgcataaaagttatgtaaagtgagtttaattaggtttagagagatcttttaaagtttttctctcttttctccttgttgtaatccagtgtatttaatcaaatctcagatggagttcaaatttcgagatcatgtttgtttgttttccaacaaatctaatttacaagaagagtagattattgattagtgcttataactcttnnnnnnnnnnnnnnnnnnnnnnnnnnnnnnnnnnnnnnnnnnnnnnnnnnnnnnnnnnnnnnnnnnnnnnnnnnnntactattagtagccaactatcttaacccaaattttagctacctaaaatatctaaaaggcaacaaatgaagtaagatccatagtcgattgatctaaaggcaacaattttctggatgcctactcgatggatctaaaaggtaacaatgttcacattttcaagattacttacacttatgataatgagattagtctgaagtctgaacttatggttggttgagatcttgtaatgttttctcatacagtcacatactcgcatatgatca

SEQ ID NO: 78851 - DNA, 395 bp, Arabidopsis thaliana landsberg
  unsure (1)..(395): unsure at all n locations
gaacgccctgctggccgtcagctatatcctgctcactcaggtatgtatgtgtctgcaactggtgacgccggccgtgctgctggtggtcggccacgccttgctgaccacgaagcgcttcctcctgaccgagaaaggcaagatcaggtccgaagccgaatcggtcgagagtaaccgcaacctggcgctcatgttccagagccagggccagctcgacatggccttcgatcgcttgcgcaaatgccccatggacgacagcgtcatggacgtcctgtacaaccttgcgctcgatttcgaacgtaagcgccagttcaacatggcagaatcggcgtttggctacatggcggacttcaatcccaagtacaaggannnnnnnnnnnnnnnnnnnccctccaaag

SEQ ID NO: 78852 - DNA, 352 bp, Arabidopsis thaliana landsberg
caaaaggcggtgaatatagtggtcaagcaaacatcttacagtattcgtggcagtaactgtggggaagtgaaggagcattgataaaagacttaaaggcgctattttagtgtcctatagactattgacgatgtccatgagatctttacattaataacagtatgtactaacaaaatgaacttgatctaacagctacattgaaatcctttcgagcattatcaaataatggaaataatgatggttttgtttatgtacacctaaaccatacactaggaaccggagtatagatctacgaacctaacatgggcgaaacgcttttaattatggatagactgaacaagaaagatctaatata

SEQ ID NO: 78853 - DNA, 555 bp, Arabidopsis thaliana landsberg
  unsure (1)..(555): unsure at all n locations
caaaaggaggtgaatagagaggtcaactaagcttctttcaatagttgtggcattaaatgttttgaagttttgcacattacttaaagcaataaaatgtctatcttagtatccttcaaaataattacaattgttataaaataattacatttcttacaagtaggtactaacaaaatcaatttttatctcacactaaattttaaatacatccgatttttatttaataagttaaatcatgattgttttttttaattacacctaaaccgcaatttgtaaaccggattagagattaactaaacttacatgtccaaaacactattaattatggattgatggaacaagaaagatctagtatatctaataagaatatcaccacattaggtaggagctgataatacaatttttgttggagatgcccaacctagagatagaaaaacatttaatccctcttaaagcccttataactatgtgcaatgcaacacatatggttaaaagatattacgacattataatcggaaagttgaactaacactcattttatctcgnattataatcttt

SEQ ID NO: 78854 - DNA, 376 bp, Arabidopsis thaliana landsberg
ggaattaactgcgatcccacactcgagattgatcatgtgcccgctaacgaccgatcattattaatggattgcgattacgggccaaagacacacgttctatatggatgaagacacttgagcaaacatcaaggataaggctacattctctgctcaacaaggctaaataatgcatgctttagaatcatataagccacgttcgcttatatatacttgatcccgactataagcaggagatggtattgcacatatatagagtcaagtgatccacgtgcacaacaccagacatacaacgagaagtgatatgacacaaactacacgcgccacgactaatgacttctagcaaggatagccgcagccactataaacatagctaagt

SEQ ID NO: 78855 - DNA, 530 bp, Arabidopsis thaliana landsberg
gactatcgactgcggacattaaggaacatatataccaatattcacaacctttttcttccatatttacataatagattacattaaaatcatcagcttgcatgcatctgcaatcgcataacagcgcatgcattgttttaaaaaacatatattataatgattatgatcttatttcggttttgcagccgatggcatcagcctagaatgttttgcaagagacatgccattactttctaaatttgaacatagaagttgacaatctgagcgagcgtttgtctcaccttcttgaatctgtcgatgaagatagtcctgacgccagcgttattagaagcctacttatgcgaactcttcagctcatttgtttgttatagacaagcctatccatgcaatcttaaatgatcgctctatagtaatgatttctttaacatattcgtcttactatgtgatattcaaagagacggggtggatcgtttacgacataccaatttcatagggttaattccatcgtcaacagggtccgacatatatgtgtg

SEQ ID NO: 78856 - DNA, 610 bp, Arabidopsis thaliana landsberg
  unsure (1)..(610): unsure at all n locations
gaattcggggagtctaagacgggagtatagtttgatgtaccgaaggcctttgttgtaatactcctgctcttttctttgcgcatcttcgggattcattacttctacatggctcatatacggaaccctatcctcgtcagaaataatggcgctaccgcagggataaaaatccggaaaatcgggtgaaggatgcaattgccactcgatagattcgtccaaccatttttcagactgcccgcaatccttgatcgtggtaaccccatagggaaggtaggttgcagctatacgttttttataaacgggcaccgagtcggggaccaggtattcgggggctttttcgtcatcacccagtacattgcccaaatgggtatgtgtatcaataaaaccgggtgtgaccagccgtccctttccctcaatggtttgttttgcggtaaagctttnnnnnnnnnnnnnnnnnnnnncaatggtatcggcattgatcaggatggtttgcccggtgatcacttttttgctatcggcatcaaatacatttacgtgagtaatggccaggtcatatttgtgtggatggttacatgcaatataccatacgggtgaanaggcaaatagagggaga

SEQ ID NO: 78857 - DNA, 636 bp, Arabidopsis thaliana landsberg
  unsure (1)..(636): unsure at all n locations
atgatgatcgggttttgatgggacacaaaatgcctgttttttatggaggcttcggaagtaattttaaatttcacaaatgggggctagattttcaatttagttatgcgatgggctataaatacttgaatcaagctgtacagcttcatttggattttgtgaactacgaaggtgccaaaaccatagaaaatattaaggaaattacctattgggaaaaaattgatcaacaaggagattatccattgtgtaatccttggagtgatgaacacccctttaaccttnnnnnnnnnnnnnnnnnnnnnnnnnnnnnnnnnnnnnnnnnnnnnnnnnnnnnnnnnnnnnnnnnnnnnnnnnnnnnnnnnnnnnnnnnnnnnnnnnnnnnnnnnnnnnnnnnnnnnnnnactatatgttacagcatataatttattcaccttaacaaaaggcgactttgatccacaatccgctgattatattggaatatatactgtaaattatttgtctgcaaacagaacatttgctttagggatcaaacttaaatcttaaatcataagcagctcggttcttaatataattgcactgattaaaaaattaacattagaacgagaattttgaatatcgttctattatttattaataaaa

SEQ ID NO: 78858 - DNA, 442 bp, Arabidopsis thaliana landsberg
ggaaaaaatgaagaagggacgtagaaactagaattttaggtgtaattgatatttgaatatgggccataattgggcctggtgatttaacattctgtacacgtatttaggcctgtatcttggaatgattttttttttttgtggtagggtaaaacttggaatgaaatttaggtgcacctattgatattgtccgactgtctgaactgaatttgataagtagtacgtgaatctttaactgtttagtaggaaaaaaaagaaaaaaaatcaagagagtgttactatacttgaactacaataagtacataattagatgatttttttgtttgtataagcaaaaagacaaatgttagaatgtaaagtccaaaagttaatccgcagaaacgaaactagacgctaatcatgaaagtcaaatatcgacagaaaagataagaacattttcatcagt

SEQ ID NO: 78859 - DNA, 308 bp, Arabidopsis thaliana landsberg
cggaaatgggatggttcacaaccatattggaaatttattgttcctgcggatccatcacaaggtacaatactcggactctgctggtgtggatgtcatgttgcaatgtacaaaaggtattcaagcaagttttagtaatggggattcgtaagataaaatacatatcatcctcatcacccacccccttccatttctatcaatgacggctattggcacctgaatagatgttgggttggtatgccacaagtgcgatctgtgagagtcaattttgtttgtgtacgtaccccgcttctgatcccctctgatctcct

SEQ ID NO: 78860 - DNA, 460 bp, Arabidopsis thaliana landsberg
aaacgaagaatatctgaaacaaaaaaacaaaacataaatctctttggcgaagatgaccggttcttggggattggtaattattatgaaagagtacacccaatccttgagactatgtgttaagaaaatttaattttatgtaagatgacacagaagtacacaaagacttgtctgtctttcactttattagactctttgacccatttttttcataattcacgagaacccaaaaattaaaaacaaaacaaaacaaaataaaatcaaaactaacaaaaaggaaaaaaaaaaaaaaaaaaagtatctcaccggaaacgatttctttgcagataccaagacttttgttactaagctttttaacagatccggagaaaatttcaaaatccgaagaatgttctaaagctagggctttttaattgacgagacggaggtgatataattccgccccgctggagctatgatgatt

SEQ ID NO: 78861 - DNA, 554 bp, Arabidopsis thaliana landsberg
gacatgtatagaaataggttacgtagtattcatattatatttaaattgtgaactcgaaataaaatggttaagggaacgatagtaaatctaactttagaatccatatgcatttttattttttaattaccacatttaaatacagattctaactaaatttgaacctaattaaatgtacattcaacatttgaaacagacaaaaatgtgaaagcaaatgcctaaaggtgcgtcttttggagaatttcttatttttcaaagatgaatcagcaatgagtttaaagccataaagtttgactcgttaatgcaatcatatgaataaaaaagccatttatcaatgtggagcgatgattcagtaaaatgtccggtcctagctggtaatggatttcgtctcatttttgcaacaattttttttataacaaattaaagcttttagttttcctcttttattaattgatccttttgacagtgctttagtgggattagaccgtggcgcctcttcgatcttagaagcaacatgtaaaccagatttcattttttttgctctagttatgaatttt

SEQ ID NO: 78862 - DNA, 555 bp, Arabidopsis thaliana landsberg
  unsure (1)..(555): unsure at all n locations
aataaaatttacccagagatcaacacaatttatgttttcccattatgtatcttttcaacagcttcctgtttacaaaaattgaaagaggctaagaagacaaataagataacttttaagtagaagaaaaagcatgcaaatactaagaagcaccttattctttgtagcgagagccatcttcaataacttggcaagttgtgtaatagaaacagaggccttggtataagacttctgcacatcttgagagcatagctcaacaagagaatctctgaggaacggacgttgttctgaatttgcctttggaatatcacagtcatgtagaaaggctttgtacatgttgattaagcaggaatcaaagcattccgagttaaaaaccatactgatgtcttttaagattagaaaagcctgctgcgatatagtctcttcaccggttacccacagatgaacagatatctgcaccaatttacacaacaaaactngactntcgaggaaacaaagagacatcatatctaacattgggaaaaaatgtcatttagagaaaagtacctaaatgtttac

SEQ ID NO: 78863 - DNA, 541 bp, Arabidopsis thaliana landsberg
ctcctgaactttcttctcacgttcggccagactattgcttatgaatcgtttatccttctcgtcttatgcaagttatcctggatagatagaagttgctcctgttgttgcgccagatcgcgattgagctttccactacttgtcatcaggtttttgtaataggtatttaactgctcatgttctttatcgagagaagatagtttttgcctgttgtttcttagatcgatcccgatgttagtagtgtcttcttttagcttctgaagttgttcctccagcgagctcagttccctatttgctttgtcaagggaagtattccgatcggccagatcggcctccattctcactttttgagctagtagctcgtcgtattttttctttgaaacaatacacgaactgcataatagcataatcgcaattccgaataataatctgttcatatataaaattgtgtcgaaaattaattaataaatgcttacaacgaaattgacataatcatggtctatgataaaggcttgtatgatccttgatctagactcaaattctg

SEQ ID NO: 78864 - DNA, 431 bp, Arabidopsis thaliana landsberg
tgttctgtatcggtggcatcatatgatgctttaattttccattacagccaaggtatggtgtttaccttcatcaaatctaggcgcttaatgggatttcctactaggttgaaccgacccaatgggcacatgcctagaatgagagctggtatatctacgcggaaggttgaaggaccttacaatatccgatatgtatctctcgtatccgcgctagatacatgcttcttacattttagtggtaagccatcgatcacacttagcgaatcctaccggtaaaattctgctgactcacagcatcttggctaacggaaggagcgaatgtattctgaagcggactgttattggaagatcaaagatttactgcgctcctcgaataacgatcattggtcatcgccactatgaggctgatgggctttgtgagacaaacataggag

SEQ ID NO: 78865 - DNA, 126 bp, Arabidopsis thaliana landsberg
aagaagagcagagcacgagaagaaaagccggaaagccgaagaggccccaggagagccccaaaggaaggacgcagacgacgagcgagaagccagctcaaacacaaaaccaaagggagcaaagcaaca

SEQ ID NO: 78866 - DNA, 165 bp, Arabidopsis thaliana landsberg
  unsure (1)..(165): unsure at all n locations
gaaaaagcgaaggaaaaggaagcgaaggacgaccgggagccaggaaccagcgaggagagccgaacgacacaccccaggcggcaacagacaccaaacacggcccaacagaaggccaagacgcccccaaggccacagaagaggaaaaangccccagaagaccccccc

SEQ ID NO: 78867 - DNA, 356 bp, Arabidopsis thaliana landsberg
atgctatgggggcagaatgtcgatcgataatttcatgacggtttagatgacattaacgcctattgctttttggtcaactccaatatgaacccaaacttttccacccccaaacggtgttcgatcatatgtgtgagccactgattccgaagatgagtgaccctgtacagtggtattggctgctgcaagcgtgggggatttgactagacgattcggactgtctgagaggacatgtctagacaatggacatagagtctgactctatgttctctataagcactctgctacattggcacttatatatatgtcatgaacttgaaggacagggctaacttattggacatctacttcacttgtat

SEQ ID NO: 78868 - DNA, 636 bp, Arabidopsis thaliana landsberg
tacgataataagttaatggaaatgtgccccactggtattttaattcgcatatgtaaagacaatttttgtatatgacattttcatatattcgtttttctttataactatacttatatcctcgttcttacctatgggttcttgtgtgtgttaattatctatagattctcatctgagtaatcactagataattattatgcatggctaagatgaaacgtagcaccttaaatggttttattgattcatgatcatattattaatcccgaccacttaaaatcgatttcgttatcatgttaatgtactcaacaagaccggaataaaaatgagcattagcgacgggacatgtcacctcggtccacctttaaaataagttttagtagatgtgatgattacagtgctattacatgaattatatagaacaacaatccgaaaagcaaaaagaccactaatcagtgagaaaaagtcaacgagttttttcttttttgcatttttatcagttaagaattttcaaatagtgaatctaagtttcattccacatattgtgaaagacgaatgatgtatggtgatgatattgatagacatcattatactataaactctaatttgtgaattatggttttgcaactactaacttacacc

SEQ ID NO: 78869 - DNA, 132 bp, Arabidopsis thaliana landsberg
  unsure (1)..(132): unsure at all n locations
ggccgcaaaaagcccaccagaccgacaaaaaaggggccccgcccggcaaagacgccgacgacgcgcaacggccgaagaacagagcgaaggccaagcnaaaacagcgcccggcaccgcgaacaccaaaacaga

SEQ ID NO: 78870 - DNA, 496 bp, Arabidopsis thaliana landsberg
aactacagaaaattagattaaaatttaaaatatgttaagtatcgtaaaatattgtattttaaatataaagttgagaaaaataaacattaagaaaaaacttaagatataagtaaaacctaaagacacagatgacagaactactcttgagtttcttcttcaacatttttcggggatggtggaggatgcaagacgacttgtcaagaatcaacttcgttaatccgtcaaatacttgaaactattgtcaattcatgacccttgaaacttaaaaggctgtactatcatccaacaatatgaagacccttattataagaactcatcttgtgaaccactttgcttgcaagtgaaacatatgatgcataagtggtatgctcaaattagtctcagagctactctttggaataaagagatcattgtagcacttaaagtatggtcaattcctcaaaaccctttgattatacaataagttaatggtttcaaaatccagctaaacagaaaa

SEQ ID NO: 78871 - DNA, 312 bp, Arabidopsis thaliana landsberg
agggggcatatccatgctcggcgccatggataatcaaagcagagaaacaccataacccccatcataaccgaaacgttgagtcgtgccgaggctccaccacaataccacaatatcgagtaatccactttcatcgtgatcttcatattcttttcctgagctgattgtggtaccaccacagcttcttttggtgggggatccacagagaagaaaattacctatagaactcttctcaccaaaggcgttgaactgttttccttgcagaatcacacctgagagataggtggatgacacgttaaaaacgacaagagattt

SEQ ID NO: 78872 - DNA, 545 bp, Arabidopsis thaliana landsberg
ttctatgaaaaaataatctaattgcatccacttagaagcaaaaataatgtaattagcattttattaaaaagatcctagagagcaaaacagagagaattacagaggtagacagaacaaacaaaacctagaacgcaacaagacagagcaaacaatgaaacaatctatgaagaagaatactgacccaagaaatcagagaaaaagatctgatggcgagagtttaagagtttaaggaaagaagaaagatacttgcgagagtgattagtggggacgaagatgacaaatttggtagagagatagtggacaagtgaaagaaatttagatccattaatggtggctttgtgatgtcacaaaactcttatatattccatcactttaataatatctataaattctatattgcttatatatatttatatagattttaatcattagaatatgtaacatgttataagcttttgagacagtttacatcggattttaagcaaccaattacaaataaacatcttattaattaacatttttttttatcacataaattaacattt

SEQ ID NO: 78873 - DNA, 501 bp, Arabidopsis thaliana landsberg
  unsure (1)..(501): unsure at all n locations
cgaataggttaacnnncttttgaactgctnnngctgaatctcatgggcatggcaagtagacatatcctggcgatatctgaaacattttanngtagccagaggaaatagaaagcaaatagcgattctccgtagtatgcggcgtagcgaaatgnnnnnnnnnnnnnnnnnnnnnnnnnnnnnnnnnnnnnnnnnnnnnnnnnnnnnnnnnnnnnnnnnnnnnnnnnnnnnnnnnnnnnnnnnnnnnnnnnnnnnnnnnnnnnnnnnnnnnnnnnnnnnnnnnnnnnnnnnnnnnnnnnnnnnnnnnnnnnnnnnnnnnnnnnnnnnnnnnnnnnnnnnnnnnnnnnnnnnnnnnnnnnnnnnnnnnnnnnnnnnnnnnnnnnnnnnnnnnnnnnnnnnnnnnnnnnnnnnnnnnnnnnnnnnnnnnnnnnnnnnnnnnnnnnnnnnnnnnnnnnnnnnnnnnnnnnnnnnnnnnnnnnnnnnnnnnnnnnnnnnnnnnnnnnn

SEQ ID NO: 78874 - DNA, 446 bp, Arabidopsis thaliana landsberg
aaataaactcttgcctatataataattattccgtctatatatctaaccctcaagaggaactattggtctaaattattaaacttctccacaaaataaacttcatcaatctctcttttgcgattcgaagatgagacgttcatggcctacacgcctcatcctccttatggttctcaccgtcgtcatcaccatgattgccgcagcttatggttattcctctgtctcgtcatcaaaacataagttccctcattacaagtacaaagctccatcttctccaacaactttattcttccttaccgttatttctcgccgcctccggtcacagattcagattctgcagcttatgttcaatgaacaccaagggcagaccgtcaattgacctgagttttattataattaatgtaactatttctttctctttttgattttgatgtaacgttcaaatttat

SEQ ID NO: 78875 - DNA, 458 bp, Arabidopsis thaliana landsberg
  unsure (1)..(458): unsure at all n locations
acagaatgaaaattttcatttctcgattctactgagaatttttatttataagcctttcactttgctttctcttcggatgggaggtgtttattttcccacgaatgtaatccataattttttggccctaatttcttctatctgagtgactcgatctcacacctcctgatcannnnnnnnnnnnnnnnnnnnnnnnnnnnnnnnnnnnnnnnnnnnnnnnnnnnnnnnnnnnnnnnnnnnnnnnnnnnnnnnnnnnnnnnnnnnnnnnnnnnnnnnnnnnnnnnnnnnnnnnnnnnnnnnnnnnnnnnnnnnnnnnnnnnnnnnnnnnnnnnnnnnnnnnnnnnnnnnnnnnnnnnnnnnnnnnnnnnnnnnnnnnnnnnnnnnnnnnnnnnnnnnnnnnnnnnnnnnnnnnnnnnnnnnnnnnnnnnnnnnnnnnnnnnnnnnnnnnnnnnnnnnnnnnn

SEQ ID NO: 78876 - DNA, 540 bp, Arabidopsis thaliana landsberg
  unsure (1)..(540): unsure at all n locations
aaaaatatanggcgatttgaaataaaacaaaaacttgcctgaacatcagaaaaatatattttcaaatcgaataataaaactttgtaatagtaatagttgtgaatgctgattgggaattagaatagtaatgctagatagaagatttcttaattataattaagaaggattttatatatatatttatatatatctatatatatatattaaaattagaattatgatttcctaagttacacatttgaagaaaaccaacattaaaaataatatctagaataatataatgtcaaatcatatatattaaaagagaattttgtatttttcaaacggtagataaaatataaaatttatcaatgaaatccgaagtttgtgaataggaatgaactatatatgagatttgtcatctataaaacaatttaacatgcacccaaaaatcgtcaaagaaaccttatgataaacacttctccaaattctttgatgttcactttaataagaaaatcatgcaagttattaaataagaatggagtattgaaagatagaaag

SEQ ID NO: 78877 - DNA, 384 bp, Arabidopsis thaliana landsberg
gtcctatattaagtgtatcaaatcccccaaaaagggttaagttgaatctataaaagatgttgcttttaggtacttacattgtattttttaactgtaaagaagtgttggaaacatctgagcggttgggtgtggataaagatcaacagcttttttatttcaatgttgcgatacacttcacttaatgtattatttagtaaagcttcttaaagcaacattataaaaatggtaccccagttgttgtaggcatacaacatcaatgttacacatgacaccaagatgacattactaatgcgtaccacatatgaatatggctcctatatagtgataaagagtactatatttatctgcaaataaaagaacacaatcattgcttatgacattggg

SEQ ID NO: 78878 - DNA, 137 bp, Arabidopsis thaliana landsberg
aagccagagtgcactctaaaaagaaaatcgagcatctaagtttctatcacaaattactacgataaccaaaacccgacgaaacatggggctgccacaaaaaaaaaacaccgagctcaccatcacatttagaaatgaat

SEQ ID NO: 78879 - DNA, 533 bp, Arabidopsis thaliana landsberg
  unsure (1)..(533): unsure at all n locations
agcctggtggagctcttcctgaagatctcggcatgttgtctcgggtctctgggataccagaaggtgagctatctggagtcggacatggtgatccatgacagcatcgagccgctctttctctgcggtacaggcttttgcgccgtggagacctcgggcatgtttccgacccacttgatggtgctccaaccctcgatcgaggtccatcgcatgctcctggaggagttggtgaaggaggtctccaacccctggttgtcctcctcacttccagttcgagagttcgagttcttgaatcgtctcttgcccatcgacaaccaagagctggtgacctgtcccctcttcgacctcgacgagccctctctctggccagactcggccaactctccctgctctcgcctcgcggtgcacatgttcggagacatgggccgntattatctgcacatgaccaactggctcttgcccaacaacagatcctatccctcggtgactcatctcgagagaggtggcatgaagccctggcacttctacactcacct

SEQ ID NO: 78880 - DNA, 459 bp, Arabidopsis thaliana landsberg
gagatcataactatatgactatttctgcattaccatgtttgtcttttcattactatgtgtgcactggtcaggggtctttatttcttgatcctcctttgtgcccataagatgacctgtggatagggtgcgcatacatttcgacgcggattggcatcggatcccagtctatgtggacatgacatggctggccagacctgtccatcggcaaggactatgaatgaccagattggtcatgtgtatgcaccactgacagatcatgcactctctagacgagatcatcgaaatgtttattcccgctagtgggccatacccactaacaggcgccttgactttttcgaggatatgtatagttggaacccaggactgttacagggcatgcgatctcaaaactcaagagcaagacgaacttggtgcttacaggacatctactttctaatggagacattgatttacaacgag

SEQ ID NO: 78881 - DNA, 513 bp, Arabidopsis thaliana landsberg
actaattcgattttcggtagatctaccaacacataaactacctatattgggttaaccattttagaatcaattttatgagataaaccctaatttaaatacattttagttaatattaaagtttaaactacacgcatgtaagtctacacaaattatataaaaaacacttcaaagaactttacgctcacacatttgatgatttcttgtagtttcattaagtcaatgaacacacaagctttaaattgatatttcaggtcattaagacaatgttgacacacaagtttcagattgatatgtgagatcattaagaaaagggtcttaatcataaattcaaaagtggactgttatacagaagcctatcttatgcatatggcactggcaccgagcacaaatgtgtatatcatacattcaagtggaccatacttattctttaaggtaataactctgcgtgactgagatctacatacacatgttacacactgcacagcgcttatagagtcaatgtacttattatta

SEQ ID NO: 78882 - DNA, 505 bp, Arabidopsis thaliana landsberg
ccaccgcaaaactctccgcctttgaagagtccgaggagaagcttttagaagaaaagagagtatcagaatcatcatcttcactttcttctttgtctccttcgtcttcttcctcactacaagaccagtaccaagacccggttgacttaaaacgtgaggcaaagagagggtcagaaccaaactgcgatctttgcttcctgtttgtcttgaccttcttccttaaatctcgaaatgaacggctctcttcgtagaaagggtttggtgggaatataggtgacgcacgagggcaagaagaagcatgactctttggtcgtgatggagttttggttctggtttggaacaagaacctctcggaagacgttgcttgacttgtaacagcacaagtctcgacgacgtcgtatagatctcgtggtcggcaagagcttaaagatgaccggactattcttgaaacccggagcttcattctcttctccatggttagaggatatcgcgagagactaatgaagat

SEQ ID NO: 78883 - DNA, 290 bp, Arabidopsis thaliana landsberg
ctaaataataatctttaatcctctttagtatttttttttttggagctccaactaaacactatggcaaagtcttcaaccgtatataataaagtcaattctggaataaacaatggtactgcagaatttgagttgccgacagatataacaagtaccgcaaatctaaagaatctgttgaaaagtacggttaataataacaaacagatttttttattagtcacacgaatggataggtctaaagagtgagtaatctacgccaaaaaaagggtggaatggacagagaggaggagggt

SEQ ID NO: 78884 - DNA, 445 bp, Arabidopsis thaliana landsberg
  unsure (1)..(445): unsure at all n locations
aaatcttactaatcaagaagtttcgctcgatatcatttcatcaatttctctcacatttcatttgctgtttgttgctgatgtactgtcgttacattggatcgttgnnnnnnnnnnnnnnnnnnnnnnnnnnnnnnnnnnnnnnnnnnnnnnnnnnnnnnnnnnnnnnnnncgaaggcgacgaaggaaagatggcgcggattccggtacgccagcagcctccggggattcccgtggaaagcaacgagttatagacgtgtctccaaatggtgagaatcaaattgtgccaaccacgacaccatcgtcgtcttgattttcctactctctggtgcctgtggaatgcggtgtaatgataccctggtttagaattggcacgtttacaggagtccaagtgttctaatagaatggtagcgagagacaattaaatatgaataccaatgcanataac

SEQ ID NO: 78885 - DNA, 410 bp, Arabidopsis thaliana landsberg
ctaacagctgcgattctgatgttgggtccatacacatctgactttgtcgggtaggatcgagcggagaaatccgagggcacgttatattgggtggactccaaatcacgagagatgtcgatgggcgttgatacttgcagactaccgcacacaacaaaccggacttgatgctgaccatgatcttgtttaatatgactctcttccattgttacgtctttattctacatctattgagagaggaagaaagttctcacattacattatcgctacataactaattatttttctacggattatcaggataagcctgaagttgatttatcataaacaaatgagcctgaatgcaagatctctggcaggatgagaatctatcagtgatgggtgggatcttcgtacctaagtgttttacacct

SEQ ID NO: 78886 - DNA, 585 bp, Arabidopsis thaliana landsberg
  unsure (1)..(585): unsure at all n locations
aaattctggatgataaacaggactacaaggttctgttgttggcacctgatggtggctttaannnnnnnnnnnnnnnnnnnnttggttcggtgtatttaggtgctactgagcactggattgatggcaaggatgtaagattcacaatcccgaaatccgaactactcagattctcgcatcaagttccaacttcgaaagtaacaaaagagatacatggagctttgcaagaagtctatgaacctaatattgaggcattaccagcgaacttgattctatgactctgaagctgaaacaaagacagtggatcaacggtaagggagaggaagattaattcccttttttgtgtttttttttttggataagagaggtacttatggtggtttagattaacgatgagaaacgtcaggtattaagaccattgagcaaagggaggaaagtgagagaagggtatagatggataccttatcgttagcttttggtgcattatgacaaaaagtttgttctttggtttaagatgtcagacctgtcactttcttcatgattttaagaagcctggtgtttctcttgtttgttcaaatctatggaaaa

SEQ ID NO: 78887 - DNA, 586 bp, Arabidopsis thaliana landsberg
gtttaagtttctaagaaatgctgatttgaatctgtacaatataattgtattttgagtatatttcaaaaaaaatttgtgaacaatgatgatagtggagatataacgcatcaacacaaataaaaaagttcaaatttagtcaagaataattctttgtctacatttacatatgtttccatggtcgtcgtttatatatttaaacatagttcatgagtttaaatacatatgaattatttttaatttagctggctatatcaatttcaacatcatatataaaactattggagcatttttttttcttgccggacctaaactacttactcggttattttctacatttcctttattgtaaactcaaagagaataacattgataagacagatttagatccagagggtacattacagatataccacaggcttttggttcataaaatgcgcaatatactatatatatatatttttttttggcagaaaatatactatatatattacatatatacccacgatagtgtaagggaaactcacatattaccccattattattttaatttttgaatggattaagggaagaacggattagctagtct

SEQ ID NO: 78888 - DNA, 524 bp, Arabidopsis thaliana landsberg
cgggccaggcggcaaggaaaacttttcagaagcgctccgtggaattcggttcggccagcacgagagttccctaggcactgtaacgggtgctgatatgcttcaatcaggaggaggaaacacaatgacacaacaaaataccaagacgacgcggcgcaccgcgctcaagaccatcgccgcggccggtttgtgcatgaccggtattggcggcgcccgggcgctcgactatccgacccgtcagatcagcctcgtcgtgccgttcacgccggccggcggcgtcgacgccatggcgcgcgtcgtggcgatgaagctgtcggaggcgttcaatcagcaggtcgtggtcgagaaccgccccggcggcggcggcacgatcggcaccaagatcgttacgcgcgccgcgcccgacggttatacgctgctgctcgggcacaccggcaccgtctcgatcaatcccagcctctacgcgaatgccggcctcgatccgcgcaaggacttcgcgccgatcggtcttgtcgcctcgatgcctg

SEQ ID NO: 78889 - DNA, 518 bp, Arabidopsis thaliana landsberg
  unsure (1)..(518): unsure at all n locations
ttatcnattataaattataaaggtcggaaagaattgtccgtggtacaatcatttatgttacagttgccataatatttctacagtctagaagtattttctattatgcccacattattattaaagaactgttaaactcaaaattttttggcatggttaattgaaagcttttttttccacataactatataaatccacatttggatagacaataaaaaaaaattatatttagaataatttttgtctctgtttgtcactaattagagattacattagaaaagtaaaaattagaagcaatattattgatagaaatactgaatagggtaggtggaaaaggcaagaactattggcatgatccacgtttttagtctttttgctctctatgacttttttcttcattttgaatttactaaaataatattaggtatttctgttgggaaaagccgcggaaggagaaaggtgagaatatgaaaaaggangtttgtgttgttttaacgacgaccctttttctctttctcctc

SEQ ID NO: 78890 - DNA, 396 bp, Arabidopsis thaliana landsberg
aaaaccagggttatacgctatctacggtttgcctctctatgagcaactttgggtgaccaacatcccttcaaagaaagtttcctgacacgcgtaactgacagctatacaactaaaaactgaatctaaatcctacctaaaccattttacccttgtaaatgattcgaaattggacttattattagattagataatgttcaccatgaccctggggacctaaccattaggtttggactgcaccccttaatttttggcagattgatgcaatggatagtgccggcacatttcctgtacaaatcaattatggtacgcttattaatcccccttactgacattccccgaaaactactctatggcacataaacttagtcgccaaaaaatacttggcaaaggaccaat

SEQ ID NO: 78891 - DNA, 114 bp, Arabidopsis thaliana landsberg
aaaaaaaaatgggttcgaagacatcaacaaatatggtttgctctcctcttatatcttcttattctgagggtcagggtttcctctcaagctaaagtcccccaggcctacaagtcc

SEQ ID NO: 78892 - DNA, 591 bp, Arabidopsis thaliana landsberg
  unsure (1)..(591): unsure at all n locations
ccaacttcanngaacttgatgggacaatgttcaattgnccccaacttcncgttcgcgagggccctacttcgggcactgagagagatcatctatgccctgtgttacgagggcctctgcgctcttagttcacacatttctactcnncaggctcgaatggcgcacccacactccacggagccgcatgcctcgnggattcaacgggttcggtacgccccagtatgtgaaggccaacactacttccggagtccccatggcgctacgacannccggcttctccctctctttcctcaacgcgccattgaggggcttatctccagcttgcagaagaacttgggactttatccacaaagccanntgaagctgannacctgaagcttcaggggttcttccactttccagctatgatnnggcaacttggcttcttttcaccacncagaaagataagggctgtggccccgattcaaagcnccattccaggaagtgtacttgcggaaactatcctttcgtccaccacagatcccttcacggcaagcctaggcctatcgatattttaaggcgctgattattccggtacaccaccgacgcatcagt

SEQ ID NO: 78893 - DNA, 555 bp, Arabidopsis thaliana landsberg
  unsure (1)..(555): unsure at all n locations
taaaacaccgctagtannnnnnnnnnnnnnnnnnnnnnnnnnnnnnnnnnnnnnnnnnnnnnnnnnnnnnnnnnnnnnnnnnnnnnnnnnnnnnnnnnnnnnnnnnnnnnnnnnnnnnnnnnnnnnnnnnnnnnnnnnnnnnnnnnnnnnnnnnnnnnnnnnnnnnnnnnnnnnnnnnnnnnnnnnnnnnnnnnnnnnnnnnnnnnnnnnnnnnnnnnnnnnnnnnnnnnnnnnnnnnnnnnnnnnnnnnnnnnnnnnnnnnnnnnnnnnnnnnnnnnnnnnnnnnnnnnnnnnnnnnnnnnnnnnnnnnnnnnnnnnnnnnnnnnnnnnnnnnnnnnnnnnnnnnnnnnnnnnnnnnnnnnnnnnnnnnnnnnnnnnnnnnnnnnnnnnnnnnnnnnnnnnnnnnnnnnnnnnnnnnnnnnnnnnnnnnnnnnnnnnnnnnnnnnnnnnnnnnnnnnnnnnnnnnnnnnnnnnnnaaccgtcattctttatgaaactttgtttctataatttataggaaaatatgcgtcctgctaaaaagagagtcttttgcaa

SEQ ID NO: 78894 - DNA, 516 bp, Arabidopsis thaliana landsberg
tctctcaaatgcaacaacggaactcaatttcatcaccaatacaccaagcgcaacattggaaccctatttcatcatcaagtgcaacaacgaaagtcaattccctgaacctaaattgtgttcctcgctctgtaattcgaaacccccaaatcaaatctcaccctaaagtaattaagagactctaatttgaaatcaaaaacaagtaacgaggtaggtgtaggaactttattgggaggagaaagagagagggggagaaaaaaagaaagagagagaaagagagagggggagagagaaaaagatagaggggagagagaacggaagagagaggtagacggaaagagatagaggaaacttggaattaatatataaaatatagaggatatcattgctttttttttatgctagatacttaattatattttttttggttagttttgccaattcccctagagtttttatattttttcctatttactaaactgcggacaaaatttatgaatagtgaataacaaacggtct

SEQ ID NO: 78895 - DNA, 605 bp, Arabidopsis thaliana landsberg
  unsure (1)..(605): unsure at all n locations
gtccacgctaagggtgctggtgcccacggttacttcgaggtcacccacgacatctccaagtacacctaggccaagttcttgaaccgcattggcaagcgcactcctctcttcacccgtttctccaccgtcggaggtgagaagggctccgctgataccgcccgtgacccccgtggttttgctgtcaagttctacactgaggagggtaactgggacatggtcggaaacaacactcctgttttcttcatgtaagcatatttatattagatagaagaaagagatgaaaacgacgaagaaccgggaacagaagaccagatcagatggacaaaaaaagtgtatccagacacgatacgatgcggacttttttttttttattattttattttatcaaatcacatgtcactcccaccccaggctcgctccgtccagacaatattcggaattagcaacaacaattgcgcccttttgatctacttcaacaagtactgactaaagtgatatggtccgcggacatatttgtccccattttaatgcttgtacaacaatagtcgngaccccatcaagttccccgatttcatccacacccagaagcgcaaccctcagaccaa

SEQ ID NO: 78896 - DNA, 520 bp, Arabidopsis thaliana landsberg
  unsure (1)..(520): unsure at all n locations
taacagccacgcccgccgttccctggttggcatacggcaatggattttcatgcgccgcccggaaatctttttggttggccagtttggcaannnnnnnnnnnnnnnnnnnnnnnnnnnnnnnnnnnnnnnnnnnnnnnnnnnccgcagccatagaaagcagcgggatggcaaagaggatgtttttcataaccgcgggttttacaggtagaagttacgaattttccggctgcggctcccgtaatttcaagccgtaaatgtccccctgccccgggagccgtggcgcagttatcttctcccacaacaggaaaataagcaactaacggtaacggctaaactaaaatctgatcaccactttattgcggctgatcttgtatttgaaatgctgttgctcgcccagcttgtccagcacttcttccaggctggcatgagggaaaacggcgttggtgacgggcgccgctccggatnnnnnnnnnnnnnnnnnnnnnnnnnnnnnnnnnnnnnnnnnnnnnnnnnnnnnnnc

SEQ ID NO: 78897 - DNA, 564 bp, Arabidopsis thaliana landsberg
  unsure (1)..(564): unsure at all n locations
tgttttcgaacctcatcatcatatatgtatatttttagtaaacttttgtttttgcatatatatacatatttagtaactccactttgaaaatcttgcattaccttatgagagcattgaatattttccatgtatttaatcaatattcatagatatttaactattattagtattatcttactattggacctcttattaaatggtagtttgaattacaaggagaactttaccaagttaataaacaaaatttcttctttaccaaaatagtttatttccacccaacaaacaataatagtagtttgacaaataataaacacatattaaaaaaatattaacttctatgtattatagaaataatcttacgtgtcatatttttttttttaaaatagtattatttctgggtataattaatcataaacatctatgtacatttaaaattaaaccattatttatattcaataaaaatataatctgcaatgcgtttaacccattaagccttttnttttgttaggtataattaaatcgaaactctataagtgtctaaatctattacgtgggtcaattgac

SEQ ID NO: 78898 - DNA, 403 bp, Arabidopsis thaliana landsberg
ctcttattatccacgatattgctcgcttaagtttattgttggtttttatctcttttcacttcgttcctcggttggaaaatgtcgctgcatgctgattcgcttactaagtgtgccattataacagtcaactgtttctcccccaggagagtataatccacgtgtatgtttcaatataattcaagtttgaccccaaaaaaaaactacttaaatttaactgacaataaagaaaatgaagagaacattaattataaagcattaaagaaaatacgctcataattaagtatagctaactgacgttcttcgctatattaagttcccaaaccctaacatcatcaactaattataggataactaggaaactaaaaaaaaaattgcggggtttaaggaagttctttttttccct

SEQ ID NO: 78899 - DNA, 570 bp, Arabidopsis thaliana landsberg
attaaacaataattgaactttagttcacccttcaccgtataaaagatacttcaaaaacaagtttcttctatttagaaaaaaatatatggttgtcaattactcaatctgttttttattatttaattatttacaaaaaaaaaattgttttaaaaagttgattttgtttaagtttttgtgcattatttatattgctaacgaattaaaagatttatgaacagtttttcattgtactgcatatgtagttatttttttttgttaaattagtttcattagttttattaatagtcgaataatgtgacatcaacgttaaatatactgattatgaaaaagttcgcatagaaggaaacctatgacaaaaactgcaactgtaagtaaaggatacatgttacacggcaagtctttcaaaacatctcgaataaaacactccgcaagaaattgatcaaaatgtgactttttggtttgtatgaaatggagtttctcatacgtagttatactaagattgtcaaagttaagaaactccaaaaagtctccttcaaatattaaaatatataatcaaccaattaaaacgtt

SEQ ID NO: 78900 - DNA, 572 bp, Arabidopsis thaliana landsberg
  unsure (1)..(572): unsure at all n locations
taaattcaacagaagtgaaacatgaagtagcgaatctgagattacaaaatagttaataattttaatataattacaaataaaacataggaagtgtttggtttctttaaccttacgcaatgttttaattagtttgaactcttcccgatacctaattgggagttgaaaaattcagtcctcagccaaacccgtttgtggctcactctacttcttgtgttacgccacacatatacacataatcgtttcacttttctggcaaaaaaccaaaacttactcaaaatcaagaggtatcatatttgttgttttctttaataaagttggcttccaattaatttgtactatggaatcatggataaaagtttcatgagtgaaaagtaaatgaccttctatctagctaccacgagagatagtcatataattaagttttgtgaacatatgtcaatcacaaattatatatatatatatgagtatttctatcatatattcaaagaagacagaacaatatatgttgtatctataaatagataacgtngtgtgtgtgtatcaatataatatgctaattgaaaaatagaaaa

SEQ ID NO: 78901 - DNA, 576 bp, Arabidopsis thaliana landsberg
tggaggaaacgtggtggctccgcttgtggcttcgggtccagtgatactaatggctgcatcgttttctaatgcaactttcgaaaggcttccccttgaagatgaacgaggagaaggtggagagggaggagaagttggagagggaggcggacgatccctttctcctcccccttcctcttcctactcccctccttcctgagccctgcccccgtccgttctcccccccctttcttctttttccccccctttccccctctcccctccccttcccttgtcccttgatctccttccccctccctctcccccttctcccctcccccccctttttccttatttctcccccccctttttttctcctcctctcctccttcctctttcttctcctccccccatctttctccctccttcttttctcccccccctccctctctttctttctctccccttatatattctcctcctttcccccccccccgcccctttcttccccccttctttttcctccctcccttcctctcccccctcccctccgtctcctctttctcttccttctcttccttcctcctccccccccttcct

SEQ ID NO: 78902 - DNA, 563 bp, Arabidopsis thaliana landsberg
caaggaccatagaactccgagttacgaagagttgcaggcattggatgatcttgaatttgcaaacttggtgatttttgggaacaaggtgtttcggcccctgcagcatcaagcatgtagagcttctatggaaaggaaggattgttttgttctaatgccaacgggaggggggaaaagtttgtgttaccaggtcatgatccttacctttctctgttcctgaaggggtgatttgaatcttgtttaggaatagttagtccaataaccaaaagtttatattgctacagtctgcatagtaaattttgtctctttggttgtttacaactccctgcaacactaaaagctggagtgaccattggtatttctccttttgtggccccttatccaaaaaaaaaaaggtggccccttaaccttaggtttgggaaaccccttttttttttttaattttaaaaaaattttttttaaaacgagtttttttttaaaaaacttggggggaaaaccccttttcccggttttttttttttccaccaaccaccaatttttcccgccaccaattttttcctcttttt

SEQ ID NO: 78903 - DNA, 551 bp, Arabidopsis thaliana landsberg
agacacccttatatatcgcagggaatgcctgcagggcattcttgcacctgcccgtaactgtcaggatttcaatccagggatataatacaagcagccatgcataataccttgtagctcatgcacataaagacgatcatacgaatcatggcaatgtcataaatcttaacatggatgtgatagcagaatctacaaaagctgttgtgaaggcgttaatatcaagtacatgtggaacgggatacaagagatgcaaacgctcgcctacattatacagtccaagccctctgccatttgatgcaggcataggtaaggagttgacactgcaggaaaaatgaatagtagtgtccgacacatttatgtatataaatacataggcgccacttgctgtcgagatggatccgagcttaatggcattctatagaaccggtatgagcactaaaggctcgatccgtaagggcggacacttgatctcggcagagtccagattatatacctgctctatactgaggcgcgtctgctcaatatcgagcgaaccgcatatcactagcatctct

SEQ ID NO: 78904 - DNA, 627 bp, Arabidopsis thaliana landsberg
  unsure (1)..(627): unsure at all n locations
gctgatccagattttgattcttcttcttcttcttcttcttcagatcgttttgattcgaaagatctctctggttcgtattctctgcgtttttccttttggttattttcgggtttagggattgttcgcttataccgcaatcgcacccagacgcttcttttttgcagttgcggtctgcgttcggtacaaattatactaaaccgttcctttgtttttttttttcgtaaaccgttccttttaaaaagtgaatcatatctttttttttaagcaaccacacactaattaaaaactcaactccacaaccgttacttaatttctagaaaaattagtttacataaataatttgaaaaataataatctcaaaaatcaagctaaacagtctgagagttgcataaactaaagatgttttctttctttttaactaagtgttgttttcttttcattaagttcacgatttcgaaaagtacatcagtggcagccacttacaacttatagacatacacaagaaagcaagtaaactaacaaccatggcatcagaaaccaacaaggttagccatgttgcatacccaanaagttacataataaacgttaaaaaaatagtaattgcatccatagagtatgccttgaacc

SEQ ID NO: 78905 - DNA, 420 bp, Arabidopsis thaliana landsberg
  unsure (1)..(420): unsure at all n locations
nnnnnnnnnnnnnnnnnnnnnnnnnnnnnnnnnnnnnnnnnnnnnnnnnnnnnnnnnnnnnnnnnnnnnnnnnnnnnnnnnnnnnnnnnnnnnnnnnnnnnnnnnnnnnnnnnnnnnnnnnnnnnnnnnnnnnnnnnnnnnnnnnnnnnnnnnnnnnnnnnnnnnnnnnnnnnnnnnnnnnnnnnnnnnnnnnnnnnnnnnnnnnnnnnnnnnnnnnnnnnnnnnnnnnnnnnnnnnnnnnnnnnnnnnnnnnnnnnnnnnnnnnnnnnnnnnnnnnnnnnnccggggaaaaaaaaaaaaaaataaaaaacctcttcgaaaaaacagggggggggggtttttttttttttgggcccccccctccaaaaaacgcgcgtccccactttttgttggaaaaaaaaaaaccttttttttttttta

SEQ ID NO: 78906 - DNA, 574 bp, Arabidopsis thaliana landsberg
atgagcaatcgttgaaagtgaggtcatgtgttatgcttgttaacaatattgctacatgtttttaatgggtttttaggtactttgctagatataagatgcaactctttcgagtttcagttggaaaaaatgatacgacctcaataaagtagaattcttttgcattttcccattgcctattcttatccgaaaactctcggctaagtagtcaaatcatttgtttattttccatttcttgttatctcattattattgttactagacctctcaacccaaaaaaagaaagaaaaaaatgcaagctattaaacgattctaggactttacacaaagggtttgtgttagaacgaagaacaacaaagctagctttacaagtctttagcaaaaaaaacgagaggattttgctagcaaaaagagctcagagctcaaatctcaaatcaaagaaaaaacagatgatcccagtcattgagcaacaaatccagattgaacatccatagtacagtgttaacgaaaccgggtttatcttggagaaaggcagtaagtttggtcttacagcgttatgtcctcagcagaacacgat

SEQ ID NO: 78907 - DNA, 227 bp, Arabidopsis thaliana landsberg
gcgtggcaggtgaagatcggactcttcctgctgccggcgctggtctacggcggcatgatgctttgcttctaattccccgtgcaggagcgcgtcgcggcgggcgtttcatattccgacatgttgaaggagttcggctgggccggctgtttgatcgtgtcctacttcatggccggcgcggtggatgccgtcgccgccgggattttccactcttcttttccaaactgggc

SEQ ID NO: 78908 - DNA, 176 bp, Arabidopsis thaliana landsberg
atgtccaagaactactactaattgtagcattgcaaaacattaagaaaggaagaaaaacttacttgaactcaactatataagaagatgattggtgatggtcttctaccaaataattcttctactacgaggtgggagtttgcgtcgagaatacagacaagcctgcctcacaaaactta

SEQ ID NO: 78909 - DNA, 541 bp, Arabidopsis thaliana landsberg
  unsure (1)..(541): unsure at all n locations
tgcttagccgtgtcgttgacacgggtggagcttaaacgccttgatagaccaggcgcgtaaacatctctggtgtgacgaagccggtgccccactttgcgtcgtactgcgcggtcggttttgccgagacggtctcgtcgacggttctgccctgctttttgagtgtggcgacctttgcgcggacggcgacgatcatgtcctgaaactcggagagctggtccttgttgccgacaggaccgtggccggggatcaggatggtggagccggtgccggtggcaagattcctggtcgtggcgcgaatgatgccgtcgatgtggccgccggtggagtagtcgatgaacgggtacgcgcnnnnnnnnnnnnnnnnnnnnnngtgaaggatgtcgaagtcggcgaacaggacggagatgtcggtgtcggtgtgagcgggatcgtagtggctcaggaagacggccctgccattaatggtcaggttgtcgtccttgaggaaggtcttggtcggcagcgcgccgacgggggcaggcggaaaatgtgcgttgaagat

SEQ ID NO: 78910 - DNA, 515 bp, Arabidopsis thaliana landsberg
agtagggcttgctgctcatatactccattcgactctagtgaatatgtgctactacgtaatccagatatctcatttgcgtctgaaaaattctgatattcgatcttttaaccttcagattaatattccagttggctcattgttatcccttgttgagcgagtgctgttggtgaacggatctctacctcgagccatgtcacccttcatgacatggatccaacaagaattggttcgtgcagaacttccagctttgcattcgtctgctctggaactcttgtgcgctactttaaagagtatccgcagcaaaccgggctccctttatttaatctagagtgtttgtaccttcattggcgaaaactatatattttacatgtcaaacacattaaatattatatttcacgtgaaacctgaccttaatggcattgacactgactattgacgagctgttcctttggtagttgatgtctagctgaagatagcttctcaattctcgtttttccagaaaatggattgttact

SEQ ID NO: 78911 - DNA, 2171 bp, Arabidopsis thaliana landsberg
gacgtggacataacgagaaaatgttgtaacaatatgcagtttatacttttaagattgtgataattactaatagtgatttgaaggtatttctaatctgtgaaatatacttataaggttgtgggattgaatgggagagtttaataagtttctttttttgttgcaaaataatcagcttttaaaatacttattacattcgaggcacatgaactatttttctatccattggccgattctaaatataaatagatgttggataatagagtttaaagaattttgagttttctaatatacagattgagaggccaagtgctagattcaatatgtaacaatatcaggctgatattttcgattgaatatcaccagtattcaataataaaatcatcaataagactaacaagtatggtctcattctaaacacagtaatcacgacaagaattctaatgagaatctatgaccaataaagactaacagtaggtgtcttgcatctacgctcacattatttcatttctttcaaaaaaggagtaaaattgtaaaaaccagagctaatgattcttccttctatgcacattaaggaaaaagtaaaagagaacaacatgagaaaaagcaaaaggaatcgaataaacaaacactttatctttttcaaaatctcatcaataatgacacaatttggaatttcattggaaactgtgtccttatggtccacaaaaattccaattcaaagcacacactttcgagacaaagacttgcttcaaaagaatcaaaaggacaaagttttttgtgttgccaagttttggatccttttataatgaacctcacttgaaagcaaagtttccacatttccaaattctatggctacactgcagagattcaagttcttggggacgcagtgcggagtagcagcacaaagcccgacacgaagtccgagtccgaggacaagtccattggtacagcttcgacgaaagaagacaactttaaagatgcttttgagtcttgcatctccgagtcgccgagagcagcaaccgttgattcatcatcatcacaaggacgtagccggacggaaacttaaagacttattcgtctcttcgtcttccgcagaggaagaacaagaagaggacgagagaccaaaggggaaaacaaaagaagaagttcttgcagccatggcggctaaactgaatgcagcttcaagattacaatgtgagtctgcttatgcagcaccagtttggttcggattcagcaaacggcttcttcagcgagcttggcgtcctaaacttggtaccattcacgagtaatgtaacccaattttcttctcttttttttggtgtgactttggaaaccattagtttcccatatgaatgaatatatatgtttcttctcaaatttggtatctttatgtttgaattcctaataaagattgatcaaaatttcacatttttgtatcattaagtggcccaacttgtaaaaaagaaagagaaaggtttaagcctttgatacctatttgcttccaaatgggattggggaactattgattaaacatcctgaaatatttaagataatagcattgtgtaattgaggaccaagaagtgagatggagaaaacagaaaaggaaagtgacattgtttgggtatgtcaatacaaagctgattactttacatattgaagaggcaaccaaaggaagtgaaaaacaaagcaagaaaaactaagcttactattaatattgtgttgacatttgacagagtgaattagttgcaatagctatggaagctccaacaacagcagcaaacatacaagattaagtaaaatcagagcacaaacagattggtaaataagcattgagcacacaccgttttgactggagcagatcctttagctttccataaactaagaagtacacatgcagatgagaagagacctcttataccatctaaatgatctttttttttttttttttttgagcaaataccatctaaatgatcaaaagtaacaaagagaggtaattatactaccgtgacactaactacacaccactgagactcataacaatgaaagagcaataagcaagtgaaatgttgggagattaaaaaatgatcacatctctaatgcttttagaatcaatggtcgttctccgaaaatggcataagaggtctatcaatacagaattcgtcgaccttctc

SEQ ID NO: 78912 - DNA, 458 bp, Arabidopsis thaliana landsberg
acatttctctcgattgagtacattttcatctaaatataaattatcttatatatacagagaatactaatgtgatgtcagttgtcactcatttattctatatatttttttttttactcagttattctatatatatttctaataatgtatcatgcattacatgattttctggatccctttatctatttattcgttgtgaatacagtttcctttgttctggagtctggaccattggaaggagtgatcaaatttacatacaagagatgctattttctttaaatgagtaactcctatcgaagaagacttgaacaaaatcaactttcacgacaaaaaatgttatattggaagtggttaacgatggatgcttgttaattatcacacggctgatgtttaacgagggacttggtaattttaagaccacacgttactaaaaacactaaatggccgctctttttgctttt

SEQ ID NO: 78913 - DNA, 542 bp, Arabidopsis thaliana landsberg
cccaacgatgttccatgcgtgccggaacctatagaatctcgttgtatttgtgttaagtcttttcttggagaaggggcttggttaaattcaatatatatagtccaatctattgaagtactagtacaccagctctaataagctgatgtgggtaagtcgttcaatagattggactatgtatattaaatttgactaagagataaactagagaatgggaataaagaatgagaaacggtattagaaagttctttgaggaaatttagatgtattttaaattgaagatgcatttagctataaacatagtggctacgttcctcttagagatgaggagagaattatattctattattatttggtttcttttcttcgattgtgtatggattcaatacttaattgtcaaaagcatcctatagttcagttgtttatagagtgaactggtaacagaaaataaagcttttgaatacgtactaacacttgacttacacgtagattaaacaagggaaaggtacacatatacaaaaggtgacaaacacatcataagggtc

SEQ ID NO: 78914 - DNA, 567 bp, Arabidopsis thaliana landsberg
ccgggcaaatgccgcatgaccgaaacggtcgtacttagcttttttatctgcatcgctgagcactttttatgcctcggccgcttccttgaatttttcctctgcagccttatcaccggggttccggtcgggatggtattgcatggccactttccggtaagccttcttgatctcatccgcaccggcagatttgcccacacccagtgtttcgtaataatctctcttggtagacatggtagtttaagtcaaaagtgaaaagtcaaaagtgaaaagtcaaaaagtcaaaagccaaaatccaacagctgatagtcaatcatatatatcatttatttacctaccactaccttggcgaaacggatgagtttatcgttgaggtagtaacctttcaccacttcatcaatcactttacctttcagggccgcggtgggtgccgggatctcggtgatggcttcgtgcttttccacgtcaaaatctgtatggatgctctccatgggcttcagtcccttcgcctgcaaaacggagcgtagtttattaaaaaccaataatataccttctttatcagcgctttac

SEQ ID NO: 78915 - DNA, 136 bp, Arabidopsis thaliana landsberg
gtaacaaccgacaagctcacgcaaaggcgagaagacgccagaacaaataggttttaaatttgcccaacacgcagtccgcaaacccaacaacaaaaacacacgcgcccgcgagcgagagggacacaaccaggcaggc

SEQ ID NO: 78916 - DNA, 558 bp, Arabidopsis thaliana landsberg
tccgggagaacgggtggaatataaaaaggctgataaagcagatttgtatgtcggccacttaccggctgtcgtcggtaattacccaggagaaaaagaaggctgaccctgaaaatatctatctctcccatgcaccgcgggtacgtataaatgcagaaatggtaagagaccttgtattagccagcagcgggctgctcaacaggaccatcggaggtcccagcgttaagccttaccagccgccgggattatgggagctggctacatccggcagggggcttctggctacctaccggcaggatcatggcgacctgctataccggcgcggcatgtacacctttattaagcgcaccgttcctccgccttcaatgatgatctttgacgcgagcaaccgcgaccagtgtgaggtgaaccgcccgagaacgaatacccctctgcaggcgctgatcatgatgaacgatcctactgtgctggaatcgagcagggctatggctgatctggtgatacaggaaaagaaaaccccggaatcgtcagttacaagaagcgttcatgcgcatcattaac

SEQ ID NO: 78917 - DNA, 402 bp, Arabidopsis thaliana landsberg
accaagctgggggcaagaactccgtccggcgtcctgcttgaggggcctcttgggactggtaagtccttgctggccaaggccagagccggtgaagcgggcgtgccttgtcttctccatctctggttcagacctggcggaaatgttcgtccgggtcggggccagccgagtccgtgacctgtataccaacgccgagaagaacgcgccaagcatcatattgatcgacgaaatcaacgccatctgccgacaacgcggcaatggccagggcggatgcccgatgatcgtgaacaaaccttgcaccagctggtggctgaaatggaccgcttcgaaggcgacaatagcgttatcgtcatggccgcgaccaaccaggctgacatgcttgacccggtcttgacccggccaggc

SEQ ID NO: 78918 - DNA, 539 bp, Arabidopsis thaliana landsberg
gctacaaatttcttctgcaatacaagacacatttcatttgactcttccatcgctttgtgcagttcctctgggttaaccaggttcacacaatagcggatcaccacgtataactggtcgtacagcctgcgggaatgcctgaggttatttagttgcgtgacgatacgcggcgaatagaaataatataagtccaccagctcttccccgtttggctgcagtaaaacatattcgtccctgaactttcttaatacggtaagttcttcgcagtcatccggcaggccgcgggatagcatgcatgcagtggtaataaagcaggataaacaacaggcatcatcctgtgcaggtcttggcgccatttggtataaacgccattccctgaaaagaacggtatcaccactttgatcatgtacttcccttataaaacctgcatattgaccggccagttctaccatattggaaagtgtgaactggcctttgttctggtccatgacagtgatctgtgcggcttcaacataaatggcaatggcatggccctgggaatc

SEQ ID NO: 78919 - DNA, 299 bp, Arabidopsis thaliana landsberg
tttggttcctgttacaaaattttttttttaccatgaacgttatatttggttaatatatagaaatttgttgttttaataaaatcattatctagtcaacattatattaatgtaatataattattccaattttccatacgtatacataattaaaagtatataatctttaaaacaaatttgaagttgataattgaaagaaatcattatctaattaatattatattaatgtatcataactattccaattttattcccatagtgattcattattaaaagtagatgttttctaaaaatattgcggt

SEQ ID NO: 78920 - DNA, 292 bp, Arabidopsis thaliana landsberg
atacaatttttaggaaaatgcttaattaattaagatcgaattgtggcttgcttattattcttgcggcttattttatactgccatcttcatatttaattactttttttttaaaattcaatacgagattaagaaattttatttaaactttaacgttaaacaatatatttgattatttgccaataaaatttaaaaaaatcattattgtatattaaattcttctttagggtgaaattttaaaatgaataaagaaaaaaacaataaaatttgaaaactgaaaacctttaaaacgaaa

SEQ ID NO: 78921 - DNA, 291 bp, Arabidopsis thaliana landsberg
gacccaaacaaaaagcgaccgaggagaaaccaaaacggcgccacaaaaagagaagaaggggcgagaacaaagggcgcgggacgagcgggcagccatggacggcgcgggggctacgggtggtggtataccactctggtccaggacaggagacggatgagctccgggcctccgggaactcggtcgacgaaagaatgggcaaggcagtggcatgcggtgacattggttccggggagcggatccggtgggcgcatactttgggaaggcacgacatgccgtgaaggactcttgggc

SEQ ID NO: 78922 - DNA, 543 bp, Arabidopsis thaliana landsberg
atattgctgtgaaactctacatgtacattatctttgggattttaggcatttaacaaacttatgattaatctgtcgggtttagggtttgccactcgaattgggagatgttaaaggaaacaaagtaagcaattctggttctgtataccccggtttagaccttggcgatggatgcaagtaaaagcgtctttctttaatggctttctcctcttcttcgatgtttgttgtacaactatctggttccccttctatcaaggacaagttagagaacaatgaagaaggggtgcccactggacttgttaaaaggttggtatttccagatttagatgatggtgtcgtaccagtgggcttaaagctcagaggaggtttgacaatttcaagctttggcctcatacattgccttctctcatggagctttgaagttggcctcttttgtatggcggtttttatcactgttgcttctggtgttgctgctgcagcgttgttctttgttggacctgtcaagcgctgcacaatttctttgaaagtgttggtgtcagtcttgac

SEQ ID NO: 78923 - DNA, 610 bp, Arabidopsis thaliana landsberg
  unsure (1)..(610): unsure at all n locations
gagcgaactgagcccgagcgaagtctttaacctcgtttgtttttttagcaccgccaccgatgaaacggtgattggcaccattgatgggcagaagaggattgacgccataggcgctgcttccagtctgtccagtgttagccacgtcgaaaatccgagtttccacgccgaccatcaaagcacggtgctggcggggcaagaaggcagcgatcacgtcattggcgtagaagctgtctctcttgaatttctccgagatcgagttggcagaatacttgtattggtcaacagtgaactgatagttaccagtatcaaacttgttgtacttaacgcgggctccttcaacgaagtcagccgattccgcttcacccaagctggggatattaaacgtcgagctaccggcatcagtcggcagatcaagcattcggacgtatttagtggcaaacaaatcatcaagcagaagagtcttaagttgattagaccaaagagggcttctgactaaatgttcgttagttctgatttcaaaaccagccattatagtctcctttngagttgaattgactcaaagggatagttatcaagcatcgaagaaagcttctccgtatgctagagcatc

SEQ ID NO: 78924 - DNA, 595 bp, Arabidopsis thaliana landsberg
  unsure (1)..(595): unsure at all n locations
tacagctgttgaagatggtagaaaaaaacgaaagaaacagatctctattggcacttcttgtcgggaaaataacaaatgcaaacatggaaatttgggtttgcctgatctagaaatacaaaacgaagatgtttttgtttgtttggttttttcggaactttaaacaggaaaaaattgtatagatcttgaatcttacaatggcatatataaaatagaatattttgtttcatggagcgatatgtgctttgttcctagattatcatgtcttgctatggttcttatatatacactaatgaatgtttcttctctactaagtagtaattaagtactatacgggagggtcgtttcgattattcgataaatatcttttcttagatacttattttgatttctatgatgcanatcgtactataaatatgcattaatgcaattatcttcgctttctttctttctaagacgaattgcttagcttcttcgtattgcctatgagttggttctctctctctctatttggcagcaacgtgaggctgtgtctatccatgagcacgtggtgaatcaattctctcagaggttatgtgttttgagaagttatactcac

SEQ ID NO: 78925 - DNA, 528 bp, Arabidopsis thaliana landsberg
ctcgccgaccgtcgagttcgagattcgttatgaagacggcatggtattgccggctggtgagcgcggtgaaagggatgggggcggcgagcaggtgtccggcgaatatcaggggcgcagcgcgctcgatgcccaaggttggttcccgactcgcgacgccggttacatcgacagcgccggctacctgtttctggccggccgcgctgacgacgtgatcgtgcgcggcggcgagaacatctcgcccggcgaaatcgaagatgtgttgatgacgcatccggcgatcgccgatgccgcggccgtcgcgatcccgtcggtcgaatggggcgaagccgtcggcatcgccgtcgtcgcccgccccggccatgccgcgccaggcgaggacgaattgaagacgctgatcaagaatcgcctgcgctcgtcacgctgccccgaacgcgttgtcgtgctcgacgccctgccctacaacgaaatgggcaagctgctgcgccgcgaggtgaagaagctgttcgtcgattgagccggtgtccgatg

SEQ ID NO: 78926 - DNA, 617 bp, Arabidopsis thaliana landsberg
  unsure (1)..(617): unsure at all n locations
ttaaatttgattcgccatcctttgagggttttcctttcgacacaaatggagaagattttgagcattcttacgcaggagaaggtactgcaaagggttatggtttccggtatcctggttacaaacctggtacacttttcgtgacatctaaaggtcttctcatgttcatttggaaagcaactaaagctgtgttgacattgcaaagacttaaccttggagagctcttaaggaaaggtgtatgtgtatcgcctttacctccatgtttgaattttgcttatttgataaaatgtcacaccaatgtgtttgcccctgaacgaagaagatcataggagattgctgcaacaaatttgaaactcacaagtcttctctatttccaatataataggctcattatcatcattgatatttagttatttacacatgtagtaaatttaaaacatgctgctaaaggatacacttgtggacttgctactgtttggatttagtatcaaacctattactcaaactacatagatgtgttggactattcacaagctcaatgttaatcaagtgtanatgtgttgcannagtaaatanaccataccaggaaaaaagaattcacanattagttttttattttg

SEQ ID NO: 78927 - DNA, 532 bp, Arabidopsis thaliana landsberg
  unsure (1)..(532): unsure at all n locations
ttgtactttctattggttgaaatgtgagttattaaattaaatatgtaaaagtgtacttgtatgataaagacttcacataactcgataacttattcaagtacacacttccttctttataccattgtcagtacttcccttaaatagtatacaaatgtactattttttcttttcaattctccactggttagagttgtgtacccatttcgatgtttataagaaaacatatcagttgaaattcattttagattgcaagagaactaaagtttggtttgtctatcatatatcagtatattatgatttatgacgtgacaagtttttattacaagagaaaaaaaaagttaagtttagtaaaatagaaggtcatgagtatactaaagattaattttttcgttctttggttggntagtttgaataatattacaaaaacaaccagaataaattcatgtgcatatatagtataatagtaaagttcctcatacgtgcattatatatccacctttcattgctgggataaatctttatataacatgat

SEQ ID NO: 78928 - DNA, 567 bp, Arabidopsis thaliana landsberg
ccccaaatgcataaaatttcaaacgacattacggtgtcatgtttcccttccacaggtcacagttttattgcccagagctggaaaaaagttgattgcaaaatttaaaatcgaaaaaagctaaaaggggtaatttcgtcataaatttgaattttttctttcactgccagctctgctttagagcttctctacttcttcttcttcttctttttcaagttcgcttaagagatcgatcggagatttcggagtagagaaaaatgtcaggattcgtcgggattttggtatcggatccatggttacagaaccaattcacgcaagtggagcttcggagtttgaaatctcacgtacgtacgtcagatccattgaaattgaagaaaatctccataagctttttgatatttcgtttgtttctcattgaaattttcgatctgattctgtcaatttccaaattctatagttcacgagcatgaagagagagagcgggaagctaacagtatcagacctcgcgtcaaggatggggaaatcaatagtagttggagatcagaatctaagcaacgaagaacgagcgac

SEQ ID NO: 78929 - DNA, 561 bp, Arabidopsis thaliana landsberg
aaaccaaataaaatgcctctatctactatttgcatatccttattatttttttctcacattattttgttgtgatcggttcggattaatttttattctaagtgtaaaaattaaataactttaaattaaaaatcttaaccctaatttaaaatctaaattttggtttctcttcttcttttacaaataaactgacacataacatcattttatttctaatttaacattgttttaaaagtgatactaccattataatgtaatttaaaaaagcgacgccaaattcagtgatgctaaatatatttagcatcgctttgttaaatgacgctgtaattaaattttttcatcgtttatttctggttagtgtcatttatgttagacatttctattactgattctacaatcatttaataaataatgtcaaatatatagttagtatcagaaaataaaaacgacgttaaactgaacattaaagtcagttttcataaatgacgttaacgttaatatttgcattgctttcaaatcgatatcaaatattaacatcactttatttaggtttttaaatgatac

SEQ ID NO: 78930 - DNA, 468 bp, Arabidopsis thaliana landsberg
  unsure (1)..(468): unsure at all n locations
actagggtagtgtgatttgtattcatgataagtaatttcatttatgaacccaataccgnngggagggggcagggggtgtttcaatagggcacacattaacttctcgtaagatcgtatggagtgttagctattctcgtatatgttggtttgagagaatgtatacgtaaaggaccttgttccctttgcaatcgtaaaagctttgggggaaccttgcagtaaaaatctctcatggctaatttgattccacatccctatgtcagcaagttgctttccttcatgccgattaaatcaccttccatgagaatataccttattttattccttacctgacttctagaaagatttgggaagttttgttgaggatcattctaaactcgatgtatgctctccatcttatatccttgaaactattgttcgttagagagttgcaaaagactatgcatcttcacacaaatattaaaacggata

SEQ ID NO: 78931 - DNA, 481 bp, Arabidopsis thaliana landsberg
tgtcattatagccatattaaattatgtttggctctttcaagttcattttcactaatttgtgagttatggcttggttctttttttgttacagaatgacgagactaaaacaaatgtggtcaagcattttagtgctagccgtggtggtgatcggagccagagctgtgcccatcacgtatcttgaatctgcagtggctaaaggagctggtaagcaataattttattttcaaatgcttattaggaatcaggttcgagcatggatagtatgaatagatagaaaaataaaaataataatgaggctttatagtaagaaaaatagagccaacattggaaatggtcttgagtcaagtttctaaaaatccaaaaaaataaatagtgtcttccaaatttcaaaacggtattcaatataaatgttcataattttggatatttcagattaaaaatctttttctgtgtttactcatgagaataacttggattttaa

SEQ ID NO: 78932 - DNA, 440 bp, Arabidopsis thaliana landsberg
tgggagttcctgccgatttctttattcctattactttagaacctgtcaaacgctgagagattggtggggagccggggggcctggaaaaagtactttcatggtgatcccaatattgttgggacgatggtacaggttgcagggcagaaagccatcgtcgtgggcgtgatcgaggattctttatggcgtattccaggaagaattgatgcctgcctttttgaggacgcgcatgccatggcagctttgccgtctgactccaatggatacgtagtggccgacgtgaagccatccgattttccgcctccctctaatggtcagtggcaaatgtcggttccagaccccgacattggttctggaaactactattgcgtttccctgaccgaacgaagcaagcaacccatgttctgttttttctttgcgcttgtcctcgcttgtcttacctt

SEQ ID NO: 78933 - DNA, 487 bp, Arabidopsis thaliana landsberg
  unsure (1)..(487): unsure at all n locations
caatccacccaactatatttagggangggaagtttaaaaaaattaatggttgaaaaatataaaataaatttaagtatccttataatcttaatattactaatctagtactcttcataaagtaatatcccaataaataagtacattatggttgaaattagttttggtattaatattgtccatacttgtgttgcggtcagggatatcttctatcaaccaaataattcacaaagaaaaaaatatctcaactaaatagataaatttacaaaaaggacaattcatcttagaatggaagtccatcactgtcccctttgatactcattgtttttacatcccagacatcgatctcccacagttttgaaaatgacaggtgaatattgaaagatgtaatatcaaaatgagaagtgagcatgtggaaagaccaatatattcgtgagttgaaagtttggtgcatgactaattatagatgtgctagtttctagaattttta

SEQ ID NO: 78934 - DNA, 299 bp, Arabidopsis thaliana landsberg
  unsure (1)..(299): unsure at all n locations
agggganaggcgatggcccatacatttgagcaacccggttcctcaccccggaanngggaagaaggggcgggaggncttgaagaaaaaggccggagcgccacaccacccgaccggcacaggcncaggaagcagcggaggcccagggagaancacacgcacccccaccggaaccaggcaacnccnccagaggacgaccaggnaggccggcgacaacggcgagcccccccccagcaaggcaaccccnaacnnnaacgganaggcggccccggccgacggcggacgaaacggacccaccccgc

SEQ ID NO: 78935 - DNA, 511 bp, Arabidopsis thaliana landsberg
atttatacaataagaaaacttcaaactatatatacgaattattgatctctactttatcattatctctcgttcttagatcgtttatcaaaagaggggttttaatgaaaccaattaagtaatgtaaccaattgtggacgtacgttgcgtggcatccatcctaccacaaataaagtgtcggagtattcaaatttcaaaccctaattagaaaataaaacctataggttacaaataaatgacactaatgggtgtgatgtatactttgagtctaagaaagaaagaaaaaataccaagggggtggtgagcgtactggtaatgcaaagggttggtttccttgtgccccggatttcaattctcctttgggacggagagacattcgagattggagaggatgtacttgagtctctaaaatcggctaattataacaatctatgttgaccttaatatcatttaacctaagcacagaaatacttcccttgaataaacattacgtgtacctgaactacaacttttt

SEQ ID NO: 78936 - DNA, 308 bp, Arabidopsis thaliana landsberg
tttccaaacccctagaaaccactcagggagcgtgtgaaactcaactttcgcccccacttgagcatctcacgcaatgtatagagcttctgcgagccaagcactgacagcgaagactatctgtgacacatcatccacctcgcttgctactttgactctctccacatttgccaaaccacctgagcacaccaaatgatctcttgcatagtgataaatattgctatacaggctgttggggtatgcatgaaaaagcctcaagtgatagactttccataagcgtatatatctcactaaataagcaaagagaaaac

SEQ ID NO: 78937 - DNA, 432 bp, Arabidopsis thaliana landsberg
cttttcatttgcccatctctattccccaacaaggaacaacaacttggggttcggcgtactacattctaatggacgaattataaatgaaccaaaaagccgaggatacactttactataatgtaatacttgaacaacacaggacggatggtcataaccatgactacaagcaatgttcagatgcaattgaacgcgaaaaggaaacatttcggaacactctaattggtaaacgagacgattactcgaggctcttcttgatagtcggtcacccttcactctcattacatcgctttggattgactacggaaatagcattggaactataccatacatatgcacataatggattaattctacaacacctatcttctaacataggacgctctaatagtcacattcctgaaacaaacccgattgactgatagagacttcacc

SEQ ID NO: 78938 - DNA, 612 bp, Arabidopsis thaliana landsberg
acctccagcttctgacttaagttgtcgaagaaatttaataaggtccattttctctatgtcagagcgctggttttcatcccgggtgctcagaagcatagtttgcatgtcttcaagtctattcaatatatcatgcatatttctctggtctcgcgagttctcatcaccggaacctatacctggaattatttcaagcttcatcaatacctggtagatccctgttctcagtattttaatgcagttaatcgaggagtcaatctgcacttgtttcccaatattttcctcttctagttcagaaactagcttctctaacagtttagaagcctctttaatatcctgattctcagcaatcaaagaggaactcttctcaagccagtcctgcaaacatttctgcagaacaataatctcaatgtgagcatcatgagctcgatccagttccacttgatattctctcacccggcattgattttcatcttgaaggtgatggatcgttgattccatgccattcatccgactttctgaaaaatgcacaaaactagcatactcacagtccttggcatataaagacactcccaactcttcaattttctgaagagaaagactcctctcagtcgc

SEQ ID NO: 78939 - DNA, 566 bp, Arabidopsis thaliana landsberg
catcctcactccatgtaaccaaatattcctaagccacctattttgattctgcacgatcaatcaatattacgaggtttagggtttgttttgtcataaagggagtttaattagcttataattacgcatttaacaattatacttacataaatgggcttcaaatacattcatggcattagcatttgtcggtacatctttaccggcattgccggttcatccggtccccacacttcacgacaaacagcagcagttccgatgtccggcgttcggcggaagaacttataaaataacttttctaaaattaaaataaaaataaagaatgaatgaaagaagatagacaaaattgattattaattgagtttgctttgaagctccaagaaccaaacgtatccgggtataaaataatacgagataaagtgatagaagacctaagactacctcattactaaaaatatggatatttttctatacaaatccacgaatgaaaagaaaaagaagttggactaattaaattgaaatccaataattgtaaatataatattaaaacccaataaattagaagtctcatg

SEQ ID NO: 78940 - DNA, 490 bp, Arabidopsis thaliana landsberg
ggcggtgggcatcggactggtggaagtcatagaagccgctgcccaggaacattttcgtggtggggcaatgcgccacggcggcgccgctgtcggccagccggcggcggtcgtcctggtcgaggtagatcgcatggccgtagaacgcgccggggcgcagcaggctgtagcggtcgtacacgtccaggtagctgcgggcgtcggggaacagctcggccacccatttcacctcgtcgcggttctcggccacgtgggtctggatgaaggcgtccggatgggcgcgcgccagttcgccgcaggctgccagttgcgccttggtggaggtcggcgcgaagcgcggcgtgatggcgtaagccagccggcccttgttgtgccacttcgagatcaggtcggcggagttccgcgcgccgctcttggccgtgtcgcgcaagaattcggggcagttgcggtccatcagcaccttgcccgtgatcatgcgcaggatgcgggcctg

SEQ ID NO: 78941 - DNA, 582 bp, Arabidopsis thaliana landsberg
  unsure (1)..(582): unsure at all n locations
ccgacctcggaagatttgagattacgctatctttctattcattttccctataatctcttgctccaacgcgggagctctattttcaatttcactgccatcacccaatatcttctccacaaaggctctatccttatatcccgaggcattgatcttcacattcataaatgcgccgattaccgcactacgggcacataaggctgctaccccggcatcagtaaccgaattggggtttccggtttctgccatagctttgataactgtaaggctgtagcaggcggcttgcatcaccttaaatggcacttcgatagcatagcgggtagcgtcctgtatggccttgtcccgggctgctttttctccgccgttggatttgggtaagccaaagccttccataattttattaaaggcagcggcgacttcgtcaaccagctntaccagctcatctttatagcgttggcctttatctgcccagtcgctgaattccttccagcggccatcccatccctttatgtgggatgacaggttagccaccatggttgctaacgacgcgcccaaagcacccatataggcggagatggaaccccc

SEQ ID NO: 78942 - DNA, 218 bp, Arabidopsis thaliana landsberg
  unsure (1)..(218): unsure at all n locations
gnnnnnnnnnnnnnnnnnnnnnnnnnnnnnnnnnnnnnnnnnnnnnnnnnnnnnnnnnnnntggaagtggtgtacccagtaccccctcactagtaaaccctcagaacctgcaattgcaaggtcatcttcaccggacagcggatgaagatctcgcgttagactgtgaggtaaagaaggagttacaccaccgaagagtttgttttttcattgttaatact

SEQ ID NO: 78943 - DNA, 536 bp, Arabidopsis thaliana landsberg
  unsure (1)..(536): unsure at all n locations
ctgaacggcttactgtaggattccggtttcctttttccgtttctgcagctgcagcacgaaatcggggacggggtaaaacggatcgtagcccggtcgcaagccgacgccccggacgagacggctatcgcgcaggcgctggaggacgtcaacgtcaaagtgcgcaaatacaacaacacggtgccttcgccgctgctgcaaaaaacgcgcattttccgcgagacggcggagctgcagttggagcgctgggagtaagctcggccgtttggccgccgtgggcaaaacagttacaataggagctatacgcttcagaacnnnnnnnnnnnnnnnnnnaacggaccgcggggattgtggaaatgaacgtttcgggcataaacgatttnnnnnnnnnnnnnnnnnnnnnnnnnnnnnnnnnnnnnnnntccgggctgatggcctgcatcgccgccagccgcgcggtcgcgcgcacgctgctgctggacaaaggcgacaagctgggccgcacgctgggcatttccggcggcggtcgctgaacgtga

SEQ ID NO: 78944 - DNA, 528 bp, Arabidopsis thaliana landsberg
  unsure (1)..(528): unsure at all n locations
acgcgctagttgatgatgtggtttagttactctatctggtttccgaccgcgcggacgttagcgagggggggggggtgtgcggtgtgatcatcacgggcagtgaagatgacacgtnnnnnnnnnnnnnnnnnnnnnnngtgatcaaccggttcatgtcagagaacggcgatatctgcgaacacggcaactacattcagctaccggcaacggatgtgggaaggatctacccgtgagtgagcttaaggaactagaccgcatcgcggtggaactgtctaaccggctggtcaatgcggcgcgcaactccggcagtgagccggtagtgttcgtgagcgggaactgtatggcacctaactggcgatggttcgacgccatggaacgtcttttttggcagtatgcagacgataccgcgtgctgggtttgggaacatgttgaatctctctgcgagtcgcatgacgtgtacgtggataccgggccggacggatcaatctacgtggtcgataccgggcgattgcagtaccaggacaatga

SEQ ID NO: 78945 - DNA, 548 bp, Arabidopsis thaliana landsberg
  unsure (1)..(548): unsure at all n locations
tcttttaatattttttccgaaagttctgaattttatttaatttttgaatattattgatttggtgaataaatgggctgtgtgcttatcaaatgggagggcgagtgtgggagactggagagcaatacgtgcagataacatgagtgtcccatttatatagcgacttcgcttacattcatttactgaaactcaacgtcttcattcaaatcccaacgtacttagtggttcagatatttacttctacatgcccccactgatactataattagggtaacaatttcgtttttatcgtacaattgtttgaaacagcctctcattcgaataaaacacaatttatcagagccagtagatgtcttagtttgagacaaatatatcaacaccctaattataactatcttatgcaaaaacaaaaatcaataatccaaaacttttgatcaaaaacaaaaaatttcaatcgtttccacacagacaaaagtgttggataattttgcttataatttcattaaaatgtgattttagactttaatgtnnacttgattatatatatggta

SEQ ID NO: 78946 - DNA, 507 bp, Arabidopsis thaliana landsberg
  unsure (1)..(507): unsure at all n locations
ttctaatcttctggtgttgtgaatgctgtttgtttaattgttgtgtttctttggcaatatcaattatgttctgatttctaaccgggatcagagaatgcatgtggttactatgaataggtctatatttatgcattttttacttgaggtttgtttcttgtcattgnnnnnnnnnnnnnnnnnnnnnnnnnnnnnnnnnnntacttcagaaattgaggggtacctgttcaattgatttccatgtggtattgtacaatcagttgcattttaacatccattaatgtcatgttttttgtgaagtttggtatgtgaggacatctccggagggctagaatttaagggtatccccgccactaatcgtgttgatgattcaccagttttaccaacatctggtaagttggagcagaactagaaaggtatattagtatccactttatgatattatatgagctggattcttcttttttgagttcaggtntcacatacataaaatcttttgatattgagcct

SEQ ID NO: 78947 - DNA, 589 bp, Arabidopsis thaliana landsberg
  unsure (1)..(589): unsure at all n locations
tacaaacagaacatgaagttagttaaacaaatatttttaacttaatttttagctgagtacaatatgatgtcgtgggtggtattattatgttcagttatcggccagcacaatattttggggaagatcctcgtgttttcctaagatcttttggctttaaaatttacttaatagaaatatattttgcaacttgtgtttataaattcccaccttataataatttttcatatatctgtgaataatgacttcacgtttaaatccaaaacaaaacgaccacatgtctttgtttatatccaaaaaaccgtttctttcatcaggtggtcgtcatcgtgtttttgtaatgtacatagcataaaattatactagtttactcggggaaatttattacaatgttgttgttactagaatactaattttcatgaaagttgcattgtttggagtattattatttaactttcatcaaaattgcatttaagacaaaagtaaaatactaaangaatgtgtgtttgttctaagaacatttaccgaactgaaccaccaaattaatttgcttcattgattgaatctgatgataattgatacttcctctttt

SEQ ID NO: 78948 - DNA, 558 bp, Arabidopsis thaliana landsberg
  unsure (1)..(558): unsure at all n locations
agagtttaagtttagccttgttgtgctcttgcctatatttgttcttcctnnnnnnnnnnnnnnnnnnnnnnnnnnggatccctacgatgaaggaaaaggcaaacgcggggaaaatgcttacctgcgccacctcacttacgaaggcgccagaaagaaatacggggnnnnnnnnnnnnnnnnnnnnnnnnnnnnnnnnnnnnnnnnnnnnnnnnnnnnnnnnnnnnnnnnnnnnnnnnnnnnnnnnnnnnnnnnnnnnnnnnnnnnnnnnnnnnnnnnnnnnnnnnnnnnnnnnnnnnnnnnnnnnnnnnnnnnnnnnnnnnnnnnnnnnnnnnnnnnnnnnnnnnnnnnnnnnnnnnnnnnnnnnnnnnnnnnnnnnnnnnnnnnnnnnnnnnnnnnnnnnnnnnnnnnnnnnnnnnnnnnnnnnnnnnnnnnnnnnnnnnnnnnnnnnnnnnnnnnnnnnnnnnnnnnnnnnnnnnnnnnnnnnnnnnnnnnnnnnnnnnnnnnnnnnnnnnnnnnnnnnnnnnnnnnnnnnnnnnnnnnnnnnnnnnnnnnnnccgc

SEQ ID NO: 78949 - DNA, 374 bp, Arabidopsis thaliana landsberg
gttttacgggtaaactatgaagggaacaccatccttaactggccaatatacagcttaaatttttagtcacgctgggcatccacttaggcacacatgcttagttataaacctaacattgccttttgatgatgcttgataaagctgaaatttgtactggagctcttgtgtgcgggttgaatggcagattggcttgagagactatacaagagatggctcttcttgctgctcaaaacgacttattctatcttgacgaggattatacatgaacgcttactgcctgtcgaagaggcaaccagattgagtcgccctatcctcatgttccacgctagacatgcttaacgttcagggtgcgtgaccatttgataatgatggga

SEQ ID NO: 78950 - DNA, 629 bp, Arabidopsis thaliana landsberg
ctgcgagtgttactcacatcccgtttgtctacgtcatggtaaatttttttctctgtcatctctattcatacacatccttcattattgttttctaattgatggtgctaccgtgtattatctagatgttaaaaagcttgaccttccatgtgggacaacgcatactctttacttgagagacaacattgaagacatggaagctgctgcaatgaagtttgagaaggaagatggagtttcagatttgattacaactgatgaagatttatataagtatccatcatcgattacacttccagctgcgaaagaagacggatatacaccgtattccactatatactttgatttctatactgaggtagagatgacatctcatgaccagttgcaatcgggaaatcccgtcatgagttatgaggcaaacgcttcatgtatctcctcagttgctgatgattatgaatgctctgattacgtaagttttaccacgaatctgtgacaaactttatctgaccgtctctttcttcaaatatctgatttctgttttcttctaaaagcaggtaaatagacgagctaactgtagcagcagtagtgattcaaagctctcggaagaagtagcatgcagcagtagcaaaaaactc

SEQ ID NO: 78951 - DNA, 488 bp, Arabidopsis thaliana landsberg
cctatggagagaggacactctgcagattctcttgattcgaacgcatcagttgcaaaagcttctaaggtgatttcgtctaaggataataagtggattcaagttcggaaaggaaccaaaattattgtgcaagttgttaaagagggcctcggtacgaaaggtccaactcttactgcttacccgaagctgagaagtagattctgggtatgagatatgttttatcccgttactcttttccatttgtttcttattattctattttctgaaataaagtttatccttataggtactattgactcgttgcaaacgaattggagtctcgaaaaaaatttcgggagttgagagaacccggttaaaagttatagcaaaaacattgcagcctcaaggttttggcctgactgtaaggactgtagctgctggccattctctagaagaactgcagaaagacttagatggtctgcttttaacctggaagaacattacagatgaag

SEQ ID NO: 78952 - DNA, 380 bp, Arabidopsis thaliana landsberg
atacacgacagcgacggtgcctgtactggcctgccggatactgcatcatataggacccgtaccaaacaatgcttgacgaggaagaacatacgcgggttgaggaaggccataacgccaccaacagaagtctggtaccggcacatggagccataagaacggtggtaacaggcggagaccaagtgctgaaggtttcccaaagactgggtgaagcacaccaggccgttggacaggcacatgtggtcctgccgacagatggcccaaaggagatgctgagaaatggggagaacgacgaagcgacaggagatcaacacacggggtggcaagatgcacaacacgaaaaatcgaggcctggaggccaaaaccgacagagttcaagggaa

SEQ ID NO: 78953 - DNA, 147 bp, Arabidopsis thaliana landsberg
acgactttttttttaatgctagtttctattttagcttccgcgagctcattctccatagaactctgtttaaaatatgttggtggatatcttacaagccccttatcttattatgtcgttcaagattgttttaagccaacgcctatttaa

SEQ ID NO: 78954 - DNA, 132 bp, Arabidopsis thaliana landsberg
gtgattaatgacatttctatttttgatcgaaacatcagagtgaaagggatctggggaagtgttccattgaaaacccaccaccatggatccagtgcggaatttacaccggcttgtgacaggtctgtcataccc

SEQ ID NO: 78955 - DNA, 551 bp, Arabidopsis thaliana landsberg
gcactttggatagtggagggtaaagctatgtaattttagtgtttgctgattgccaagtctttatctttgattttatgaaagtaaagataaaaggattaagctataacagtcacattccactctcaattcttagtaagttaattttttactatttaaaattcagatctaagatattcttttcatttcaatatttcagataaattgggattttggatttcgcaaattcggcggttgattaaagtaaatgattttaataaaattatactaactaatgaaaattagagatacctgtagcctggagccactcataatgaatagctttaacttagtggatggactaaagcgatgatataaaaggagggaaaaagaaagaaaacgaataaaggtatataaaaaaaattgcgttaataaatctaaagtttttgttgtgagcatacacatactagtggatttaaaatattttgagtaagacaaacaatttaagggttaaaaagtgaaccaacatcttcctatgacattcttactggaaatttgacatatgaaaatttgat

SEQ ID NO: 78956 - DNA, 627 bp, Arabidopsis thaliana landsberg
tgatataatgaattgtttacattaaattgcaacaacatcaaataagggtaacatactaacatatagtttgtttgtttactctttaaaaaaaggggataaactaagagctatttctgctataatttaggaacaaactggatcacatgacaaaaatgcatcataattcatattaaattttgtgtatatctatttctcatgtttagaaataacattcttgtgtgttatacatgttatcagtttttcttcctagatggaagttttattgttggagtcttttaaaaccatactcactatgttcctctttatttgatgttttggattttagatagaaattaataaaaaatatggtttctatttttataaaattatttttttgttagtttagtaattgtatttttatttttttattattagtcacaagcaaaaataataacaatatttttataaaacattaattttggtcgaacaagtaaaaataactcaaaacatcaaataattagaaactaaaaaagtagatattgtcaaaatttgtgttgagttcgaataagataatgtggtcttctccacaaaatttttagataaatgcacttcttgacattagagaaccaactatttattagaataaac

SEQ ID NO: 78957 - DNA, 128 bp, Arabidopsis thaliana landsberg
tttagcttatggtagtattgggaattcttttggttttcgttttttaaaacccatgcagctctatagcagggcggggcaacttttaaaatagctgcctcctatccccatctatattaacacctaaattc

SEQ ID NO: 78958 - DNA, 481 bp, Arabidopsis thaliana landsberg
tgaagcaatataaaatacaaatgatcgccccaacattttccagaacactaataagtactaatagctagtgtatatatttacatttactctatataccaagcaaaagacagtttaataagtaacattgtatacgaaaattccatgtatctttggaaactccatcattctcgagtttagaatctctggaataaaagaaactaaagaaaagaaagaaagggtcctcgtgttggccactttggttggaatcgcagcactcaaatattcatacgaccattttccttactaattatgatatttgttagctcaggtgttgacctgaaagaagaaaaaacgacttaggtaatataaatcatagcttgggcccttcattaaatttgcatcaatcaaaatcatgtgaagaaattacctactatgctactacgaagtctatgatctacatttagtcattcattttctaagttactaagttgtttttgccctt

SEQ ID NO: 78959 - DNA, 312 bp, Arabidopsis thaliana landsberg
ggaccggcgccgttgacgaccgctccaagacgcgaatgcccaacgtggtcagtcgctgcgacgtttcgttttctcgcgggatctgactgacctcgcgcagcaccgacaaaatgacggcatcgacgcgctgaccgatcagcagcgaatcggtcgccgacagcaccggatgcgaatcgacgaccacgaaatcgaactcttgctccagcttctcgaagatgcctttcacgccgtcgcgggccaaagcctgcatgacttcgtggtcccattggccgggcgtcatgaacgacaaaccttccagcgtcgtcgtttgca

SEQ ID NO: 78960 - DNA, 416 bp, Arabidopsis thaliana landsberg
  unsure (1)..(416): unsure at all n locations
ctgcctgccttcttttgacatttgcactgctcggagagaatgcattttccgtctgagtgtttgtcggcactggcagtggnnnnnnnnnnnnnnnnnnnnnnnnnntcactctgacctgatccccagtgagcaagcataactgcgcctgggataagtcaaaggaccaagagaaggagataaagcagacacacgcacgactggtcttacccgttcggtgatgcgtcaagttgacttgccaccgcgcgcccctttctccaccttttcctctttctccttttcattgacgaccctgtgcgaacagggtaaaatgagccgtttaatgagtttactaggcaattgtggaataaaagttcaattgtgtgaccgaaggcaagcaaacagcgttgaaacttttgactttgctaaagaggatgcaa

SEQ ID NO: 78961 - DNA, 587 bp, Arabidopsis thaliana landsberg
ggacctatagagagattcaaaatttattaaaaaaaacgttttatggtttgtaaaagtgattacataccagaatttgagtgacgaagtcgacatttgcgagagggcggcgaagagcttggaagacggaagagagagatgagacgagagaaatgagaagaagaagaagaggagtcgaatacttcaatggatcatctcctctaagtaatccgccagagcttgatcccaaccatgcctcgcatacaaattcatgtgtgccattatttgtaacactattgttcatcttgtttctctttgggaatattttttcttcttaaaactagtattcacgttcttctttataaccatttttgtttgtgtttttgaattcagcataacgctaactaattgagcaaacagatcaagcttgttgagctggggaagaagatacatgtatcttttttaagattttaaacagtttttgttgtttttcaaggattttgtgttgactttataaccgtcagagaaaaataggaaattatatatgtcatttctcactttcgcatatttaaatttcggtattactcatttttaaatctgtttattatggg

SEQ ID NO: 78962 - DNA, 229 bp, Arabidopsis thaliana landsberg
aaagttaataaggaaccaaagacaaaacctaaaaccttagaccccagaaataaacacaagattttaattgaaaaaaaaaaagcgctaaacgggaggcaccaaaacggaaacgaatatcacccaaacataaaaaccaaaatctaacattaacttatggaataaggaaggagttgaaggccacaggggaaagggaccacaaagcataggggaagaagtgactatacaacaa

SEQ ID NO: 78963 - DNA, 322 bp, Arabidopsis thaliana landsberg
tctcctaaaaaccagacataatatggtgtacattttagggcaatgcatgcgatttgatctcctcggatgctagaatcaacaaattcaactacacattgttcacagaccttagagactactttttgatcttcgaacactggataatgctcacaagcgcaaatctcactctttataggaccgaaaattctttgacataataatccatcattatccggtttatggcggtagtaatgaatagcatactggtctgacacctttccaacaatgtctacatctagcattattatagtgccccaggcactaatttgctgaggcgaaacta

SEQ ID NO: 78964 - DNA, 307 bp, Arabidopsis thaliana landsberg
  unsure (1)..(307): unsure at all n locations
gannnnnnnnnnnnnnnnnnnnnnnnnnnnnnnnnnnnnnnnnnnnnnnnnnnnnnnnnnnnnnnnnnnnnnnnnnnnnnnnnnnnnnnnnnnnnnnnnnnnnnnnnnnnnnnnnnnnnnnnnnnnnnnnnnnnnnnnnnnnnnnnnnnnnnnnnnnnnnnnnnnnnnnnnnnnnnnnnnnnnnnnnnnnnnnnnnnnnnnnnnnnnnnnnncgacaactaggtacggagctatagctgctaactatgaggagtgctctagactatggatatgaaagatcaaatagaccgagattatatcacccttc

SEQ ID NO: 78965 - DNA, 192 bp, Arabidopsis thaliana landsberg
gtgcgaaaactttattcttgaactgaaaccgtgcaggacattcgatgccaaccgaaaccgaaccgttccttctcctggagcagtacctgggcctgcagatcaagcgccagcgccaggcccagtccctcaagctcgccgactttggttttatcgttcttatttatcaatgctttttttgttagatttatatct

SEQ ID NO: 78966 - DNA, 142 bp, Arabidopsis thaliana landsberg
  unsure (1)..(142): unsure at all n locations
catttcccaaaatgtgtagcttaaaatccagcaagacgctaaaaccgcagctgactaccgtgactacaaattgaaccgagnnnnnnnnnnnnnnnnnnnnnnnnnnnnnnnnnnnnngtgtgaacgagaggacactttgacg

SEQ ID NO: 78967 - DNA, 590 bp, Arabidopsis thaliana landsberg
actacactgaaattagtgttctatatttgtatattgattttttttttttttcaaattgaaaacttctatatgtgtataatatggtatgaatctactgcaactgtggatttgatagaggaccagagttgtggaggtgtgcaagaagcttttcgctttggaaaaacatgaaattattgacatttgtgtgtgagctaactgtgttgtgctttgcccccaacaaaaataaaataaaaaaatctgtgattagctaagttagctcatcgacaacaagctactattcatccattatgttacagtgaaattaggatgaacggttctatatctgttacagtgaagatttacaataaaattacctccgctaatttacattaactctctcatttatcaaactcctaagtcctaacccctgatttagaagtattatatcactttcgtttaaaaaaaaaaaaaaaatttcctaagcttactattatttttgttatactaactggtgaaagaaccaataacattcaatgattcttgagtgaaagaaaggaatagaaatatatgtttgtatcattttgagaccgtgttatggagctagtgtccgt

SEQ ID NO: 78968 - DNA, 526 bp, Arabidopsis thaliana landsberg
  unsure (1)..(526): unsure at all n locations
cagaagactcctggannnnnnnnnnnnnnnnnnnnnnnnnnnnnnnnnnnnnnnnnnnnnnnnngggtctgccataccgggttgtagccttgtcaaccggggatgcatccttcaccagtgccaagacttacgacttggaagtctggatgccagcccaggacacttaccgggaaatctcatcctgctccaactgtactgacttccaggcccgccgggcacaaatccgttaccgtgacgaagacggcaaggttaagctgacccacactttgaacgggtcaggcctggctgtcggccggacggttgccgctattttggaaaactaccaaaacgaagacggcacggttaccgtaccagaagctttgcgtccatacatgcacggcatgaccaagatcacgccagaagttaagtggcactagtgctaaaaggaactccgcggaggggttcctttttgcgtgggaaatttttctaaaaacttttgcaaagtgtaaccttcagctccttaggtgtctttagggtagaggagatg

SEQ ID NO: 78969 - DNA, 411 bp, Arabidopsis thaliana landsberg
aatcaccatttccatttttggcccatattcaaatatccatagcccctgggaatttcaatgctacgtcccttcatccttactgacttgaataaactaaaatccaaaagacctatattctaaaacaagtttatttcgaaccaaaacaaaggatttgggttattttaagcccaaatttttcagacaagtcaccgatgagcgatggctgtatatcaaaaaccttgccgtgagcattgataaataataaacatagataggggaatcagctccaaaataggctgccttgtatactaccatagtgttacaatctagcattacgcccagttgccaatactgtattaattttccctttgatccccataaatgagacacctctgaactgttcctcaccgcatttgtatgattgactgattt

SEQ ID NO: 78970 - DNA, 444 bp, Arabidopsis thaliana landsberg
  unsure (1)..(444): unsure at all n locations
aaacccccngtttacgtcccccctggcactcccatcttctctcttcctttttagaaatgaagcatctttatgttcgtcagtgacgcctgtccaagcttttacagaagaagccgtcgatacttcggatttagcttcttcttcttcaaagcttgtacttgtcgttggcggcactggtggtgtatgtacttaaatgttcaattttggaattaggactatgaatttctcactattgggtctgctgaatgctggttgttttaaagccttatcctttttggtatcaggtcaacttgaggtagcttcattgctcaataggaatataagatcaaggccattactgcgtgatgttgacaaagctaccaagttatttggcaaacaagatgaatattccttgcaggttcgggcttaatctcactatttcggatacacttcttgttctttttatac

SEQ ID NO: 78971 - DNA, 529 bp, Arabidopsis thaliana landsberg
ccgccgcgcgcaagggcaatctgcgtgccgtcttcctgcattcgaccgtgatcaacccgatggccgcgatgatgggcgccgaacggcgcgaagcccttgccgccgtcgcccgcaagcacgatctcgcgatcatcgagaacgacatcctcggtccgctggtcgaacatcgcccgccgcccatggcggcgctggcgccggaacggacgctctatgtcacgagtttcaccaagatcgcggtgccgggcctgcgtatcggctatctcgccgcgcccgaccgttatgtcgccgccgtggcgaatcgccatctcgtttccaactggatggcgacgccctcgatcgccgagatcgcgacgaagtgggtgaatgacggcacggcgctggacctcgtcggctggcagcgccgggcgctggccgttcgtcatgcgatcgcggcggaaacgctcgccggcctcgattatctcgatcatccccagagcctgcatgtctggctgcggctcaagggcgagcacaccgaggagggctttgtttc

SEQ ID NO: 78972 - DNA, 512 bp, Arabidopsis thaliana landsberg
atgcgaacagcgtaaaagccctaaaaaaagtcatcttctttgcaattgtaactctttctctgattccttcttcttcttcttgctcttgatctcgaatcctttctctttcctttttcccgctgattacgcgatcccgttccttctcattcattcattcattcattctctcgccgtttttttatatatttatttcattggatctgtttcagatttcgatttccttaattcattgagagattcgttaatggaggttaattacgaaaggcttcgaggttcttataacgattacagaaaattagaattgggtttaggcgaatttggggatgattttgtgggtttgcctgatgatcctttttgtatgaacattagatcgactttgaattcaatctcagattggtttcatgagaatcagattggtttagtctcagaagatcatactttgcctgaggatccgctttgtatgagagttagatcgactttgaacacaatctctgattggtttcatgagaatc

SEQ ID NO: 78973 - DNA, 544 bp, Arabidopsis thaliana landsberg
aatggcgtcgaggtacacagcaggtgctcgaggagttagtcctttaggttgagcagatgaagcaggatcaaatcggggagaagcagatcaacgccttcattcagctaaatgaaaaactgctgagcaacgcgactgcctacaccaacctgatcatggtggccggttagtgacctttgaagacatgcgtcgcagccatcatcgtatggccttgaagcagccggttaaagccgtaacatccaggccatccaagtgcctctgcaaggccctttacctcaatcgttttgagcacatgtcgcgtcgcgagcttgtcgaagatccccatgttacccgcccgccagttgaggtgcaggttacgtctgacgtacgaggcaagcgattcatcgggttggatttggagaggcatggattagcgtcgacacagggttgcggtgagcgcaaaagctgaaaggaggtgcgcaacgaagaagggagccggttaaggctccctccgtgtgcgacagtttttattgcggtgcgacagttttaattctcagaatccaccacg

SEQ ID NO: 78974 - DNA, 611 bp, Arabidopsis thaliana landsberg
cattgtgcgaaccatgtgcgcgtctcagtctttcaactgatagcgtcttgatgaatgacacgtttgccaatttcaagaaggtatccgagaaatgccatctccacaacctgattctccaaaccttgaagggatatcatgaaaccagtccgatcgaagttcgccacgttggtggtactctcaaacttaacggagatacaatgtcaagtttatccatttgcaaaggcctaggtatgtcgtgccttgttaatgaataatcacgtctttcgttcctaactttcgatagccgcaagctcaagctcgaatgttgctcctgactcgctgcgaggcatccagctcggattagctcaactccccgaactgaatagtgcatcattctacaatctaatgttggattggatccaagattgtgattcgaatcacgctgagtgccgccgaccgagccttgacctggagtgtctaccgactcgacttctggatgttggcgaaggcggaacccactcgtacgactcattggtacatctgtgcgtaacaaaaaagatcatttgcacatgggtcacgatttacgtatgttgcgctgtcccatcccttggggcatactcacaagcatgatc

SEQ ID NO: 78975 - DNA, 283 bp, Arabidopsis thaliana landsberg
tgagttttgtatatagtttctgtttgaaggattattgctgagtacatgtttcgttagatcatgtaatgtgtaacttgagatcgtgaaagaagatgatgatcaacaacaacaatgtaagctttttgatgttctttgttcttggtacttgagatttgagagatgaaaattgcaaaagttatgtactttgtgacatgctaatacactttcatatgagctaagatataggcgtgtgtgataatatgggagatcatgaaggtgtaattgagaatctagtttttttttt

SEQ ID NO: 78976 - DNA, 346 bp, Arabidopsis thaliana landsberg
aggatatagagagaatagtgtagagatcttataaattacccactaatacattacaattgtatctactttgtttccccttttctgggtcaaagttattcttggaatccatacaaaatcttgatcgtctcttgtgtacagataactttgtcttcatcctttttctcttagtaccatttttggaaagagagatgtttacactcaagctctggaaacataacaggattgagtaatgctttataaactttcaaatttcaatatctcttttcattctaaacaaagtccaatgtagtaatagtatggctaacaaaatctatctatattaagagaatgtcacacctaacataaa

SEQ ID NO: 78977 - DNA, 582 bp, Arabidopsis thaliana landsberg
  unsure (1)..(582): unsure at all n locations
caggggacgaccccataattaagctcaaccctacttcgggaatttggtaagtgttaagcatgctggcaatgaccaggagtgatgcccgcggcacaccggcaatacctttactcgtaagcataaatatcagcagcatcatgagctggtcgccaatggtcatgggcacgtcataatactgcgccagcgaaatagccgcaaaggtcatgtacatcatgctgccatccaggttgaacgaataacccaaaggcaaaataaaaccggtgactttnnnnnnnnnnnnnnnnnnnnnnngggcatcaaaagttttgggcatggcggcctcgctgctggtggtggaaaaagcaagcaataccggttctttgatgtgtttcaacagcttgaaataattgatgcggcaggaataacaaataatgcccagcacaataaaaataaaaaacaaaagccccaggtaaaacgaaccaatcagataggcatacagggttaaaatgcccagccctttggcagccaccacggccgacactgctccaaatacagccaatggcgcagaggccatcacatatcccgtactttaacatgatatgc

SEQ ID NO: 78978 - DNA, 613 bp, Arabidopsis thaliana landsberg
  unsure (1)..(613): unsure at all n locations
taatctaagtttaatctctttgtctgagagaacttggaactgaagattattcgattgtggcaggttattaattgtgttaatagaccaggcgattttgtgggatattatggtcggttgttttaaagagagattacttctttcttaatgtattgatccgtattaggtaagaacatgtctctaatcccctaattattactggtggtctacctcttctagttgcgtattaattagttttattagactctttgtaacatttaattactcttacaatatattaagagactaattgtgttttcttactttgtgattataggaacgttgtgagagcttatgttctgatgaacttatatcttcctcagatgccttttacctcaaggtactaattttgtttcttaatctcttgtttactcttgattggttttgaacttaaatatgaggttaatttagggtttgtcttgtttatagacaagaaagccttataccatcactaaacaaagagagannnnnnnnnnnnnnnnnnnnnnnnnnnnnnnnnnnnnnnnnnnnntctatggcagagcttggagacgaatcgaaggtgtgtgtgcttatctgactttagagagtctaatgc

SEQ ID NO: 78979 - DNA, 502 bp, Arabidopsis thaliana landsberg
  unsure (1)..(502): unsure at all n locations
tcattctaaaccttagttagctagtttacttatctttattatccatctactaccttttattagnggtagattgtagttaatgatctgagaatgaaatcacatgttgcttacacgtagccttttgttttggtccaagtactatttttaattttattttgagaaagcatctaccgtcatacgtacgtgtaatggatatggttgctttctgttttcgtgtatgtttctggcttgattggccgagttgtcttgcaaactttgttttggaacttgttctatcaatcaggcaaaacatattcatccgtaattgaaacttgttaatgtacgggaattattaacttgaaaagggtaactaaatatattctctatcagtaccgtatattgaaccaagaacaatagttttcttacaataatttgacccgtagaaccaacgtgtctggtttgcttataacttgacatccacgtcaatgtttgttccacatttcaatgtccacatttttgttaa

SEQ ID NO: 78980 - DNA, 584 bp, Arabidopsis thaliana landsberg
acacaaggaccagggggactgtgggccagggccaggaggggctcactgcactttgtctctgggttttcattctgtgagctcacagaaggagaatataccaattgagcctcaatctcatttataaatataaacctcctagaggttggtcggtgtcgaatgagcaagtgccagacaggaaatgctggacaggtactggcttcaatgttacacccttagtagagtttctgtgaacggccagacaggaactttacattcagtaagttcagataataacagccccacacatagttatcactgcctcacagttgcccttgaccagaggcatatggaggaacccatctgtctgtctgcgtcatgtggacaaacagccccactcaggctgtgcccatgccaaagccttacctccctccacatgctccaggcccaactcaagagccgcgcaaagtggaagtgcgcatcctgtgccctgcccatcctcctgtggagaaacaagagaagctcagcaggggccagaccacatggtgcctcagaactactgagctcagggagtgaaggactctctgaagagctgtctgatgatctgg

SEQ ID NO: 78981 - DNA, 490 bp, Arabidopsis thaliana landsberg
aaagcaattgccgataaagagcaaaatctccattcttcataaaatactgtattatttaaaccaatttgtccatttcatggttgtaacatcagtttctttactactgcagatgatcgatggaaaagtgttttggtcaaagaatccttttaaaaacataaatatctgaaaatagcataagcatcggactcttttgtaagtgcacaacgaaaaaataaaattccaataatttgggcaatcttgtcgactatatatcattcaaataattgaagtatatcttatgttatagtaaattttaaaagatgaatgatagacaggttaattaggcattcaaaatcaaaagatttttacattgtctgatcaaagtataatcacatgtcataatctttaggtttgtctcaactctcaagggttcaaaacttggtgagtcgctcacgctagagatgtcgaatacgtacatacgatctatttatgaacgtctaaatctgaaacg

SEQ ID NO: 78982 - DNA, 407 bp, Arabidopsis thaliana landsberg
  unsure (1)..(407): unsure at all n locations
acggggaactgttgtgagacgagaaagtgagaggttcgtcntctttggaactaagaacatctctcgggtgtgaacataatttacgtacacaagaagcaacacatagccaactaggttagtaactatgatggttacttataaccactgagtacaagcacttatatgcccttttattgatcttgatcagacccttacgattattagaaacagtctcaacgtgacagcgatccttgatggaactgttcgaattataagatcccaaaatatgtctaattttgttatgagggaagacgaacttggtgaaataggatacgtagagggtgtgaaatgaggttaagatttcgccaccgaggaacatgaggatagtgaggaagataagttgggtgttggagaagacttccatgtta

SEQ ID NO: 78983 - DNA, 392 bp, Arabidopsis thaliana landsberg
  unsure (1)..(392): unsure at all n locations
ggggagggccaggcgggtggcttccaacatggtcatatacggcagcgccgggtccgggtcaagggcgatgactaaacagacgggctcgactaattccttgtcggtggctttccacgtgtgcagatcgagcatgttcatctgcactgcgccgatcaannnnnnnnnnnnnnnnnnnnnnnnnnncgactggccggtctcggccttgacatatctgagcacgtttggcaaaagcaactggccggcgtttttctggtaaaacaactccacggtcagcccgttcggggcacgtaccaatcgccaccaggcgaatctagagatggggcagtatccattggctgactgcatcggagtacatatggcgcactttcgcttggtaactccgttggtggaat

SEQ ID NO: 78984 - DNA, 570 bp, Arabidopsis thaliana landsberg
aagaccaagaaaaaacatagcaaaggtacgaaaatttaattttaagatttagaacagatttgatattaaaaggggcaattgaaaaaagatattttgcaaaatcaaagatgggagatttccttgcaagctgtgccaccgccctctctctctctctcttagttttttttacagacatagaaataagaaaccctgaaacagagataaaacaaaacacaagttttgagtgtgttttttcaagtctctctcttctctctctgtccttgataaacacagcaaccgcctttattacacacaactctcttataataatctctctcaccatttcttctcttctcttcagaagaaagaaagaaactcataaaggagaagaaagaagaacacaagagtctctctgtcttaaactcattcattctttctctctgtataaccagagttgtgtctgtgaaaacacacaaatctaagagaagttatgaataaacaagatgttatgaaacttcaggtatacgtctacttctcttcttcctctgtttcttcaagcttgagtctgatgtatatatatcattcatgagc

SEQ ID NO: 78985 - DNA, 503 bp, Arabidopsis thaliana landsberg
acatacggccgtgaagatatgaatacgcggacccatgcggtggttcaaatactcgatttcagggaagatttttttggacgctaattcattttgaggccgggcgaataagaatccgcacattgtgaccctaaggtcgcggacttcgcgtggccaatagtcgaaatccattgggagtttagtgagaatttgttgatagctgatggtcggtatcatgtcgcggctctgattcatcataccggcacaagtcgttattcgtgggacccagagttgctacgaatgcggctcgatgttcggtttgcgcagtgcttccagctcgcggagctcccggtcggagcgtttcgcaccttcctcccagcctgggtgatatcgtcagccagtgatcggatcggtaatagactctgtctttcgaagtcggtcgagcgaagcggcaaacagtgggaagtcagggatcccattcacattcatcaacacgagcacggcatagaggtgccgaaaatgggggc

SEQ ID NO: 78986 - DNA, 352 bp, Arabidopsis thaliana landsberg
tgcacatccatggcacgaccttggtgttggttcttaagctccattggtcttcaatgtggtattggctcttaacttataacccaagtaagccttctttaatctctctctctctcttggtctgttaacgagagagcctctctggtcaggtggttgagatcacaaagggaagcaaagtgaaatatgaactcgacaaaaagaccggtcttatcaagggaatgtgacttcccaaagattgtgatcttgttttcttttaactgttctgatggatgacattgaatttgatctcaggttgaccggatcttgaactcctccgttgtttatccacacaattacggattcattccacggacat

SEQ ID NO: 78987 - DNA, 591 bp, Arabidopsis thaliana landsberg
  unsure (1)..(591): unsure at all n locations
atacgttagttttaaaattagagattggttaggaattatttaaaatatatttcattggctgaaaaatgaacgggtgggttgtattctctcttaagtttgtcttacatctttcaagtgaaatccaaaatcatgatagttccgtaataatcacaaaaacagcattacaaactaattaatgatatctttatgaaggtgaaattcgtcccaatattgggcctataaagcctatatcaaatcagggccacatgggttggtgattgggtataagaaaatgaagatatacattttttctggtagttgttaaattgggcttaaaggcggcataccttaacaggccaagccgctaaaatccacagcccaaactagtttaaccgctaactttttaaaattgtttaattaaacgatgtcgttgtagaatttcttcacagttcacacatttgttttcaacccaaactcgaggtttctaaaattcctaatagctnttttcatggatcatttcattgttgggttcgtatttaaaaaaccaagatccacatgaacttcgacagtggatttttccacgtgccaaaacgacaggagccagagtcaaac

SEQ ID NO: 78988 - DNA, 394 bp, Arabidopsis thaliana landsberg
aaaaccttggcgcgtttgagcgagcacctaatttatatctacctctctagacgctcactctcttgtagtttttaatccggtttcaatctccactcctatcttgcagcaacagctgacttttgttcctatatcttctccgacgcggtacgtgttctcttgcactcgaaatttataatttctcattcgaattgattcaacaatcacttctcttgtaatgccatggatagaagattcgaatttgatttcatcagatagagattgattaggattagggcttcttgttgttgaattggaattagagatggtgtggtgatttacacatgacggtgggattaagaagttacactcgcgagcctgggaattcagtgacatggagaaatagccatctatgtaa

SEQ ID NO: 78989 - DNA, 305 bp, Arabidopsis thaliana landsberg
  unsure (1)..(305): unsure at all n locations
tgggggccctagagtaacttgcctgacgggtaagcaagaaacttggggagccgacgatactgcgtgcaaacgtcgtctgacttggttaggggcaagatatcgaccattatgctggtcctcaagtttcctagaactnnnnnnnnnnnnnnnnnnnnnnnnnnnnnnnnnnnnnnnnnnnnnnnnnnnnnnnnnnnnnnnnnnnnnnnnnnnnnnnnnnnnnnnnnnnnnnnnnnnnnnnnnnnnnnnnnnnnnnnnnnggaagcaaacgggatgcgatgaacgagccggttacggccactggccta

SEQ ID NO: 78990 - DNA, 210 bp, Arabidopsis thaliana landsberg
agatttatttttttctacaagcgcttgtacctgtttttttttataggggatttttcctggtaacaacgcggcagttcgatctggtttttcgcgcgaatgaggttatgaccctcatatttaatgctgtagtaaatatcgttgttaaagtggtcgtgaagaaacctcacagcctgcatgtagatcatgaattcgccggaataaacgaaatga

SEQ ID NO: 78991 - DNA, 560 bp, Arabidopsis thaliana landsberg
  unsure (1)..(560): unsure at all n locations
gggatgatgtgccggtaaaataacggtcgtatgaatttttatattcgccatcaccattcagatcggcatggagggggtcgccataccagatggcgttattgcgcacggcattggcagggcgcagtttatagcctgcggccagcatggcttgtgcccagctgatatcatccggtgtgcggatcataccgtctttgggaccgccattgatattaacgcttccatcggagttgaacctgttgcctgtgccggtgtatattttgtagagatagtattcgttgatcttatgtccttccactatcctgttcacatcgccggaagaaacggcgccgaggtttgactggtatacggggttgccggaagcatcttttgtccatccttctgtcagctgccctttgtacttcaccacttcgttggtattgaaagaaatattgccgctgatactgtagctgaaatcacctttcctgtccctgtagccgagtgatagctcgatacctntattcactacctgtgcagcatttactaccggtgcagaagcaataccggcagtgagaggaataggt

SEQ ID NO: 78992 - DNA, 447 bp, Arabidopsis thaliana landsberg
acagcattaacacaaaatttaccttaatctccgcaatgaaatatacttatttctgaagacccattcaagggctgtttgagatagttgaaacgataggaattgttttcccagcgatatcatttaaaaatttcagatacgcactaacctattattacatactatctcaacttgattataaccacgccaattccaaaacctaacttatttccattttagaatcgttgaacctattgagctcttatatcatattcactattcagattgataggcatgatcaccaatctttgaatctaacaaacaaattagatgagcctaattaaaataccttaaaactcaaattcatatatatttgaagataagagaactcaatacagaatggacaaaaaaaacttataatatatataaatatttactaagaacatatgatctgtaataatatgaaaattc

SEQ ID NO: 78993 - DNA, 471 bp, Arabidopsis thaliana landsberg
cgatctggagaagcgtatcaaggagatttgcgagattcgggttcgctacggctatcgtcgcatccatgtggggctgcggcgcgaggactggatgatcaatatcaagcgaactcgaaggctctatgtcggcttggcctgcaattgcgggccaaaacatccaagcggagtgtcccgagctgcgggaagacccggtgcccggccatgaagcctcaccagacctgggtgatggactttgttcatgaccagcggcgctggatcggaagatgaggattctgacggcagaccagcatgatgcactcggcgttcctgatgctgttcattttgattgcggcgccgctcgccagctacattccgctggcggcgctcgccgcggtgctgttcatcaatcgcatggcgaagaccacgagcgtcgaaacgacggtgccgctcgtcgccgacgacaaggcggacgaacgccatggcgcttgcatg

SEQ ID NO: 78994 - DNA, 507 bp, Arabidopsis thaliana landsberg
tatcggcctcatcgagcctgcgatgattgttcttcttggtctcggcgttggtgtccttctcgcatccgtactcatgccaatctacaacatcacagcatctatctgattttcaatgccgagcgtgcatttgaatgcctcgcacacatgcgaggcattctcttgtccccagataaagagattctgctcatcctggggtctataatggtaagtaaccacactacgtggagcaaataatcattatttactgttctctatgacgaaacacacacatacgcgaggcttcacgctcatcgagctcctcgtagtgatcgcgatcatcggtatccttgcatccgttgtactcgcatctctcaactcggcacgcgacaagggcgctgatgctgcgatcaagtcgaaccttaacaatgcgcgggcgcagtctgagttgttctatgacaataataaccgtacctatacaacggtgtgtacgggtacaggcggtatctgtaccatgctgagcggcgctgc

SEQ ID NO: 78995 - DNA, 560 bp, Arabidopsis thaliana landsberg
  unsure (1)..(560): unsure at all n locations
caggctaccgacgaaataaacgtgaactttactttttgcgattccaaaccggtatttgccaatgcgttctcgccgaacggcgatggtataaacgaccgcttccgccccgtagtacagcgcggcatgatgtacggctaccagctgcgcatttacgaccgctggggacatatggtgtacagcgataccgatccccgcagaggctgggacggctctatgaacaatacggagaagcaggcaaatgtaggcacctacatctggtgggtaacctacaccaaggatataaaggagccgccggtaatactgaatggtatggtgaatgtgatcaaataagcatccaactcgaaaatgcagacataaaaagaaaggagctcaattgagctccttcttttttttatcatcaataatgttggaatcctgttagtacagcagccttgttttgatagtatgcttcacctctttcaatnnnnnnnnnnnnnnnnnnnnnnnnnnnnnatctacatccagcaccacgtaaccgatttgctcattggttttcaggtactgccccagatgttgatttt

SEQ ID NO: 78996 - DNA, 681 bp, Arabidopsis thaliana landsberg
aaaacttttaaattaacacctgcaggcttaggatcaaacaagtagatctaatgctcaaagttagcttactttggcactcataggagacttcattttatttatttcaaggaaaaatataataaattcaaggaaaacgaattttaaaaagggttcttgaatcaaaataattttaatgttcttctgtaggaataaatctgctatttacattttacttaaaaataaaattgaatgttgactaaaataaaaataaaatgttgactataatacaaaataattttggtggttttaactaactgaacatattctggtaataacaaaacattatttatcagagaatttaatataaaagaaatgaactgtaaataatagcaatttaatttttgaaaaataaatccaatattaagatgacgattttctttttttttagtaattgtcaaaacagaacagtaaaatactaggagacataatttgtgatgacaccgtctaaattatctccaaggttcatgtaatatctaatgcggtatcattggatcaaaatgaacgacacaccaaaagaaaaacaattatctcaatatacacaaacatactaaagagggaccagaaatctactataaatagaagagtcagctttcgatcatgattgtagtaactaataatagtaaacatgaaaactttgatttg

SEQ ID NO: 78997 - DNA, 573 bp, Arabidopsis thaliana landsberg
  unsure (1)..(573): unsure at all n locations
tatcacagagaccaatgcgaaggtgaaaactttcagggcattggaaaaactaatataatactttttgggcagatacgcagcttaaaagaaaaaggccttccggacgggaggtcttttttttgtttttacgggaggagacgatgaacctcaaagaattatttatgaggcaaatagaccgttttaaatgtagacgcttcattacattcggaaggtgttttttttatgtttttttttgatttgtgaaaaattcattcaataaaacctgttacttgttcattaacaatgtcattttaaaaaaaagcaacaaaatttttaggtggctgtaatataaaaagcttaatttagcgtcgtggaatctactacaacataaatttttagaatgaagtacataactctaactattttatctatagtttcaacagtttcacttgcgcaaagttcaaatttcaacactcagcgaaattgggcgatgaacaagaaaganaattctatcggtcttggagcaaccagtttcctgggagacttgtggggagcaaatcaaattggtacggactatagtttaaaagacattga

SEQ ID NO: 78998 - DNA, 266 bp, Arabidopsis thaliana landsberg
ggccacggtccgtgccgatccacaccttgcccttgcccaggctgaacagtgacagcacgttgttggatgacaacgtgtcgggctggtgcgccacatgttcgaagtgttgaaaatgtccgggcgaagtcatcaggtccagaccgtgggcataggtacccacccaaagctcgccgttgcggcccagggccatggtcatcacgtcgttgccggacaggctgtcggcgcgtttcgggtcgtgcctgaaatgacggaagtggccgttttct

SEQ ID NO: 78999 - DNA, 99 bp, Arabidopsis thaliana landsberg
aaagcgctgaaattagactggggacttcctaaggggaaaatggggggacaagccttcacaattggttttgctttggggaaggccctattggcctttgga

SEQ ID NO: 79000 - DNA, 100 bp, Arabidopsis thaliana landsberg
  unsure (1)..(100): unsure at all n locations
ggggaagngcnaaagaaaggattaagaaacgggggtcgagatgatttacagtgaattttgaaattttaggtgttgtggacaatagtgggatatagtatag

SEQ ID NO: 79001 - DNA, 354 bp, Arabidopsis thaliana landsberg
  unsure (1)..(354): unsure at all n locations
ttctcagcttcttttgatttacttggtgggtcttttagctgttctgctgctgtctcctcaacgaaaacctgtaaatgctttactttcctgaaaagaatcagcancgccattactcttttttattaatgaagctctaagaacagaatgtttcttctcctgaaattgtgtaagggaaagatagttgttaaggaatcagtagcagctactttatagtaagatcataacaatggtgtacttgaagaaacgttatgccgtaatctttggcttaagagggaacatagctcatgccttttgttttcctgtcctatctctaatcaacttggtctccgacagtgacttcacaacaaacctacc

SEQ ID NO: 79002 - DNA, 607 bp, Arabidopsis thaliana landsberg
  unsure (1)..(607): unsure at all n locations
agaacaacttataaagattgcttcatattcttcttttagtagtcggtaattagtataagaaattctatagttgaatacctttcttgagccctcatgagaatgttatagagcaagtatatgatctcactaccgaagatgacaacgggccagtagaaaggtaatgaaggcttcctcctatttgcttgatttgctcgatttgctcatctattttgatataagtttaaaatttgaacaattttatttgatgaagcatagtggattaaaaaaccatagtgagatacttgaaagacaaaaaaacacttccatcgaaatcccttttaacttttatccacatatggccacgctttaaatagtagtactatatgattatcatatgttgaacagaaaaaaaaatattcaatacgtataatctatgtaaataacgtaattgaaacgatcgagtgataaagttgactagtttaaatttccgaattccaaagtatatactagtagcaaaacaagtccactatcatcaatgtcgngtgactcgtgtcctcatcattctctcaaacccacgaggcattttcttttctactttttcctcacccttttaagtccagaataaaaa

SEQ ID NO: 79003 - DNA, 535 bp, Arabidopsis thaliana landsberg
  unsure (1)..(535): unsure at all n locations
accggccaacacgaagtcctccagcagcagcactttattctttccgggttcgatgaccaaaagctgaaagtctttggtcccgatattcattaacagatgatattgatcaatcagttcttcatcaaactgattgtccttcacctttctgatgagtttatatgtgagcgatgtggtctgcaaggtctctaactaccgggtaatgcgcccgttgccgcgaatgcagtcaggcgcttttacaagtataaatattttaaggcttaaatcacaaacacttgacggattgccggcctagatgcggatgaagccttttaattgttgcaaatctattgtagtgcgggcgatatgaaaaatgccgtgcacttgatcttgtggtaaagcggagatttccgtcatcgacatatagcgtacgtccgtaatgagcgctaattcccggtcttgtccggtcgttaacgtgccgtcgatgcaactcacccagaagaacaattcnatggcgtggaggggatcttgtaagaactcgcacccgaatgcgaattgc

SEQ ID NO: 79004 - DNA, 561 bp, Arabidopsis thaliana landsberg
aacctcgtttcgatgacgatgggacgtcggtagagggaagtgttgatgagcctcaagatccgatggtggcagagttcaaccgtgccggcactgcctgtgctgtcggcttttatgataagttgaggatcttcgggttttctccggaacaagaccgttgggtggtgtccatggtcaaaagcatcaaaaacatgtacgctccaacatgtggttcgtggaagtatgatggcagccgattcacacttgctaacgtcactggagtggttgacatgtatgacgcttacctgaggaggtacacgtacaagggccagtttgagttcacctatgttagcccttcgcaagtaattgtgaagaggctgtccacgggtgctcgaattgttctcaagtcacattgtggctatgaaatcatcaagatcaacatttattgcgagcaatttttaatcgctcatacgcagacaacgctgctgatgggagacctcgcctcttgcatattgagtgagattccatggaacggctctgggaatgaaaggttttattttgacaatccccttgtctgtatgatta

SEQ ID NO: 79005 - DNA, 411 bp, Arabidopsis thaliana landsberg
ccacgttgccggaggcgcggtcgatcagggcgactgcgcggtttttctccaagcctgcctcagtgaggacgggggtgtcgaggtcttcgccgagcatggacttgaccgggtaacggcgcagcgccgtgaccgtcgtggtgtcggtcatgggtgctcctttctctcatggggccgtgcggcaggcggccggggcattgacaggccacaacctcatgataacctttaaaatacaaaaatacaggttacgagatatggaggcacgtcatgtcctcaactggcagcgggaccccggccgccgcggtggcaggccagccgcagtcatcttcgctgccgcgggcgactcggacggatagcggccctgcaggcgtggtggccgagttctacaacgcgctgatagcgcaagacgcgcag

SEQ ID NO: 79006 - DNA, 316 bp, Arabidopsis thaliana landsberg
  unsure (1)..(316): unsure at all n locations
cgggtaacaaacaaaattaattgtactttcaccatatttttgaagtaattgtttttttaaaaaaaatattacagcttagatgatgttttacgtgttcaatataaaatagattgtaaataatattttacctatggtgtgcaaaaatcataaacatcaactataacatacggaggggagtattgatgaactaaaatcttaaatccaaaatgaaatttaaaaattaattataacttttaaaaaagaagccaacacctttgttacatatttttcctttttggaaaacannnnnnnnnnnnnnnnnnnnnnnnnnnnntct

SEQ ID NO: 79007 - DNA, 517 bp, Arabidopsis thaliana landsberg
  unsure (1)..(517): unsure at all n locations
cgccgcatccagccacttgcctcgtcgcttttcgttcatgccgtgcatcacgacgtcaccgacgagcaatgtggtcagcctgccggacgcgcatgggcggctgacccnnnnnnnnnnnnnnnnnnnnnnnnnnnnnnnnnnnnnnnnnnnnnnnnnnnnnnnnnnnnnnnnnnnnnnnnnnnnnnnnnnnnnnnccgatggcgatccgctctatatcctgccggcgatcaaggcctatcaggagacctatccgctgacaccggaagagctgaaggcgctgtggccgctgatcgtcgcccgcgccgtgatcctggttgctagcggcgagcagcagnnnnnnnnnnnnnnnnnnnnnnnnnnnnnnnnnnnnnnnnnnnnnnatgagcgcatcatcttcgacaccgcgatgtccgtgcccttcgagctcatggaagcggcgatccagaagatcggcggcatcgagcaaccgctaccgcagaattcgggctggcaggcgctattgcccgagatcaataca

SEQ ID NO: 79008 - DNA, 141 bp, Arabidopsis thaliana landsberg
taaccaagtgtaataagagtgagaactggacgaaggttactttcaaaccagattagatgaagtttaacgggggtgaattagaagacaacgtggttgctctaatgagtaagcgagtgtttgatattgctggatgtttgggga

SEQ ID NO: 79009 - DNA, 526 bp, Arabidopsis thaliana landsberg
  unsure (1)..(526): unsure at all n locations
ccacatctcaatccaattgagcatatctggaagcaattaatttttattttcaggaagatgttccctcatttaggcctcgtgaaaaacaacgaagtcgatacggcaaagttgatcaaatgcatcaagttggcgtaggcagcaattactgttgactagattaatgcactgattgactcactccctcgccgacttgatgcatgtatccgggcgcaaggatggtataccaaatattgaagaggaaaatcaggggttcattttgatatacaaatcatatttttaaatatttatttgatggaaatatatgtatgtgaagttgacgctgtgaaataattctaatcctgtagggtgggctgttcagattcttttggaccccaattttagagagcttgcttgagtaaatcctggaactttcgttgtctttctctgattgatttagacagnctggtgcgctaggtgaggtgaagtcgtcctcggttgtgtacggcaccggaacactccgccacatttgaagcgagtagttagtgct

SEQ ID NO: 79010 - DNA, 561 bp, Arabidopsis thaliana landsberg
attgccatcctggcctccggcgtaagctttcgccgcttcctgtttccttactgggtaggcgccattggctttggggggatgttgtgggcggccaatacctgggtggtgcccaaggccaaccggctggtgaacgccttccaggataattacgtgcaccggcatgaagatgcgatggcattgtatgataaaaccgtgcgcatagatagtttcaactatgtgacctttggttcctgggaccccaattataagaccggcgccagctttgtcatgcaggaagtgcatggccagaaagtgacctttaaactgaaagcagaccgcgtaagctgggacagtacggcgaagaaatggaagatgtacaacctgtccatgcgccacatcaatgacctcaatgaaagctggacctataaacaggactcgctgatgaagctgcgcattacacccatagacctggtaaagaagcgtgatgagcaggtggccatgaccacgccggaactcaatgagtatattgaaaagcaacagttgcgtggcgcagaggggctcaatactacctggtggaaagta

SEQ ID NO: 79011 - DNA, 574 bp, Arabidopsis thaliana landsberg
gccaccgcttgttcggccttttgacattaaaagtcttgtgcgttttagggattacctggaaacgacctggaggtccaacattagaggtgggtttatctcaactaaattaggaataacagctacacgcatatatgcttttatcaaagaattttcatttgaccttgttagttgtattcataaaataattatagtctaagcgtatgtcttttggaggttcattgactcagtgtttcatatcattcttttggaagttctaaatcatatctcttaagttttagttcactttctttcagtatctcttagtttcctctgttgttggtgtttgaagttggagaaatatttgtgatttatctacatatttgttggaattactggggttttgcctatttatttgctaattccttggtttttctgtatttcagattcaccaactcgaagatcacatcttttaaaaaggaatatcgattatccaagtttcgcaaaggcagcgtaagtcaattccttaaaatgcatcaagccattttcgaactcatgctgattaaacttttcaaacataacatcttgttatttcaga

SEQ ID NO: 79012 - DNA, 449 bp, Arabidopsis thaliana landsberg
tagttcgtgcatggccatcactccgctgccacagcaggaacagaccgaagcccggccttttgaattgcatcaagaaggttgacaggggccgcgtatgcctccccatcgggcagatatcgtgcggtgcgcttggcaagctcttccggggtgcgccaagttccgatgcgctgataggcgcgcattaagtccatttcggcggcgcggttgaggggtaggagattgtccagccagcattcatcggacacgttgcggccattgcgggcgaagtgggccttgagatcattctgcgcagccttgatgccggccagagtgttcaccgtggccgctaaggtgccaaccggtgcattgctgtatgtgttggtccagccataggcgggcttgccagcgatcaggatccgggctgtatattccgatgcgaagttgcctcgggaatttcagccaactacatt

SEQ ID NO: 79013 - DNA, 290 bp, Arabidopsis thaliana landsberg
caccggcaatcatcatactggccttgcccagcttgatggtgttataattcgttgatgatggcggtattggaagaagcacacgcggaaacagtagcataattgggcccatgcaatttatgacggatagaaatagctcccgccgcaatgtccacgatcatcttaggtatgaaatacggactgaaccggggtgtgccgtcaccgtcataaaattctttcaactgttcctggaatgttccgataccaccgttccccgaggcccaaatcacacctaccttataacggtgttcttt

SEQ ID NO: 79014 - DNA, 339 bp, Arabidopsis thaliana landsberg
  unsure (1)..(339): unsure at all n locations
gcatgggattataatgccgatggactggctgcctccggcggatttgaagaactgttgtgccggttgctgtatatccagtacctgcgccagagaaggttatcagagattgctgataaatacctgggccgcttcagcgtaaaagaccggatatattcagaagagcnnnnnnnnnnnnnnnnnnnnnnnnnaccattggaatggggtaagggtacacggatggaactgctgatcagtgaagaagagatagcggaatctttacagggagataaagcaggcgattcacctgaaaaaaacnnnnnnnnnnnnnnnnnnnnnnnnnnnnnnnnnnnnnnnnnnnat

SEQ ID NO: 79015 - DNA, 133 bp, Arabidopsis thaliana landsberg
cacaaagccgaggaagaagaaattcaaatttgtttgtgtgaaccagtctcgctgtacgcagacttttttttttcaggcgcagacagtcttttcctctgcgctacaaagtaaatcggatttacccgacttggac

SEQ ID NO: 79016 - DNA, 183 bp, Arabidopsis thaliana landsberg
tctattatgaaaaccgtttgctgatgctggacttaccaagggatgctctatcggtggtggatagactctgaatggtctgaagctcttggaccttgcatgctgaggagcacggtcgtcagagtgtgaaactgagcccacggaattgatttgtctttaataaccatgtgactattatttcagggc

SEQ ID NO: 79017 - DNA, 587 bp, Arabidopsis thaliana landsberg
  unsure (1)..(587): unsure at all n locations
ggcctatacattcgagaatctacagccatctagtactggctttatgtaagtttaatgtctaaaagtatggtctatgtgagagaggcacacatgtattttgtatatatatgcgtgtagagtagtagctgatatatgatgtatgggaaacttagagaattacgtttacaatatttggtgccctattgaataccttccttgaatgtgcctcctcggtatttttctattgtaatgatccatccacaagtttcgctgttattatccgtttaatatgcagaagataatgtttttccttatattttttaaaagattccattgggcattggatagatatgaacatagagatctttataatctttaataattggtaagctcagattagtttaactcaacatcggatgggatgatccaaaataacgcccatcttatccaataatctacatgaatcatgtgatgagacgtaacgcttaaggcggngggcggaaaagagtcaaaaaggcagtagccgtagatgtagcaaaaccgatggaccagattagttgcttaacaacgaaagatcaagagagggcgaaaaggtattattattggat

SEQ ID NO: 79018 - DNA, 336 bp, Arabidopsis thaliana landsberg
accaaaccaccatcaaatggctgtccaactaatactagcctttaattttctatgcatgcaaaatgaaccctggggtcgggactaaagacgaaatgccgcactcacctcaagctagctggatctccaccctatgccccgaccatcataacacgtctgtacaccaaggcataaagcacatgatgactgcacgccatcctaaccttcctacagcttagcacacgctgaatgctcaatgttacacaacacaacgctggcgactaaagcacgacagttgcactcggtgcgatactctaccaaacaccttacggaacaagctgacaacaccacctcacgccc

SEQ ID NO: 79019 - DNA, 244 bp, Arabidopsis thaliana landsberg
gcgggagagcgaagaacttctttcatttttatctcaccgaaccggtcggtcggaccaaacaacccgggacccgattattatttcaggccggctttgtttgatttttctaaaataaaaggggctttatcattaatgggccactcccacaatatgggcattgtgacacgagaacatacaaccaaataacatgtacaaaacaaccactcctttatacatgatggagaacacaataatgtgataaaaa

SEQ ID NO: 79020 - DNA, 132 bp, Arabidopsis thaliana landsberg
accgagactaagtgtaggctcatccctagtgcaaaaacttggcagagcactttggaagctaagggcggacttcccacctgctcccactcaagtgacacacttgctccagacccacaaccgccacacaagacc

SEQ ID NO: 79021 - DNA, 395 bp, Arabidopsis thaliana landsberg
gcgccaggttctcggcggtctgggtcatcgagtcgacgccgtagccggcgcgcatgcgcgggttgatcaggcgccagcccagcgtggtgtcttccagctgctggttgcgcgtgaatggaccgtcggccttgcccagcacgtagggcgcgcgggtcatgctctccacgccgccggcgatcaccaggtcggactcgccgcaagcgatcgcccgcgcggcctggccgatcgccttcagtcccgacgcgcacagtcggttgacggtgacgccgggcacctcggtcggcagcccggacagcagcgccgacatgcgcgccacgttgcgggtgtcctcgccggcctggatggcgcagccgaggatcacttcgtcgatcgcggccgggtcgagccggggatga

SEQ ID NO: 79022 - DNA, 525 bp, Arabidopsis thaliana landsberg
gcctcgtcgatgaaccccgacaggtccccggcaaacgacacttgcgtttgcgggcgggcgcagaagtcgtccagggtgatggcgccgggcacactgtcggcgcgcagcagtttcggcatgctgcggcgcagcaccttgcgcttggcgttggctggcagttcgctggtatagctgacccccaccgagatttcgcccgaggccagcagcgtcggcatcagcaggtaattgacccggcgcaccaccagcacgatacctggcgcttcggcgcgaatgcgtttgagcaactgcggtagcagggcgaactcggcgtcgtccgacaggccgatgcggaacaccgcattgctggtggccgggtcgaattcggcggcgcggctgaccgcggtggaaatcgagtccagcgccggggacagcagggcgaagatttcgtgggcccgggccgagggctccatgctgcggccggtgcgcacgaacaacgggtcgtcgaacaggttgcgcaagcgcgaaagggcggcactgatggcgggc

SEQ ID NO: 79023 - DNA, 377 bp, Arabidopsis thaliana landsberg
  unsure (1)..(377): unsure at all n locations
ggacctggtgaggaaaccagctgggtaccaggcagcgccgttcttggtttaaggatcagaaacccagtcatgggagacagccttcttgatgtccatggggtggaagcgcttcagggcggtttccagacgttcgggctcctttagggggtcgagcttgccacggttgtcgccggcgaacgaggtgatgcgggttgtcttgccgccagcacagaagccatcaccatagacatacannnnnnnnnnnnnnnnnnnnnnnnnnnnnnnnnnnnnnnnnnnnnnnnnnnnnnnnnnnnnnnnnttggtcagatagtctacnnnnnnnnnnnnnnnnnnnnnnnnnnnaagcggcgacaggggttgggtcaaagtgaatgtcg

SEQ ID NO: 79024 - DNA, 613 bp, Arabidopsis thaliana landsberg
  unsure (1)..(613): unsure at all n locations
ctaaaacactatgatatgttcttcatcatagagacttggggcatgaccgagaaagcataaagcattaattagacaaaatagatctgaaaatgaaaaaaacacacaaatgcaataataataaaactctcctaaacttaagaaacccaatgaaagcgacagcttgatttgctcattattaagctccgacgaacaaagccactgcgaaggcaaaactgaacaaaacccctaagacacaaaacgatcgtctcttgcatatgatgtgaggagaaaggatcttcttcttccaaaaccgagatgatggtaggagctccggttagacaatctagtcaaaatgaattttccgatgaaatccgttttggtttaagatatatctaatttatgtcatggnttgtacatataggtaagactgtgttactctctctatatgtaacatgcaggtatgtattttctaaatatgaaaagctattaggtcatatgcaaatataaaaactcaccaatctagttaatataaagaagaaggtgcatanatagcttgatcaccaactgattaagcaaaagtcaaataatgaaacttaggtgatgaattgatatcccttgatacgatttatttact

SEQ ID NO: 79025 - DNA, 224 bp, Arabidopsis thaliana landsberg
aatatctatattgaagttaaaaatatatatatatatatattgaagttactttgaagtataaattactttatcctttacttattaacatgcacttttttcctttagccaaaaaaaccagagcatgtccgatcttgtaaatgcatgaaactctagagttggatctatctggcatccgttaccatatcatcgatattctgtattcaactcgtcagcgatcttatgat

SEQ ID NO: 79026 - DNA, 347 bp, Arabidopsis thaliana landsberg
  unsure (1)..(347): unsure at all n locations
tcggctccttaaaagtatagtctcgcgttccctttggtgatcttattgacgtaagcctggcaaaacattgcgtactcgaggaccatgatgttgttataacagcgattcccttgcgccgttggctgctgttcaccccgggaaagtccagagagccgtccagtcgtcccgcgaccggcacccgctctgcgggagcgtcagcagtcgnnnnnnnnnnnnnnnnnnnnncccccgacccagccctaagcatcttttccaagtcgatctttgcacttcttgctacatgtcatgacaagctgtactgagacgagcgtatagtcacggcggacgactgtctcgattcaggcgcg

SEQ ID NO: 79027 - DNA, 460 bp, Arabidopsis thaliana landsberg
  unsure (1)..(460): unsure at all n locations
gaatgccatacatgtcttaatcccaccactttatttttttaacaaaacaacacaaccggtgggggcgggttgattttacttgatctaactccattcaaaaagagacttttttaccagggacgggatgcattagaattccgcgatatgatactttattcatgaaaaactcaatcctatctttatttactctatcttttctttatttgatcgctgtagggannnnnnnnnnnnnnnnnnnnnnnnnnnnnnnnnnnnnnnnnnnnnnnnnnnnnnnnnnnnnnnnnnnnnnnnnnnnnnnnnnnnnnnnnnnnnnnnnnnnnnnnnnnnnnnnnnnnnnnnnnnnnnnnnnnnnnnnnnnnnnnnnnnnnnnnnnnnnnnnnnnnnnnnnnnnnnnnnnnnnnnnnnnnnnnnnnnnnnnnnnnnnnnnnnnnnnnnnnnnnnnnnnnnnnnnnnnnnnnnn

SEQ ID NO: 79028 - DNA, 536 bp, Arabidopsis thaliana landsberg
taattaaatattagtttatatagattttattctctattagtaacagctcttaaaaacaaagggggaaggggatgctatataacaatgtatatatcagagataaacaaaaacgaaaactcaagaaatatataagagactaattgagaagcctatataacaacgtctagtcgtttaggttagtctcacttagacatattgtggtccgaggttatcccattttaggatgtgagatacgacacacagcagcatatattgttttctcaaggggaaccatattaataatgattagaaaaagttcttgaaagatgatgacttgcagatcaagtaagcctaacttatcccttttaacatctctaaaactcgtttgattagcctttatggtgaagatatcatttgttcaaacaacttaactcatgtagtagttttggttaatttcaaacactatcattctttatttctttcatccgattgaatattaattagtatttggaaaaagcaaaacatttgatgatcggattcaacaattagtatcaaag

SEQ ID NO: 79029 - DNA, 509 bp, Arabidopsis thaliana landsberg
gggaagggacccaggccgcccattccttctgcatgccgatgcggggggcgtcgttcagatcgcacggctcccgcaggcgcagccggggggccatcgccgggctgcacaggggggtgaacagggcgggcatcagtcggacgctgtcgaggccgggccagtcgccggagccggagcgcaggccgacgtcgaaattctcgcgcgcgaggtcgacgaggttgggggcggtgtccagccgcaccgccaggtccgggttggccagctggaaggcgcccagccgcggggccagccactgggtcgccagggtggccagggtggtgatcgacagcacgccctcgtcggcctcgagcacgtcgttgatggcccggcgcaacagggtcatggcctcggtggcggcgctggacaggcgttcgccggcctcggtgggggcgacctcgcgcggcaggcgccggaacaggctctggcccaggcggccctccagagccctgatctgccaactgaccgcggcctgg

SEQ ID NO: 79030 - DNA, 395 bp, Arabidopsis thaliana landsberg
  unsure (1)..(395): unsure at all n locations
caaataatcatagacctatgaagaccattccaattttcaacaaaagtgcactcttaagagggaatcgggggagagatattgcaggcaagagaaccttgtattctgatctagcaattggagctataactcttgtagtannnnnnnnnnnnnnnnnnnnnnnnnnnnnnnnnnnnnnnnnnnnnnnnnnnnntgctcctgcatttgccttgactctgcaacaaccacaccaaattttaactacaaaaatagagaaggaatcgaacaaaaacacaatggaagatggatgatacattttcatctcttaggttgagcagagagacttcaaccacaggaagctttttcttgaaccaaacgaagtcgttttaacaatatgggaagagaacaacactaacgat

SEQ ID NO: 79031 - DNA, 568 bp, Arabidopsis thaliana landsberg
cccccaaatccggaatgactcgcgcttttcgatgcttgaccgaattctcgatccatatgactcttgtcagaacccagctggggagcggctacgagctggacgtccaaactagtgtgtcgcccatcatcccgcagaagacaccagtgaccattcacctgttctccatttacatggcactgtgtcgtccgacgtgggcgggtgggaatgtgcactatgtgcgggcggcattcgaaagagccgttggtgagcagtcggacttgctacgtcattcccatggcaagaacaaggtccagagctctggcgatgacagtgcatgctcaaacatcactgtctggaaattatacattctgtttgagctcgatcgagctcaggacatcaaggccgcaaaggccgtcttctaccgagcgctccgcgcctgcccctggtccaaggagctggtgatgctcgcctttgaacgtctcggtgaagagcatgttctgggcttcgacgagctccggggggtgtacaacatccttaatgaaaaggaactccggcttcatgtgagcatcgcaatgagctggaggagtga

SEQ ID NO: 79032 - DNA, 585 bp, Arabidopsis thaliana landsberg
gttgttaaaccctatgccgcttctgctcttctctttgtttcttttcctccattagatgttggataagctgctctcttctctgtcggggggcctgcgaggtggtactcttggtgctcattctggaagaattcaggactgactgattcaaagcgctcgtatctcccggagcgtaacctgccccggtcatcgacgtgtcactgatgaacgacgagctcatattcgcagcactggacccagtgacaatctcctcgatcttcgacttgtcgcctgatctcacagccgcttctctagcttgcctttcggcttcaagcctcgcaagaatctctctcctcttcgactcagacaacctcgacgctgacccaccagtcccactcgcaccagcggcaccagctgatgacgatgaagctgcactgcccgcactaactgcactcgtagaagctcttcccgtactcatcaaccactctgtgacactgtatccaccgcctagcgacgacgatgtagaaccggcatccgacacactcgatcttggactcaacagcgcatctggtgctttcattgctgttccgtagtttgtctgcctctccc

SEQ ID NO: 79033 - DNA, 551 bp, Arabidopsis thaliana landsberg
  unsure (1)..(551): unsure at all n locations
cacttttactgcccggcgagcgcgtcgagaaggccgaggatttgcgcggcgcgctttagcggtcgctgaagaaggcgccggcgctggtcgacgttgggacctcgcagaccgtgctgtcgtccgacgcgcagaaggggctcggcttcgtgccggactatcaggcgctgaccgcctgggacgaggccgaacagaagcggcgcaagggtcaataggggctcctgagcggacttacatccgcgcctggaaatcccggcgcggcatgaggtcaggcatgtcggggagatcgggcaggcgaacgcgctcgatcacgccgtcggtgaccttgttccacgccgacatggcggcatcgcgcgtgccgctgacaatgccgcgcacggtgtcgccgacgccgggcttgcgcggcgtagcggcaacggcgggcagcggcgcgnnnnnnnnnnnnnnnnnnnnnnnnnnnnnnnnnnnnnnngtgagcacctgctgcgtcagcggctgcgcggtctgggcgagctttgccttcgctcgtgcctgctcggcggcgagccgcatcg

SEQ ID NO: 79034 - DNA, 557 bp, Arabidopsis thaliana landsberg
acgggatcaaaaccaaatctgaggtcccaacataaggtttagtttgaccactggccacagtggatacaatgaccttaggaatcccaatagggagagacctaaaagcagatgatatgagcgatgttcctccgcttccgccaaggcctatagccccagcaagagaattatcctcaaaggcttgcctaagaaaattctcaagacatttgctcatgacaccaactgcctcgcctctatcatccggaagtttaaccggtttttcctcctggttcgatccaatgtagcatgagagaacttcttctcttgttacaaacgcaaagtctgcaacattatcgatctgcttctgatcagcacccgccgaaacatccacaatcacaacctcaacctgttattccaataaaacggctcacaaaaatatcaaccattcacaatctttcaattctccagaaaacttaaaattgagtcaaatccttcatatttcgtaaaattggtcaatagtgattcaggtgagtcctttctttgtcagagctaatcttaaccttggaagacgaggtttttgg

SEQ ID NO: 79035 - DNA, 228 bp, Arabidopsis thaliana landsberg
atatgatctttgtctctttctgtgcacggccggggaacttaaagaatcataagtgtactttaaaccgaagatgtagatgttgtggttcacagtgacaaaaaacggaacgggagtcacttacttatctagccattagacagcattcgattctcatatcaccacggacgagcgaaacacgctagtgtagctcattggtaaccggccctgttttcaaggagggcttatgat

SEQ ID NO: 79036 - DNA, 175 bp, Arabidopsis thaliana landsberg
  unsure (1)..(175): unsure at all n locations
accaagatctaccaaatctttctctttatgctggggggacggagggatcgggggggggattcctttatttcatgccnnnnnnnnnnnnnnnnnnnnnnnnnnnnnnnnnnnnnnnnnnnnnnnnnnnnnnnagggctaggccaatacggactcattaacgcccttttttttcttc

SEQ ID NO: 79037 - DNA, 561 bp, Arabidopsis thaliana landsberg
  unsure (1)..(561): unsure at all n locations
gtaaccaagtagtgaaattggatgttattcttcaggatatgtgccgtcgagaaccaattgatgtatggaagtgaaaatattcgaagtttttctatggatgcagtgagagaggaaggaacttccttcgtaagtcagatcttcttacatgtgttgttcttgcctcattgaataaggggttataagaaagtgaaagttttgtcctttttccaaattgatcttggatactagaaagaaaagtctgtggctttattgatctaacagcatatttgactaagcctcttttttagtttggttnnnnnnnnnnnnnnnnnnnnnnnnnnnnnataaattgggaatttgttgatgtacaagtgaattaggcttccaatatttcttgttcttttatcattgaaacttcgttgtgtagatgaattttcctctcacatttgtttcaatcttgttttggggtatgcagctgctgtccaggagcagtcatctaatggatatttgcttattgcagctagtggaggccttaaccaacaaagaacaggagtaagtgaaattatgtgtcaagataaacgt

SEQ ID NO: 79038 - DNA, 475 bp, Arabidopsis thaliana landsberg
aaccaaccaagggtcaaaccccattcattaaatatagatattcaatataattttgttgacaatctcttatatatagtcgggttggtgttatgttttgttaactcataatatcactgtcataatgaaatatctatattccagcagaatcattatagacataactatgtctgatgaccaataaactactgatttgacttgttggtgaagaaaattccgggaatccttttatgaatctatgatcatatgcctaacgcgtttcatggagcttattctagtgacttgttcatgtgagctagtcttatcttatcataacttataagattggcctagacccaaaaattactagtgaaaggtgatatcatttatcttttacccccatgtaactgtgtcctacaacatgataaaatatgaatagtctccctttcctacgaatcttgatgagtccaagaacacgcggatccatattactggacac

SEQ ID NO: 79039 - DNA, 584 bp, Arabidopsis thaliana landsberg
  unsure (1)..(584): unsure at all n locations
caacgtattttttaaatctttttttcagtcaattcttaatgttattaccaggttgtgaatataaaactaaaaggatataaatgtaataaaagtaaacaaccgaattaatggggggaaacactaaccattgtctttttctttcctgaaactagacttgtgtcttgtccacctaaattcacttaaatctccattaacatacacatataacttttttcacacaaaaataaaatatatatatttaactttttatcaatatattcaaaattttatattgaattgtattgaacttttttttttatgtataattggtttaataaaaacttatatggtaatagtaaaaatatatcattgattgaagtaaaccaaaaatgttacttaaatctactaattgatccatattaaattagaagttaattaaataaacaaacaaaatccaaataattataataaactaaaccggaattcaaagtttaaacaaatattgaagtaaaaaagatgaaaactttataaagatggaaggatgagcaaaaagtgttgtatataatngtcgacactgagcaaagaaagagtgaaagacaactttt

SEQ ID NO: 79040 - DNA, 616 bp, Arabidopsis thaliana landsberg
tgaaagaaggagaagaagggaggtagcagaaattgtactttttgctccatgatcgaagagttggtggagatggtaaatgcttttggatttctaatagagttcttgattcacttgatattagctgtgattctgagactgatggcagaagaaaaagaaagagaagaaaagtgagagaaaaggcctggcttttagaggaactatgcattctctcaggaagaattacagagaaattagaaagaaagatgttattgtggcttaaggaacagaaggtctttctgttattgtagccgagattagtgttagtatttgtttagtagtctaaaaaaatggtgttttgtacataaattctagagatttttttagatcggaagcagattttctagggaaattgggagataaaaaaatgaaacaatgtttttgggacagagcaagaaacacaattaagtggagagaagttctgctgagaagaagacaataaatacaaattttgtttaattttttgtttcttatggtgattgttcataagtttcacattgacagactgttttactgcttcgaagaagtgaatgaaatttttaaaagcataaaattgattagatccctaaaatacgtaaaa

SEQ ID NO: 79041 - DNA, 646 bp, Arabidopsis thaliana landsberg
  unsure (1)..(646): unsure at all n locations
tagaagacttggctgcacaattagattcgcgtttggtctaccacaaatgtggaaatattcttcgagtatactttattctttacttatgacttgaagcaaaacccactaactttcaccgccccaatagaatccaacaaattgtgactcagagtggttgtatccaagtaattgcaagcttgactaatctcacactattcatttggtaagactaattacttgggatttggtgagattagtttccttgaattcattttcgtctgataatttatttttccaaattttggaggcattaaattgcatgaatctggaatgaaaaatatagtgagtgacaaaaatagatggagagttaaatcgtaaaaaatctaattttattaaatgcatcttctctgtctaaatttgtgaggccatttgatgccagccgttggtacaaagatcctgagactgacactaaccttcactaatattcgcctatgaaaagtataaagtaaaagcaaactcaaatcttcaactaaaattaagaaataaataaaatacgattagaaagttgaactagtttggtctgctcaacttatggcttacttcacaatattgttgctgntgattgggtatgcactcattcttagggaagactaaaaccggttaaaac

SEQ ID NO: 79042 - DNA, 369 bp, Arabidopsis thaliana landsberg
aggccggaccttgacatgtgcctcattcatggctcatcggcttggcattttccttatgtggggacccgggctggggacctggctactattaaggaggatcgatggcgcgatactggtcaaactcgacgcaaattcaactgtggatatacttagggtatacaggcggcctggatgggacacctatggctccgtctctaccgagacagcgttcatcccttataagtgcatggacaggtttctcttgagcgcatgtttaggataaccctctatgtgtaaattaaagggggctcctaacaacgtctacaaccaaaccaatgactactaaaccacccctttcattgtgctgcgattaagggaacgcaccgttca

SEQ ID NO: 79043 - DNA, 526 bp, Arabidopsis thaliana landsberg
  unsure (1)..(526): unsure at all n locations
gttacttaattgtaaccacatctttattcaatttatatttatagatgacgctgcaaagacgttggggcaacttgaatccaaacgtcttcgcctgcaatccctctcagcctattcaagagaaaatgcaattagccgtgatgctacccatgattttctgaatgaggctattagcaagcaaagactgccgattaaagcacacttcaatattcttacctggaccgataatccgggagatagaaaggaattaaaaacacttgtttcaacagccttagcacaaatggacgccatccctaaacaggaaacggatggagcgccacagatctggtgggcaggattannnnnnnnnnnnnnnnnnnnnnnnnnnnnnnnnnnnnnngacacattcgttgaacaagcctgctgttttctgaatttggaaactagttatcaatcctcaatcagtccaattggaattcgcctcggcgaccgactttaagcaagcctgtttatgtagatatatcagatgaaccgatgaagatgggaattt

SEQ ID NO: 79044 - DNA, 570 bp, Arabidopsis thaliana landsberg
ctggccgagctccaggccctgccctggcagaagatcgtcgagaccgccgccgccaaccgcggctcgggcgttaacgccccggtcctcggccccagcctgccggcccaggtgttcgaccccaagggctcggagctgtccaaggacatcccgctgatctcctcgaccaccgagaccgagagcgcctcctggggcgcccccgtgaccccgctggacgacggccagctgaccaccacgatcaagaacgccacccgcatccccgacgcggacgtcgcgaccctgatcggcgccttcaaggcggcctatccgggcaaggacaacatgtacctggcccagctgatcgtcagccagtggtcgttcaacgacaacgtcctgacccaggccgagaagaaggccgagcaggccaaggccggcggcgcgccggactacttcttctacttcgcccaccagcccgacgtgcgcggtggggtgctgcacgcgccgcacacgttcgagatcccgtacgttttcgacagcctggcgcactcggccccgatcgtgggaacgatcaccccgccaagcaacgcctgggcg

SEQ ID NO: 79045 - DNA, 325 bp, Arabidopsis thaliana landsberg
caaaatatatagtttaaacgcgtaagatattttgttttattatttaaatttatttgctaattgtctaagtcgagatataagtatttgactttcttggtcaatattggtttaaacttttttgtttgttttgaagtggctgcatgctggcatctcgataacggaaatacctttactttgaaactattttcttaaaatgtatatgtaaatacttaagaaaattagctttgaaaaattcaaatttagagttcaacaaagaaattttatgtataaaagtggaaataatggagaagtataggtaacaacattttggtaacattcaaaagct

SEQ ID NO: 79046 - DNA, 379 bp, Arabidopsis thaliana landsberg
cctttttttctttcttgtgtaattgaaaagctttattataataattattattcagggaaaaaaaaagcaccgttatttttgttatcatttggagggcattatctggctgctagttgctgagaccatgtcatgattcatgccgcatttcaccttgaaatgaatgtcttcctttgtaaaatcaatttgaggcgattccaaaatcgcagctgccatcgacaatctcctctttgacgaggcctgtctttgaatcactctctcaaacaaggtttaaaataagggttcaagatttaacctcttttggaggaaccaccgaaatttcaccactagatgtatgggctatagtgatgatgaacttagaagtttaaaacatctttgaata

SEQ ID NO: 79047 - DNA, 368 bp, Arabidopsis thaliana landsberg
cccgccacggcgatgccgtttgttcttaacttaaaaatgaattcccgctcttggttgacgaaaacattgctgcaattctgggacaagactgcttcgaagaaagtttattcagggaagcaatccggcttttgatacaagggcaggctgcgctcgtagggcaggagaactttggggccgaacagccacaaatagtaccggcgcgtacggatcgttatccagctcggcgaccaggtcgtttcgttttgaagaaccaccagcggcaactgggcatacgccccgtcaacaagcggtagagcatggggggagcgcacgttccattcggtattcaagccgatcgcatgctgcttggtgggcttccaacatgcgat

SEQ ID NO: 79048 - DNA, 186 bp, Arabidopsis thaliana landsberg
acgcgagggcctgcacaccgaaagctcctacaagttcaccccgcagggctttgcggggctcgccgagtagggtggctggacggtgctgcgtcgctggatcagcgacgcgccgcagttcggcgtcttcctgctctcggcggacgcctgacccaaagcgtgcaagggaaggcggattctttttttaat

SEQ ID NO: 79049 - DNA, 509 bp, Arabidopsis thaliana landsberg
ttccccttttcttcctcttcctcgattttgcctttcacttttttaaccttcttttcactcttcttgggcgtttggtcagcgttttcctctacagtgtgggttttttcttcagccttttgctgctcattcttcttcccacggcttctcttcctaaccctcttcttcagctcttcaacggatgacttgtccgattcaaccatgtttccactttcttcaaccaatcaattctgcagcaatattaatgaatttatgaatgaaaaaaacaacacatttgagagtaattatacacctctaagagaagggaaacagagcaatcccaaagaaaaacagagtaattaaagctgtactcgatttcatccagggtacagagattcgaaaaggaacaaccacttgaagagaacccatagattaaaaaaacttacttttagaaacgaagccacttgaaaaggatgggagagagctcacagaatcgaagaaatttgctgtggaagaagttgagagagagagag

SEQ ID NO: 79050 - DNA, 576 bp, Arabidopsis thaliana landsberg
  unsure (1)..(576): unsure at all n locations
tagacttcgttcttctctttgagactctcaacttcagtgtcttttcctttttcttttcatcaacctggagatgttggtcctttggtcctccttccgatgcagccactctttctttaagttgtttgatggaagtccttgatttggagaaaagccattcaatcgtcttgctcgccttgtcgaaacccaacatgtcttgaagatcgaaaaacttgcgagcaatctgaagagacagcctcatcctccggtctctaggaccttgagccgtgcagatcttactatgcctgtccctttttttgaccgtccttctccattgaacctcttgtgaggtgcttccatcaacacacttctcattcttcttcttaagctcaagcttcttgcaaaatttcctaggagattcaacaacatttgctgctacatcttgctgctgtaacaagaattggtttatcaagaaagactcattaaaactctcaagaaaatcggaagagaaaggaaaagaaggcgaagagtagtgatggtgagaatatggctttgaatgtganaatgaaagaggaaacatggtgtttgaggggatgaagg

SEQ ID NO: 79051 - DNA, 487 bp, Arabidopsis thaliana landsberg
gggggcctcggtgaagagccgcacgctttcggcaatggtcgcgagccggcccgtgaccagggaaagcagtgtcttcttgcccgccccgttcggccccgtcaccgccacccgctccggccccgtcatggcgaaagagaggtcgcggatcaccggccgctccggcgcatagcccgccgtcaccccctccatgcgcagaaccgtcctgtttgccggaagctgcgtcgacggcacggtgacggtcagcggctggaggatttcgatgcgctcgcgtgccgaggccacggcctccgccgcctgcccctgccggctttcggcaaggcgcgcattggctccgcccgtcagctccgcgcgctccttcattccgccgagcacgatgcgcggaaggtcgccgcgcgccttcttgcgccgcccggcgctgtccttgcgcgccttgcgctcggcaagcgcctgcatggtgcgggcgatgtctgctgcttctttctcctcg

SEQ ID NO: 79052 - DNA, 535 bp, Arabidopsis thaliana landsberg
  unsure (1)..(535): unsure at all n locations
ggctgactcccgcgtgaggtcgaccgcggaggcgaagccccacgtgccgtccactatgacgcgtaccgccaggccgctgtggtcactggcattgaggccctgcagcttgccgtcactcaggctgacccgctggccccggatccgctctacgcggaagtcagcgtgctgggccccttgtgacttcgcggcgtcgagcgcggcgtccgcgagccgcgacagcggcaggccggtgnnnnnnnnnnnnnnnnnnnnnnnnnnnnnnnnnnnnnnncctacatcaggcgcacccgtcggtcccagaggctttctttccggcgtgccgccgcgggttcttacccggcgcggagacgttctgcccggcgggcgcagcgcgtcgtcggtcaccgggcggggtcgttctagcggattgctcccaaaatccggtgcgaacttcgtcccgtcccgttccccccgcgcgggcgggcagcggtactctctgcgctgttaacgatgcaggtggcggacgatttgttaaggaggcgcccgacgtgggacg

SEQ ID NO: 79053 - DNA, 486 bp, Arabidopsis thaliana landsberg
  unsure (1)..(486): unsure at all n locations
aatgcactggcgattctttaaaacaaccgctggaagctgttcgacataaccaacaccgcaaactacagcaaagaagatatcaatacctggaccattgatgaccttcactcaaaaatgagcacactatatattgcttccctgcaaaaccccaccctgctgcaaaagacnnnnnnnnnnnnnnnnnnnnnnnnnnnnaacaaaggaaacaccagggaattgcgtcctacggtatatgatctgcttgcccaccgtgcactggattattttgagaatgatgaaaaagannnnnnnnnnnnnnnnnnnnnnnnnnnnntaaacgagaaagcagcttttgatcccgtgacagatttcgtccatcacaaattcatcacaaaagataccgctgcattacagtataaagcgcttttaatttaccgggagctgctgcagtttcacagcaacgattaggactatgccgccctgatagacgcggatcttcgccgtctg

SEQ ID NO: 79054 - DNA, 507 bp, Arabidopsis thaliana landsberg
gaagacatttgcccaagttgctaattttttctttttttcctgatgaatattcatttgatctttggctttgacaaaaaaagagataaagaatgagggaaacaaaataaccaatgcgtgtaagtaataatactcttcttgcaaatgaaaacaaaaccttgaacaatcaatttactagctatgcgctagggccaagctactatactaggcactaggtccgatttattcagaatcagttttgatatggatattggtcggattcgttcaacccactgattgcaagttggttttgaaaaacaatgttcggccatttgcatccagagttatttaaatcacgaaaaatatagtttgctatgtatcatatacatacggaatttgcatgttaacactattgatcaactagatttttctaatgctatatatattttggaggggaagaattgaacttaccttaccactctttttcgattcaaatactaagaattacattcatcagttgtgagtatagct

SEQ ID NO: 79055 - DNA, 334 bp, Arabidopsis thaliana landsberg
ctccctcgcgcgaacaacaatgtcactctctctctttctctctgatgggtgattctacaaattgctgattcacctctttgctctctttctccttttccgatctcgatttttcccaatctaatgcttttactggcgactgcatcgattaacttaagatctgggtgacccttatgcctgaggaatggattaaattgtggattgattatgaatattaccgaaaaaaatctgttaccgattgagtttcatccggtcttgtctgaatttccagtggtaggtctggatgtggggaaaatctacagacttttgaaagattcttgcgtacaaggccacctaa

SEQ ID NO: 79056 - DNA, 582 bp, Arabidopsis thaliana landsberg
  unsure (1)..(582): unsure at all n locations
tgagagcgatgctatttggatctagttaatgctttaattatttggtttgctttggaaaatgacacttgttgtggagtttacttgtcaagaatatggtaattgattttgaagcgaaagtgattaaaaaatataaatggttgctgaggattacctcaaaaacattgcatggtagtatcgcattgttatcttcctcacaaaaacattgatctgaagcagctctcttgttgtgagctggaggaaaatgggcccacttcgccatccccaaatcaaaaaattgaaatcataaaatgttattagctaactcgatctgtcaattaagctaacaaaaagatgaaaactatattagggttttcttttaaatcttaagactaattaagcttaagtacatttttggcagctaagctgaaagcttccttgtgagccatgcttggattctgagcctttaacctcctgatctcttccctgctccaatacaacccccaaagaagaaccattntacanactcaaaaccttaagtggttaaatttgtaagaatatatataatatacactccatgtcatgtgttgaatttatttcttactt

SEQ ID NO: 79057 - DNA, 430 bp, Arabidopsis thaliana landsberg
gtgtgatcgccacaggccaagcccctgtcagcatttttttttaggaaggctccatcaccgcgtcataggcgccggccacatggtcggctttcatcagccaaggtctgcgacgcatagctagccccttggcgcgattggattcataactcaccacagctgtagagtgacactgcggtcctatctgatcttaacacccacagcgctgatcgaactgacgataaatccattgtgtatagtgcgggagctaagtcacatttaaaaatgactgttttctgcccgaatgatctttcggcataccagttgtgtaaggtgtttgatgctgaggggatctctcaacgaagagaccgggagcgaattgcgcgctctttcgatctctccacatctgacttactcggcgttctgatttcactgcggcgagcgcggtgggctc

SEQ ID NO: 79058 - DNA, 595 bp, Arabidopsis thaliana landsberg
gagaagaatgtttgcatgtgggctcgaggccattctatttcttttttggctaagaatgtggctgctttcggggctggtctaataagtctgcctgagtaaatggaagttttggattagttgcttggcagaggaaagtccaatacagcctggtatcgactgttgtgtggttattagcgttcactgttatgaataagatctataatgaaaagagacaaactgagcaaggaaaaaaaatacaatatacacagttcaaggagaaaggggcaccaggaaatagaatggagctaaatcctgtgttcaaggagatgaatccattaaaggaaagcctgatattaaatggaataagagaagtggtgacctcagagcaagacctcacccaactaaagagtggtttaggtctatgagtggtggtggtacacacctttaatcccacaaggcagaaggcagaagcttgccgatctctaaattcaaggccaccctggtcagccaggcttaagtagtttagaaaactatggaaaacagtaagctcatgaagatgtaattgtttcagtcacagccagcagcagaaccctgctacttcaatcacgtggttctg

SEQ ID NO: 79059 - DNA, 305 bp, Arabidopsis thaliana landsberg
aacaaatttgtctggatatataactttcagtttattttattcttctaataaattggtatcgttgttgattaaaatggttttctggtttgattttttttcttttttttatccttatttaggattttgatttttctggtttatatattggtttagaactcggatgtcggatgaatactgatatttttttggtttgatatgttttgttttggttttattacttatgtgggctagtttgtttctaaacattctgataataacaaatcggtttagttaaagatcatctaaaagcttaaaacagtctacta

SEQ ID NO: 79060 - DNA, 462 bp, Arabidopsis thaliana landsberg
aggataaattcttagatattgttaaagaaaaagactctgcatatgttgttgattgggaagacagcgaaagaatggtggatagaattaccacgtcatcaactttagatctatcagtacccatgagatcatttgagagcaatgccacgtctcaattttctagggatggttcttttgggttccctgatagacaaaagcctacgtggagaaaggaagatattgagagtggaagcaattcaaggtttattccacaaaatttggagaatgttccacatagcccacaggaagaattctttgggacagctggatatctcagtgccccttcctacttcaaaccaggattcccggagcattcaattgatcagagttggagaattcctggagatggaaggacgcatggtaggaactatggaatggaatctgaatctcgtgaaaatttggagagcaatatggtgatcctggatg

SEQ ID NO: 79061 - DNA, 257 bp, Arabidopsis thaliana landsberg
attttatgaaatcgactatgtacaatcaagagagtctataaaggattgcgactgagaatgccttaacaagatcaggaactgaatattttctgggtaagaactgaatgtaaacatgcgacactttgagaaacagtaaggcaaactatacgctataccctgaaatatggcgttatttgcttaccccttgtctgtcatcactgcaaaaaaataaacaagggtactgtacgacagctacctctcgagccaagctggatttg

SEQ ID NO: 79062 - DNA, 501 bp, Arabidopsis thaliana landsberg
  unsure (1)..(501): unsure at all n locations
gacggaaggccttggttacccgggcggggtgaagatcgacgagcaagtttaaaactttaaggcgcgacgcctttgatttggcgcgtgggctcgaaaaagagcccacctttgattttagtttttccggtttgaagtcttcgggccagcgccagctggcggcgctgccgaactacaaagagctgatgcccgacttgtgcgcttcctaccaggaagccatcgtcgatgtgctgatgttgaagctggaaaaggctttgaaaaaatacagaataaaaaagttcgtgatcaccggtggggtgagcgccaactcgcgcattcgcgagcgcgccgctgaactcgccaaaaaatattccctggatnnnnnnnnnnnnnnnnnnnnnnnnnnnnnnnncaatgcggcgatgatcgcgttcgccggagcnnnnnnnnnnnnnnnnnnnnnnnnnnccgagcaagatttagccccccaagcccgggcggaactcgcatgagctcatcacttta

SEQ ID NO: 79063 - DNA, 571 bp, Arabidopsis thaliana landsberg
ctgcgcgtgctcactgccttgcgcgagggaccggccggttgtttcacgctcaatgcggcgctggaggcgggatggggccaaggcgcgcattggccctcgcgcagcgcctggtatccgggacgcctggtgatggtgacggaaaacgcgccggaaagcggccttttcaatggcgacatcggcattgccatggtggacggcaagggcggcatgggcgtccatttcgaaacggtggaaggcgggacgcgaagttttcccgtgcaggccttgccggcccacgaaaccgcgtttgccatgaccatccacaagagccagggttcggagtttgacgacgtgatcctggtattgccgcccaatgacgcgcgcgtgctcgggcgcgagttgctgtacaccgggctcacgcgtgcccgcgaacacgtgcagctggtcggcgccgacaaggtcatcgctgccgcggtcgcccgcagcacgcgccgctacagcggtttggcggaacgtcttggtggccgtatggacgtgccgtgaccaacggtcacgagcacgtggctgcgtgtgttgcgcgcgcgtgacaggg

SEQ ID NO: 79064 - DNA, 457 bp, Arabidopsis thaliana landsberg
gtttcttggttgaagttgaagttgaagttgttctagaaacgatgtatagttattggttaagagtcaatgattatgactctgagggttgtctaatactaatagaagaagagtgcataatatgtctagaagagttagcatcatcaggtagtgagaggaggatcatgaagttgctttgttctcacagttttcataaagattgtattctcccgtggctacgctgcaagcgatcatgtcctacttgtcgtgacgacattcacaatcctcgagcagaagaagaccaccatgaatgatattttgtaaaaggaaattcagaaacaaaaaaagaaaaaggaagaaagagacaattcaagcgtttctcgtttctggattgataatatgcaagtgtttggtgatcgattctgagttcagagctttgatttcctctggtgagtgcttccttagacgtcattgttttgac

SEQ ID NO: 79065 - DNA, 518 bp, Arabidopsis thaliana landsberg
atcaatccaactgacactgaatctactgtctcggatgatactgacgtaagctctgcgaccgaagtgatctccaatttgtcgacagacgatggatcttcagatgcttaaaatgatgatattgtaaaagaagtctgaaatttcttaatgactaaactctgctagtgaagcaaatggtgcatgtactaagataatgaaatttaatcatcaatatctacaacatgtttattcatttgtgtaaaagttcgagaacgaggtaacagtatgtataatgaagagactcaaaacttgtttttagaaaaaccaataatcatgcgctggtgtctttgtagtcctcagcttctgattccggatttctctcgctctgctatttccacaagcattgcaaggcgcttatcgaaaatcaaagcactctcgtctctcatgtcaagctctaaagcctctgcttcaagccacttctctctcagatcatcaaggagattccctcgtcctgtggtcatcatggcacctggtgcacttgg

SEQ ID NO: 79066 - DNA, 544 bp, Arabidopsis thaliana landsberg
  unsure (1)..(544): unsure at all n locations
attggtatatacacacatttttgttgacaaataaatcaattcttataacaagaattatcctgtttcttgttggggggtctaattatccttttgtatgtggggaggagaagatatggacacaaatttaaaatactctatacataatttttattattatcaagaacagaaatgaaaataagaatggcatcattttattgtgacccataaaacaaaaaagaaaagtgataaaacataaaaaaaatctttctatcaaaaaataaaaacattaagaaacttgccccttccttctctcacagatcattctagggctcctgacagaaaaaccaaataccttttcctctttccatttttgtagaatttcaaatctttctttcctcaatctttcacaatgatcttttcctgtgaagttcttgattttaaatcaccctttcttcactactagcttatctcttcttcaattttctctaccgacattcaattactctccctattcggngagatctctctctctcttttatgactttggttatgatgactggtcact

SEQ ID NO: 79067 - DNA, 587 bp, Arabidopsis thaliana landsberg
atagaaagcgtcagataggagagtttttagttaaaaaattattttgccaaaagcagccaagatagatttagggcgggtcaatccctaaattgtaggaatgcctttggtttatagaaatcttcaggcaaaacaaaaaagagagaccaaatgaattatttctttcaattttcttcaaacttttgaaaggatttgtccttttcgtgtgtttgttttatgaattgctcattgcttcaatataatatcaaggatagattttacagtttcctatatcagaggttcgttgcctttatttattaaaccttcatgagttcatcattatatttctgttgtttgttcatttggtttcatttctcaaaattgtattaagtttcattttggtttatagacagagaagaatcgtgaagagaagattactaacagaggaggccattgcgggtaaagtataaggttcgaagagctaaggttcattggaactttacatggatattcataggtataagtaagtcctctgctttactatatcatttttctttatgctgctctacatctgattggttccgtgaatcactctacgatgtagcttatgt

SEQ ID NO: 79068 - DNA, 585 bp, Arabidopsis thaliana landsberg
tcttttgattcctcttctccttcggattcctccttctttttcgatttagtggatctcttagtctcagtcttttttgttgctgtctttttcttggttttgggcttttcctcctcttcttcctcttcctcagattcttcctttttcttagacttagtggatcttttagtctcagagagacgtccggatttcccctccttctcctccttcttctcaagaactttctcagaaacctttgatcctgtgtctttatcctccttcacctcttcaggagtttgcttaaggatattcttaagttcactgatgggttgccctcgtgtgagacttgcaatctttgctgctgcaatgtagacaactggtttcacatccatgtagttacctccctttatcaaatccacaactcttttgacatgacgacgacctttactcatgtaaacagtattgttgataaaatcaacaacttcgggatcaccaccagcttcaacaagatcatttgatctgaggggttgacggataatgagaacatcgccagctctatcaaaatcattctttagtgtgggcttgaagagcaccagcattcatcatttt

SEQ ID NO: 79069 - DNA, 456 bp, Arabidopsis thaliana landsberg
  unsure (1)..(456): unsure at all n locations
attaccattcagccggcccacggtatcatcataccatatctttatagctcccaaggtggttacgccctgttcttttagtttaacctggcggacgggatagcgggtcacctggttgcccgccgcaccgcggcccttaatagccagatcagcgaagttgaattcgaaggttttgatgcgggctttacttgaggggcttaaaactaccgtcactatttccgcctcaccgttggggttggccgtgaagtattgtaccttggaccggtcgttccctttggtcaggtcgtactccttgtctcgcgtaaccccggtcacattgtaacgctttgccaggctgatgcccgtcttgccgtcggtataaatcatattataggtcgtgcgatcatcgcctttcttaaatactgccgcatgtaaaatattcttcccgataaatactntatccgccaccttcactacttt

SEQ ID NO: 79070 - DNA, 508 bp, Arabidopsis thaliana landsberg
ggaccgcctcgcgctctcgccccggaccgtcgagggtcacgtcggccggattctttctcaagctcggcttcaccagccggatccggctcgcggtgtgggtcgagcgtcacggaaactgacgtttcctcacacaccatccgcagcaggtagaaggacgaccccgcaccgtgtggtgcggggtcgccggggagagctgtctagcggtcgcggccggcgccgtaggtgcccatgatcgggccggcggcgtcgacgagcgtcatcgggtcgaccaggaggtgctgggtcgcgatggcggcatcgcgggtggcccggccgagcgcggtggggttgcggaacgactggctgccgccccagcggtgcgcgaaggtggtgacctgcgcggcgacgtcctggacccaggtgatcgcctgccgtagccgtgcgctctgcacgggcgtcagatcgtttccggcgttgatccaagtctcggcctcgccgtgaacctcgtacacgtaggcgctagcagcgc

SEQ ID NO: 79071 - DNA, 234 bp, Arabidopsis thaliana landsberg
ggggggaaacacaccagctcatggaatctcgagggagggacaagaactagacgctctgcttcatggacatatttgattgctgggtgaacttgttatttgcaagaaaatgctgacaaactactagccggaactataaatagttaaggcgggcgcgccccatgagtgagcgaacttgcactgagagcgttgttctcacatgcacgtgtgctgttgggaaacctgtctttctatctg

SEQ ID NO: 79072 - DNA, 410 bp, Arabidopsis thaliana landsberg
tttatttccccaggacttcctagaacatgccacacgttggcttgtgaggagtggccaggcttggcttgctggtttgggtttatggtcctgccagactcacttcctcctcaggctcacgagcagggctctagagtttgcctttcatttcaatttctactggtgattaaggaccataattaccacagaacagtctgggttagcgcagggataaaggcaaccaatacccagtaggactctgtcagtgctggcaatgggagcagccagggaaagttcactgggcagtgaatggcaaaagaagcaggagagacacagactgaagagcccctccaccccaggcacccagagagccaggtactgagaactttctaacatgataaagagaaatagcatcagaaaactgcaccaggcag

SEQ ID NO: 79073 - DNA, 386 bp, Arabidopsis thaliana landsberg
ggtaccagaaggttcacgatcgtcgcaagcctttgtaacttttctgggcgtcaggttgaggccggggatcgggggggcgcgcacgtagcgcgtaagttcgtctgccaccgcgcccggcgtgccggtgaactcgcgggtcgcgttcaggtgcgcgaccagccgccggatggagtagccgcggtcggcggcgagccgccgccatcccgccgcggtgcgcagcggctggtcccggctgttgacgatgccgtgggttttcgtctgctcgggatcgaccgggtcgaaagcgggcagcgggccgtcgacgtcgtgactggacaggtcacagccccagatgctctcgatcacggcgatgatccggcggtcggtccacgtgcggcgggcgaacc

SEQ ID NO: 79074 - DNA, 456 bp, Arabidopsis thaliana landsberg
agcactaccacattttcattctctttgccgatctctatcttactttttccgaaaccgccgcgggtttctgggtcatggagaaccttgatgtctgtcaccttcatggaaaacgtttgcgtaaggagctgcaaagtaaagaaaaatggggaatagtatatggcgtgagttgacgcccgatatctcgcgataactcacgtcaacccacgcttcttcatccttcaaaagtgctgtagaaatagggcgtcttcacttcgaactcggcgctgcacgtatctaccattttgttgacacgggtaagaccaagggctttgcgtttttcgtatacctgttcatccgtgcactgtccctgcagtatacgtgccatctgcgcatcgccgaagccattctttttggcttctttgaacaaatctttcgggatggtatcgagtgtgtattgcgccattttttttccatatt

SEQ ID NO: 79075 - DNA, 592 bp, Arabidopsis thaliana landsberg
  unsure (1)..(592): unsure at all n locations
acacaagtccattatataatctcattttgtagcagacattgaatcaaataacaacttgtggttttcacctgctagccgaagcgtcctacgttttctttttggagaaggaaaagccaaaaaaggtggtcggtgtttcttgattggagatgtatcattgggcaccaaagaagctatgaaaaagacacctcatgtagattagttcagtaaataagcattatataaacgatcatccataatcctaaacacactatacttaaataaacataaacataaactttatatgatcacctttattagtagatgattgtgctagcaacatgggtccatgaggaggctgatgaagtctcaagccaccattttgaaccggattagaagtttctttcttaccgctattagttgaagttgttcacatgatgcgatatctgtaacacgcgagtcgaggttctgcactcttgacataaccatataccgggtacaggatcgtaacaagactgctgcgcaataactgtatacacaaaagagaaagatttattggaaagaatgataatcataatcatgtanaaaaagagtattctacaaaagatataggggc

SEQ ID NO: 79076 - DNA, 433 bp, Arabidopsis thaliana landsberg
ctaagacttgacgaaacataacatattatctgttaggataccactttcaatgcaagacttttaaagggttggaccgtatgagccccttaaaaaaaaaaaaaaaaaaatcatgaatgtgattattataaagggacggccccaagcttaaggattcatggagtgggaagagactcatatgtggtgcattctaatcgggccgctaaggaaaatacaccaaatattagactgacttatggcacattgaccacattacgcttatcatagtgccttgggtactccaagaggaattaggtaacaaacttgaggaagcccttttaaatatatatcacacacatgaggctgatcagaagctagctaccaatagctaattccacatcatgacgcgtatgtttaaacatgtaagactggtatcaatcattatccagatatgaaa

SEQ ID NO: 79077 - DNA, 278 bp, Arabidopsis thaliana landsberg
gcacaaatttcctttttgattgacaaatataaactcttactttacgcaagaagaaatttcgcgatcgggaacatgttaatcatttgggaccctactcgaaaaagactgatctaatctcccgttatcgataaaaagagactgttggccagcgccgttcatagcactcgcttatcaatggccatatcaagtgctgacttatacgctcggttcacagtcacccgagttacgtcttgatataaaaacagactcgaccgtgccgccacacccaactccatgca

SEQ ID NO: 79078 - DNA, 514 bp, Arabidopsis thaliana landsberg
  unsure (1)..(514): unsure at all n locations
taatatgcatgatagaggtcccaatcacaacatattatcaatcaacacatgaattgttttaaagaaaggcgttggcaagtccaatattacacacatatctaataacaatgttataaacttatatttaatgatttgagtaaacttgcaatatacaaatcgcttatcgagcttaaataggcatgaattattggtggtaaaatattttctctgtttggacaacaaaattgagtcgtctttccatttattttctgatatatatttctcttttatatctattacaaagttttctctccaaaaagagagcacaccttgtgtttggatgtggttatcctgaaatattcagatttggatctgaaattcaactatcaagatgatgatccatagcttttacatatcatagttttggatatatgtccaactatcaaagtacccacatatatccaaatctttatcagtaaanaaaaaactaaaaattaataaataatatgtcaaaacaactttctataaattgttt

SEQ ID NO: 79079 - DNA, 556 bp, Arabidopsis thaliana landsberg
attcggatattgcttgcttagagtatgagacaaaaatcttttatatttctttcacgtttgatcgaattgcttggttccggggaagaagtggaagttgattagaagcgacgactactgaacgaacctcgttccacctggtcatctatcgcttatttgctctttttcttttttggataaagatgtttctccactttggataatgctattattaattctttgttgaaatttggataaggataataattttttcatacacctaccataccaaatcatttggttgcatgtcttcaacggaatcggaggaactgttttttgtttggtttgtttttttaagcagaagatctcggattgaatccacactaatctccggatcttaatttggttaggaatttttttatatacatgtgtggttaaatgcctaagtgggttaggataaccatactgtctcattctctcattggagagatactattaaacatgctatgatgattgtgttgggtacatgtacatctaaactcctatctcaaggttttctacgtaatctcagcttaaataa

SEQ ID NO: 79080 - DNA, 216 bp, Arabidopsis thaliana landsberg
ggggcgcctttttttctttgttcatttttgagactgacgcttgtcaatccctatggccgacttttttgtttttagcacatatggtacaaattagcgatgagtggccgaacatgtgttgttcggaatctctcgcaggtacgttccttccctcaactttctgattccctgcatcatttttctcctgccgtcgtgcatgcgtgtctgcacgcgtgagtt

SEQ ID NO: 79081 - DNA, 542 bp, Arabidopsis thaliana landsberg
ttttactcatcacaaccacaactaatttgagattgcttgagtttatttattctaacaaagctttggtggaaaatggtaatagtaaaaaatttcaacggttgcttgaatttatgtccaagctattaattaaactttataaaaacatagaatacgaaaactcaactcttttcttcattttaaaaaacatactttatttttaattatatttatttgaatataagcaccaagtcaagtcaatgacaacactgcacagtattccttctggttccaataatattcttttgttttatcagataacttgaaatataaatgcatataaaaagtcgcatttgtataaatattctccattatctaacaataatcctatcagagaaaaggaaaaaaaatatgaaaatttccgcttacgcgtgttattctctaaatggttggcacagaaaaaaaaccaacaaaaaagaattactggtagagaatagagattgtcaaatttctcataggttagtgatacactgatattttattaaacattaattaaaaaatctggg

SEQ ID NO: 79082 - DNA, 561 bp, Arabidopsis thaliana landsberg
  unsure (1)..(561): unsure at all n locations
gagcaaagccgcggctgcccatgttttcttcgctttctaccgagattttgcttctgtttttttccacaaactctttggagagcgggaaaccgaggcccgtgcctttttcattctccgtaccgggcttggagtaaataatatcgggatggaagatatctttcctcataccctcgctcataccaatgccatggtcttcaatgatcagggttaccaggtcgttctctgaccgggaagtaaccaggatatttccgttccggtaactgtatttgatcgcattggaaagcaggttacgcacgatcagccgcaggtgatcgggatctacccaaacggtttgctggagatcattgataacaaggctgatatttttctcctccatcttctgctgcagtatgctgaacctgtcgttgatgatggaagccagttcggttttttcgggatgcgctgtnnnnnnnnnnnnnnnnnnnnnnnnncagcggagaaggttgtcgagcgtattgtgcaactggtcaacatggtccgaaatacgcagggccatctcggcaaatttttccggggaaaata

SEQ ID NO: 79083 - DNA, 415 bp, Arabidopsis thaliana landsberg
atagggctttggagagatctgcgagaagaaagttgagttcttaatccatctaggttttttgaattagtttctagaagagggagagatggtgattgaggaatgcatcagagaaaactgacagaagagagtgagcacacgcaggcactgttttgtgtcgataactttgcgcgagcgtgctcacctctctttctgtcagttgcctatctctgcctgctcgacctctctctctctctctctttcaaatttggctcatacatttctttctttgatcgcttcttatcatctcgtctgctgcgcacttttgctagtgatgcgtataagacacacgccgtctgatattcataagttgtgtgcttttctatgttatgcggtagtgggtgctcgcttacgcataacaatgtctgtttcaggcttt

SEQ ID NO: 79084 - DNA, 435 bp, Arabidopsis thaliana landsberg
ggcaccagtatacttagcaagggcagcacaatcagtttttgtgtttcgtgcgtgcgtctacactccaggggaagagatggagagccattgcgcttccctgacctcacaaccactggaggaccataatattgcatacaaacgcggagtgacgctcacgggcaccgcaagagctgtacatcaaacacggtgcgtagcccaacggcaaacatagcacctagcgggtgagagccaaaccctgcggcatcagaaggtgcagtttcagttggcttgcgccataccttaacaaagaaatgtatgtgacacattggaggaggagtcggacgctctccttcaaaagatggtgtaagcacgtaggctagcccatgtagagcataccgcagacgctgacgcccttatgggagttgtgcaccaactattcactcgacaacaaaacac

SEQ ID NO: 79085 - DNA, 617 bp, Arabidopsis thaliana landsberg
  unsure (1)..(617): unsure at all n locations
ggcgccggactataaattcccgaaagtgagattgccgtttaaaatcgttagaatatgccggagaatccattgaatattcgggttgacgtgtacgttccgtgataaccttacagtaatccgtannnnnnnnnnnnnnnnnnnnnnnnnnnnnnnnnnnnnnnnnnnnnnnnnnnnnnnnnnnnnnnnnnnnnnnnnnnnnnnnnnnnnnnnnatggttcagttctactacgatcaggtaattaccaatccgaaaatcgcaacatcatacccgacaggtaatatgagtacgggaattcgattccggtttaacttaggaggattgtaaaatgaatatccgtgctgccagattaggcgatgaaaccgccattcacggactaatttccgaattggcattgtatgaaaaagcaccgggcgaggtcacgaatactgtggaaaaactgaaagtcgatctctttgttgatgcagtctgcgaagcactggttgttgagaacaaccggcaggaagttgtaggctttgcattgtattaccaatcgtattctacgtggaaaggaagatgcctgtatttggaagaactttacattcaccccgcattccggagaagagggatcgggtcgcgg

SEQ ID NO: 79086 - DNA, 594 bp, Arabidopsis thaliana landsberg
  unsure (1)..(594): unsure at all n locations
ccaaaaattattcagaattacgagaactaggtcaaatttcaacctcggtactggaaataatcgatagttcgggaattggtccacgaaattaaacaagaaaaatctcgcttctccaataaaactgagccagaagatctggcccaggtctttggaatcggaagacgaaggttgaattccgagtaaactatgtagaataagccaccaaaatccagataatctagtggattttatacgaagaattggaagcgaggagtgaagaaaaccttttttctggcgatatgcaaatcaaggaagccatcgtgatagacctttcgcttctgcttgaggtgcttcgtatacatcgcaatccatctctgtttctccgccatttcttcttcttcctcggagaagagaatcgcgttttcgctgtttgattttaaaattcgagtgtgtagtgagtgtcgtagctattgactgtgggagtgaatagtgacgantgattaattttaatttgaccccgcataatcttaaagaatgtaacatcacacccaatacttttaaaatagtctactggctccccaaatactttaatcctttaacaagattgaaatttaa

SEQ ID NO: 79087 - DNA, 315 bp, Arabidopsis thaliana landsberg
aagatatgttgctacatacacaacattttaaaaaaccattattttttcgtatgcatgtaagatattcatttatgggaggacaatgtagacaaagcaggggacgctgagacacgtctttgttgtttgtacaataacaacgagcctgatcgatgaataagaacataatcggcatcgagtggatgaggctttaaacaatgacatttatcaatcgggagataaggacttaatggcgtgtcgttcgtacaatgacagtactcgaaccggttacggcttctggaatttaatatgtgcatttaatcaaacaaatgcacatgc

SEQ ID NO: 79088 - DNA, 571 bp, Arabidopsis thaliana landsberg
atgcccttggatctttcttcggcaacttgtaaaactgacaatcggagctttctttttcatcccacggctctcaattatccgctcgagcatatatatcatcgacaacgtgtatatatgtgtttaccaaattatgttttttattttatttttcaaaaaattgcactattaggtggacctacatatgggttcgattcgactccaataaacaagctaatgatgccgcccgatgaccattcaaatattgttggtagtggctttctcctaaatatttgcattttcttaaaagaccctctttgaaaaaatcataattgaaacacgacgtatcacctacatgcacctcttgaaaaatatttccattttattctcaacgaatgtatttattgatgtatattatttcacaacgaaagttcgcatatatgttttctaattggtccctagaatataattatgcgatattaaagttggatgcaagggaaaaaagataattctgaaaaaaagataattctgaaaaggataattctgaaaaggacaaaatattcctctagaatgtataagaagtggtcattttttt

SEQ ID NO: 79089 - DNA, 538 bp, Arabidopsis thaliana landsberg
  unsure (1)..(538): unsure at all n locations
cactctctttttctaagctggaccgccttgtactacctatgtactatatatgaaacgaccatgcattcaaggaccagagagctgacggcttnnnnnnnnnnnnnnnnnnnnnnnnnnnnnnnnnnnnnnnnnnnnnnnnnnnnnnnnnnnnnnnnnnnnnnnnnnnnnnnnnnnnnnnnnnnnnnnnnnnnnnnnnnnnnnnnnnnnnnnnnnnnnnnnnnnnnnnnnnnnnnnnnnnnnnnnnnnnnnnnnnnnnnnnnnnnnnnnnnnnnnnnnnnnnnnnnnnnnnnnnnnnnnnnnnnnnnnnnnnnnnnnnnnnnnnnnnnnnnnnnnnnnnnnnnnnnnnnnnnnnnnnnnnnnnnnnnnnnnnnnnnnnnnnnnnnnnnnnnnnnnnnnnnnnnnnnnnnnnnnnnnnnnnnnnnnnnnnnnnnnnnnnnnnnnnnnnnnnnnnnnnnnnnnnnnnnnnnnnnnnnnnnnnnnnnnnnnnnnnnnnnnnnnnnnnnnnnnnnnnnnnnnnnnnnnnnnnnnnnnnnnnnnn

SEQ ID NO: 79090 - DNA, 481 bp, Arabidopsis thaliana landsberg
  unsure (1)..(481): unsure at all n locations
aacccgaggaatagcccagcgaacgatacaacttgaataaaagagtggcgatggtggttttcccattggtgccggtgatgcccaccaattttaatttttctgtggggttattataaaagtttgccgccatgatgccgcatgcttccgcggcgttccccacttttacataagaaacatgggggtaattccattcgggtatctcttcacaaataatggcaacggcccctttctctatggcattctcaataaactggtgcccgtctgtatgcactcctttggcgggaataaaagcattgccgggaaccacgtccctggagtccatgcaaagcccgttcacttccacttcagtactcccctgcaacgcaatgctgcggactttgtataatatgttttgcaataatgccatcagctcagttgtatttctatgctgaatcctttttctatannnnnnnnnnnnnnnnnnnnnngactcaccactttt

SEQ ID NO: 79091 - DNA, 380 bp, Arabidopsis thaliana landsberg
gacactcggatcagattgcgcagacttggaggaaggggaccagagtgtttgatgaaggatggatcactaacggagactgagcttgaggcgcctaatgaaaaaggtatttcactggtgatacttttactagccgcaccgtagactcggatagagagtggaggatcatgaagggctactttatgactgtcggagtccaaatataataactgcgctgacgaatttactggaaactccgccattcctaggaaacctgataaatacttattctcaacatatactgtgtgtataagaggccagctccatatccgatctaggatctttcttcatattctgaagcaggctatgtcgatatacaccaactacctgagggcctttaagat

SEQ ID NO: 79092 - DNA, 259 bp, Arabidopsis thaliana landsberg
agtcagaaaacctatcacgctggggggtctatgctccataaacagagccgtgacaaacttttgaacccaccctaaacagtatcattcaccatgaccgtgataaaagcactgcacgggaacaactgagcataacaataaaccgacgatagaaaacttactaataacaaccaactgaaagaagagatacttgctacgaaaccccaaccaaaaccatcccgaagttgatgatgcacgaccaagttaccattaaaccatcaga

SEQ ID NO: 79093 - DNA, 490 bp, Arabidopsis thaliana landsberg
acatgcccgacgcggcgggcaccttcgatcagcttttgcacttgctcaggtcactgtttgcgcggcctgattcccgctatctgaaactgatccggcagttcagggtgaaagatcacgaccaactgatgacgcgtcttgacgaggtggtccgtggcggtggcgaggggttgatgttgcacctgggtcgggcggcataccacggctaccgtagcgaccatctgctgaaactgaagccggttcaggatgcggaagccaaggtgctggcctggctgcccggcggcggcaaatatcaggggatgatggggtccttgctggtggttacgccggcaggccagcggtttcgtgtgggaaccggtttcagcgaccagcagcgtgcccatccgcccgccatcggtagtgtcatcacctaccagtatcgcggctacaccagcagcggcctgccgcgctttcccagcttactgcgggtgcgctttccgccgtcagggccgtc

SEQ ID NO: 79094 - DNA, 209 bp, Arabidopsis thaliana landsberg
gtcttcgcactgatgcgcttgtgtcattgcacaggggacgatctatggaggctctttgtacctgctgttgagtggaacacagttggaacgatgctccaattacctgccttcgggttgaagaccacaatgtatagatgtggagtcgtattaggatgaacactggcgggggtgatatgacaattgaggctgaggccttgtttgtatttcta

SEQ ID NO: 79095 - DNA, 630 bp, Arabidopsis thaliana landsberg
  unsure (1)..(630): unsure at all n locations
attgattataagaaaaatctactagaaacacatctatgaaattttgttaattttttttagagaatcttacgattattttctttaaccacttattttttatgaaactaaaatgaatcaatgtggtacatcaaaattggagaccgcacaaataaacaaaagattcaacatagaaacaagttaaacccaactttatagtgaaaaaaggaggaacagccatgagattgaagtttcatggaaccaaggttgtagcctatcaaaaacgtatgtgggttggatagatcaaaattagaaacttttgtttcaaatggtaaaagcagttatttcacaattcatagatagttgaatgctaaaaaaaataaaataaaaaatagagaagaattggtaagtattaaaaatataaaaattgattgaagtagatgtgaatcatgtgatgaccaaaaaagatttgacaaccaaaattgtctttttttttgggtgttttatgtattcagcccgttcgtaagtgttattatagactctaccgtttcgttttctccaaagaaagtttatgattttttttcacaagttcaaaatgtatctatcatacatagttgatgatggaactgtgcngattttcatcttttgtttttt

SEQ ID NO: 79096 - DNA, 612 bp, Arabidopsis thaliana landsberg
atgtgcgcttggcattaaacaaatatgaacggctgaagcagaccttccgaaatcatttcgactaccggtccattcaaccgaaaaatcagcaaaggcttttagtccattatcgcgacaacgttattccggtgaatagttctgacattggaacggtttatatctccaaccaaatcgttgacgtgcaaacgctggcaaacaaaaggtacgttctgaacaagaccctggatgaattggaacaaatacttggagatcagtttttccgtgtaaaccgaacagctctcatcaacaaaaaactagtactgggagtaactaagcaattgaatcgaaaactggtcatccaccttgatcctaatttcaaaactgatctcaaaatagcagtcagtaaatcaaaatccccgttgtttttgaagtggctgaagacagcctgatattcaaccggccggttgaaccgcctgattgtccgcttgagcattttatcttctctcccgtagggaaataagaaacatattcgcttgaattttaaatactaaatacatgtttgcatttcacattatgcggttggtaacccttgacatcattgcattgatcgctgctcttttatttaaatcccat

SEQ ID NO: 79097 - DNA, 465 bp, Arabidopsis thaliana landsberg
cacgcctggctggccccggcatggcgcaccacattccacaatccctcctgcgctacctgaaacagcgcgtgctccaccgggggcgacagctgccgctggctgcccgacacccggaccgacaccctcagccgcgccgcggaccggaaatgccggggcagatcccgcagcgcctgccccaggcccgtccccggatgctcaaaccccgaaagctcctgcaccgcggaccgcacccagcccagccccgcccgggccagctctttgcccgcgaccagacgctcatactccggggaacccggatccgcgtgccggtagcaccactccaggtgcatgccgatgccaaccaggcactgagccacgctgtcgtgcaagtcacgggcgatccggtgccgttgcgcgctcaccagctgctgctgccggacccgggccaggtgctcgcgggcccgccggagctgctcattgcgcctc

SEQ ID NO: 79098 - DNA, 529 bp, Arabidopsis thaliana landsberg
  unsure (1)..(529): unsure at all n locations
actgtctgccgcccgcctgtagcgcaatgcttttgattgtcggatcgccttcacataataatttttcgtaagccgcctggcatagtagttaaactcggggaagctggtatatacttcttccaatgcttctgccgaaatagcggctacagtagtatgttccaatgcccgcatatattcatctgcaggcgcatggctgaaaaaactttcgggtatagccgtatcgccttccatcaaaaaacagttaccgattcctttcccctgcatttcgggagcgggagatggttcacaggatatctgcaccagaccatgagcaatgaaaagcaggttgcagcaggtttccccattgcgcagcaggtattcacccggctggtattctttcgactcaaaaaatgcggagagataggctgccagtggcggcgataaggactgatctcatgaagcaattgcatggcacattgtaccgggtgggacggnctgatcatggtatttggatttctggcatagtcccgaaaattatgccaaaacatcc

SEQ ID NO: 79099 - DNA, 356 bp, Arabidopsis thaliana landsberg
ccggggagcgacacgcggtaggcgtcgtccggcgtatttttgatgtttatcgccggcgcggcggacgtgaggggcggggggctttcggcgtgctgcaccgtgaagggaatcgtgtcgagcgccatcgtgtcggcgccggcggcgattctgaagtgcaggagcgggccgcgcggcgacgccagcgccatcgtgtgctttcgcccagtgccgaggccgggatagttgagcagctgcaccgtagccggcaccgcgccggggttgacgatcgtgtgccgcgccttgtgcgttgcgaccaccgtggacggttcggtgactactacgcgcggggcggggttcgccggggcggtgctgactac

SEQ ID NO: 79100 - DNA, 598 bp, Arabidopsis thaliana landsberg
tttgtgatttaaactccaggctttccatgtcgcggaaattttccacttcgggcagatacttttgtgttttggcaattttatgcggattgctatctgcggaaccgatcaggaaatgaatgaaacccgtcatatttgcttttggtctttaacgactcgcaccacagtctccaaaagttcgatgcaggaccaagttgattatttccacggataaacatatttcccgactgtggatcagcatggaagaatccatgtttcaggatcatggtgagaattacattcataccgttttctgcaataattgccggatcaaatccctttgaaacaagattcggtaaattatccggggcttccccttcgacatattccatgatcaatagcttggatgtggaatacttgctgctgattttcgaacataaacccggtcgtgttccttaaacatgtgggttaaacgcatcatgtttgaaagttcattcatgaaatccagttcttttaacatgatgaccgcgaaatcttcaatgaacttgatcaggctgaaattgttgatttccggaatcggctctgattttttgagcaaagatttgaggagcttgatgtccaa

SEQ ID NO: 79101 - DNA, 583 bp, Arabidopsis thaliana landsberg
  unsure (1)..(583): unsure at all n locations
tccttagatgtgctgattccacactaagtgcaaccaacagttgaacctctccaacaccaaagcaaacccttgggggagggaaaaagaataatataatcacaaaattatcattaacttaagctatggtcagtaacacaaatatgtcatttcacgattgcttatagttaggatttttttatttttattttattttttataactacatgacattaattcgttgcgttagaataagtctacgtaccatgttgagacgaagaagaaggcagcttgaaaagtgagcctcttcgcaggaacagagtcaggatcccactcaaccagaaccagagacggcgatgtggtgactgcgataagtaagtacatgtggaagcccaccatcgccaccgctagtcccacaaacgcaatcgcaccacacaacagcggcgttttcccgctaccattatacacgcatgttttgcttccccatgtcgcctattgcaaatgattgacaacatattaatggcaatgatataacttatactanatactattattatcgaacgatatggtaattaatataaaacatgaatcaatatagatttctgat

SEQ ID NO: 79102 - DNA, 525 bp, Arabidopsis thaliana landsberg
  unsure (1)..(525): unsure at all n locations
agactaaatgcgggctaaatttgaaagttcgggattttgattttttcattcgaaatcgtttctctaatttgtttgccatgggtatgggtctaagttaaattggactttctctaaattagtttatcacgttaaaaaattaataaaaattattatcagaattacttttgagcaaaagtaattatatttatgagattcactatcaatattgctaggttacaggactaaaacctaaaacctaaagactttgtcgtcggcgatggcatgtgcatctctccggtttggagatgtttagcctctcgattgagtttcctattctcctaaggagatatggattgtttattgtggatcttggatgtcacgatttttatggttataccaaaggcggtctatggaatatttgggattcaaagagattggtatctttggttggaaaatcacttctatgngtcgcgctacgtggaatctccggcaggatatacgaggagatatcaaggattgcggatctgtgaaggtattcttggaata

SEQ ID NO: 79103 - DNA, 535 bp, Arabidopsis thaliana landsberg
  unsure (1)..(535): unsure at all n locations
aactcaacgaggatctagacagactcagtattgacaagtgtattcttgtggaagaggtaagagagcttggtgagggagtggaatctgcagacattgcgaactttcagcttcaagttgtgctagagaaatcgaatgccgaactactctctgccagatcagccaatgttcatttggaacatgaaatagctaatgtgaaggttcagaaggagaaagagcttttagaagcaatgctgatgatctccatcatgcacaatgaaaaatctgaattatctaaggcagtggagggttcagactgtagatacaaggaagctaaagcgatagaacaggatagggataagcacgtcttgacactccgtggagattacgatgagcaggttaagaagaatcgtcattcgcacgaagctaatctgaaattggaagctgacttgatgaacttactcatggaactcgaagaaatcaaagtggagaaggacaatctgaaccaggagctttttacagaaaggaatgagatngaactatgggagtctgagtctgc

SEQ ID NO: 79104 - DNA, 468 bp, Arabidopsis thaliana landsberg
gaatccacttccctcctagtatttcttggagatctggcgctttttaaatgtgttttatgcagttgaaaatgcgccatgatcggggtatggacaaacgttcgatcaaagtaacatttcctttatggtgacgatagtccaggatacatttccaaaagatctcctccagcgactgagacagtttttgttcggacatgtttttaaattgcggagaaagcaatcctgtataatgaaacacagacttttcttttaacctgtatcctccaccaacaaaataatccaggatggttttggccattcctgttttcctggcatgaataaaagcgggctcctcaaaattctccagtaataaccgggcaacctggtcctgttgatcggccttgcccatcaataccacgatcctttccatcactggcaattgcaaagcatttgtgttacgcttttggaccttatgaagtaattcaggggtaa

SEQ ID NO: 79105 - DNA, 549 bp, Arabidopsis thaliana landsberg
catccgcttacaataaactttgacaatcaaacacttgtaagttacataattaagcaaattaagagtggagatggagatgggcaaggagaatacctgaagaagaagaagattgacgtccgctataccaccgctcaggagacctgcgacggtggtgtctggatcgatgattccactttcccataaggaatctcaatcgacgatgatggattttgtagaacttaggggtcagcgggagaatttgggagctgaagaagcaaacgaattggaaattggaaattggagaagagagcagtgaattcggtcggtggtgtcgtctattcaacttccggttctgtaacggcccgatttcatttcgtgtgggctataaatgggcctaatataataggtccacatataattaggctataaaacgttttttttttttatgaatacattgataaacattttctgattactaaaagccattttaaactgaataattacttccatgacattaacttattagtcattattcgctacaaattaaacatctctcgttagatattacac

SEQ ID NO: 79106 - DNA, 506 bp, Arabidopsis thaliana landsberg
ggtcttttctttactttatagagtacgaggtctataactatcatgagttgtttgagagcttagggtaaggggattatgcgacaacgatttggaaaacggaaaagtgaacttaagtgaaactgtgcaacgcgcaatggagaaccaaggaaagaaatgaaaatcttacgaaattgctattcgatttttcttccatggaactgtccccattagaaactggctcagtgagttccctaataaccgatgcaatctcaaaggacacaccaactcggtcacccagtgaaccatcctgagagcccagatttttaacaacatcgaaatggcgaagcaaaagtatcgttggtgaatacctgtgacaatgaaaacaaggcattcaccaagctgtggataaaaatactattccagaaagaagagctctatatttacaaaaatgtaagtaattttgcacttcattaaaacacggtcatttactgaattgcagtcataatgaatccatgaaagaaaagaaa

SEQ ID NO: 79107 - DNA, 508 bp, Arabidopsis thaliana landsberg
aggtcggcacacggttaagcgtctcatgacaaagtgccgcgtgttattgattcttgaattgatatgcacgacacctatactacgggacacggggctttgaccagggctggtccacctcgagatttcgatccttggacctggatatcgaccctttcactgtctccctcttacatgctgtacctgaaatgaatgttctcccagtctgtcatgtccatttctccgttgatttgtccctggtgtgcagactgttcaggtgttaaccccatctcttccaccagcttagccctgcggcggttctgcaagatatctgttcatttgtcaacaaatgcggcggaatctgcttgttcagggtactcacagtagaacctccacataatgaacaaaacgcactcaaaggcatacatgactccgcagataataatagagggggtgtattgggggcgcccacttggcttggaaggtctgggcgccgatagcattaccgatgcagtacgcaataaatatgacg

SEQ ID NO: 79108 - DNA, 533 bp, Arabidopsis thaliana landsberg
gactgtcggcggcgcccgccggggttggcagggtgatgtcgacggcctgaccgggcttgaaggtgatgccgtcgggcttttcgaaatggaaggccatggggcggtcggcgacttcgtggctggctttgagtgcgacggtgtaagtgctcatgcggcagctccgatggaaggttgtgggcggattgctcgcgggatgttccggttcggtttctgcttcccgtttctccactgtactaccatgcggcgccggcgccctggaaagtcgtgaacccaaagggggatactgctgggccgcggcgtgcgtgccggatgtccggggcgccgggccggtcaagccggtggttggagcggattggcggccacgcgaaagccgcaattgctggccgacgaggacggagtgttcgagttgcgggccgcgacccggtagcggttgcagtacgagtcatggcacatgaatgacccgccccgcatggcgcgcctgcccgtatcgatgcggtattctcggtttccgggcagggtggacgtgtgatatg

SEQ ID NO: 79109 - DNA, 349 bp, Arabidopsis thaliana landsberg
gaaatcactcggagtgaactttgaagcccatctgctgcataaacgggatgacatgatatgacttcctgcgcgaaatttggcttggtcatggcagccttttaagttggccgccagaactgactaaatctcagaaaacatttatttgggaggattatggccaaacctgtcttaggccgtggtgacggaggagatacctgctggatagacactatgatgaaggtaccaacccatttacagatctccagtcttgtgagccaacccaaatatcatgttcaccacggttcttggtatagctacgtagcggtaaacattctcatagtcctttcacacacttaaaaagagcatgctt

SEQ ID NO: 79110 - DNA, 577 bp, Arabidopsis thaliana landsberg
cgaccgggtgtcgatcgaggtgctgaacgaggacttcaagaatgtgacgctgtcctactgtttcatggaaagcccgaacctgccgcgcgcgctgggcctgtgccgcaagctgggcctgaagttcgacatcatggcgaccagcttcttcttaggaaaacgcaatgtcgtgccgtcggccaattcgggcatgcccttgtggcaggacaagctgttcatcttcctgatgaagaacgccgccaacccgaccgaattcttccatatcccgccgggacgggtggtggagctgggcacgcaggtcacagtttaagcaagatgccccaccaccacgccctgcgggcgcggtccccctccccagcaagctggggaggcataaggacgacggcgcggggagatttccccttgcgtcgcggggcttaaaaccctaaagcgcgcgtgaattcgcaaacaagggtttcgctcatgtcctctcccgtcgataagcccgtccgaaaagtcgttctcgcctattcgggcggtctggacacctcgatcattctgaagtggctgcaaaccgagtacggggcggaggttgtgacct

SEQ ID NO: 79111 - DNA, 614 bp, Arabidopsis thaliana landsberg
  unsure (1)..(614): unsure at all n locations
ttgggattcatacaacattcacccggatagtcggtcattcacaattgaagaatatatgtacattgcacataaacagttgctcaaggattgtgaatgaaaaagagaaacatcttagtgtctgaaattgtcaggccaagtttatttttgccgtgtcttgggtaattcctttagctcagtctcaatggtgtctattgttacttgatagtatacttctctttcaacacaacgtttttctttggttggcttttgtatttgctaatacgagaattaccactggaggtggacaggacatcttattttaactaattaaagttttgggtgcaattttacttgataagtgtgaggcgatgcattggttcggtacggttcaatttcaattacctcataaccggatcactatatcttcgccgtgaaaatattcagacagacgacaacacctgcataaacaccattgttcaaaatagccagagagataaaagtaaaaccctaaaccccactagttaaagttaacattnttattgtttctctccggctcctttcaatctgtgtactgtgtatgctgctgatacatatcagaagtactcgaaagatctttagctttgggcgtcatgttt

SEQ ID NO: 79112 - DNA, 457 bp, Arabidopsis thaliana landsberg
ccaggacaacccgccgcgcgtcaccagcaattgcgaaatatacggttccagcgatgcgccgaggatgccgcccagctggtaggccatgccggcgccgctgtaacgcacggccaccggaaataattctggcaggagcgcgcccatgggcgcgaaaccggcgcccatgacaaacagcgagaagcaaagaaatagcgcgatcagcatcgtcgacccactggccagcatcggcgccagcatgaaaccagcaagtatcgccgcggcggccgcgaccagcagcaccggacgccggccccagcgatcgctggctttggccgataacggcgtcgccagcgccatccagcatacggcaccgcacagcatggcgagaaactgcgtacgcgggatgtgcaaggtagcggtgccgtagctcaggcagaatacggtcgccgtatagaacaggctatagcacaccaccatg

SEQ ID NO: 79113 - DNA, 496 bp, Arabidopsis thaliana landsberg
atcttttcgacaattcatggtttgcatatcattggatttcgtctatttttttacaatgacttaccctataagggcttaaggatctttttattttgctttatataatatatatacagagagaatatttggaagacataaaagacaagaaacgaactaagacagaaaaccataagctaaaactattctttggtcgttgctttcgcatggagcctataacacagagagtgtccatccagaatcgcaatcatgaccatctgccacttccatcctattttaaattagatacatatcttgctcttccagcacacgttattttgttttctactccaagaaaatgctcggagtataaaaaatattaaactaaaaatatgtaagccttcgttcaaggtggtaaattggattcgactgaaacatgggctcactttttccgttcctaaacccgaaacaaagttcagaatcacacggttaaattcatgtccaaaataagctagataat

SEQ ID NO: 79114 - DNA, 561 bp, Arabidopsis thaliana landsberg
taagcttgtttcttttattaactcctaagttgttttaaaatactcgacgaactagactgattcagcattaagaccaaacatgtaaaataaacgttgcagaagttaatgctcattagttttctcttttgtaagaacatacaaacacacaggtgacaagttttggccaagaattacaaaataatatgataccttcatagtcatacctcagaattaatgtcctagtcgagaagcagaagtttgtttttatagatctttcttttcattagagaaatgggtatcggcccaataacataggccaacccatttgcatttattttctcatatccagtaaggatatactttcaaatttttgtataaatgggattttgatttttctttaatatgttgaacgaatttagtaaactattcacattattttatgttcagaactatactgtaaaataactaacggtcaacaataattgagagaatttggaagttttcgttagactcacatcaataatgtgactcaaagctaataattgcaatttccgacaaatttgtggcatgggcagttatgct

SEQ ID NO: 79115 - DNA, 567 bp, Arabidopsis thaliana landsberg
tcatgcattctacgcgatttgcccaaccgatattttatgatggtgattacgggaggaaaataattctcatcaatagttggtctcgattttttaaaagacgattaattgattacttaaaaaaatagccattttttttgtaacaaatgttgtttgctttgctttcaatcttcaaccacacggtcaaaacatttatgtattttacgtaaaagaagcataccaaagcttttacaatttttgccgttatgatatttaaagttagaaataagctaaaggtttaaacgatgataatccaaattacagcaaaaaaatttactcaacttgtagacaaagaataataactagataacaggttacacaaatttttgttagatctctcatggatttaatccacatttccacaattaaagaagaaccaaaagtggcgtttataatgaacataataaaataaaataaaatcattggtttcgtatgaaccatttttttttggtgtaatacgcaccttctcaacataagcattggctcacatttctttttggtggtgattgagagaagtcattgtgtgtatac

SEQ ID NO: 79116 - DNA, 506 bp, Arabidopsis thaliana landsberg
cggtagttgtcatatacaaacacttgtaactctagctccaaaggttttgatcccttcttctggacttcaaaaacaactacactcatgtactcgaatccacacagagatacataacacattttgttttttatctaaaacattgtgaaggcatttataacggggaaccgaggtctcgacacctttgacgtgggctactctacaaccgggtatttaaattcacctgtcctgaggcagcggtccatgtttgaccccacatggctacaattttcagtatatatcaagtcagcgatggaaagttttagggttataaaaatgaggtcgttggagagttatggatgggccctttagacatgagttttactgtgtgagagcaagagctctaacccagggggagagctctcttctcagcacctcactttgttctcccgttatgtgggggctcaagaaactttctctttctttggttcaccttggagctcactgctcatcccagactggttggttag

SEQ ID NO: 79117 - DNA, 581 bp, Arabidopsis thaliana landsberg
catgtttaaacattatttcgagcagatggacggggtaattatctttccgattttctcactactggttttctttgtctgggttcttggcctgggttggcacgtgttcagattcgataaaaagaaacagcagcacatggaaaatctgccattagatgaataaagcctttgcgctaagtaaaagcattcaagaaatttaaatcaatatccattcatgggaacattcattaaatcaggcgaagaacttattcaactactgatacttattatattgattcttacggctattgtattgctgtttattgtcctgaatatgtacaaggtcattcacagaatcattgcccagaaagaagggagaactattgagcctttcagttttaaaaaatggtggcaaaaagaatcgggtacgagtgtttcggtagagaaagaagaagccatcttattgcaccatagttacgatggtattcaggagttagacaaccatttacccccgtggtgggtgaagatgttctatgcaaccctggcgttttcagtcatttatatgggtatttatcatatcttggatatttaccccctacaggatg

SEQ ID NO: 79118 - DNA, 626 bp, Arabidopsis thaliana landsberg
ccggccagctccacacgtatatcgacgagctcaggcgcgaatacggcctgactataccatcggatcgcgctcgtcggatatgtcgagggaatgtggctggcgctctatcacgcgctgcgccagaaggaaccgttttgcgcggtcatcggcttcagtggcgatcttcagggcttttccgacctgcagcgggagctggagagccgcccgccggtccttctcatccatggcgaaaaggatcccgccgtttcgccggcagcctttctgcagaatttccagacgctcgcggcagccgatattccgatttcctcctgcttccggcagggtgtcggtcgtgccatcgaaggcttcgccgcggaatcggcgatgttctatctgaaaggcgtgcaggcaacgcatccgccccggctcactgagaagaagaagacgtccggcgatttcgccaaatcggtgaagctggtcatctgggacctcgatgagaccttatggcaaggcacgctggacgatgccgacgcgatcgttccccatgcgagccgcgtcgacgcgctgcggcgcctcaatcggtccggcatcgtatcggccatctgctcgaagaatgattcgacaccgcgcgcaacaagctggaagcg

SEQ ID NO: 79119 - DNA, 589 bp, Arabidopsis thaliana landsberg
aagaacaattcaaggattatcaactaaaatatttaaagagaaactctatcgagttgcacttttttattttacaaatatataaaacaaaacattatgctaaataatgaagtgtaagactttagaaatatctgtatatgtatttattaaaaatattgttaacgttattctattggtaagagaactaccaaaaatatagaacacttaaattaagaaacccaatgaatgctgaatctattttctattgtttgcatagctatatatcaatatgacagtaagtttataactaatattcttttatatttcctaatatagttgtccttttaatattttttatgaagtaaaagatactcataaattgttttaattactcgtcaacaaatagttttaagaaagtatgtggtcagcaactgagaattaaagagtaatgacgaccaacagttaataatgggttggtgactcaagaaaaagggttgaaattttaactaagtgctaaaccgagtaaattagtcaaattagtcgacatattactgttttacctaaaacctaagagtattactagcgcaaaatatatcatcaattaaaaacgttt

SEQ ID NO: 79120 - DNA, 652 bp, Arabidopsis thaliana landsberg
gcaaaaaaaatgatttatcggatctgagtaatttgaccgtcgatgatgacaatgccagtaatacaaatttgttcttaattgtttgaaaaactaaagaatttattggatctcatcttctagtacatgtgaactaaaacatattggaaaacttacaagtaaataatagtatagtaaaaataagttttgaaggtcaatagtagtcaaagtttttagttagtccaatgtgacgatgttcccaagcgaattattgcgtccacatgcctaaagtgtttattcgcgccgacttttgcagctctgctccccctcctagttaccaatttccaatttcgctcttttacttttactttttacggtgttaatacttttagagtttaaccccaaaccgttattaatttaggtgaatggacatggttttaaaaagttggttcttggcgatttcattaacccgaaaaacaaaaatacatagttttgacaaaaatgaacctcaagagaccggttagagttacaaacttaaacgtgttgttgaaaaataaattgtgacatgtaaaacagtaagtttaatgtatttccctgggtttataccaatatacttttactatttagtctttttccaaaaatctttttggtaaagagatagggaacgctctaatta

SEQ ID NO: 79121 - DNA, 552 bp, Arabidopsis thaliana landsberg
aaccgacatccgcttgaccgagcgtggtgggcggcaagatggcggactactacctgcgcgcgcgcagcctgcgcccccgggtccgctttgaactggatgggatcgaatcgattgccaagctggtttccgaggggctgggcgtggcgctgctgccagactgggccagcacgggcgcgccgcccgcgcacatcaaacgctggccgttgcccgagccttgtccggtccgaacggtgggcgcaatctggttgcggtcaggcgtgcgatcggaactgatgcggacgtttgtggaattggccgagtcgcaactcggccggggcgctacagcggcgcagcgcccccgctaggcgatggcgtcttcgccattgcgcgccacgatcacgccgctggacacaaccagccgccggggcgtgctctgcaccacggcctgggcgatacaggcagcatcgaccagcaccagatcggcgcgcgcgctcggcgccaggccgtaatccgcaaacccgcaggcgcgcgcggcagcccgggtcacgcagtcgaatgcccactcgatctcgt

SEQ ID NO: 79122 - DNA, 478 bp, Arabidopsis thaliana landsberg
aagacgaaataaaaccttgtgacttcgtgacccaatacatcttgagtttaacagccttcttttctagcagacagaaagagcttggggctgtgaaagcagattctaatatcaggttccattctattaagatgcatctttactgcattctcgcttcaatccacataaatctgtacgtgaagttttccaagatagaaaactagtttatgaatgaggcgaaagaaaagtaaacagacgcaaacctgcaccggacgttttctctataagtaacaagtatattctctgagaagaaattcttcatgtggccaaccaaacagttcctggaaagcaaagttcttctagcgtgaccgaatgttccactgtcaatacatacgacaagagtcagagttgcacatgaacatcataaaagcttttttgaccgaccacaccgattcgcagagactggccatttaatgatacttcattagagtgtgtgtacctt

SEQ ID NO: 79123 - DNA, 392 bp, Arabidopsis thaliana landsberg
tatgtgtcttgatgtttgctttcttataatgtgttatttaagtgtttcacggttatagttcgaacggccagaggccagagcggaatcttacatgttgcgattctcgatctatcatagcctgctgatctcagaaactgcttttcaagctttgagtatcaacttctcttagctttcacacattcaagaacttgcatttttttcttctgagaaagatgagttaatccctgacgagtgtcacatagatgacaggattagctcctgtatatatcggaaaactaatatcacgcgagagactgttggcctttgcatgttaacttttggctgactacaagggaaaacatagccagcccacacagtgagctatgttctttatcattactgaactttaaagt

SEQ ID NO: 79124 - DNA, 496 bp, Arabidopsis thaliana landsberg
catttgcatctactgatttagataaatcttatttagtaagatttgttaaagtcaagcatcgctccacgggacgcggtcgaaatgccttcagcgacagacatggcggccatgcaggccaatgccgacaaggccgcgcaattgctcaaggcgctgggcaacgcccagcgcctgcgcgtactgtgcatgttgggcgagcatgagatgtcggtcggacaaatcaacgagcagctgccggaattgagccagtccgcgttgtcccagcatctggcccggttgcgtgaggaccagatggtgcatacgcggcgtgagtcgcagaccatctggtactcgctgccgccggggccggcgcgcgaggtgatcgccacgctctacggcatttattgcgccccggtgcgcgggcgcaagggtacgtgagcgcgtagcggttcgcgtacggtgcgggatgcggcgcgctgccattaatttagtatgtgctagactaatgatcgtattcacg

SEQ ID NO: 79125 - DNA, 386 bp, Arabidopsis thaliana landsberg
gagcatgcccgatggaaccggaggagattattactccgggccctcttttcatgcctggatgatcccccagcgggctgccgaggcgggtgttgtcgtccagccagtctttggggaagaagccgagatcggcgtatatcgggaagaggccaactgccgtatgacccttgccaatggagaagcggtcgcgctcgttctatcgaggctcgctgaggcggatcttcatcacgtcgtagtagagcgcggcaaagacttttgctgcggagaagacagaggtgttgtgcccctcctatgcgatgtcgatgaggcgtatggctttaagcctgatgaattgcgcccggtcccgaaacgggcgactgtcgtttcgtccggggcatggctgtatggct

SEQ ID NO: 79126 - DNA, 471 bp, Arabidopsis thaliana landsberg
tggtaggggccgggcggcagttcgagcggggcgcccacggtgtggccgagagtctgttctctccgtcgggcagagcgccgatcgtattccgctggtcggtgatgcggtgagcaagccgctgaccgcagccggcgaggcggcggtcgacatcgccggcgccggccacaacctcgacaccccgccggctggctggcctacctgctcgcggtggccgttgccgcaccgccgatcctggcggtggtgatgccgtggctggcgttgcggctgcggttcttcctgcgcaagcgggccgtgctgacgctcgccgcctccccggccggtgagcaactgctggcgctgcgggccctgaccaaccgtccggtgcgcaagctgaccgcggtcagtcccgatccggtcggggcttggcggcacgccgaccacgaggtcatcggagggctggcagccctcgagctgcactccgcgggcctggcc

SEQ ID NO: 79127 - DNA, 527 bp, Arabidopsis thaliana landsberg
  unsure (1)..(527): unsure at all n locations
tggcctcgaccgcatcgcgtgccggcagcgagatcgccagcatcacctcgtttgcttcggccgaggggatcggccgctgggtgaagctgcgccacttggcatgcgtcagcagcatcacgtggatggcctcgctccacaccatgcatgcggcggtgtcgtcggtgaagtgcgggttgttcgtaaagccgatggctcgatagaagtccgtcgatgcggcgaggtccttcacgggcaggttgatgaagatcatgcgcgacacgggggtatccttcggtggtggagaaaaggggcagcaggggagctgctctcggttcgacgatccacacccgtcgttttcgacaaacgccactggcagggtgtgccttcggccgctggccgcgtcgacaccggcatgcgttgtcgtcgcatccggaacggccggcggggcgtaaggtggccgagggcagcggcgttgtctgccgctgttgacgcagtgggcggtccaggggagggcgagatatgggcaggtcgaacaccaantggtggat

SEQ ID NO: 79128 - DNA, 463 bp, Arabidopsis thaliana landsberg
gccaggaaccaggcaattgcaccagcgccaaatgccaaaaagactaccaggctgatcatgtccgggtgtctgccgcgcatggcggcgcccagcttttggtcatcgataaaaataaaaaccaaccaggataccagcccgagaattgaaagggaaagcaaaaaggcaaagaggttggcatcgcgttatttaatggctttggccgaaaagtcccacatcttgtattgcgtcgaggtgccgaaatatagggttaattcctgcagaggaaaatcaccaggataagtttcatggccagatggttttacctgtaactttttacggggcttaattgtaaggatggacttgaggcacaaaagttacagctgtaaaatatattttcatcctgtaactttccccggtacacccttgatatagcttgcataaaaacccaaaaccaatgagagcgaaccaccttcttttatgcatg

SEQ ID NO: 79129 - DNA, 564 bp, Arabidopsis thaliana landsberg
cgcagacagcgcatcttatggaccagcagaaacgtttgtctgttcgtgacctcgctcataattttgagattggtttggctgcagctgctaagctatctgaggaggtctgatattattctctttttgttgaggtcttatagatgaaatgtgtctcttgtattgttactatctttggttactatgtaatgagttgatttgcacatttatgttagtttttgtgttgattgagtctactaaataggatttaataagagggattgtaattcggtgataaccttactttttgttagcaaagaatttttgttgttataaatacagaaataggggatcaagaaggctaatctaggttgctaaagtgaaaatatgatatgattgaaagaaaaatttaaggctaatttggttgggaacgaatgcaagcaaaactcaaagaagcaacttcggtggagaaacatgttcttttaaagaaacttcgagatgcattgtagtctctaagaggacgtgtggcaggtataaacaatgatgatgtacaagaagccatttgcctggttagtcttttactctttt

SEQ ID NO: 79130 - DNA, 157 bp, Arabidopsis thaliana landsberg
gggaacacgaccgggaagagcacaagaacgaggaccagccagacccacgacacccaaagggccgcaaggcagcggggccgagggaccccagccagggacgcacaaaggcgacggaacgaaccaaggaagcgcacggagcggggcccgaagccgggaa

SEQ ID NO: 79131 - DNA, 276 bp, Arabidopsis thaliana landsberg
acccacccctctggattccccttttgctcaggcggtgacctgcccgccggaaccggggggacacgaatgggtctgaccatgaacttttatttctttcgtggcatgcgcgtcgctggcgggtatgacaataccgcatcacgacaggcgccagggaacacgcgaaccaacggctgagggatcaatcccagacgacggaacgcgggcagaggctgcgactccaactgccgtccatgtccaatctatactacagctgtccaagtgatcacactacctact

SEQ ID NO: 79132 - DNA, 463 bp, Arabidopsis thaliana landsberg
gaacagccgaagatgcacagcgataaccacgcccacgagaggttatacccgtttcgcggctgatgtacaccccggggaagcccgggttcgggcagagacccgtacgcacctttgcgtgcaaatcccgccggatccacggtaatatttggtgggcgtccctcaccgatagatggagctcctaagtcactgcgctcagcaacgcacggagtgaagaggctgagtggagcagtgctctcgcgtacgggctgtgaggctgacgaagtcacgccacacggtactcccgcagaggctctgttgggcgtacagttatcaagcaacggggctcttacgtcgcaagcaactgtatctgtggcgggctgatcggctcttgccgaaggaactaccgcagtagcacacgacggtagtgtgcgcgggtccgcggagagtgccgcttacgtcaccgggtgcatagtaggccgcagcc

SEQ ID NO: 79133 - DNA, 377 bp, Arabidopsis thaliana landsberg
aaaagaaagaccaaagccgaaaaaccaacggaaacaaacagccccacaaatagcaaaattgaattgagaaaaaaagaggccaaccggaaagaggaaggaaacataaaaacaagaaaggaaaccgaacaacaaaatataaaaccgggcaatgcaactgagcttagaagaagatccgaacgaaaaatccaacacgcggactgaaacaaaaaccagccaggcaagatgacagaaaagcaagacacaaatactgacaagggaggacaagaatatagattacaaagaaaaacaaaaagaaaatagccaagcgaggggaaaccaatcaccatacagggcaaacggcaacacacatgaagacccaagaaaagggaactagagga

SEQ ID NO: 79134 - DNA, 554 bp, Arabidopsis thaliana landsberg
tgggaacccagattctggaaaatggggacacggtaaaacagctgctggctatatgccggtacctgttatttaaaaaggaaaggaactggatgccatcgcaaggccatcgtgctgaactactgttcagactatatccagacttagagaaagcctataagatctctcaggagctctcttctattctcagccattccaagtccaggatagttgcctttaaaaaactcgcaatatggtacaataagatagaacaaacgggctttaagtcttttaataccatagcaaggacgatacagaataattatgaaacgatactaaattacttcgacaatagaagtacaaatgcctctgcagagtctttcaatgcaaagatcaaggcttttagatcacagttcagaggtgttagaaatgtgaagttcttcctttttagactttctaaaatatatgcttaatcaatccccaactttcttgcttgatcccaaaaatggttctaagaaaatctcccccaacaattccgcttgagcggcttgtgcacaacattgcgttaggaataattc

SEQ ID NO: 79135 - DNA, 518 bp, Arabidopsis thaliana landsberg
  unsure (1)..(518): unsure at all n locations
taactccgttcattggagaagaagatagcttcaatgggaatgttagttttttagattgtaatgacactgctcaggggtaattgtccatttggttcttcactccactttcgactattgtctgcttccttcgttagcttcggtgtttttttctagggttttactcgtatttttgataatcgggtaatttaatttcgcccgaatccaaatgccgggcgacccgggtataatttttcaattatcttattttcgattatcgtctaggtttaatagctccgtgagtagtaatcaaagtctagtctccgtagagaagcttaatctcaatgcggcggaggaggataagtacgctatatcgccggaagttgaagacccaatnnnnnnnnnnnnnnnnnnnnnnnnnnnnnnnnnnnnnnnnnngcctaattcgccggtcaaaacttccggtgatgatgaaaaagtggttgtaacaatttcgacggcgcctaaacgtggacggccacgtggttcgggaaagaaagttt

SEQ ID NO: 79136 - DNA, 616 bp, Arabidopsis thaliana landsberg
tgcctgcatgtctatcccatggttgcgctcgatcaacgccttaagcggtacagcggccaagtcatccgttcgctttcccgccagggcgccagcgaaacgtccgattggcgtacggacggcatcgcatatgaaaacatcacgcatgtgcatcgttcctgtgcagatcttgaagcgaatcagttggctttgacgacgggcttgcccgcttcagccggggtacccagcaggatcatcgcggcgccggtcagcatcagcacgccataggcgacctgtgacgcggccatgctgccggtaagatcaatcaatgcccccaccagcgccggcatgaacacgttaccgacaccggccagcgtcgtgaccaaggcgatgctgcccgctgctgccttaccggtcagcaggctgccgggcagtgttcagaacggaccggtcgcacccagaaccgatgcagtggcgacaatcagcagaatgaccgatacggtggtgctgggttgcaggatggccaaggtcaaccaacctagcgccgaaatactcaagcagatcgccacatgccagcggcgttccatgaccttgtccgaatgcttgcccaccaggtactgagcgattacgcccaccatga

SEQ ID NO: 79137 - DNA, 122 bp, Arabidopsis thaliana landsberg
  unsure (1)..(122): unsure at all n locations
aaggaaagacgaaaaaagagcaggcnaatgaagacgacgaaattaaagaagaatttgtcaccgaaaaaagagaagagacaaaaaaggagagaaaagggaggggaagaaagggagacgcaaaa

SEQ ID NO: 79138 - DNA, 556 bp, Arabidopsis thaliana landsberg
tttgtcttaatgttgcgtcttccaactggtaactactctgcacaaagttcttttatgtttcaagaatcaaagccgatttggttaaagagaattttgaacttccaaagaaattatttaaatgaaaggaatataatagaagtagctcttgattttcaatattcgagggttcgagagtgacagaacaaagcaccaagaaaacgacggtccgggaaagattaataaattttcctataagggtttaggatttgtttttgtatttctaaaatcttatggtatttgtttgaattattaaaagctttggcagctggtgatatgtctcttatggtctctctattgtcagataaatggactttttgcaagaaaaaaagataaaactttttttttgtttgtaattggtttgcgttttagttacctttttcttgctatttctcttaaaaagggtcatttggatcgaaagccaatgtcttacatcacatgttcttttgtgtgttatataaaaggtaaaaaaaaggtttaatatatcgtcgactttgcatgcagattccatggtttattt

SEQ ID NO: 79139 - DNA, 588 bp, Arabidopsis thaliana landsberg
  unsure (1)..(588): unsure at all n locations
tgtgtgtaaaatataagatcaaaagaaaaaataataagccagaaatgtggttaaaaatgagttttacaggaaaaatatgattaaaatggtataattttgctacatgcttatgataatgaaatatacaagtagacagaacttaagttgtacgtaaaaatatttgaccgaaaaagtaaagttgtagattttcgtcaagtctataacaaggatatagaattagagacaaaaaggaataaaatccattacagttgaatcatatgcatttccattttctaaattggaaactacattttattaaaatcttgactggtaaaaatattgactaaatttttagaatatacattttaaaaatgggaaaaatcttttataaccaaaacgtaaaataatttttgatatcaataagataggtaatattggtttaatcaatttatcatatatatatgagctggatatgaaatttaaattttaaacggacaaatctagtatatttgaacataataataaaagtaattttaagtatggtaaaatttatcaaattatatataagataattactttntaatcaataaataaatggctaatcctgat

SEQ ID NO: 79140 - DNA, 509 bp, Arabidopsis thaliana landsberg
  unsure (1)..(509): unsure at all n locations
gccgcnggttggccgaggcggtcgccgcgcatcccgagcgtcggtgggtgctacacgatgggctcgtcgtttctggagcctgcgcgtagatcacagctctacggtgttggctccagaagggttgccgtagaaggtcattgagccaccgtcggcgttggagatgtagacggggtggtgcgcgaacgcggcatttccggtgttcaccacgccttctatgttgaccagcatcttcatcagccagttcggcatctcctgcatggcgccgacgctggaatccgttgtgacgtaggagtagagcagctgaccatcgggtgcgtagaccgagatcggaatgccgccgcggagcggaccgtacccgaacagatcgacgaacctgcccacgtcaggaatcgggaagttctccggaggcgacatcacctgcgagggaatccagccacccttaccgccgctgtcgaagacccctccgacactctgcagggggccgtcgccgatctggatcttgatcgggt

SEQ ID NO: 79141 - DNA, 499 bp, Arabidopsis thaliana landsberg
tgggacaaagatcgtagcaaaattgtctctcacatttaataaccgaacctcttatatttattttaattttaagaataatttatattagttttaaatctaaattataaaaagaaaatcaattttatttgaatttaaaaaattatatcgagataataaaaaattaaacctataaaaataattgtttctatatgtttattttttttagaggaaaaaataaagatttctacttttactccatagttcctcaaaaatagagttctttatttaatactggacaaaatagggacaaaaatagagatctctatttttgcctttatatatagagtaaaaaatagagacctctattttagagatgaaaattgaaatgagttgaagtgaaatagaggtaaaaatagagtatatagataaatataaaggtgagttggagatgtcctaaagagaactgaaagatattggattcaaaaataatttatttagagattctttgcattattatgaa

SEQ ID NO: 79142 - DNA, 628 bp, Arabidopsis thaliana landsberg
  unsure (1)..(628): unsure at all n locations
gatatccattctatctaagaaataacaaaaatatcaattgggagagacctttgatacgatatagagtccaacacaacatatacgagaaaatctcctacaactactttaacattaaaaaaaattgttaaagagagtagtagcttctatagagtggcatagtaaacactttacagtatcaatatgataagaaaccgaatgggccctaaaccaagcccaataacacgattaacgaacattcttgaactgttgttgtcggccccaactactaacgtaccaaggtagttgcatttcgctattccactatcttctttatcacattgcttataatccactttatatcatcattttagttacaagttataatatcccaaaagtagaggttaatgggtgtatagaaaaaattgtaacttttaccaaaaatatattagaagactcaaaatctcgaataataacagattatggtcggttgcacatgtaatgaatacgaatggtgcaaggtgactactaaaatataggtttgtgtcattgtgtgtcaaagataatataataagataatagtaatgttttgatgttacgacnggtattttttgaataaacacaaattatcactattttttatttttacatg

SEQ ID NO: 79143 - DNA, 616 bp, Arabidopsis thaliana landsberg
cgtataaaataatgtttagcaagcagtagtatttacatacaaaaatttgctaaataatttaacactcacatccaaaaacttgtttttttctctctttaaaatttgctacgcatgcatcgcttctgatcttgcttgtggttacaacgggacaagatcgatcataccattcatgattcatcactcaccttgcacaccttttttggcacccaagcatccatctcgatcattttatataaaaccacaagacatttagataaacaattggagaatacaacaaatttaattactataacctcatataacttcactattttaattttgacaggatttactaaataaatatgtgagaaaatctagtggatctggaaatattgatcaaaatttctcatcgaaagcccgactagatagattttcaagcccacgttaggtctctaggttttatttagggcttcttcttcttcttcaaccgcaataaatagcaaaagaaaaaaagggttttggattgcaaactgaaaaagtgaacgatccatccaaaagtcagaagtttacgaagatgcatataggtcaagccttagccgcagcaagggaggtgagtctcagatgatcgtgatgatgg

SEQ ID NO: 79144 - DNA, 489 bp, Arabidopsis thaliana landsberg
ggaatcgccgaaatcggtcttgctgtaggtgtggttgtagccgacgctgatgccgttttcggtgatgtacgggttgatgtaacgcaggttgatggctttgtaataacggctggtctgcacgccgacggagaacttgtcgccagtgccgaggaagtcgttttgcgacaccgaggccgtgaacatggtgccggaatactgtgagtagcccacgccgaactgcagactgccggagttctgctccttgacggatacggtcaggtcgacctggtcgtcggtgccgggcacgcgcttgtgcttgatctcgacgtccttgaagaagccgagctggttcaggcgcgtcttggaacgctcgatgaaggctttggaataccacgatccttcaagctggcgcatctcgcggcgcagcacctcgtcctcggtgcgcgtgttgccggaaaactggatgcggcgcacgtacacgcgctggcccggctggacgtagaacgtgat

SEQ ID NO: 79145 - DNA, 499 bp, Arabidopsis thaliana landsberg
  unsure (1)..(499): unsure at all n locations
aatgtattgggccacttggctgaaatgggccttattggctatgtattattttatttctgagacagactttttgaaagataatcctttatggaaaaattgacttttagaaacacaagtttatttacttacaaaaatatccgacaacaatagtcaatgaggatgagcaattgcgcatgggttttgcacaccatcgaattttctttataaacttaacaaagaaaactcttttttctcaatcactaatcagctttacttttcattagaaatcacaaaaagtaaataaataaaaaatttacttactgcgtaacttatgaagatatattatgagcgagttagaaatacactacccacctcgccacccagtcacccactaccaaaagaagagtggctacaaacaccttctaagatgtttgcactctttgtttcttttggttttgaaggatcttatactngnttgtttcattaaacagctttatatatctgtttcatgtaaaagtaa

SEQ ID NO: 79146 - DNA, 125 bp, Arabidopsis thaliana landsberg
cgcccgagacaaactagagagcggaagccggccaggacttcaacattttaacgtttgacccaaccccagagcatgctacgcgggggcggaagatgctaaaagggtccaaaaaaaaaggaatatgg

SEQ ID NO: 79147 - DNA, 103 bp, Arabidopsis thaliana landsberg
ctaggaaactatggttttggacctatacataggcacaccccaattgatctttagggatccatgtgcaacgcttataaacaaatccacaccccgacactttagg

SEQ ID NO: 79148 - DNA, 355 bp, Arabidopsis thaliana landsberg
  unsure (1)..(355): unsure at all n locations
agcaccaaacagaacaacctcgcaagcttcntgacccacacacaaccaaagaccacgggaaacactagacccgangcgccgcaaggaaacgcacacacaggaaaacgcaagccaacagcccgccnaagaggaagaaacgggcagcaaaaacgccgaaaccaggcccgccaccaaccaacccaaaggggaacaaaaaggcccacgacccacaaccccgcccaaccggcccgaacagaagaaaagcgagaagaaggacaacaagggacaaacgaaccaccccngcaacnccgcgacaggaccgcagccgagaccgacgaacccagaaccaacacccccgcgagcagcagcaaccacc

SEQ ID NO: 79149 - DNA, 572 bp, Arabidopsis thaliana landsberg
  unsure (1)..(572): unsure at all n locations
acccgctgtggtatagcctggcagtaagatcataagtatattttacagggtcaccggcaacggtttcccttttttatgcagatagggcaagaaacaggcagaacagcaatgcgagggccagggcggcgtatattttgtatctgttccagtagtaggagcgccggagttcgcggatcatgtcttccagttgccgggcaaagagattgtcctgcccggcgagtactgataaaggattcannnnnnnnnnnnnnnnnnnnnnnnnnnnnnnnnnnnngagcgggtgcaggtattgcagcatctgccgccactggcgcgcatctccacgggcctgtaataaggcaatagtatgatccgacagtacataacccagttcatgccctaactggtcaatattcaagcggaaggggtcgatggaaggggctttttcgaacaacctggctgcggcaatcatcacttcatcggcactcgtgggttcaggtcgctgtgattgtgccggtccggccttgtagcgcctgtaatcgcaggcggctatttttgcagggtctttcagtatggcataagcttcctggata

SEQ ID NO: 79150 - DNA, 526 bp, Arabidopsis thaliana landsberg
ggtgcacttgtagtttcccctgttccgcttgaagccatctatacagacattgacccctcgaattctaaagttggcgatagaacggtggttggtcactggtcggaggtaccttgcggaagacgttaacacacaaaaatgccctgggatttagaacgcattaaatctttgttaaaatatttgttttaaaaaaatagttgagtagtatgcatatgtgtcccgggtaaagccggctattttcttaattaacttcacggaacttaagggacactagtcaatccattgccggtggctatagatattctgcagctcggccgtgtcttgccaatgcccaattcgtatgaagatcccaatgtagaagaaataaaatgaatcagagaggatcttattaatgatttttgctttttaatcaataaggcaagacaaaccagttttaaatcttcacatttttaaagcaaatggttacagtgcaaactgacaaaattatgatagaactataatctgttttatcttaaaccaggacttttta

SEQ ID NO: 79151 - DNA, 555 bp, Arabidopsis thaliana landsberg
  unsure (1)..(555): unsure at all n locations
tataattaagaataattgcatttgatgattagaacattttattggtccaaaaaggttatctaaacttgtgaaagcattctacaatttttttttttttttgtnnnnnnnnnnnnnnnnnnnnnnnnnnnnnnnnnnnnnnnnnttaactcccataatcgatgcccctcactnnnnnnnnnnnnnnnnnnnnnnnttcagtaattgatttgaaatttcttagccatgagtccatgacaataacaactttatatttgcgttttatggctaaactcatacaacaatatatttttaactttatttttacattttatccttcttaattcttatgttcagtttagctaaattatatttacatgcgaaatgataagcatgaagattttgtttaggtgacatatttgctaacatctctttaaaatgtatattaaaaaaaacataaaatattttgggcataaaacttaatgtggaattttattagctgtctcaattaataatgttatttaatatatctgtatttgggggtttataatgaataagacattaaatatgaataaaaat

SEQ ID NO: 79152 - DNA, 338 bp, Arabidopsis thaliana landsberg
acagcatttccgtgcatccagggggcgaaatgcggcagaagccctggctcgcgacctatccggatatcgtaccggccgaaattccgccgctggaatacgaatcggttgccgaactgctggaaaagtcttgtgagcgctatgccgatcgcgtcgccttctccagcatggggaaggcactgacctatcgcgatctcgaagtgcagacacgcaagggcgccgcctggctgcagagcctcggcctgcagaagggcgaccgcgtcgccgtgatgatgccgaacgtgctgcagaacccggttgcggtctacggtatcctgcgcgccgggctaaccgtggtgaac

SEQ ID NO: 79153 - DNA, 496 bp, Arabidopsis thaliana landsberg
ggcattagaaccaaagagaagagagtacagccgggaaccctccgaaccttctccggccaccagaaacaaacggggccgcagaaagcggaaagcgccgcaccacaaaaaggcgagcgcaagcgcgagcaacaaggggcaatggaaggaccaagaagaaaaagaaacaagcgacgagaaaaaggtaaccggaaggaacgcacaggccacgactgaagccccaaaaaaaacgaacgggcgaaagacgccacgcgagaacatagaaaagggaacacagacaaagagaagagaaaagcgagatgccacagaacgaaaagaagggcagcagaggcccacatgacaccaccagagagcaacagagaaggacaccgaagagagagacgggccccgccacccggccgcgggagaagaaaagccaagacaacagcagaccaacaagaaaggcagcagcaatggcgaaaggaagaactaagggacaccgaggagaccaaaaaaagaa

SEQ ID NO: 79154 - DNA, 111 bp, Arabidopsis thaliana landsberg
acggcaactataccggtttacgttttccctcattgcatcttagcttttcttcaagctctatatcttaaggaaatatgatattttttaaaccgtaacacccacatctcctcc

SEQ ID NO: 79155 - DNA, 274 bp, Arabidopsis thaliana landsberg
  unsure (1)..(274): unsure at all n locations
gaaaaggacaacangcaagaaggggnagaagaagcggggacacccggaccaagcccagattcgaattaacaaaacacacccaagaaacaagaacccaggccacgcaaaggacaccacgcggacacaacactacaacaacaaagaggcagccgagaccaaccccacccccacaaaagaagagacggccaacaatcgaaaccaaagcagtgtccggaccaaaaaaaaacgggcacacaacagagaaccccggcacaaggagctacacgaaaaaaaa

SEQ ID NO: 79156 - DNA, 116 bp, Arabidopsis thaliana landsberg
ccgtggctcttcatcaactaagatgccgctcattgtacatatttctagctcgacccgaaagttctaggtgcatgggccttcttcgcgcagctacatacggtttggaagtcttactc

SEQ ID NO: 79157 - DNA, 526 bp, Arabidopsis thaliana landsberg
atgtctttgattttttacgactttttagattatgtagtttttttgtgattggttgaatttttaaaaatttaatattgtattattgttttagaaaaaaaatcttaaactatctgcttttaactcaaatatcctatatattgaaaatgaggatataatatcttatgatatctcaattagcagaagggaccaaaaagaaacagcaatgaaggtgaaaaacattaggaccggattagtgtggaacatgcaaatacagaggatccacgttataaatcaccgtcgtcgcaggttaataacgtgttcattgttatttttccgtaatcttatttgcttactcatttcatttttcgaaagtcagtatatgtcacacactttgaatcatagattggtgattggtggggataaaaatatcgtgcgaatatcttacaggaattcacatgtaatcatgtggcttaataacctcagctttaaacataaaacacacacacacacaatagtggatctactataaatttgcggctaaaaaata

SEQ ID NO: 79158 - DNA, 540 bp, Arabidopsis thaliana landsberg
gaaaaaaaaaaaaaaaaaaaaggatctctggcgaaaacgaacgtatgacctcggcgaattaccatgtcctaagtaagacacgttagttattagctcaaatattaggaagcgatttgacaaacgacagttaggtacagtagatagaaagaatatttattacactgcttttccaaaccacgcgatttattttaatatctccaagtctaaacaaacgcttaaccacctccaccttctctctggaagcgagtttcttactttccttctccatcttctcttcggaacttaggggctgattgtgcggatgatttttggcgaaaatgtacggacaatcacggaagttattagcttaaatattcggaagcgatttgaaaaaaaaaacaattaggtacgatagatacaaaacagttcttcagtattttcatatcctcggacccgggaatcttacgctcaaccttatcccttttcatcttctcttcggaagcgagtggatcatgggcgcgaattagggtttctccacttcacgcaatttatatacctcac

SEQ ID NO: 79159 - DNA, 218 bp, Arabidopsis thaliana landsberg
  unsure (1)..(218): unsure at all n locations
ccaaaccagaggaaccagcnaagaaagcagcacgaaggccggaanaaacaagaacacaacagcgcgagagaaacgaacgaggcccaaacagacgacacacgacaccagcgacccgaacagaggcacacaacacaacagagaacacaacagggccgacagaggaggagggccngaacaaaccaagcacaggaacacaaaaaagaaaaagaaaaacaaag

SEQ ID NO: 79160 - DNA, 481 bp, Arabidopsis thaliana landsberg
ctgttatatcccggcggctcacaggccgatgcaaatgcaagaggatttagctgtttaaacttctactggtgtaatctgctcaatgggaaagcggttaacgggcgatccaatgctgcacgacccatcgcacttcttgccatgatcgtattgggcagtacactttctgcattctggctcttgtttgctggcagcatccgtaccggcaaagtactgaagtatgtgattggtgtttccggcgtattatcgatggctggcatgttctttttattgacggcaaccgatcacgatctggttatcaatatatcttctgccctgggccttctggcagtgaccggtacgcttattggactatatgccaggaaatggtttggattgtttacctggggcatggtgaacctgctgttggtagcggttaataactatgtctattataataaggagttgcttttttcgttgcctggtatttaaaaaattacttttg

SEQ ID NO: 79161 - DNA, 607 bp, Arabidopsis thaliana landsberg
gtacacaagggcagatttaaacaatatagtggtatagtgcatggaatgtcacaaccttcattcatgttttcatttgcccaggagtgtcccttccgaagtgttacagaacgaagtgccaaagaactcaatttagaacctcccaaatacttggaagcgttgttcacatttccgcttactgttgcaacacttgaattaatgtttgcccctgaatcagcagacagtcttgaactccgtcgtggaccagaatcagaaaatagtctgccagaaatctgcaaacataagagacatgcactcacggtaagaaagttggtatagaaaatttcatcccgagtacgaaatagactattacagagaaagaccaataattcaaaattatgatttgctgatgtcaagtagagatatgtgattatgtgaatcctaccttacgtaactttccttcatctacaaactttcttctaggtgcttgaagagtagagttaacagtggactttggagaactgtcagtaataagggagtttgggtttgcaacagctggctgaaaattccggaagagtggtggtggagctataccggatagctacaatttcaaaaatacaaagaagcattt

SEQ ID NO: 79162 - DNA, 246 bp, Arabidopsis thaliana landsberg
atatcaaaaaacatatctacaaggaagtcaaagacgccgttttgaattttgaaagaaagcatgggaagccacggggactagcaatccgacgaaccatacaaaaccacctgaccaaataagcactatataggatgcaaggcctaccccaaccaaagctcaaaaataacggatcgaataatcaaaaagtccaaagactaaaactaccaacctcttcgataaaaacacagataggggaaccactcatca

SEQ ID NO: 79163 - DNA, 279 bp, Arabidopsis thaliana landsberg
  unsure (1)..(279): unsure at all n locations
gaggaaggccaaggcacaagggaaccgcgcaaancncaaaccanctttccaagcttcataccccgacccagcagccggcgacgcagagaaggctagaccccaacgcccacagaccccccggaaagacaagccgagccgaccgccaacgccaccaccacgaagcagacagcacacgccccagcgaccagagagccgaagaagagcccccaccgacccccgaagaacggcacaccaccacncagggnncngnacccnnnacccgaagcancaacgcagaca

SEQ ID NO: 79164 - DNA, 256 bp, Arabidopsis thaliana landsberg
  unsure (1)..(256): unsure at all n locations
gcggggcgccagaacaggacccccgggcgagaacttcaactcacgaccgcaccaggggggggcggaccagcccggaccccaggagggaaaancagcagggaacaggcaagcgaaccggaaaaagaaccgnacaaccacacaacaacaccgaagcaaaaagaaagccggggcaagaggacaaccacacaaaggnggccacgccgnaccagcgaaaccgcggccacganaacgaacgcaacccgggagaggcgaggaa

SEQ ID NO: 79165 - DNA, 553 bp, Arabidopsis thaliana landsberg
gggaaggaggacactgaatatggacgtgatgatgactcccatgaggagcatgaggagcctcaacagttacccagtccagaggatgaatctgcaaagccccaggaaattgagaagcctcaggaatccgtcgtgccaacatcgacagaaaagatgccgtattgtgaaatcgatgaccccacgaagctgttcctggccccaatggtctgccctgccgagttcaacgcaacgacaggctgagtccccagccagcctgataccagttctatcgagggaattagcgcaagctctcagaacgtatcaacagaagacagggaaaggagtggcacatcgacacctcacgttcctagggctgaatacccagcgacggaagatgccacatcctcatcatcttcatccaccgcctccccaagcgcaacaccagccatttcaccaaccagcccttctttcatctcttcgtcgagtgccagcattagctcatactcgacagctccagccaaaagcgccaagacatgcttcaactcgtccacctcaccttcagttcggcctccacacc

SEQ ID NO: 79166 - DNA, 153 bp, Arabidopsis thaliana landsberg
  unsure (1)..(153): unsure at all n locations
ggtacatttgtgttattttatgttaatatggctgtttttgtttggaaaggcttgcactgtgtagcttacttgctagnnnnnnnnnnnnnnnnnnnnnnnnnnnnnnnnnnnnnnnnnnnnnaatatgactttgtttgagatacaatcaaactc

SEQ ID NO: 79167 - DNA, 356 bp, Arabidopsis thaliana landsberg
ggccatttttgttaacactttttttttgcgtctgatactttatgctttcaatctagagataccttttgcaagtccgccgggaatggaaaattataatatccgttgtttattttaaacgttctctaaaataggatatcaaaaagtaatgttaatcttaaatcaccggataccggcattcctggtcgacttttagtcagcgtagcgtcaaaaataaggtcatgtctttaactatcttgtctatatcattttcttttttagcacgttatctcctccccacgactcataaaaaaaaaatattcagtcaaaatgaggagtggaaaccaatgagacctgccctaatatttagcgatgatagt

SEQ ID NO: 79168 - DNA, 131 bp, Arabidopsis thaliana landsberg
cattaccgcaccgaggccgcaccgaccgggcccgcgcccaaggaaaagaagaaccgacgacccaacacaacaacaaggccggccccagccccgacagccgggaaaggacacgcgctaaaccgccaaccaac

SEQ ID NO: 79169 - DNA, 465 bp, Arabidopsis thaliana landsberg
aaacgcatcctaactatcggaatctttttttttatctttcttacattctgaatcctttttgtttttctaacaatcggaggctgtgatttaaataataaatcgataatggtaaagcatgtatatctaggcattatctagagtcaatattggactgtcctatagtcataacctctccaattttgttgtcacatgagatgaacccatttaatttgttacccgattgagctacattttatccgaatttctttttaaattttaggcaatatcttatccttcaacatttaaagttttatcgtcgttttgtttgtgtttgtataccattagccatttattttccaccatgcaattaaatatgcatgataaaaagtccttaaaaggcaccacatagtttatatagctcatataacgttctttaaagaaataaataacatatgtccaccgtccatgttgaaacacgtacttagc

SEQ ID NO: 79170 - DNA, 572 bp, Arabidopsis thaliana landsberg
tatatttttttagtgtctgtgagacacacactggaccacaaacttatgaagcagtacaaggtatttcattgtactttggacataactctttgttttttttcgacatcagtatttgattctttctgttttcagaaacatattcatgttcattgaggttaaagagctctcctgaagatgatcaaattaagacgcaacctggatctggcgaaacgtttattttgtatgtacccttgtttattgacatgatctttaatgatcattctttctatccctttctttgtggatcttagtattcttttctcttgtagcttaccagatagtcttggcgatgatttgattattgaagttcgagatttgaaggcgcaacttcttggccgtgtcgctacttatctagcaggtatggctgatgatccggtagaaatatctctctctcacttgaattatgtttttcagattactgattccattagacgcctgaaccgaagatcttatgtttttcttttctttctaaaaagatgaaaaactgcgaaggtaccaattattatgaaccagagctggactattgggagaat

SEQ ID NO: 79171 - DNA, 512 bp, Arabidopsis thaliana landsberg
  unsure (1)..(512): unsure at all n locations
acctgtgcatcacttttcgcgtaaatcttgcttaatcaacgaccgcattatcatgcaaagtaatgatttgccacttcctcccacccgtcttgcggagacagccgctaatgcgggtgcccttgcgctgaagcggtctacccaaggctagggttactcggacggctgttgtcttcgcagcgcgcagttctgcagattgccgacggtccccgctcgctcgtcggtcgtttgctgcgtcaggtttcaatcaaccgactgattttgcccatcaggctccacccacatttccaaggaagttttcgcgagcgctcctctttcaggccgctcatcgtacaggccggannnnnnnnnnnnnnnnnnnnnnnnnnnngtggaagcccgggaaaacttaaggggcgcgtctgtacgcaatcggacgcgcaatgtctcacggttgaaggtgctgccgaagctgcccacctatcaagtgaccggaaaggatagtcaacatgtcgggctatcgcggacgggatcca

SEQ ID NO: 79172 - DNA, 206 bp, Arabidopsis thaliana landsberg
agacgcttgcaacgatctcatatagtacattgccggatctatctggctcttgacttacatctatcacatcgattagagtgggacggggtaacatattcttgcgtgccctcctccctttctctaaccctcctacttctctctccttgcctccttcattccacctgtccgttctccctcctttcctctccctccttctctttctcctt

SEQ ID NO: 79173 - DNA, 417 bp, Arabidopsis thaliana landsberg
ttacatatcatcagatccaaaatcaacttgattaacttccttactgaattagatgtaatcaacgaacaacttggaattatcttaatcaattcgtgttggtagtttgcatttctctactaataattgtctacatagatactaacttaccaagtatcaaaggatcctaagaagtccaaaatgatatctcattagaagtcaattaatccatataattaagatttttagtaagaaatacatagatgaacaatgatgttaacatgtaaagttgcctcaaaaaacattctccttcaataccttatatgaaatcaaattaagaatcatttgagagcttggttacacaatttaagttttttctttactttgctttagaataaaaaccagtctcatccagctcctgataagaggttttaatatgcc

SEQ ID NO: 79174 - DNA, 337 bp, Arabidopsis thaliana landsberg
gcggttagaaactgatcctgttccaagctgattaatgtgctgaaaactctaattaagttgtgtattttaatagaaaaccatatagaagccaaaccgattcatactggattaagttataatgctgttactgttctattatcgttcttgatggtttaataaaacattttttaatgcagggtgagtagggatttgtttttgaacacggaagagttcattgatgcagacgcctccaagctcaaaacacagttcaaagagcttgctcttgtctgaccattcctgggaattgggaacaatacaaaaataatgctcgcaataattcataacccaacaccaaaca

SEQ ID NO: 79175 - DNA, 548 bp, Arabidopsis thaliana landsberg
ttaaaaaacgttttttcttatttaatgtatttttttttgctacgagtttttttaattgatttattctttgtgctgatttgtagtttgttttaaagtgtatttttctgttgttgaatgtaatgatcaatttggatttttaatatgttagaaataaatcaaattaacatatttactatgtaaaataacaataaatataccttaagattttatattggtcgaatgctatgtcagtattgattttcaatattttctaataaacaaatttcatggtcatgagaatgtgtatgtagctttgttttaagcttacatattttaaaatttctagaatttctttttaaaaacatgtctaattattaatacatttgtatttacaatatgtttatccacaatatatttcaagtattggttattatacctttcaccattcaaatatttataccatatttcatattgtttccttttcatctttcacacattatttagcatcttattttatcctactacatgaaaaaaatacaccgcaagcttacgacaactttaaacttttt

SEQ ID NO: 79176 - DNA, 101 bp, Arabidopsis thaliana landsberg
aaaacccagcatcatctcgttaaccaaactcttttacctttttatatttcttatcaagattgtaaccataaagtaccaagttaattttaataaccttcccc

SEQ ID NO: 79177 - DNA, 127 bp, Arabidopsis thaliana landsberg
ccatggatgggtcttttcagacgcgtcgccacgatctgtataccttctgagcgcttcttactatctcaagcgctgggagatttaaaagaattcaacctcttcctctccttcctatcttctccctttt

SEQ ID NO: 79178 - DNA, 576 bp, Arabidopsis thaliana landsberg
attcccttaacttttgatatcctcataacatatggatagatgcatatatgaggaacttttacaggcaatttacagatttttcttttgatatctgtagtgagtagtgaccatatcaaattatcaataaatgggatattcccataaaatacggatagatacagaaatgatacgagtcaataatatgtctaccgttttcctgaccatcacacattttcttagatttgttagtcaaacagtctaatctcacaaaattactaccaacctcgtcagaaatattttattcttatttataggaattttaggtacaaaataaatgataataaatgtaaaagggcactttataatttggttcagagttaaaaaattcatatgcaaattttgtatcgtgtgtaaaacttagcttagaaaataatatgactgatttgaccgtgccgccaaacaataagagagagtgattttctcaaaaataattgaatcaagcaaagactttaccagtaaggtccattgaaatgaattggggcatgcttactaaaccctacttataattgaaagaaataaaccgctccaattttggac

SEQ ID NO: 79179 - DNA, 279 bp, Arabidopsis thaliana landsberg
aaatcagaaaatttgttgagaaaagacaaaagggagattaggtaactagtttaatcattgaagatccagtcatggaagtggggggttcattgtttcagttctgccaaaaaatattcttattcgtgaaaattgtaaatacagacaattatttattatagagtccacacaaaaaaaaaatccacggtccgttaattacgcttttatattatatttttaatctactatttcatgaaagcgacttttaccttatacactccatatcgcatcctccaatgaggt

SEQ ID NO: 79180 - DNA, 272 bp, Arabidopsis thaliana landsberg
gtccctcatggaattacgccgctatggaaatcccctttcgtcttggtaagatcatctgctacctggggcccatccggctcatgcgtcacatccatatttgagcgatcgagagcgtgcagatggacggctgtatagttaccaggacctatcctttttcactctccacgaactggtatcatcaagcgagtcgtaatcatgtgagaagatgtctaggctctcgaacagagaatgcgcgcgataacgactgatctaaagcgatggtaggagagtca

SEQ ID NO: 79181 - DNA, 470 bp, Arabidopsis thaliana landsberg
cgaactacttgcaaatttatcttttgctttattttaaaaaactgttgtttttgtttttatttatcatatatatatatatgaggaacttgggtgaataagttatagccaagaaatttgtatttaagtgaaataatatcgtctttgtttttatgaattctgatgctaaacaaagaatatacatgtttagtatttagtttataggagtataataatcatgcgaagaacgatacatagggagtctcttgatttacgccaaaaaggacgatacgtttgttattacacctttctcgacattgtcaatatcaataatttgattaatctaatctaaatcctttttatctacaaaattaactaatccattacactttccaccagttacagtataatataatcgtcaatcccatatatatatatatataactcattcattaatatttcaccaaaaaaaatacaaaattcaattacctcat

SEQ ID NO: 79182 - DNA, 552 bp, Arabidopsis thaliana landsberg
ggaagacacgatggtctatatatatgaaaacactaagaaaatgaagaaattcaaaacaccaaatttccacactactatcatatttttcaaacctacaaatcatttttttctgtgctaaagaatctcatactgaagtttcaaacaaatgtcccacatttttggaagggttggatagtcttgctatgtacatgtaaaacattcacaacaaccagtaatgattgaaaccgcacagcaataacattaaaccgtaaaaacctttactaagttttttcacatatattcatgtgcaagtaacactaaagcacaacttattttaccaccaatctatctgtagaatactctaaaacacaacttaattttccaccaattaaccaatctgtagaatgcttcgaaatttggacttcccatatacactagtacactactaatctttttgcacccacactttccatatcataacaaacaagtactctttcaaatatctaaaatactactaatgttttgctatgttcggccaaccaattcactcacgactatgactactaaatcttt

SEQ ID NO: 79183 - DNA, 508 bp, Arabidopsis thaliana landsberg
gaatcgatgtaatcaaatcggcgacggcaactgaaatcggcgatgctgccggcgccccgtctgcatgaaaaaacattgctgcggctatagacatagctcgggctgctaccgctcctttgcgtgagagcctatcgcagatgctgtcgacctcatgcatcctacggtcctcccaacatctcgcccggcaagagagcggcctagccttttgaacttagggcacacggcttaacgacgtcaggtcagcgcaatgcgttacgcaccggaggtcgttttattgccagcggaggcgtctggaacgctgacatgtacttcgtgaccttcccgaattgcgagactggcagccgcgaccgccgcctcaaacgcagcctctttggtttcatattcgttttcggcgtttccgtcgtgcagaacgctccacgtgtctgcacgtgcgatcactgcatattgggctagacccatgtcgcgtttccctttttttgatccgtccagatgtccaatcttcctcgga

SEQ ID NO: 79184 - DNA, 496 bp, Arabidopsis thaliana landsberg
ccatcataggtttcgccgtcgctggcggcggtctgcttgtttaacaagtcgtcgggcgcggattcagacatcggggcggttataggacgcgcgggaatcggcgcgcaagcgcggcccggcggttatcgtcagttcgtccgggccaacgaaaagggctattcgccgaagcgcgtcggcgcggggctgaccacgacgacgccgttcgccgtcacctcgcgcacttccagcgcacgctcgatcacaccgttgcggcggaagcggaacgggccgtccagcccgatgaaaccaccgttatcgaccagacgggtcaccgggaacggggttcccacccgccagtcgcgcgcgatgcgcaaggtcagcagcacggcatcatagccgagcgtggcgatacgataaggctgggcgccgaagcgtgtcttgtaactggtcgagaaccggcggaaccgcgcgtcggaaaccgccgagaaccacgagccgcgcatggccggcgtggtcg

SEQ ID NO: 79185 - DNA, 445 bp, Arabidopsis thaliana landsberg
ggctgactaatagcttggcaggatttgagggccatatgaggggggggcgcatggggcttgttaataactctgccgatttaacgatctactaagacatacatgtggtcatgtcgatcggttctttgagccgacttgatgtggcggtgttgtattgtgtgtattatatgaacacaggacaaaagatgggatgacgtagtgtatctagcgccatttagaccgatagacgggagtgcattatcatctgtgacgaagtaatgcatgatttgactaatactgggggggatccgaggattgtcaaaacaaaggggactgatgaaagactacggaggactggaagggaccatacagtaggtgttctcggacccccactgatggagagaggctaatatctggggataaagtgaaggacatattcgcgaattccaagccattagtagatctatac

SEQ ID NO: 79186 - DNA, 556 bp, Arabidopsis thaliana landsberg
aaaccaacaaccatgatccaacatctcttttgggtttcgactaaaaggtaagagtaacatgaaaaaacctcatctcgcttgaaagtagtctaacaaaacttcctagtgagataaaacaagttccatcccataaaattaagaagaccaagatttgtcctaaaaaccaaatgtacaatgaaaactgaagcccaaaagtgtataaacgtatccaacttcttcctctcagtcctcaattgtctgaatctctcccatcatgatccggttactaaccacattaaatcccagaaccgatgcgctcaagctaaccttcttccctttcttcgcctttttctttcctccaactttcgagaacccgtcatttgcagctgtagtgttatagtaatagtcttcacctgtgttgtttcgggtcccgactcccgagccctttgattgaaatgcaatctcaactacttctgatggtaacaggtctttgtagttgagaaatttgtcgatgaacttgtggtcagggtcacgagaccccagattttctatcagaagagtttcagcctttgatcgg

SEQ ID NO: 79187 - DNA, 554 bp, Arabidopsis thaliana landsberg
ctctcttttagactaaactatgagaagatgagaccattagtgtaactatgttctgataaatgttttgttgtgtttttttagggatcttagcggatattctttggaaggaacgttagctcctgagcttagccaattgagtgacttaagatctctgtaaggatcttttctttgatgactcaactccggtttttccatgtttggttgttttttcttggagtaaaccactttcttgtcgttacagaatactctctcggaaccatttctccggtggaattccaaaggagtatgggagtttcgaaaacttggaagtcctggatttgagagagaatgatttgagcggacaaattccacctgagctaagcaatggcttatcgctaaaacacttgtgagttaacatttctaatgttcaattcttaagaaaatgtattgaatagaagtgtaccttaaatgtttgtttgctacgaccttgttgaactgatgtaagttgctttctggtaacaaattttcggatgatatgagaataaagatcgtgagacttcaatcttcgtatgaag

SEQ ID NO: 79188 - DNA, 555 bp, Arabidopsis thaliana landsberg
ttgcccatcgcgctcttgaccttgtcggcggcgtccttggccttggcaccggcctgctcggtcttggatgcggcatccttgaccgcggcgaccacgccgctggaagccggcgctgctgtgctgctggaagcgggctcggacgacgcaggtgcggtcgacgcagcggcgggctcgccggtggcggcttcagcggccgaaccggcagcggcggcggcgttgccggcggcttcagcggccgagccggcggcctgggccgcgctgctggcagccgaggaaacggcggccgcggcgttctgggcctggtcggcagcagactgaccttcgctaccggtgttgctgcaggcggacagtgcaagaaccatcgcggaggcaacagcgaccgcaagaacggtacggttgaacttcatgggagatctcctgaaataggccgtggatagccacgaacgtggctgccccctattagacagcgtcacgctccgcaacgccagcggtcgtccgcgtgtcgcgcagacggtgttcatgcgccattgtccgcgctagtcgacgattcgggcc

SEQ ID NO: 79189 - DNA, 385 bp, Arabidopsis thaliana landsberg
tgttgaattctgctgaagctaaggatccttaattgctatttggaaacctaaaattccaacctgttacgaatgtgattgcttgaagaccaagcgcgctccctgtgtactattgcgcccgataccttatagcgtgtcccacatcgcacagatacttaacgcgaaagcggaacgagtcacacctaactccatggagcttctggggtggtacaactgactcatccgaatggagcggaagatgggacgcgagaggataagacactacaagctctaagggggcatgagactgtgcggagacctcacaatgcattggaggacaagacctatatatacatggcgatggagaacagcatcaagagtgatcatgctcgcactatcaccatttgtg

SEQ ID NO: 79190 - DNA, 361 bp, Arabidopsis thaliana landsberg
ttttacaatttggttagcaggtactggtttgcatgacatggatgaatttgtccagacccaactgatactagccgtaagattcttatatctatgtctatacctgatcgatatgtcatgtttgaacaaaatttatcactgattcgaagcatattctcatgagcactgacaataacaaacaatccgttttttatgcagggattaacgatcgccactcatattcttaaagaaggaggaaaaatgactgcatagatattccgtgggaaagatacaagtctattgtactgatatgtcagaatacatgtcgagctgatgaaaactactgacgagatagatacaagcttgtacacaatgatgattactg

SEQ ID NO: 79191 - DNA, 485 bp, Arabidopsis thaliana landsberg
ggcccctgacacatagcaggtcgtgctcattgttctgtgttttttgctgggggtatgcagatactgatagtgggggcaccagtcaccagtagtcggtagagtgcatcttacctttcactcagccactctgaggatgttcagctgatgttgatgatgatgatgatggctgctttgctgcttcctattttgactcgcatcacttgagagagcaaggggcccctttcaccatcactcgcgtgatcgctctgtccgactgatgaagacgccgggcgcctcttgctccttttacgcctcttgcgcctcttgcctgcctgccggtctgcctctattgactacattcaacttcatagatactttgtgtgtgtgtgctgcatccaagcattcactagcattcagtgcgcctctggttatgttatccgattgtagtgcacacaaacacacaaaactccgacgcactttgtgccagcaccgacacaaagcgtact

SEQ ID NO: 79192 - DNA, 544 bp, Arabidopsis thaliana landsberg
acgcacgcctgggggcgcattgcccatttgtgcgacccgttcggccacggactgtgcatcctgcagttcacggaccagggttacgatgcgatttccactgtagaaaacaacccgccatgaccgccgccgagctggcctacccgcccgtaaccgaacaggatttcgacgcgctggccgagctgcgcgacgccgccatgcggcccagcctggaacgcctgggccgctacgacccgcaacgctcgcgcgagcggctgcgggccggcttcagccccgcccgcacccatggcatttgcctggctggccggcgcatcggcttttacgcgctgcgcccgctggacggggcgctgcggctggaccacctgtacctgctgccggccgaaagcggccgcggcgtgggcagccgcgtcatgcggcatatcatcgggcaggcctgggcggccgggctggcattgcgggtgggcgcgctgcgcggcagcgactcgaaccgcttttatgtgcgccacggtttcgtgcaaaccggcgaaaccgaatgggacatcgaata

SEQ ID NO: 79193 - DNA, 357 bp, Arabidopsis thaliana landsberg
  unsure (1)..(357): unsure at all n locations
nnnnnnnnnnnnnnnnnnnnnnnnnnnnnnnnnnnnnnnnnnnnnnnnnnnnnnnnnnnnnnnnnnnnnnnnnnnnnnnnnnnnnnnnnnnnnnnnnnnnnnnnnnnnnnnnnnnnnntcttagaaaacaagttttttaatttagttttacaaatgcttccaaactgagaattgctttcttactctaatgaattctttctccttcatactattacaattgctcttaccatcaatcattagatcacatatttcattatccatttctttctctccctaagtcttcgatttcttccttttttcctacccccagcatctactcctggccccccttcttttttttctctacctccttttcct

SEQ ID NO: 79194 - DNA, 182 bp, Arabidopsis thaliana landsberg
tacacgcggcaagaaatccgactataagcgatattaactatcatacacttgacaacaaattaatattaatggagaatgatacatcagtcctagatagtgagtaaccttatggaggtacgtagggcatcaggaatgctattgcggacgaatacgatagaagagtgaatgctaggtgactgagt

SEQ ID NO: 79195 - DNA, 553 bp, Arabidopsis thaliana landsberg
gatgatactggaatacgaagcgcaagatcggggagtcaattgaattattgttcgcaaggcccttcgttctctggccgaagggggcctggttgcgaaaaatggggatacgcatacaagtctctatgtcgtggcgtaaccctacgcgcccgtacgacgtggggacttggcccggcacttctgagcgaacttggtagcggcggcctgggagcgccgccactggcctgcttgccataaggctgccaggagcttgcggattaagcagaacactccataggggtgacacttgactggctgggcagtaggctgcttgtgtagccaggtaacttgagtaaggcgcgatcaatgccctatgagtacacaccgccgaagtacgcccaggtgatcgaggagctccggcgacggattgagtcgggcgagtatccgcccggatcgctcatgcccagcgagtaccacctcagcgaggactttcaggtcacgcgggcgaccgtggtgcgggctctcagggtgctgcgcgccgaccgctggatagagacccagcagggcaagggcagct

SEQ ID NO: 79196 - DNA, 597 bp, Arabidopsis thaliana landsberg
ttgcacaactatgggttctgtttgtacattactgacatacggttgctatatgaggaggaaaatgagaaggaaacgggaaagaaattattgcttgtggagaacaagatagatcacacacgttataagaaacagaaagacttttcagttccatcatattcaaaagaactcgtactacttatccaaactatccacttaaactgtcacaattccgtattctcttgacatgctttaacaaatcaaagctatgttcttacttcttcagaattttgttagacattcccatttgaaacaattccataaaagttcctaagcaacaaaatcagaaaatcagaaaaccagagtaaagtaacacaaaccatgatttccaatttcccaactttggcagtggtaacactaagagctggtggcaaacccatactggcatgtatagcctcaccattgatgtctgcacacagaaaaatctgaatcagaagaaacagaaaacacaaactttttttcctcccaatgagggaagataaagacgaacctaaattagaaagctgagcggtacggcctttgagcttaaattgatctctggtaaacgatttgagccaatac

SEQ ID NO: 79197 - DNA, 545 bp, Arabidopsis thaliana landsberg
ggattagtcaaaatctaacatcacaatcatatctttcaattatctaagggaattcgtgctgagccaagaagaagcttacgaggtcaagatagggaagcaagagtttagaagacctggagatcctccatttgaagatgtctttgacaaatttcaagctgagcaaaggaaagatcacgaagatggtgatggtaacaagaatgatcttactaaggatgaattataggtcacagaaaagcttctataatgggtagtactgaaagttcaactcttttactgaatcttacctaaacatgtttggtttttagtttccgttgaatgccgtagaatacaataaagaggaaagctttgtttcttttccaatgagtatatgcactcatttaagcttattgctaaacgtggagagctcaataacctgaatcctgggaatgcctgctgcttcagctctctctttctcagtgttgcatccccaggttcctgttttgagataagtttttgtcagaataaccaataaggggaaccagaagtgatgatatgggagagggaag

SEQ ID NO: 79198 - DNA, 538 bp, Arabidopsis thaliana landsberg
ttttctttgatgttaacctgcggtttaaccgcgtttcatttcccacttacacatctatcggcagttttttcgccaggagtcgagcagtctcaggtaaagacgttttattagatttatacttccgatgcccacgcataactgttgtcactgcatagatcgtcctctgggacttgcgggatccccgacagccgtcgcttatcctgagtcccggcgccggcgacccctgcggaatggtgaccgcgctgtcaaatctcgcgaccccggacggcgctgtggatggtacggatccttcctgcgttccctactgtatattctatggctgtctgtctgacgacgtcccactcactgcaggatccagcgaacgacttgctgcgggatatgaagacggctcggtgcacatgttcgacccccgccggccctcggggtaacgttccaccactactctcgctcatctatcccacagctcctgacagctgtattgcactggttgaatgtcaggtcggtggccacgcagaagctgcacagcgagcccatcttt

SEQ ID NO: 79199 - DNA, 556 bp, Arabidopsis thaliana landsberg
ctgactcctaatccgaatttctcaacaccgataactgttgacccgaactttcctatcagtcaaactgatggacaacaacaggaatctcaaaatccattgacaaagccattgagtctgacaaacattgctggtatgacagtgccaatggtggatacatcacaaatgatccaacaacaggtgctccaccagcaaatggtgcaaatgcaacagagggctttcctcgcatcatcactgcaacagaatctcgagatccagaagcagctcatccaacaaaaccaacaactccagcaattgttagttcactcatctattggagggcctaactcaccgctcagcaatggccagacaggcccaggcgctggagatgctccggtcagcagtacatcgccgccactgtcatacccactctctccgatatcgccattacttcagataccatcacttcctttactgcagtcacccgtcggcggcgacaacaatcaactattgttaagtaccgaaaacataacattattagacacaacattacccccaaacagagatactactgttatgt

SEQ ID NO: 79200 - DNA, 571 bp, Arabidopsis thaliana landsberg
acatcaaaaccttgatagattgtaggaatcacagtaaatgaagcaaaacccatattgtaaatggagctaagaagatacgtttagagagagaaagtaaagtgtttatacttaaaaggtgagattttttaccaaaaccaatttcaagaatcaatcgaaaccaaacccaacaacaaatgttctaacgcagaatcagaagaaaacaaaaaagagagaagaagctttggtggagtgattcgtgtcatctgctgaatctatctctgtctctctcttcctaaaataatatacttaatttaattgtttattaagttagattctgcgaccaaatacgagaattagaggaatgattttaagaaaataatttaagtaatgtatggactatggagtatttatttataacgaaaaaaaaaaaatatgttgattaccatgttttgcgtttccttaattattttagtttacgacaactttcaataaggaacagaacataagtgtgtctggtttgctcttgaagcaactccaaatccaaagcaccaaaaagttttctactttctcggttgttcaactagaacatgac

SEQ ID NO: 79201 - DNA, 547 bp, Arabidopsis thaliana landsberg
  unsure (1)..(547): unsure at all n locations
taatatttttcagttcaacttttttactaaatgaaagttgtcttgtctttcgtttttcgagatcaatgttaacgagatttcatcatcgaccaaacaaataaggaaaactgaatcatctacgttacacataaaatgcaatttctacaatttagccaaagtagggacccttagaaaaattgttagtttgttaatttatattaagagtaggggcctttatgaaaattttataagtagaaaaatttaattttctatttcaagaagctggcgagaaatcaagaaaacggtatgattaatcggaaaatttggggggatattcattattttagaaattgaaacttgtatggatggatcatggatggtcccgtaacaaaagcgggccaaagccaaaatatgtaacccacttgtgaaatattagtcaataagtttcttgtcttttactcttttatttctggtaaaatgtttataactnttaactaaactatgtatttccttactagctaggggctagggaaaccaaatttcaaaacaacctatatgcatcacatct

SEQ ID NO: 79202 - DNA, 584 bp, Arabidopsis thaliana landsberg
tgactacggcctgacggtgctgctgccgtggaccgtctctctcgcgctgatcatgatcccttcggtgctttccgacttcgactaccggtacgtgacgacagcggtgcccttcgcctgcctggccgcggccatgtcgctcggaaccgccgggtcctttggcaagtcacggtcaggcgccggcgtcgccgccggagcgggcgctgaagcgggcggcacgccgggcctcgcgcgccgcatcacgggcggccgccttggcggcggtccggtcgcccccggcgacgacaagcgtaatctcgccccggacgccccctgaggcttcggcgtccgccgcccacgccgcgagttcggcgagcgtgccgcggcggatctcctcgtgcgtcttggtgagctcacggcacacgacggcggcgcggtcatcaccgtgggagatgcttagttcgtgaagggtaacggccagccgccggggtgactcgaaatagacctgggtgcgcaggtccgtcgcgttcttcgtgaaccgacgggtgcgctcgccctccttgcgcggcgggaacccctcgaagcagaccggtcggtcggcagtccgg

SEQ ID NO: 79203 - DNA, 572 bp, Arabidopsis thaliana landsberg
ttcaatttagaatgttaggataaagctttcattgaacttgctacaacacatgtagactatatatactcaaacactactattaatattgtttttcttcctcatttcctctactctagtctacttgaaaattacatagacctatttatacttaagaagtgtttgctaatcctgatgaataattagtgtcaattcaacgattcagtttccacttactgtcttactcgatcggaaaatatcatggacaaaatgggtcacttttgtttttgtatgagatgatatatcaatattgaatgcgttttgtatatgattataaaaatcgaataacttgtccccatgttatatacgatacattagttgattgatatgcacttgacaatatttgataaatggagcaaaggtacaaaatgttagtccaagaatcaaccatatcctaaagtccccaaccccacaccagaggatctttaattaacatagaaaatagaaacaaaagtaaaaatttgactgagaagactaacagagagacactgtcttcttgaataaaacagaaatcttttttcataataactactaca

SEQ ID NO: 79204 - DNA, 190 bp, Arabidopsis thaliana landsberg
  unsure (1)..(190): unsure at all n locations
gtggaggaaagagaatgtttaacggcgtttaatgtaataaaaaagaaccgtgagttttgacggaggtttattattttggtgtgccgaggaaaaatattggtctcgagaagagacggcaaagagggcccatgttgtctacnnnnnnnnnnnnnnnnnnnnnnntggtggaagttgaatactttgtcgtttt

SEQ ID NO: 79205 - DNA, 566 bp, Arabidopsis thaliana landsberg
  unsure (1)..(566): unsure at all n locations
ccatttctaaaaagacatgtaaaataaaatagattattggaaaacaagaaattaagtgaacaatacaaaaataataatagaggaacacaaaaaatataaaacaaacgttgagaaaccgaagagattctaactaattttaataatttttctaaatcatatgcttcatcctttttattaaattgtggaggttgaagatgttgtactatatttttctaaagttacaaattcttacaatcatttgtttctttttcttttaatttaaaatattgtattgtccaatttgtcttattcgtttttagagagtgttatgttaattcattagctggttttttgtttttaagaattctgacctactttacctcttaaaaatttatgattttttatatgatatgtttttgttttgttgtttggggttttttcctcttatttattataattgagttgagaaaaaaaactattagttttggattagatggcaataggtcgtgtaaaggtttttagggaatttaaatattagtttgaattagaaaaccaaatgtntaaactgtattatccgggggaggtga

SEQ ID NO: 79206 - DNA, 248 bp, Arabidopsis thaliana landsberg
aagcatgatggttgcccacttccgtgaattatccataagtgagtctttgcaccctgatgttgttggtgaaactgggacgctcttcggatgcgtgtcggacgttttccgtcacaggtgtcgggatttttccgggctttcgcaccacatgtactctacctccgaaggatgtcacctaacttatatcgatttgaaagtcaatatttagcccgttcaattcctggcagattgtttccagtagaaggttccag

SEQ ID NO: 79207 - DNA, 384 bp, Arabidopsis thaliana landsberg
cccggcgccgctatcaccgccatcgatgtaagcgaagaggttttacatttggcacgcaggaatgcggatgcgttacagggggccgttgcttttcagcagctggatttcctgcaggaatctcaatgggatcatctgcctgtattcgataccatcgtcagtaacccgccttatatacgccggtcagaatcggaggagatgaacaagaatgtgctggaccatgaaccgcatattgccctgtttgttccggatactgatgcactgttgttttacaggaagatccatgctttcagtaaaatgcatcttgctgaaggagggaatatttttttagagatcaatgaagtgcttggccccgaaacggtagcgctgttcagctcgccgggatat

SEQ ID NO: 79208 - DNA, 558 bp, Arabidopsis thaliana landsberg
aacgccgaagaactaacacttttaaatatggaaactttcaaaacttaagaaaggatgttagggaattacatttatttgttttaattaccacatcttgtcttgcctttgctgtgcaacatttttcattttatttagttaacactatatatttttaattaataattgggaaattaaataaatgttcagtttaataaataaaaatattatttattcatataagtttttctattacatatagaaattcttagtaccgattgcgttcaattgacaaagtccaccatagactgaaaagaaaaagaagcccaagagaacccacatatttgataaaccaaattgaaccacgcaagcaaaacgtaattattcgatgaatgtgaaaacggtcaaatgaatcaaatatgttaaaattaagggccgaatatccacaaagtactatgatgatgtgacgggatggtaaacctgtcgtctgtcgaccatatataaaatctgttagtacaaatgccaacaaacaaattaaatctggcgatcatacagtattttatttttccgaataatccacat

SEQ ID NO: 79209 - DNA, 508 bp, Arabidopsis thaliana landsberg
  unsure (1)..(508): unsure at all n locations
tgggcccaagggtgaaatgcgatatgagcattgttcactttaagaagctctttgatggtttttatttaaaggacaacaaacatccttataaagggtgctagccctactatcattaaaaatgggattggccagtcccaggcatttgtcaaatacaggcttataggaatacccaatacctgggttgccccaaagcccatgtggataaaacccatagcacgcccgcgggtttctattgtaaacagatctgcatcaatagccatggtgatggaaccaatcacacctgcgaaaataccggggaaaatccgtgcagcaataagcaggtgataagaaggggataatccacaaaacagggttcctatgataaatgcaatatagaaaaagaggtagagtttttttctgtcaaaactaggaggcaaagcctgctgtaagcaagccagaaacacctgcgctgatggcgtatgccgatacgggcaaaccgaattggnnnnnnnnnnnnnnnnnnngttta

SEQ ID NO: 79210 - DNA, 570 bp, Arabidopsis thaliana landsberg
  unsure (1)..(570): unsure at all n locations
aaagctgattccgtcataattcttcgtacgacatgttatctcactactatagtttttgaagttaatcgggttaaatgttcgccatgcagttccttcaacaggtcgtcaacctccgcggcggtaaagttgcagaaccacctgtcggcacggcgctctatgctgggcagacctttgccgcgtacggtatcggcaatcactacatttaccttgcccttttcaaaagggaaagccgaaaaagcaatatgcaattcatcaaaatcatgaccgactatccgccttaccgatgcaccgaaggatgcgaacttgtcatgcaatggttccagcgggataagctcctcggtaggcatattggcctggaagtgattacggtcgaccacgaagnnnnnnnnnnnnnnnnnnnnnnnnttagctaccagtattgcttcccagcaagtgccttcgttcagttctacgtcgcctgtaatgcaaacgactttattattaccgcccctgattntaatatccatagccacaccaatagctatggatggcaaatgccccagtgaaccggaatggaattcgatacccggg

SEQ ID NO: 79211 - DNA, 433 bp, Arabidopsis thaliana landsberg
atgacctctgcttgagccaggtgtctgaagagctggggtacttctggtcgttagctatcggcctttgttccaccaggatgttggggtccaggagtcaccctataaaccataggaacactgatcctagtcagatagggatggtttttagaactcacactctaagactgattgatcagtgtcatagctcagaatttggtgctaaggctatgacactgaccatttctaagggatgacttataaaggaaaaagccacaatgatcttatgtgcaggttcaaggtgtgctgcctggttgtcagctctgactcaacctattttagcaagctaggcagagcagttagaaagggctagctaaatttattttgattgatcctaagtggagctaaaggctgttgcatttcttaagattaataagccaccggacatatattatat

SEQ ID NO: 79212 - DNA, 576 bp, Arabidopsis thaliana landsberg
  unsure (1)..(576): unsure at all n locations
atctgcgttaccgttaacgcttatggtgctcaggcaaacctggtaggtaccagcgctgtcggccgttaaggtataataaggatcttcaagcgttgagctcgacaggcctgcaatatcccagtaataagtnnnnnnnnnnnnnnnnnnnnnnnnnnnnnacacctgtgggttgaaaatatcaggcatgtttggagcccaggtaaaatcggcaacagggatcggataaaccgtaatcatgttgaaaatggtcgtatcaatataacatccgttgatggtgatatcatgcagcgttacatcgtaagtgccctcacccgaaaaagtatggctcgcattacagcctacagccgaacctccgtcactgaaatcccatgtgcaggtattggacgacaggttaccggtagtattggtaaagttgatcgttacagggtcacaacccgaaatggtgtctgccctgaacgtaatggcaggcaatggatacacggttacagtggtgctggctgtagcagccggagtaccgcagttatcggttaatgatacngtatatacggtggttacaggcggatgcacattgtgcgt

SEQ ID NO: 79213 - DNA, 535 bp, Arabidopsis thaliana landsberg
  unsure (1)..(535): unsure at all n locations
aatagatatcgactataacttatagtcttatagataaagattaaagtttagactataaggattaatgcgtcaatctcttggtacagtgaatttgaaactggtttagggtgaactgaaaaaggagagagcaaggtgcttgagccttgtggtgttaaggtgaacacaagttacacttgcccaaaacaaagggaaaacgaaaaagaaaaaagaacacaagttacgacttgacacaatataagcacatgtgtgacgtggagaacagaagggaagcataaaactaacgaagatcatatctaattattgaacattgaagagatagatctctgcaatatcctagaaattctttaataatccgaaaatgatcagaaattttatcatccaattagttttacgaggataaatgtagtcggtaatccattcatttgattttttcataataaaatatagcactatttcgactagttgaaaaaaaaaatagttagatattgtggaaagttgatctctagtctatatctatatagntataaaataaaag

SEQ ID NO: 79214 - DNA, 700 bp, Arabidopsis thaliana landsberg
tttgttcttctgccattgtcgcatgaacctgtccaagctctctcaagtttccaaaggcttatagacttaagagatccatcggtacttacaatctttccaaagagtacgtttcttttttctggaatcatcactcttattatatattgttgcgtgtgtctatctaaaggcatcgaattagtagtagatctgcaccgtttttgagttgctacgcaagaagatgattgttttcgatataccatgtcattttttaaaggatcataatatcacttgtttgtttaatcaaccactcctttgtctttaattatttagctttttttcttaaacaataacgtgctttgggattaagtgaaaacagagcaaagcgtcggaaacagaaagtgattaggtcaagtcttcgtaacttcaacttgttaaagaatatgatccttacttttttgcgtctaatcttcttctttttttttttggttagtgtaagttttaaattcaagatcgatcatgctaagtatatacacaacaattctgttataatctatattgatcttcatattttgatgatatttcttgtttctatgaagtatcattgattttataaatctctaattggaattagactttagtatttactatttacttatttaggtgaaatctcattaaataaaccacgactggtcaagtgaatggttgtttgtcttgtatgttt

SEQ ID NO: 79215 - DNA, 517 bp, Arabidopsis thaliana landsberg
  unsure (1)..(517): unsure at all n locations
gacctcataagaacgctcctgctcgcctccacggccgccgccgtggtcatggcgtctcggcttggcgctggctcagacccctgacgccggcgagacacggctggaggagatcatcgtcacctccaccaaacgagccgaacgcctgcaggatgtgccggtgtcggtgacggccgtcaccgccgatgtgctggagcgcaacaacgtccgtgaacttggcgacctggtgaagctgtcgccgggcctggtgatcaactacggnnnnnnnnnnnnnnnnnnnnnnnnnnnnatgcgcggcatcggcaccttctcgaacggcatcgccgtcgagtccgacgtcgccgtggtgatcgacgacgtgccggtcgggttccaggccgccgccttcaaggacctgatcgacgtcgagcgcgtcgaggttctgcgcggcccgcagagcaccctgttcggcaagagcgccatcgccggcgtcctgaacatcgccaccgtcgccccgaccaggacttctccggcaattcat

SEQ ID NO: 79216 - DNA, 491 bp, Arabidopsis thaliana landsberg
aatatctaaaacattattggactgggataataaacatggacagtgcgctataatagcactatttattttaatcagattaacagttatttttgggcctgaactctttatttatcttaactctccaaaaaagcaacaaagcacattttttagagtgcgagcaaccgttgtcacaaacaggcattagttcacaccgcgagaatcaatataagagttcgtctcaatgtggaattttagatatgtaattggaaattacattggagtttaagaacgaattaacacggcagttaagctgggccattaaaaaaaaatcgatgttccaggaaatcaaccttgctagctagtgaaatccgattactaaatctaagacttaaatcttttctttaggaggctttatgcagaaatcaagacacatatatattcgcataaaggtcatggttatgagattagaaccagtcggcgtggagagtttgggggcatggaaaggtactatt

SEQ ID NO: 79217 - DNA, 540 bp, Arabidopsis thaliana landsberg
  unsure (1)..(540): unsure at all n locations
ggctgaacgctactcggccaagcgcgtcgaatcggagttggccgccgccgagaaagttgccccgaagaatcttagctaccgcatgtccaacgaaaccagttcgcgcgaaattcagccgttgaacgtgtgggacgactaccgtttcacctatttccggttcccggcatatgcccccctgcccacgctgtttgtgatcggccctgacggcaaggaaagcgttaccaacgtctcggtacagggcgagaaccacaacattctggttgcgcatacagtcgcccgccaatggcgtattcgccacgggcaggaagtcgtaggcgtggtgaacgatgggtacaacccttcggtcggcgctaatcccagcggcacggcatccccggccgtaagcgcgtgatcaaggtcaacgcgggagacagccaatgagccgagaagtcaatgtagatgatgccgacaacttcgacgatggccggtgtggtttcgaccaggggccacgaaagaagatccncggactgcgcgccttcatcgcgcttatgtgcctgatcg

SEQ ID NO: 79218 - DNA, 527 bp, Arabidopsis thaliana landsberg
  unsure (1)..(527): unsure at all n locations
tcttttgtgttactttgtctatttccttgtttttgcagttaatgatggtcttgagagttcatttactggaatgaagaaaaagaagaagaagccagtgagtattgttttacgttttgtgcctagtattttttttatgtcattaaacttgtgtgtttgatgattctgtgactcacatttgttcttgtttgatatttaggctgaatcaagcttattgaacaacgaaagtgttgatgctggggaagatttggatggtacttttaatatcctttttttttgattgctaatataccttttctcttggcggggtctttatcctgtttgaatcttactgagnnnnnnnnnnnnnnnnnnntaatgacgagcaagagggggaagaaggaatagttctacagcaacgttacccctgggagggaagtgagagggatttcatatttgtcgagggggactatattttcccatgatttcttttggttttaatccttcataaatctcttgctcccttgttttttttgtgacgggagtttttt

SEQ ID NO: 79219 - DNA, 584 bp, Arabidopsis thaliana landsberg
ggggaatccacacctgcataaaatggatcgtatactgtattttctaacctgaaataagaagttaatatataagtaatgtaactaaaaatattttagttctaaagagagtatactactgatctaacattaattacttatagttgatataaacaaacctctcctcattgttattggccgcacttgaacgcctatttccatcttgccaaagagatgcactcgacgattctgctagacttttttcttgaaacggtaacatgatcctctgcaatagttatcttttatgtgtcacactcctacaaacttttcttagaagaagaaaatgattagtttgtgtaagaatgcatgtgtacctttcttttagacgaaaaaccttcattttcaaattgatcataacaatcgcgttggcttaaacctccaccctacaatagtagacataatatttttgttcttatcacaagtgtttaaaaattgtatattatagttttgtcttgtaacagattgactaatagtagttggttaatatttatttatacaagcaaataacatttttcattaagtggttctatagctcatccttcaacgag

SEQ ID NO: 79220 - DNA, 559 bp, Arabidopsis thaliana landsberg
ctaatcttttatcgttttagatcaatcatagacgacttctaatataacaaaaaaaaaagatactactcatgtagctgaattagtccaatgatcaagactcaaaatttcaaaacttttttcacttatggtaaacaaaatatatacacaaaaaaaatcagaacaaaatcggagttctctcttttcatttttttttttttacaagttctgtctttttcaaggtaataaaaaagttataaaaaatcgaaataattaattaaggatgatgttttaattatcggttataatcaaaattagttactactagtacaaagattaacgcaccaaaggagaagaaatctgaagaagtgaatgctttcttcaaacgcgctctctctttctctctctctctctctatctccagttcttattctctctctctttctatctctaccaaatttctgagaacctcttcgtcttcttcgttatctcttcccttcttctgtgtcactaactcacttcactgttagtggaagaagctcttaccatattcacacttgtaagcaacgattttagggatctg

SEQ ID NO: 79221 - DNA, 532 bp, Arabidopsis thaliana landsberg
  unsure (1)..(532): unsure at all n locations
gttggttgcgtatttacatgactcctcgcacgcactccatcattggaggcaaaaactattcctgataaaacgtggtgtcaatcaatttgagcccgtgcatgcacgagccatcaccacgcacctacgcgaacgtcgcagacagttcgccaaaaacttttgaggttaaagccgtatagacatttaaacgtccattcacgaatgatggaaaatatcactcgaacggccacccggaacgcccattgcccggtgcactccggacttgccatgacggcgatggcatacagcaaaagggccggcgttgccggcccttttgctgacgcaacccgcttgtcaatgctcatcagcctcgagcaattgcgcgtaatcatccggtcccagcaacttgtcgaaatcggcgacatcgtccggcttcacgacaaacaaccacccttcgccgtacgcnnnnnnnnnnnnnnnnnnnnnnnnnnnnnnnnnnnnnnnnnnnnnnnnnnnnnnnnnnnnnnnnnnnnnnnnnnnnnngtcggaagccgac

SEQ ID NO: 79222 - DNA, 586 bp, Arabidopsis thaliana landsberg
  unsure (1)..(586): unsure at all n locations
tttagcttatgttcaaactgaagaatntattattaattccccattaaattatagttcaattacaggcatcaacaagtttaagtgtcccaaaaaaaaaaaaaggttttaagggtccaaattaaataatttttttgtaagccaattttgatcctaaatgtagctttctcttgtgacgaatgatgcaaaacgagacagtttcaactttcacggaccaactattttcatggcgcctcgatatttcaggtaacttgtgtaataacgatagtgaatcacaactagtttcaaggaccaacaacgcaagtgaacttatcccgacactcacttcagtattagatcacaccactaaggcactatacaaacattagcccaaagaccaaattttccatatataagaggtctcttcatatcatctatttgtgtttctctttgaaaatcgatacaataatttgttgtaatttttgaataatgtctttttaaaaacaaaaaacttatatatttaaataacaaaacataaaagtatacatgcataaatttagattgctaagtcaatacgtgagtggatacgtattactctccttagatgcat

SEQ ID NO: 79223 - DNA, 559 bp, Arabidopsis thaliana landsberg
  unsure (1)..(559): unsure at all n locations
aaaattgttgcatttgccatgtttgtgattgtgtatgtatgcatatagtattatcatgttgtaattgaaagtcaaaacgcaaacatatatagactagaataaatgtaacgtgttcattggcatttgcttttacaacccgcaaaaacactaaaaatatgaattatgcgtctttttttctctaatcccaaacaaaaatgtaatcaaattcctaaccagaaaaatgtaaacaaaaattggaatgaaggatcagattacgagtgggtaccatcagaccttatatcaaagtattaggcacataattctcacttccgcactctagaatcttgatcatttcctgttttaattgtggtgtgggacatatgcataagtctatttgttcatgatagtttaatttgtatcaatttgctaaagccacattatataatgtcttaatatcttcttgttggtcagatcttggagccatcatatactaacaagtaacaatntaaacattatagtgacagatataaatgtgctttagtttggacgaacacaagatgaattggaatagagaggtgag

SEQ ID NO: 79224 - DNA, 610 bp, Arabidopsis thaliana landsberg
tctcacattacacaaatcaaaccctaaaaactccaaatcgggcgagagagttacacattatataataaattgagaaagcaaaaatcggtctatggaagaggctccaacgtaataatcatgcattggagcactttttggtcattggtgggactctttgaaactgaaacccaacacaaaaaataaaataaacactaaagaaaaatatgtttcgtcgtcgtcctacgattacgccgtggcctcttaccaattgaacggcgacaataaagagacacacgtctttaaaagtcggtcccaaaattgtcattgaggctggttcgattgggttgatccggttttgtgtcaaattgactaaaccacaatacggttcactctttgatacgattggaatctttttctctatgtgagtgtgtgactcatatgttgcaatcaggtctttcttttgagtccgattcagaaaaagaacatgttaaagttagatattccactgtttgtttatctgcgtcatcatttaccctacacatgaaacattgagtcctcaaaaacacatgaagcatttttcgtaatttatggaaaaataaataccgaaatggatataatgaaatgaaagcat

SEQ ID NO: 79225 - DNA, 257 bp, Arabidopsis thaliana landsberg
aattttagaaaatgaaaacacggcaataggacaaatatctgttctcatatcatcatcacctaaactagaagaacacactaatctacagagcttcacaatgcaataaacagagataaacaagactaagtcaatcatataaactaaagcaaccaacaaaaaagctaaagagcgtaatacaagtaccttgacctaattagcttgagatcgatatacaaaacaataggagcttttaaggacaagactttatgatcacaaat

SEQ ID NO: 79226 - DNA, 511 bp, Arabidopsis thaliana landsberg
  unsure (1)..(511): unsure at all n locations
ggggaaatggttctcatgtgaaccggcaccttgttacatgtttgttagtcgatacctaagcaagtcggggggaaaccggggctgatagtcgcttaagtcgcgaacattcgaaagggggatctcggttaaaatnnnnnnnnnnnnnnnnnnnnnnnnnnnnnnnnnnnnnnnnnnnnnnnnnnnnnnnnnnnnnnnnnnnnnnnnnnnnnnnnnnnnnnnnnnnnnnnnnnnnnnnnnnnnnnnnnnnnnnnnnnnnnnnnnnnnnnnnnnnnnnnnnnnnnnnnnnnnnnnnnnnnnnnnnnnnnnnnnnnnnnnnnnnnnnnnnnnnnnnnnnnnnnnnnnnnnnnnnnnnnnnnnnnnnnnnnnnnnnnnnnnnnnnnnnnnnnnnnnnnnnnnnnnnnnnnnnnnnnnnnnnnnnnnnnnnnnnnnnnnnnnnnnnnnnnnnnnnnnnnnnnnnnnnnnnnnnnnnnnnnnnnnnnnnnnnnnnnnnnnnnnnnnnnnnnnnnnnnnn

SEQ ID NO: 79227 - DNA, 490 bp, Arabidopsis thaliana landsberg
aaagacaagctctctaggagtaacaacgcgagaaacaaaatttttcttcatttccaacaaggacaagctctcctggcttcaggtatttagggtcaatagcaccagtagcttcagtggctgcgtcacaaaatgactgcatatactcatttggattcttcagtatcctatccaaaaaaaccaaagcaatcaactttaaggtcacaaaacatatgacaattgtagtgaatccttaaaaatccccaaattaacctcactgaatctaacaaaaccctaaaatctgccgtaaattcataaccttatactaaagaaccgattaaaaattcgaggaagacacattgagaagatgacgaacctagaggcaacttccctgaagtggtggtgaatgtcagagatattaataatgagacggtgacgcttttgatgtaccaaagccttgatttcctgcatatacatctacacaattccgtaaaaaatccattttttcaattag

SEQ ID NO: 79228 - DNA, 498 bp, Arabidopsis thaliana landsberg
tcctttttctgtaagtgttaaattttggtaaattgttatgcttgaaaattgagacaatgccatgtttggtatttaaccaacgggttctatggaataaaacgtacatattgtatgttttataatctaatgaattatcttaacacttaacttacaactaacaatgtactactactatgaataacctagaaaataattctttgcgggttaattaatattttataaaatgttggggtaatttagagaaaacatggaaatatatactatttattgataactacaaaactatgctatatttcactttggtgcccctcgtttgtgagagtatgtttggtccgtcgatgcacatggaagcagcagagatagtccattctgcggcgcgttctgaagctgagaaaatgggcaatgaggatgaggcggtcgatgagatacaacgtatgagtggttactgctgaaatgtgataatagtacgtaggtttccggcgtctgagtcggaatctg

SEQ ID NO: 79229 - DNA, 557 bp, Arabidopsis thaliana landsberg
acatgaaccgggagcatgaatacatgagccacctctccattgaacaccacaaaagtcacgtagactacttcaatttgcccaaaggcaatccgtttagtcagcagactcgtggacacggggaaagccactatgaatgaagctagagccacagcaactggagccaccaagccattccctagtgaagctggtccaaccaccaagacactcactagcgcaatggctattgtctgaaaagtggcgtaagagacatcaagacagcacttgagaacttcgccgtatgttggttcagcatcggagagccagatcaagattgtggtcaggtaagaaaaggctggaaacgttgtgaagtgtcttagtggtttgggaccgtacaaagtggttaagctcacgatgagacaagccatggcggttcgcagagccaggccaagtcgctcgagccatgttgtgtcgcgcattcttttaacggattgttgttttagtggattcgtatgtaggaatacttgttagataaagatgatgagatgaacgttatggtgagcaagatgactacctatata

SEQ ID NO: 79230 - DNA, 561 bp, Arabidopsis thaliana landsberg
attgacattaatcgacaagaaatatgaggtttggagtacaactatagttattagcattaacaacaaagctcaatttagctctctttgttagacatctcacatgcattttgaatggtgatcttgaagaagatacttttttttttatcaacatgtgcatgctattttttcacagcacaacatggggaaatggccggcaatgagtattcttcttttctaaagaactcattttgtaacctataaaagtttttggtttcgacttctgaatgaaaacatattggataactgtaaaaaatttccagtatggttttaatagtaacgaaaatatataaatatatatgttgatattttcattattgttagaactactcggcaccttgtagaacataactgtaaactagcgtcaagatattgatttacgtcagatcaaggctattcatacttatctactctttaggtctggggattcacttgtcaactatttttaacaaacgacaacaaaaaaatatgtgacgattcaagtgctccagtctcgtccaacaggatattgacatgatatactac

SEQ ID NO: 79231 - DNA, 537 bp, Arabidopsis thaliana landsberg
atgtgtatgtatagtagatatctttctacctataggttttttgttcgggcacgatgtatctaggccgcacgtggtgccaacccaagtcccattagatcgggaccccaaaaatatgagccacaaaggaatgaagggcaaaaagggcaatttgttacatgcttgtacgcgtttgcatctcggcgctcctggagcaatctcgtataatccgaatcgtgctggtgcagccgactgactgcaggcagcagcgttttattgtctttggggaaatgatccaaaaatgcgcaattgtgaacctccataagcctattacggatacatgcagagcatttttgcaccgttcgcttctttcgtcacacatgcagataaaggaagtgggaaatggtataccgagtggctgctacgtggggagctggcgtgaggaaaaaaaaaagcggtcttcccgaagcatacatattgacccgtgagcttgtggaggacagagaagaaaaaaaaaaaacttcctttgccgattggtagccgccattccactattaaaaa

SEQ ID NO: 79232 - DNA, 609 bp, Arabidopsis thaliana landsberg
agaaagaaagagttttataagaaaatttaaaactgaaataaatttgtctttttcaataaaggtgaagcaaaattaaaaaacgagaaaaaaaggtgagatacaataaatgaagaatgctaatattgggcagatcaataactcaactactcctctgactaacttttatagtcactcctcttcccctttttgattccctttccatttttctcagatttatgtttctaatttctcgaattcttataattttatactttgtgattcgtagtctttgtactttcctacttgttcgtatctctttcaccggatgttcttacgcggttccttcaatttcttttcattattttatgttcttgggactgaaacaacaatttgtttgggtaaaagctagtcgtataattagtggaatattgtaaagtgttggctattcatttttttttttttttttgcaaagagatactaggaatgtaaacggtggttgtaatgacattactaacactcgtctatctcctattaaactgcaaattaatttggtgaacaatgtgttagaaaaacattggtattctggtctattcactatattatattctttggtataaccatatataaaaa

SEQ ID NO: 79233 - DNA, 555 bp, Arabidopsis thaliana landsberg
  unsure (1)..(555): unsure at all n locations
gcaccatttttctactccgctaatcccaccccatcaggagcccgctaattatcactaaagctaagagtttctcagcacaaccacaacgcgcnnnnnnnnnnnnnnnnnnnnnnnnnnnnnnnnnnnnnnnnnntttgtctaccttggtcatgaagtaaaagtcaccctggctactgactgcctttctttcggcctcccatccttttaatgaagacaaaatggaaatcatgtaaggccgagcccccaaaggtggtctttttactccttttgccggcgtttcgaaaccactcctctaccctaaacattcttactttccttccttttccacccccaccgccacctgttattaactagtagaagtaacgggccccacggtcgacatctcctgacatgtacccttggcttcgttacagctatatgcgcagatatacttcttgtcattgctgtcaccctgacaggttcccgtcctcagactcaggtagtgccatgcagaactcgtcggngctggcgtgatcttcgtcggcggcggtgttgtggtccgaggtggcggtggtg

SEQ ID NO: 79234 - DNA, 474 bp, Arabidopsis thaliana landsberg
  unsure (1)..(474): unsure at all n locations
ttgaccgccgaagaccatccgctcgcgcgtggcgcgggcgcgcgacgatctgatttttgcgctttggcaggaggagcgccgcgaagagcgccctgggtcgagaacagcctcgcgaggtacaaagcaagaatgagactcgacctatgagttagcgagaagtagtcttactatcgccctttggccggctagaatcggaacatgtcagcggcgagcgcatcggagtgggcggagcatgcccgtgcggcgcttgaccaggctgggcatcgcgagggcggggcacgcaatgcgatcatcgacctgctggctgagcagtcctgcgctctcagtgccttcgagatcgaagatcggctgcgggcgagcaagcgtagcgtnnnnnnnnnnnnnnnnnnnnnnatgcttgatctgttgcacgatcgcgggcttgtggcgcgcttggagttgggtgacgctatgacccgctgtgagctgatcgat

SEQ ID NO: 79235 - DNA, 549 bp, Arabidopsis thaliana landsberg
cacctgaatttcattcatcaacattattatatttgcactaataatatattagttgttttcaaccaaaagttaagaaaacaatgtatatggttgtgcacaaattatcattatttatgggtgatcccttttttcttctatcattatatatggttcatggaattttaataagatgtaactcaaataaataaacaaacaaaataaatctgcttggtggagatattttggctcctccagtcaaaactctaaaacatacatacacgaaaagcatgattcatgtgatgaatggtaatattgtgtccactctgttgaattctgactcatgattatatatatatatatatatcttcgaattattaaacttgcaattcaaaatattatatatatcattttgaaaaaccattaaaactattttaaaaatagatatgctggttatatatattatgcagagcctggtctaaatagatagaaccagtcaaccatcatttatatttatctttggccgataattattttaaaatgcgcacttagtcaaaagagagttaaattatg

SEQ ID NO: 79236 - DNA, 397 bp, Arabidopsis thaliana landsberg
acagcctacgccgacatcaacggcactaacctaaagagatgcgatttaagacatgcaagactctattgacgcactgaaaggggggggggcgtgcgctgctaactcgggtcctgcgtcgactctccatgggtcttccacttcatccgatacaatgcaaactaaaaacgagaccccctcacttgattgaggataacgacgtgagccgtacgagaagcatctctcatgaccggaaatgaggggggagatctaaagggggaacctagcccaagcttcctgatgcgtcgcccgtagcaaaaacacctaccttgttacgaagaccaggtccattggaatacgaaatacaagcctgtatagacaacaaggcacatccatttactactgaaggtgtccctatata

SEQ ID NO: 79237 - DNA, 387 bp, Arabidopsis thaliana landsberg
  unsure (1)..(387): unsure at all n locations
agcccgccggcggaaggccggggtgatcagcaaaccggtgggggcgatagaagtcagagcatgcccggcgagaattgcgaccgccggctgatgatcttgccggcgaccatgaagacgccgtcgccggtataatggagcgtgcgcggatgcctcggcgaagcagcgacatgcgccttgaccacttcnnnnnnnnnnnnnnnnnnnnnnnnnnnnnnnccgtcgtcatgaagccggcactcgaaattggcgtggcattcgccgatgagcggcgccgcgaccttgctcgccttgcgggcggtcagcgaaaaggccgcgaacttgtcggtgtcggcgcccgagcagttgccgatgcccacggcaatgtcgaccatgtccagcgtcggcagg

SEQ ID NO: 79238 - DNA, 549 bp, Arabidopsis thaliana landsberg
  unsure (1)..(549): unsure at all n locations
gtgtctgaattatgagagagagtggttgacttgggtcatgatcttggtttttggagtgacttatctttatacaatacatatggtaatagtgttggattctatttggtgaaaaccaaggtaaaatattctctaaattagtgatgatgctgaaaaatattgcaaaaagaaagattcaatatagtttttttgtttcctcctattcatttagtcaaaagcttggttattactactatactaggtgattggccaacatcatgcatggatatgaatcataaatttaagaccgatctttttaactcttttggatttgttttgtcttaaatccactatgatgttagagtttatcgtgacactttttaaagaatacaacttgagatagtttgaccataatgattaatgttttgatgatttcatattataggtttggtttggatagttaatatccaacangagacaatataaatacatgttgatattacattgtacttataactaatttagatgaatacacttatgaaatcaacanagtagagattcttagattcttag

SEQ ID NO: 79239 - DNA, 553 bp, Arabidopsis thaliana landsberg
  unsure (1)..(553): unsure at all n locations
accccgcttcagttagccgtctttttccggggcgacctgggcgattctttctgcggcttccccgaaaagctgcagcgcattgggctgaaaggggagcagccgctcaaaggtgagcccaatgagcatttgccgcctgttgattctgacagcgactttgccgccttccagctcaaatatccccaggcagggttcctggattacctgagctatcatatgtttcccannnnnnnnnnnnnnnnnnnnnnnnnnnnnnnnnntttacggaaacgtggaaaccattcctacgcctgccttcttttacaggctgaagctgtgagaggagatactggtaaccctcagcaaaggcaaaaccattattgtaaagctgctgtatgtgcagccgcccgatgaaagcggcatgcgcaccgtggtgtttgagctgaacggctacacccgccgcgtgcaggtgcgcgaccataatgttgccagcgtggtgccggtgaacaggaatgcngcccaccccgagctggatataggcgcacccctgcagggcaagctttccaagctacttgta

SEQ ID NO: 79240 - DNA, 490 bp, Arabidopsis thaliana landsberg
  unsure (1)..(490): unsure at all n locations
gcgcagcgcaggcgctacccgtgttgttttgaggtttctcaccatgcagggagcggacagggggcggnnnnnnnnnnnnnnnnnngctgcccaccaccatctgccggacgagcgtagtgcggcggtgatcgcgattctgtcggtcgcgggcgcggccggagtgggcgnnnnnnnnnnnnnnnnnggcctgatcgctcaggatctcagcgtccatgcagcatttctgtttggtgcgctgatgagcggcgccgcgctcgacgcctcgctgctggtgattccatccagccaggcattgcggccgatgccattcgacgccggtggcgcccttgttggagcgatcgggctaacggcgctactactggcaatcgggcagggcaccaactggggctggacatcggttgcgaccgtcggcctgatcattgtggcgctgttggtgctgctggtctgggcttcgcgacagctaaggcgcgaggcaccactcgttgcgctg

SEQ ID NO: 79241 - DNA, 603 bp, Arabidopsis thaliana landsberg
  unsure (1)..(603): unsure at all n locations
agcatctctccaagtcctaacctccccaccaccaccaccgttgatttcatggcctatagtcccgtggaaccgggctacactggtgttggtgcacccattggtccgaccggtttccctatccgtggcccaagcatcgtccgtgcgccgcttgaaccaccacaaggtcgtgatggtgacgcttcacgacagcgtttggatcactctcttaggttccccatcaatcggtttcaagatcatcactcgctctgagttttaatagattctctacgcttttcttttcttttctttttttgtttttttttgggtattttctcgtcctcttgttttgtaactttgttggttctatctaaaagtagagatctagaattgtctaaacgccaagatcctacatgtgttattatcataatgacatgtttgttggtttttattggtctagtcgaatactctaattattcacaaccggattttggtttatgtctattattgatatatcatatatctaccattatgatttgtgttgtgcttgattntaagtgcggataaataccaaaatataaaaaatatcgtactggatcgctgatgccaaatgatngtaaatcaatt

SEQ ID NO: 79242 - DNA, 126 bp, Arabidopsis thaliana landsberg
aaacatagtcagtttggaagtatgttgttttgttctcatctcatgactattcatttaagtttaaaatctacaaaagaaagtcacttgcaactattatactgtaaaaatcaaccaagcacaagatgc

SEQ ID NO: 79243 - DNA, 356 bp, Arabidopsis thaliana landsberg
gagaaaatggatgaacgatgaatgagaatactcatacttgctgtgcctacttatataagcgggcttcctatccagacgctatcaaaggctatgaggccaaaggatatagctcccctgatactaaagttactgaagcagcaaaaccaaaccactatgcaccactgctaacatttttatggatcatagagccattgagcttctataaatgcaaggaggccatcagtaaacgaatgaagagtgttgatcactaaaatgcccatcgtgatgatcgcacaaagacgaccatacaagaccgtacacattatagctgagatgcaatatctgctacaggttggaaaacctataattgcatgact

SEQ ID NO: 79244 - DNA, 433 bp, Arabidopsis thaliana landsberg
ggacgcgacaacgatgacgcctttcagccgcccctttacgatgatgggcgcaccgaacgacgagcggaggccccacacgtccggggcggagctcccaagcggaccgaaggcacccgtcacggcgaaagagatccatacctaaccgcccccgtccggaccaccagcggggtcacgttctgcccgccgatcggcaaccggctacccacgggggtggccggctctccgcctgtgctgctccacgtgccgacgatcgaaatggcggcgtccggctcgtaccggaccaggacagtgatgtcaaccgccagcaactgcccgatctcggcgctgaccgcggcgaacacaacctcgggcgccgccccgcgggccaccagcgtcgcgacccgccgcaacgccgactgcttctcggcgaacccgcgcagctccatacgggcct

SEQ ID NO: 79245 - DNA, 497 bp, Arabidopsis thaliana landsberg
caacttcgtggagaaatggaatacgcccatcatgattttccattgaggccgcgattaccgcgtacccaggggacgggggcaacaggcattccaggccgcccagctcaaaggcatcaagagccgcctgctctacctgcccgatgaaaaccattgggtactatcccagcaaaatgcgctggtatggcaaagggagttttttgggtggttgagggaaacgttgaaataattgcagatggcagatggcagatggcagaattaaaattggagaaggcgcccttacttcaatctgccatctgcaatctgcaattacccaatcataccccgcaccccaaacaacaaacttcccacccgcaccatcgtgctgcccttttaatggcagtggtgtaatcaccgctcatgcccatgctgaggatgttccagtgtgagggatcgggtattgaggttgtgcaggaattgtacaattttttcaggtagcggaattcgttgcgcactttttc

SEQ ID NO: 79246 - DNA, 472 bp, Arabidopsis thaliana landsberg
  unsure (1)..(472): unsure at all n locations
tctttgccggcttcctcgtagtcgttgccatgtatagtcagttttttccgccggggggcggtttcgcatattacgtccctattaatttagttcttttctctgaattctctccttaatttccggagcccgcaagggctttcaggcaagatcagcagaacgcagaacgcgtctttctgtaaaggatggcgaagttaccaaagtatacatgcattacccatagtttggcgttaaagtttacctttgggccaatgaatcccgttatcggccaaacagcattgcataccattgacttagaggccagatccgtggccgggctggctgcttatattgatgatgctttcagcaaaaccgttgaactggtgcatgcctgcaaaggccggctnnnnnnnnnnnnnnnnnnnnnnnnnnnnnnnnnnnnnnnaaagatcgtttcacactcatctctaccgtacccctgtcctgttcatgcacg

SEQ ID NO: 79247 - DNA, 175 bp, Arabidopsis thaliana landsberg
tggacgcttgtgttaagctctgggtatcttcttttctccctgtttatgctcttttgatttctatgtgtctgctttgtttcgtcttctttgctcactatcccgtctgcattgctcaactgttcttttctgcttctgatgcagaatgcgtaagtttcctcctatgaccgtctactta

SEQ ID NO: 79248 - DNA, 127 bp, Arabidopsis thaliana landsberg
tttgcataataatcgttcaagaatcattcaagataagtattttaattatttcaatcttttaatttattgttgggatgtttatttgacttgatagctcctccccaaaaattagaccaaaatgagtggg

SEQ ID NO: 79249 - DNA, 494 bp, Arabidopsis thaliana landsberg
ggaattctgcatcaattcgataccgggttgttttgacttctcgttaaccccacatactattgaggttcgcgcattctatgcgaaatttgataattatgaaataaattttatctgcagatgtcccaccccggcacagtgaagtcgcgcggacgtttgccccgggctagatgccgatgcgcgtcgtcctgactgacggtttggggcgcacgcgattttgccacatgatctgccggcactggcgaggcccgatgacggacaggcaccgctgccggctgcgcgatattctttcgaggcggccggcaaagcatgatcgcgccagttgcattccgttattgcgatcggcggcagcggatcaaccagcgtgccggagacgatcgatgccagcagccgcggcaaaggcggcattatggcgatggtggcgaccagatggtcgcggaccgccgagatcagatgcgaatcgctttgatagaacggtgtgaaggccagcgacagag

SEQ ID NO: 79250 - DNA, 613 bp, Arabidopsis thaliana landsberg
  unsure (1)..(613): unsure at all n locations
acgatcaccattggcacggcagacctggcgactgcagaagcgctggagatcccgctcaatgccccggtttcttactgttatcggtctgccattgatgaccaggggcggttggtcttcgtcggggatggggtgtaccggggggacgtggtcaggctcgacgtcaaggtcannnnnnnnnnnnnnnnnnnnnnnnnnnnnnnnnnnnnnnnnnnnnnnnnnnnnncaaagtcatgtgcgtgatccatgaacaccggctggcagaccaggtgcgctgtgtgcgcaccaaggtctcccggcacgtgcccaatgctgcgctgctggcgatcaacccgttgatgcgcattccaaccctggagctgggtaacggctcggtgttgttcgattctgtggtgatctgtgaatacctcgataccctcgggaacggcccggggctgtatccgcagcaggccgaaaggcggtggcaagccttacgctggcaggcgttgggggatggcttatgtgacacgctgattgtgtggcgacatgagcgtgagcggcccgaaacccaacagcagtcggactttctgcacgcctgcgcactcaagctttcgtcgaccttgcagttgctggagca

SEQ ID NO: 79251 - DNA, 568 bp, Arabidopsis thaliana landsberg
ctctgctctgtcatagaactctcgtgcgtccgctcataaacaagtaaaatagcaaaattataagtagtttctcctaaaaatacaagctttcaaaggtctgtgtagattgttgcaaccaaaaatgaaggtttgcaagaagcacagcattgccaatagcgacgtaaatgatcaacagttctaaatcaatctaaagcatgaataaaagatgaatgacatatgaaaagctctcatgagactgtttcaaactttacatcactctccactctttgaccagaatgaccacttttgacttttttgacgacttgagcacttgaccagggtacattcaagttgtatcccattccaaacctgcgaatcaaatttttgggagcaaaaaagatacttttacgcattacacaaaatctataaacgggagaacatggttttctgaaaaagttctaaagctcaaaacaacacattgtcgtcaaagcttatttcgcaaaacaaaatggatttctttgtgagcttgtactaccgcgcgttcttccgcgcttgttcaccaaatcttggcggtttcacatgagtaatt

SEQ ID NO: 79252 - DNA, 574 bp, Arabidopsis thaliana landsberg
  unsure (1)..(574): unsure at all n locations
gtgctgtggcagtttaccgcggtaaccgcnnnnnnnnnnnnnnnnnnnnnnnnnnnnnnnnnnnnctcgccgccgagcatatctactggcattagggggggaaaaatttctgtcggcccagccgaccagaagtcgcttccgtcataaatgccgtttggctgcttccatacatcgcacatctggcactgcaggttgcatttgccgttgaggcgcagatccaagcgccgtgggccctggctctgcacttccacgagctccacggagggaatcaaatgccgataatttttgtggcactggaatgtgtcgatagggccgcggcaggtgcggatattcccttcgagaaattccctgcgccaggcctgcattttttcgccgttccaaatttcctggataccttgggctggaacggttcccaccggcacctcacccgaaaagcaacaggcggaaacgctgcccaatgggtttagctgcagctgcaaaaacggaatcgggcaaaattctttcgactgttcangcgagagctggggctgcatgggccggcctcctggatttcacgaagtcgggatgaattttc

SEQ ID NO: 79253 - DNA, 432 bp, Arabidopsis thaliana landsberg
gggctttgggatttctggtccgaaatgaatattttccttcttaccttcttatcttttccccactggagaaaaggataaacaaaaataaaatcccaactttggcatagagccatgtaatctaacgctattttgaaacataactgatccaatttttttgaataattaatattttaatatataacactaaattcgataaatcgatcgactgttaataagtcataatcctccaaaacattgtcacatgagacataaagcgtttataaatagtaatgacaagattctgatgaaaaaagaaaaataaacccaatcgatttctaaaaattgctgattaatgcggcaaagaacaacatcgtttatttttttttatttttttgggttttatccaaagaaaaattggtccgaattccaaaattaacgtaaacaaaaaaaaaa

SEQ ID NO: 79254 - DNA, 457 bp, Arabidopsis thaliana landsberg
  unsure (1)..(457): unsure at all n locations
ttcatttgcttcgcgtatatcactatatggatttgataattactagtatatatattgttactattgagattattacaaacaaacaaagaaaaaccatttttgccaacaaccaaaaatggacaaaaaaaataaaacaagtagtattctactgacatatatgcaatagatatttaactctctaatttcttaaacatcattcaattaacatttgatgaaatgaaatcttaaataatataaaccgaatatcaaagtcattaactaacaaaaagaaaggaaaaaaagaaggaatatcagagtcatcatcaagtcaactaccaccnnnnnnnnnnnnnnnnnnntcaaaacgtcggactactcaaactttatttagacggtttcagttaattcgaatctaatttggcctatttactaagtagtacaaaaactatttttgagctatttttggtttattttctaa

SEQ ID NO: 79255 - DNA, 481 bp, Arabidopsis thaliana landsberg
attgaccttcgagtgccaattcttagcggcggctgggcagcaggagaagctttggacattgtgagggttgtcaagtggcagaattgcgagcagaatgagagatgagatgggacacaaaggccgcattaacggtagactaaatgtgtggagcggtggatcttcggcatcctttgtcaagtctatagcctcttcgtgctaaattaggttaacaacatattggagaaaggaaaaaataaaaatatgtatgatcatatctgataaacaaaacagaaaggaaatccaaaaattagctattagttgcgagtatatgttgtatgtagaatctacctccactctctcgcgtcgatcaacgctgttggttggttgccacgatagacttcagccctatacattttagactcattccgttggcactagtactccggcagagactgtaggttatagcttataaatgtggtattgaacaaaacattgcttcgtc

SEQ ID NO: 79256 - DNA, 515 bp, Arabidopsis thaliana landsberg
tcacagaatatatatttgtttatctacttaatctgcatcttgtttgaaatattttattctaaacatatactatacatgcgacttaaacaataatgaaacattattctctagaatatctttacgaagagccaatggtggtcataatctaatatttgtcacctaaagtttcaacagagcttacgctacatattctatttcatttttttcaatattatttgtagaaaactttttaatattttttttcaacaaagttaatttattaaatgttgcaggtttggttgccatgacaaggcaaatatcaaagatattggtgttaagatgtgaagaacagaaatgagtttgtgcaagaatggattttacgagttcgggatttgtacctatgtctcgccggaattatatctaggaaactcaagatcaattgctctatacttgagcttttcttccggtttcagtggctaagaaaacaagaagtagataacaaaagttgtttattaacaacgactcaacaatacact

SEQ ID NO: 79257 - DNA, 613 bp, Arabidopsis thaliana landsberg
ttttatactttcctatgctccacgttcattattttgcaaacttgcatgacttgtcaacttatattgtttatcatcaaaaataatgtattccacatacacaaaaacttactttccatcactagagtcaactttaaatcctatcctcgttgtaaacttagatcttgagaaggatgtaatctggtaagatggatcaaatcacatgagttcttcttcttagtccctcttgttcaagtagttgctaagaagtggtaacatggctttgagttggcaaagataagattaagatcaatttaaacttgacaccgagactggtttagattttgcctttgattaagaaaatctgattaatgacacaaaatatacatttgtttttataactgtaactaatttcttcataattataatttcagtcaatactagtatactactctttaatgcatcataaaaaaaaacagccatatattgagggttgaattatattgtacccaaaatacatggttgaataacactctcaaagaaacatacataatcaaaagtcctcaattaagcaattatagcctatatataacaaccgtttaattaaataaaatattatacaaatcactatgtgagc

SEQ ID NO: 79258 - DNA, 580 bp, Arabidopsis thaliana landsberg
ttgacgagattgatcataacaaaaatagaaacccgtggaggttatgtactgtgaaccaagtggaagaagtaaagctaatattgagggtcataccaatttggataagcttgataatgttctgtgccacactcactcagctcaacacattctttttaaagcaaggaagtatgatggacagaaccattgggaatcacttcaccattcctcctgctgctttccaaagcattgttggtgtcactatcctcatccttattcctctttatgaccgagtttttgtccctatggttcgtaagatcaccaatcaccattctggaatcacatctctccagagaatcggtgttggcttatttgttgctactttcaatatggtaaagtgaattatgaattatcctaatcgaattctatatatctatagactatagttgtccctaacacgttctggtcctaaatagactaatcttaatctaagcaatcaaatgaatggcctaagaatttacggagttctgttttataacaggtgatatgtgggcttgtggaggcaaagagacttaagttgcaagagatcatggattaatcgact

SEQ ID NO: 79259 - DNA, 107 bp, Arabidopsis thaliana landsberg
caatagcaattgcccatttgcctctaccacgaggcacgtccttggactcgttttttctacaactcaagacttggttcttcaccctctcttcgggagtgcaccttacg

SEQ ID NO: 79260 - DNA, 310 bp, Arabidopsis thaliana landsberg
caaacctaattttctaaatctccttattcttcttgtttagcttactcaattcatcatgacgatgttgagacatttcgtactcctcaggtgatgacccacatggcaagagtgggtggccgagtgtcagcactgataagctgcggacccgattctttctggaccaattgaggtgtattactgtatgagtggtcttttggggtgaaaaatgttttgacaatagcaggaatcaagagtataacggtagagagacactggagtttacttctatgagagaactaaataaaagactcactgtgatacagtggtgata

SEQ ID NO: 79261 - DNA, 385 bp, Arabidopsis thaliana landsberg
  unsure (1)..(385): unsure at all n locations
cctcatcatgacgcactgtggtgctaaaatacttattccatgtcttttttcttgaaannnnnnnnnnnnnnnnnnnnnnnnnnnnnnnnnnnnnnnnnnnnnnnnnnnnnnnnnnnnnnnnnnnnnnnnnnnnnnnnnnnnnnnnnnnnnnnnnnnnnnnnnnnctcggacctatcttacattattgttaccaacaaagtgaggctactggagaaggttacagaacgaacatatatgatgcaatctatggctacatatatagcagataaaccagactttgaggaccaatgaaactaccaagaccgtaggcgaaaacatggaataggaatgacttacaattgatatatgcggagtgcttaaccgtatgccgacgacgacatggaat

SEQ ID NO: 79262 - DNA, 521 bp, Arabidopsis thaliana landsberg
ggcaaacttggacaacgtgcaggggtatgtattctgcacatttaatgcttacaggacccaccttccgaccggggtactggtgctgtagattgaaacgtccaagggtcaccaattgttgttcgactttcaaacaaacatatatgtcgtgcccctattggacactgtaacatcactccgtgagatcccgtggaaagaacccatcgcgaacatttgtgacttagttggagcagttcagcaagcatgcgtgctcatttctgcgacattgattcatttccgggggtcgtcgcagggaaccaacttcactgacgtcgttcagatatcagcgaatgggttgatatcaacggacaccggtgggattgaggagcaatgcattcacgcccagatgatgcttatgtgtagcagactatcattcggatgtcagctgtctcgcgttgtatcacgcggttatgggtcggcgcgcggatgctctgcaacagtttggtctgtgactgaactagacagaagtaacgagctttgtatta

SEQ ID NO: 79263 - DNA, 118 bp, Arabidopsis thaliana landsberg
actttttttagcttttctacacagcatcgttactaggtagcagatacattgtctttgtagtttagggatgcagataaacccataaaatctatatgatacaagtaatccatgtaaatat

SEQ ID NO: 79264 - DNA, 514 bp, Arabidopsis thaliana landsberg
ccgccagtggacattatacttctactgcacggtacaatagctttttttctgatatttcggcgcgcaagtataattcatttactcatttggaaaagaaacctgattttaatgtgaatatcggctatagccatgcaggctcaagctgtaaggtggattcagtttaaagtatttgtagatgccaatcagaaatacatgtatgaatggacaaggaatgatagcttaatcagcaaatagacttctaatgaagtatttggcagggataaagcgggatatcgggcttatgtcgatagaggagatgatgtggattatagaaacgaatgatattagtctgacaggctgcgcatctgatgcctttaaccagtatagtattagtcgaatgcaccggtgattagcgctgaaagaacaacgattttagccaatgatgatagctttattaaggacgagggctgcactgatgtaaattgacaggggctggaagatgaagtgccaattgcaggggctaatcacgctagtc

SEQ ID NO: 79265 - DNA, 393 bp, Arabidopsis thaliana landsberg
ggccgacgcgacatagccgcgccgcggcgtgagcggattgtcgagccgccgcttggtgtaggtgaagctgccgatcaccgcttgccggttggtctggaagctgtcgccaatgcgctggcggtcgcccaggtaggcaatcgcccaggctttttcatcgagcttgttggggctggcgatgcgcgcgccggtgcggatcttgtcgtcgatttcgccgctcgcgatcgtgtgttcgagatgggcgccgaaactcggcagccagccgttgcggatcgccggcaggaacacgtcgccgccgagcacgcgggtttcgcgatcgatgcgcaattccgattcgagccgccagttgcgctggaggaaattgcggtccagccatttgatctgtgcccgcgcgcc

SEQ ID NO: 79266 - DNA, 546 bp, Arabidopsis thaliana landsberg
gttgcctttttgccccatgccgcgaagcagacggctatacacatgctcgtagccgtagtcgttggccacggcggttaaataggaggtgttggcatgaagcgcctccgaaggcagcggctgacggtccttataaaaacggccggaaaattcggcggccaaatgttgcgcgtcggcagcactgccgccattaccgcaaaacaaaaccttatgcccgttttgaaaagcagaaaccattaagctggttaccgtaccgatagtattaatcaaagcctcgtcggacaaaatctgctctttggtttttaccgatgccgataaaatactttttatggatgaaatcattggataattggtaataagtcttcaaaattaggaaagtaaagctaaaccctgaattgttttgttatttttgcagcttaaattggatttatggattttgaagtgctggaaagcgctgtgcgtcagcgcaggacggttaatgccgggcggatgaacggaaagaaaattgccgaaatcgatatccgggatttaattcaactggcagactgg

SEQ ID NO: 79267 - DNA, 585 bp, Arabidopsis thaliana landsberg
agattgcatataaatgatgtaaccactgacactgttgagcaaaccttcacggctcattaaagatttataaaggacagtaagaaaaaaaatatgtttccccactaggctttctatttttagtatcactctaaactctagcgagtgaagatggctaaagtatagctagttaatgcttaatgcgtaatataaatatagttggtatatgattaaatactagtaagtctggttttcaagtaatgcagtttaaatggttcactgatgaattaaaattgacacacaataaattgtttaaacataatataaatgaggaaattaatgttttgaaggaacttcaatacagtataagaatatatgtgtttctcaaaatggtgatttatgtatagctttctagggtctctccttaactccgttgctagacataattggtgttcgtgtataaattatttgaatctaacaaattgttaggttgaataaaattttgcagcatatttgaaggtggatgaatttaagagcccgttatatagacgaactgcaaaagtacgttatctatctgtgtaaagccaaccacaaaaaacaccgcatttt

SEQ ID NO: 79268 - DNA, 663 bp, Arabidopsis thaliana landsberg
gttatgaaccattcataaagttatgtatgtgtaaattgtgagatactcatcaaagtagttatgttcacttagaattttctattccctacatttttatacgagctctttgttataaaatccgtttagatggtttctcaaacattgccttcaatcactttgatgcttataccagctctcttccactacactgtggtctgtggactgatattaaaagtttacttggtatggaagtaagctatttagttgacggttccttctctgttttgaatcaacctctgcccatcctctgttttttctcgactctgttttaggatgaggcttgggactaataatatacacttgtaggtatttatcccacataattctctagaggacttgaagacgctatatacaagattctagatactggattctagatactggatcgatttaattagtaattggtcaaataatgatacctgacccataataaaaaaaaaacttgtcaaaaatcaacttcatatttcagtacacttggagctcgtatgcatattaactcggcttcattgaattaattctcatttcatactccattgttttcagtttttgttttcattatgtttacattcatcaaacaaggacaggtcatccaataagagagacttggtcacaaaaattccaaac

SEQ ID NO: 79269 - DNA, 363 bp, Arabidopsis thaliana landsberg
ataaaccgttggattaattgaacgaaaactgacgtgtacactttgactttcacgagaggtctaacaagcgacgcgatgacttagactgggaactgcgctcgtacacaaaccagttatcatactggcacgcttataataaaagcacagtagttaatgaccagaaaggtccctagcaatgacaagctgacggctagggccactaagggatcgaagaacattacatgccggcgaatacaatggaaacacactaccgctatactagctactccgtgaagggccttccgtccttgataaacccgtccacccgacctgaagaccatgcccattgcgacaccacttggcacttggaacaacagaacttgc

SEQ ID NO: 79270 - DNA, 157 bp, Arabidopsis thaliana landsberg
gtgcacgcgctaggaaagccttccgatttgaaccacgcctatcttcgtgtcatcgtcgagtccctgggggagtcacgatgaagctactgagctccatgttgatggtcgcggttcgaacgagcggggccttcccgcacgaaccctatgctcttgaacc

SEQ ID NO: 79271 - DNA, 582 bp, Arabidopsis thaliana landsberg
cattaaaaaatatttcaatataggacttatttgacattttaagaataattaatttcataaaaaattgtagttaatgcctatctaaacaatatcgttagaagcatcatgcatgataaaacactatgataaaacaatgtattttttttcctgtctagtatgataaaacaacgatgttagattaaaaaaaaaaatttgattaacctaattttattttattttcgattgaaaaactattgtgagtagaaaagaaaaaaataaaaaaataaaaaaaagtaaatgaatacaaaattattctttaagttgcttttaggttttgtctaaggtttgaaaaaacatttttgggctttatctttggttgtgaagataatcaaaatgagtaaggtacttgggcaattgagcttcttttttcttctcactttttgtggtagttgtaatgtgtggttagttgcggatccataaaacacttcagcactaagaaaaaagcttttacctatgaaaaagctataataattccatttttgtcttttaacaatgatcatgctttccatagtaatttgataattcccaactccctggatttta

SEQ ID NO: 79272 - DNA, 553 bp, Arabidopsis thaliana landsberg
  unsure (1)..(553): unsure at all n locations
aatattaacacctgataagaagtaccttttaattgatgaattaagggatgaattatcaaagctgggtaatgtttttttactcaagtctgatgagcgtgtaacagcgataaaaaaccagttaaacactgtgttggaaaaactcatcaataagcgcggtgtggtaacgccctctgagaccgatgaggttttggaaaagctaaacgaatccaagcgcataaggctgggcaatgactttgctaaaagcattaagtcagcagccctttaccttgtattgtttgcagccattggcacaggcatttatttttatactaaatccaagcgataagcgatgaatacgaatctgaaaaaagctttattgatatttgggggaggtttaattgtttttttggtaatcaaaaagattagacccattggctcttcatcaaaaaagaccaaacaatccaccaaggcacctataagcgatacgcagcgcaaaaacgcggctattgccataacagcctatcangcagcgatggcagctggtgagcccaaggattttttagacgaaatgaat

SEQ ID NO: 79273 - DNA, 424 bp, Arabidopsis thaliana landsberg
tgatttttggcaaaatactgcccatctgcaggttagccgccccgatcacgataaaagcaaattcaaaaaagagcagccagaacttcaggctgtgggatcggggggaatagcccgtaaacaactgttctaccaggttcttatcccctatcttacgaacagtccttcgtttccatgccagcacacccacaaagatcagtacgatcaggataagcagcaccagcgcatacaggtattcgctatgttgaaatcgtaacattcctacaaatgtaaccgctatctccctgccgttaaaaaaggaggaaagttttttaagaaaacattaacaggtagcgctgccaaaagacagcctcatttccccgccgtcggtatagaaaagcggatccggagagtttgttcagatgcccggctttcccctggcaggaat

SEQ ID NO: 79274 - DNA, 599 bp, Arabidopsis thaliana landsberg
  unsure (1)..(599): unsure at all n locations
gcgcctacttcacctatcaggacggcaagctcgtcgcctcccgattcctcgacccgggccgcgtcacccccgatgatgcgctgctacagaacgtcatcttcaccgcggtaggcgccgggcccgccgtcaccgccggcaaggccggcgtcgaagccggctggcagggcatgcgaggcctgttcgcccgcgaagccctcgaggccggtggcggtagcgccgccggcctgaccgccgacaacgtgctgccgcgcgcactcacccaagccgaaatccgagctgaggccgccgccgacgatctcgccatccaccaccccggcgtggacgccccagtcacaaccagtggcgatcacctcccaccgttaacgaccgccgaccacggcccaccggtgcttgcccaggaccacgttccgcacagcgccccacatgtgccggcgccagcaaccgaggcgcacccgttgccaccggattcgccgctgttcgacggataccatcgcgtcgaaccgggaccgcagttcaccgacgccgctgggacctgatctatcccacgacagcctggccagcaggccttacgtgataccgggaaccgtcgtncccgacgc

SEQ ID NO: 79275 - DNA, 446 bp, Arabidopsis thaliana landsberg
gagctgaagtacacaaatagagaacatgaagaagtgctaatgtcgtattaccatttctgaatccctacggggtcagagacgattacgggtgcaagaacgagactcggaccagagtgtgtgatggcttcatcgagtatgactctttctgcttgtgctctctttacttgcttctgcgttattcggaagctagcttccgcgtctatagagaggaccctgctctgtgtattacgatttatactcttccgagtttcgtattcttgagcttattgacgaatcaataacctctatggttggcctattctttttgcttgggtcaacacttcatagtcatctaagtttttttgttgggctaggatcggccttgacagattgcgccatgtgagcactggacaactgcctgtggtcggatctgcttgcacataatccgcactatggatgagcgattt

SEQ ID NO: 79276 - DNA, 518 bp, Arabidopsis thaliana landsberg
cgaggtagacgaccatcctccggccggaaacctgcgcctcgtcggcgggagcaccgttaaactttgtctcgtaggtcgaatacatatgggcggtcggcgaggcgaattcggccgcacaggtatcgatgcgcttgtagacgggatggacgccgagcttttggcgttgcgtttgaacggcttccgcgtcgctgttcgtcaatgacgcgagcctggcgtcggaaaagcccatgcctttcagcatgcgcaggttcccgccatcctccggcaggccgtgctcgcggatgcgcgcctccatatggacgatctcggcgatacgctccaggaaccagggatcgatgcggcacatctggtgcacgtcctcgacggaggtgcccattctgagcgcctgcgccaccatgcgcagccggtcgggcgtcggcgtaccgagggcggcgcggatggcgttcttgtcttcgccttgttcaaggccgggatttcaatctcgtcgaggccggtcaggctcgattccagcccgcgca

SEQ ID NO: 79277 - DNA, 506 bp, Arabidopsis thaliana landsberg
  unsure (1)..(506): unsure at all n locations
agtttcttcatgatctcatcatgcgtataggcaatacagctaaaatcgaaaagatgttccccgttttccgtcttgtacgatgcatccgnnnnnnnnnnnnnnnnnnnnnnnngggattccaggaaatgcagttgtttctccagccgctgcgggtgcgccatatcatccgcatccagcctggcaacaaattttcccctggcatgtgccagtccataattcaatgcagcagctacccctctatgcggctgccgtatatacctgatccgtgtatcgcatatattcccggcaacagcctgtgtatcgtctgaagatccatcatccactatcaacagttcaaaacgggtatatgtctgcgccagtacggatgttatcgcagcatgtatatagtcctgcgcattataggcaggcatcagcaccgttacaggtatttcatgcggctgtgtcatcggtgttgcatttcatgttcaacaacaataataattcggccatgggcacaaccgacaatt

SEQ ID NO: 79278 - DNA, 554 bp, Arabidopsis thaliana landsberg
  unsure (1)..(554): unsure at all n locations
attgcgcttgcccgtgccttgattcgtgaccctgaaattctcgtcctcgatgaggccacggctgctcttgactctgccagtgagaagagaattcagctnnnnnnnnnnnnnnnnnnnnnnnnnnnnnnnnnnnnnnnnnnnnnnnnncaccgtctctctaccatccgcaacgccgacaacatcgtcgtcatgcaggccggtcgcgtcgtcgagcagggaacgtacgctgaactcatggctaaagaggacggcgaattcgcccgcatggccaagctgcagagcgtcggcaacgcatccaagactgaggcaggatccgtctctggcgactcggtcgacgcatcgaccttgagaatgtccctgaacgagaagactgacatggctgagatcaaggagggtgtcgaggttcagtcatccgagaaggacaaggccgaaggcgaaaagaaggaggaagagcccaaggacaaggaactagacgccaaaagccattcagctctgtcatgaagggccttgtctggttgatccgcccatctctaggctggttcgcccttgccatg

SEQ ID NO: 79279 - DNA, 486 bp, Arabidopsis thaliana landsberg
aatccctgatggttcctctatcggaagtttatagtataccatataacgtggctctaaaagatgattagcctaatgacaaaagaaataaaaaataaggagccagtgggatttcgtaacccatttgacaaaaaaaaaaaaacagtaaagaaataagaagaagaggaaaagagaaaaaataaacaagaagaagtagcgtatccatctatccgtcctgtccaacagccagtccaggtaaccccttcatggtatctcccaaggatgtttttttgtttataagaaaatatagatgtaacgatcatcgccccagccttagccgttgctgaaccccatgtaccccgctgatgcatcgtgatgtgtccgtccggttgtgtgtgcatgcgccaaatgtcgatttaatatacaagaccaaaacgccgatgaatgccataactgtatgggtgcaggctcccatgccctaggataacccttaaacaccctttcgtaagt

SEQ ID NO: 79280 - DNA, 566 bp, Arabidopsis thaliana landsberg
  unsure (1)..(566): unsure at all n locations
cgattgacggcagccattttggagaatttttcaaaagctttaatgctaacgcatttctttttgcgccaacacttcgcgctattttgatgtctgtcagacttccatcgcgttctgctacgaatgacacaataacccgacccgcatcggcttcagtgatcttctcgttttttaagccgtcttcaatatattgaaaaaactttgccatgccgcctgggannnnnnnnnnnnnnnnnnnnnnnnngtaaattttatcaggtgggtcgttagcgtcattcccggaaatgggttcgtctatcgtnnnnnnnnnnnnnnnnnnnnnnnntaattgtacgtccttaactcttacaggctgaatcacctgtacgataaaacttatcggcacactgtaattcgacttaataaacttattattttgccttgcaggcacccattttggcgaaagatttataacgcgcattgcttccatatcaagttttggcgacaaagctttaactatatggatattcgttaactgcccatctttttctactgtgaaaccaaccgttactatgccttgtacattctta

SEQ ID NO: 79281 - DNA, 243 bp, Arabidopsis thaliana landsberg
ggttacaactttgaacagatttttaaacatcaaagctaaatctaacggagaaggcttaatccctataaggttaaagaagaccgtcgttcggttctaaacgacagcgtttaattgtaagcttattattaaataaacatgaaaatgtaaaaaaaatctgaaaacggtaattatctctctctactcgctgggactaaccataaccctttttaaatccctccttcccaaaaaaatgttgtttttttt

SEQ ID NO: 79282 - DNA, 603 bp, Arabidopsis thaliana landsberg
  unsure (1)..(603): unsure at all n locations
taacgcttaccgagtcctggaccctatacatcatagtaaaaaattattttgcatttcattcagtccttcacattttagaaatcaagttacacataagacttaagcataacgatacctatacttcacaatgctctctctgtagagatcacggacatgctgtacagcctcatctgtagtgtactttggttagtccttaggtggcccactccattttgatacaggattgcatgttacaaccacgactgtgtcggtataaggaatatataggtacttaacatgcttgtttgcagagagcaattttctgaacagccagaaacaaaacaaaagttaggaaacgttccaccctgagccaatttatgggatcaatttgcttcaaagtagagggagtgatttcccaaatgctagaatgcactatgccaaatgatatgggcagtactaaaaagtgaaaaaaactttaagctcttgcatcaatctgatacttctgtgataatctgaccagaagaaaagtcgtatactgagcatgatcttcgaagcttgaagccatatatggagactaagatagagaaagttagcgatacttaactcgngatttttcttgatttc

SEQ ID NO: 79283 - DNA, 543 bp, Arabidopsis thaliana landsberg
acaaaatcttatataaaacgttgaaaatgtatttttcaatatcccaatatgaaaagccaaatgtcttttcgtagacagccgaaacatgggagaagaaaagccatatataaaaaaaaaaactgtaatatacttgttgaaatttcataggaccttgagaatttgttgaattcgttataaccttatccataaatacacatgtaaactaatatatatatccacacaatatgagttcctatatatctcgtgtttttgaccggtaattttaattatgtcaagtagacgattactaagtacacctactaatatatatgcgaatgcatcttcccagtataatggcctgccaatgcatttcccggtcaaagatataaactaatgctacacatatcaatttatatgctatgctgttgttatatccatataatttggaattagatatgaaatcaaacgtgattaagggctctaatagctgtcaactttaatgataagaaatatgttgcctctatagaaattggtgggtaatgagctaatatgttcgggtgatgt

SEQ ID NO: 79284 - DNA, 107 bp, Arabidopsis thaliana landsberg
  unsure (1)..(107): unsure at all n locations
atgccactgtaaagaactctactgagtacaatagatgngcgctgtcaagaacgtagcaggaggtagngatgtgtcagttgtttttgatctagtatnggatcgtacat

SEQ ID NO: 79285 - DNA, 426 bp, Arabidopsis thaliana landsberg
  unsure (1)..(426): unsure at all n locations
accacttaaagtagcaatgaaataaatgagacagaaatgttaatatatcaacagaaatccagaaaagttgaagactttgtctcccaaagacgcaattccccaaaagggttaacgtaaaaaacataaacgacgcaaataaccggagcttaacttatatcatttcaagcatttgggtcaaccactggaaaaagcaagcactaggcattaaaaatgggacctttacacaaaagcttaggacatggtagatcaaatttctcgattgacctaaagatgtcagaacctccacttgnnnnnnnnnnnnnnnnnnnnnnnnnnnnnnnnnnnnnnnnnnnnnnnnnnnnnnnnnnnnnnnnnnnnnnnnnnnnnnnnnnnnnnnnnnnnnnnnnnnnnnnnnnnnnnnnnnnnnnnnnnnnnnnnnnnnnnnnn

SEQ ID NO: 79286 - DNA, 353 bp, Arabidopsis thaliana landsberg
tgctcaggagttttaaatggatttgaagaaaaatggcagtcttcaatgttttaaggttgttggtctcaaatgcattggtatctttgcccattttgggctttaaatgaaaagttgttcgacgaaaaaaaaagggaaaaaaattaaaaaaacgtaaaaaaagttgcaaatatggatcgaactcacgacattagtaaaatttagatatcgttgaaccactagactactgagaattatacgataatgaatccaatagtttttaaatattgattcaactattgggagttaaaagactttcatggttgtttatgaggacccaacaatgatttcatttgggcggaacaaatcacccgcta

SEQ ID NO: 79287 - DNA, 459 bp, Arabidopsis thaliana landsberg
  unsure (1)..(459): unsure at all n locations
cctaaatctctagctcccctacatctacaagtctgctgtcgggaatatggttttgccgtccatccgtagaggctatatcggataggttcgcatgctaaaaaaacgttatatacccaacttttctgggagaaggtcattctcttaataaggatgtcaaatttggtcattcattaaattaaccctaaaaaaaaatcaactcccgcttcacaaaacaacaaaaaatgtaacatgaaggaatgaaaccaaacacatatgactcagtgatgaaatacataaccaactaaccaaagcaaactttttgaataaatagttttaaaaattttctttatattggtgccctaaaactgctttatgggagggacagactcataagtccgttttaacaagaaaaaagaaaagaatggaaagccgtcttaagcctaccattagaagcaaatagctntaactttcgattacgat

SEQ ID NO: 79288 - DNA, 316 bp, Arabidopsis thaliana landsberg
agaaacatatatcaccattttcggatgtcaaccaaccgattttgacattcaaaacatattgtacaatttatgctattactaataaaattcagtataaatttatcattttaattggtagcaatttctacataaaatctgaacttccgagataaatggcttcaaaattctcaaccatatggaatttttttttttttttttgtgacattaggtgaaactaaaccaaaatatatgaaaataatttcctacattttataaattgaattttttttttcttctaattaactgaattgagaaggggttttcaagaaatgacaag

SEQ ID NO: 79289 - DNA, 630 bp, Arabidopsis thaliana landsberg
aatgcaccttgaccacgatacaacaaacaacgaagatgataacctaaaatcaggatgccaacgatgccacctacgacacgacaaagacattcacaaaaagaactcaaccgaaaccctcaacaaaaagaaaaaactgcaatcactattttaaaccctgtacttacaataccccattaaattccaacgtttatgattgttctttggttgtatcttggattttgttatggttttgttttcagtatgtattatggggaagggtttgaagaagcgcattgggatattctcctatttatattatctcccattatagttccatatttccttattaaggattttttgaaaaaaacatatagtatataaacgataaatcatgataacccttataaatttatttctcacattcattactatttccttttttgtgtttatattgggtgcgttggtagatagcattacggaggaaatgggaatgatacttatgaaacttggcacaggtatggttggattatctggattatctgggatgattatatttataatatacgtatggtctttaaaaaaaataattactatgaaatacatctgcatacaaagcctattttctatacaggtaagaaaacaaaaggggga

SEQ ID NO: 79290 - DNA, 580 bp, Arabidopsis thaliana landsberg
ctcagcagcaagataaatgtaagtactatcggatattcccagggtaaaaagacagctcggagtactaccttacaaatgcttccatccttacttggtggagttgcaagaacaactgttttacatccagcaatttgagcaggctgagagagaagtatagggtaaggaaaaagaagacaagattattacaaaattacaagagaaatgaacaagcaaaagtataaaacatgagaacttacaatagcaagcatcaaagccgttgatggcaaaacagctgttccaccaggcacataaagacctacagagccaatagatcttgacacccttttacatctgacaccctaacaaagttcacgactaaagattagtgtgaagaagacttaagaacgtaatgtgtaactaaattgacttactttcatattctcaacgcttttctcagttgacttttgggctaagtgaaacgatatatgttgtcatacgcaacatcaaacgcttctttgacattggaatcgagctgaatacaaaaggcattgacacagagaaaggaaattaatttaacatacaaatgaaaaagaattcaaac

SEQ ID NO: 79291 - DNA, 573 bp, Arabidopsis thaliana landsberg
  unsure (1)..(573): unsure at all n locations
taacattctcactgaaatctaaaaaaggagtggtagaagtgaaaatataggttttgtgtttcaaagatgacggcggtcgggatagataaatccgtcagcaatatagtcagttttatttttagggcggacaacaaagcgctgcggactaatcgtaattgtatgtaaaagcaatctgttgttggtctgcgatagtttttttctttctttttgattttactattagagattatagtttatgaaaagtaaataaaaagtggttatgccgtaaatgattttatccgctcgtaccgctgtaatcatttgaaccctatatgtttgtgttagtcattgtcttacattctgtgaaataagatggtttatatgaggttttgacactgattcttagaccggattttaannnnnnnnnnnnnnnnnnnnnnnnnnnnnnnnnnnnnnnannnnnnnnnnnnnnnnnnnnnnnnnnnnnnnnnnnnnnnnnnnnnnnnnnnnnnnnnnnnnnnnnnnnnnnnnnntaaatgcatagtcgcataatgaatgtcggatcgattgatgagtgaccaactngattaaata

SEQ ID NO: 79292 - DNA, 578 bp, Arabidopsis thaliana landsberg
atgatgaatccatcaacttttcttatgataaggcactatctttggctctgtattggatttgtagcttactttgcttagttatatccgattacttaatcgtaatttcatagtatttctaaaccattgtctctctatttgttagttttttttctttgagtatttgtatttattagtgtatatgtattaatgttttatataaggtgaaattcagtttaccattttattataaaatgtaaagctttaattaatttacgatgcagtatgtaatgatatatacaacacgagaaataataataggcaaaatgtaagaaaaaaaaagagtagggacaaaaaaatgtataaggaaaaagaagagatatatagtgggttgataaaaaaaaataaaaacatactgacgaatgttttaaattttagtgttgtaattgaacatttttttttaagaacacatttacctttgtttaccaaacatttatcaatccattcatttaacattttccataatgaataaaaacttatatatcctactgacatactcaatactattttagtatgcttgagtggtcaagactatataatga

SEQ ID NO: 79293 - DNA, 573 bp, Arabidopsis thaliana landsberg
gatgttatttgtcatagcgttggtcgttggaatccaaatagcgagttattattaaataaaatgttccaagaaattgattatgatcgtcattcgtccatgtgctaagtccactccccttattctaagacttttatccatcctttaaattggaccaaatattaaaagtcaaatatgtagtcatctggctccagagaacaccaattttttttctaaaatgacaaaaacttagaagattcaagattcagaaaacacatacgtaacgtaagccaatatttttccattcaaagagtttaccgatagcgaataaaaactgttaaaaaaactagaatgaatactgtaaacaatttatattagtagatagattaaagagtttttaaaattgtggtaaaactccaaaacaactattaatctgaaagagagtagttgttgttagtttacccaaattatctgattgtgtgaatgtagtaatctccacaataaattgcattatggtattattacggagttatcagacttttcacttcaccaatcactgtgcttattaaataatgactacttaataaacagataagt

SEQ ID NO: 79294 - DNA, 332 bp, Arabidopsis thaliana landsberg
  unsure (1)..(332): unsure at all n locations
tgggtagtctcggaaattcaaatgaggaaatctttttacttttattatgaaagcgcatgacctgggtggggctccggattaggatccaacacaannnnnnnnnnnnnnnnnnnnntgaaatagcttaagcgaatgtgtacaagaatccattaccctcttatgtgcactagacagcaaggtcaagaacggattctggtccgacagctactgaaacgcacactcgagatcagatgacgggcactgaaactgatgaacagaggcgtgattttgcaacgcacccgtggaactaaacatgggcgaatcatcatctaaatgactacaacgcgactaac

SEQ ID NO: 79295 - DNA, 569 bp, Arabidopsis thaliana landsberg
cctcagcgaagcgctgggcatcctgtccttcgtgctcggcctgttgatcctcttcagctaaaccgcccttattgactgaccaggccggggctcatccgtttgagtcccgcgcccgcatgggaaagcacgccgtcatggccgatccggtcgagaccccttctgaactacctgtcgctgaagccggtcaagctgtgaccggccatgagaccctgcctggcggaaccgaagccgagcaccaagggggtctgccccagttcgagttccaatactggggcggccagatcgtctggctgctgctcatcttcgcggtcctctacatcctgatcgccaaggtgttcacaccgcgccttcggggtgtgttggacacccgcaccgagacgatcacctccgccgtcgcggaagcccgtcgcgtgcaggaagaagccgacgcccaggcggccgacgcagcccgggatttggccgaagcccgctcccaggcgctgaagatcgccagcgattctcgctccaggcccaggccgcggcgagcgcccgcttcgcggaagaagacgctcagctggccgagaagtcgg

SEQ ID NO: 79296 - DNA, 399 bp, Arabidopsis thaliana landsberg
  unsure (1)..(399): unsure at all n locations
ccgccacgtcgactttaccaggatctcttcccattccttgtagcccttcttcatgaaggcttcctgcagcctgggaatgagcgcggcgcggttgttggcgcgattggcattggtgttgaagcgcggatcgtcggtcagttccgggcagcctatggccgggcagaacgccttccacagcttgtcgctgcccacggcgatggccacatcgtcggtggcggtgcgaaaggtctgatagggcagcaccgccttgtaggccgtgcccatgggggcgggcagcgtgccgctggcgcagaaggcgctgatcatgccgccgagcaggccgatctggccttccatcatggacacgtncacgtgctggccttcgccattcttgtcgcgcgcgcgcagcgccagcatgat

SEQ ID NO: 79297 - DNA, 598 bp, Arabidopsis thaliana landsberg
aggtcggagatcttgagaggtgtagcatcttcgaccatggcgtctgatgccacatggtgttcgtgttcctcgtgtttggccatggcgtgtccaatgggcaaacagggttcaaatacagtgaagggtgatatgattgatcaaaggtaagtgtgttgatcttgctcttgaggggaaatgagccgtttcggagccaggaggcgccttggagtccttatatgctcaacgccgaggggttaccgaagaaagaccatgaggctaccatcaagcctagaccaagaagaaaacctggggccccagctcatgaccgcactagcccccagatgatatgattttctgggacagaccacagaaagcgaggataagctattccgaaaatacaggaagaaaatctcagcaggtcacgaatgagcaccagacaagctttgacagcgtctcccgcggggtttctgtgtttcgccgcggcgtaatactagtacgattgcttcctgagtcgtgcagttttgtctcattggttagaagtgacgctaccggcagaattgagggtcctcttgggattccttcgcgcaggaactgaggggcgggccatgtgggccaagga

SEQ ID NO: 79298 - DNA, 504 bp, Arabidopsis thaliana landsberg
  unsure (1)..(504): unsure at all n locations
cctgtggctccgtagggcaaaggtcggcggcagggccggggcggtcggcggcgtttggaggctgaggcccccgatggcctgcttgtgtctcagcttccgctgctgctgttgctgctgctgctgctgaagcgggatcctagccgacgcctggctctcgaacggcagggtcgacttcatatccgtgaaagagcccagtcccgaggggggggcggccgcgaagggctccacgttcttgaggtccccaaggctggctcggaggaagtcgtctgtgtcctcggatccggccacgttgtggcttgtcgggggcggcggcgaaacttcttgtgccgtcgtctggctcttcaccccgttcacgtcgccgggacgccactccggccgtgatggctccacgggaatgtttcgagcaccgttgttggccggtggcgcacgcggcctcgcaggaatgggcggnggctggtgaggcggcgggtcgatatccatggcattncggctttcggcactccc

SEQ ID NO: 79299 - DNA, 578 bp, Arabidopsis thaliana landsberg
  unsure (1)..(578): unsure at all n locations
ggcaactgtgaaacgagaagccgcagatcaagtcaagcggctgcgacaatattgttctatagttctctatgtcgggaataatgaggactatcagattgcagagatgctcaatctgacctgggatcgtgacgatcattcaggcgattggaccgaaaccaatttcccggcgcggactctgtnnnnnnnnnnnnnnnnnnnnnnnntggctgaatatgcacctggtgtcccctaccaccccagttcgccttggggtggtgatggtacgaccgacaggaccgttggcgacattcaccagtggaatgtctggcacggctcacaggagaagtatcagctatgggacaagcttgtgggccgctttgtctctgagtttggcatgcttagctttccagctgctcaatccatccgtcgctatgtgaccgatcctgcgcagcgatatcctcaaagccgtgttctggatctgcacaacaaagcatacggtgcagaacgccgactgagtctgtatgtcttggagaatctcccggtcaactcgttagatcttgacagctggatctatgccactcaactcattcaaggcgagt

SEQ ID NO: 79300 - DNA, 481 bp, Arabidopsis thaliana landsberg
  unsure (1)..(481): unsure at all n locations
accccccagaaaaaaatgaaactgggattttttttttaatgttactttttagctctctttgttgaattatgtacattgggttctttattctctttttttttttaattccctttttccaaataactttggcttttaattgtagtttaaaaaataataaagctgaaagatttaggttcttacagatggagtaagatgggcacctatatttttagtttcaaccaagtaataatcatagaaagaggatggttatagagaaagcttttagaccgagtgtatatagcggtaagaataaatggcttacatatctgcaattatctgaacataactacttaacaaagcctactgtcactttgatgagtttactaaacattggttgcctaactntacagatcagattgaaacaaagggctagtctctctattntgcaacttacaatatgcatttgattcatgttcatcaattcaaagacaaagtatccaca

SEQ ID NO: 79301 - DNA, 591 bp, Arabidopsis thaliana landsberg
ccttgctgataatactgagcattttgcttccttttgagccttagggtagaaggagtcaatagagggcggcaggatgacgaaggacgggttcagtaattcttagaacaagttgaacagctctccgaacttctgaccctcggcttagagttaatcgtccgcgagcataacttgttatatttgatttgtgaactgatgtattgctgtgtttaataaattgtcaacagaatatgctcaggatatatttaaggggcttaagcgagaataagcaagcttatgctgggcgtaagtatgcgtccacatcgacccttttcctactctaataattatactcgcaaacagataaacgatagtaagcgttcgaataaatggttattagcttgcttcccgatatggatgagaagataatagatgagttacaagtaggaaagtctatcgagcagaaacttcattttattgtgaaaagatacattgatattagacgttgatattagacgtgtttacgaaataggaatttaaggaaaataaaaattcggtccagcaggccatcagcctagtccagctcagacagaagaacaatctccccgaacagac

SEQ ID NO: 79302 - DNA, 592 bp, Arabidopsis thaliana landsberg
  unsure (1)..(592): unsure at all n locations
acgtttaaactatcttgccataaaagtatatatcaaaaagcatttagcatcatttttgttattcaacttatattgaatcacaacggagaatggttatatctatgtgcaactacaacctcaacaattactaattaaattttaggcacgtgaatacactgtgagaaccatattatttcacattcagattctaacttagaatttaaagactgagctcctctattttctaagccagtaaataatcgatttcggtttacgcgctcttatatgacgcattcaataattatatttattcaactttaaaagtacataagtattgatgtggtcctgtggattacttgtcccctgatccagttctcttgcttaatcaagtaagcttaattactcattaaaccccaaaaccaacgggtcttcaactgcataagtacttaagccccgcaagttgcagataccttagttaagtacatattacgtacgtacggtattgactttaattagtgcgagaatcatatcattaacagaaactcttaaagcaacacaatagtttaagtaactcangttttatacaactattaataaacatacttaaataatg

SEQ ID NO: 79303 - DNA, 545 bp, Arabidopsis thaliana landsberg
  unsure (1)..(545): unsure at all n locations
tttgtctggagaactagtagtgatggtgttgttatatggaaatggtacaggaagtggtgtatgaagaagatgaggaaataaagaaactgagagaagagtggggagaagaagtgaagaatgcagttaagacagcactggaggagcttaatgagtttaatcctagtgnnnnnnnnnnnnnnnnnnnnnnnnnnnnnnnnnnnnnnnnnnnnnnnnccacactgaaagaagtgattgattacattacgcagcaggtcaaaactctcaaacgcagacgagcctaaaaggtaatcactatgttgttccttcagtttgtactttgtagtattgtcttctcattgatcttggtacacaaaaaatcttaagctagaaatagatgtgcttatgcattagtaaagtctacagatacgttttgtgtcataacttgcaaatagttttttttttttttttggttttaagatatgaaaacatataaattaagatttcagctaattagttctatggtgcttgtgttgcaggaaacaaacatatgccggaaggaatagata

SEQ ID NO: 79304 - DNA, 539 bp, Arabidopsis thaliana landsberg
  unsure (1)..(539): unsure at all n locations
tctctccttactaaattatttttcttcctaaatatcaaatagccacatcagttatagtccaaaaagtgaccgaagaaattgactagtattttattttattttgacagcaattgactaaaaaaattatattaagtcttaagttatatgataatctcattttgaaaatgatattcaccaaataaaaaaagaaaagaagataataataatttttttcatgcggtccaataaataattgccattaaagtagacagaataataagcttagattaattaaagatgattaaggaaaaatataaaaattaaacatcattaaatataaagttaaataagtacaaaattgaagaccactcannaagaaagtgttgaaaccaaggagttaagcttctcaactttctccactataattcattccattgtcgtcacctttttgtttcttagactgttaccttacctgtaaagaagagagttaaagatccattgcaaaaaaaaactcaaccttttatctctctgcttcttctaattaagtaatttcaactacc

SEQ ID NO: 79305 - DNA, 570 bp, Arabidopsis thaliana landsberg
gaataactatacgacggttaattactttgtatattattttaaaactgaaaatgtgatgggatgatgatttacactaatttgttactctaattacacagtagaacattaagtacaaagaatttaaacccaaaaaaaattaaaaaaaatagtaaaaactatatgagttgtggcatttgactcactgcatcattttctttttttttgcaatttttctttttatatactcttctctggaactataggtttctgttttgtcacaggtttcagaccaaactttcaccaaattaacaaactgatttcatacaaaactgaacgaaattaagtagatattccaataagagccgataagagcagatcacgataactatactatacccgtgattacagtatagttctgaccaattgtgcatcacgtgattctctagccaccacagtcttactctatacctatagctaatgagagtacgcagctacaccttgcaggtttaaaattccttacttttcaaaaaatcggtttatataatagaagtatcattatatttttgataaaacgagaacttgagatctaaa

SEQ ID NO: 79306 - DNA, 478 bp, Arabidopsis thaliana landsberg
  unsure (1)..(478): unsure at all n locations
ggcaatgtgcccaccacctctgatacgaaaaccgctcggtcttaccgttcggtttctttgtatgtacttatgcagcgacggctggcttcttactcgatctcttggtcgttgcccgcggcttgcgcttcttcacatcaaagcccaattcgcccttcctgagagagactgagacactgcctccttggagcattccctcgccgatcatcatcgatgcgaccggcgtcaggatcttcgcttggatgacgcgcttcagtggacgggcgccgaatttcggatcatatccctgatcagcgagatattcgagtacctcatccgatacatggagttcgatctccttcgcgcgcnnnnnnnnnnnnnnnnncttcacctgcatcttcacgaatatcgcggatcgtatccttcgagaggatatcgaagatgatgacctcatcaagacgattgaggaattcggggcggaagaagctcttgagagactccg

SEQ ID NO: 79307 - DNA, 626 bp, Arabidopsis thaliana landsberg
atgtctacaccggcaccggcctggtatcccaacgtgctgtttttataatgaccgaaatcattgtaagcagcgctaaagttgctggaaagattttggcgtttatccaatatataggaatagacagggccagccattatccggaagttaagattcttggcgccgaacttgccgccaaataacagcggtacgttaaggtcagtaaatttaacgttcgcactgtaatcagtaccattttgtgtagattcaaatttgccccctttactgctcagatacagctcaggttgtacataaaaccctccaccaaagcgggcaaacaagccagcctggtagccggcaactgatgcgtcgtgaaagttatctgactttatttttgaataattaacgcctccttttacaccaagactaaattgcgctttggccgccattgtggccgctataatcagcatagcgcttaataagtaccttttcataatatagatgtttaatttatagatgcggcatgttttataagagtatgccgttaacatggagttaacaatagatgtaccaaaaattttggcagcactatacatggtattttttatatttttgtcgcaaaatatttttactatggcagaaataagcat

SEQ ID NO: 79308 - DNA, 149 bp, Arabidopsis thaliana landsberg
tcgaacgggggaggggaacattgtccaatgagctaaataatgcactacggacttgtgttataaactacaaggggagtccaaagtgcagctgataagacctccacccgaattatgaacatattatcgaaaccggttgggggaagaaaaca

SEQ ID NO: 79309 - DNA, 326 bp, Arabidopsis thaliana landsberg
ttcattctatactactgcaagaacggtggttctgccttcgcaatacagaaagaacatcgatgatctcattacccaatgttaccagtataaaaaatattttattaacccaaacaaaaggagtttgataaaaatctaatttcttgaatatgacacagattctaatgtttatctcataaatgaaggctgaaaacaaatgcaaaacatcaaaattcgcatcaatctatagacaccatttgtccacaacaaaggactctttcagattatggcatgggaaaccaagtataagaaccttggttgggtattgagtagctaccgccactatccat

SEQ ID NO: 79310 - DNA, 510 bp, Arabidopsis thaliana landsberg
atgttcctttcttcttttatggtttactaactcgcgtaatatgagggcgagggatctgagacaacattgcaggtggcgtcgtctcagaagaatccgccacgttcgacggctttgcaccgtgtaaaaccgttttaggaaacacacgtaattgtgttgcaagtaactgtaacaaaatttaaaattatagtaaccaaaattcagaaacatgaaacatgtgaaaacagagtatttactcgatagaatattgacggttacttacgtttgattgtgtaacaaagtgttcgtgggaagcaaaatcgagcaatcgctttaatagaaactgagtgttgtcgtccaactgcgaatagaagattcctaatgttagattactcgatgatatagaaatatgattctgaggttgaagatgaaaattacagagaaattaaacttaccttatatgcctcaggaatatattcgttccttgcatttgctacgagaagactgtataatcttctcagagattgaagatta

SEQ ID NO: 79311 - DNA, 580 bp, Arabidopsis thaliana landsberg
taactatacaagctcatcaaggtttttttttctttaatgtaatttgtttatagtttatcaagttttagttcttatatatactcaaatatgtacgtaaagaaaaaataattcgaatgtactggatttaatcattgggatggtaaagtttcgaatggaacactactgtacccatatctctatatccctttttatgtacctgcaaccccacacacacatatatatatatagtatgggcattttagttccaatccggctagagattcattctgattatgtataatatttataatgtttctagtatttagaaatttgatatttctgtgtaaaatttcttacacaatattttttcttatcattagattttgtaagcaaatacaaaccttaactagctagcttaatacattatttttgagttgtgtagaagaattccgaaattccacatatgtaaatgcctaaaatagttaaaaagaaatagatatttagatcattcgctcggatacagattggatacgaatatctgaattttcttaagtgtttgatttgtaccaatcgttagtatttactcatacacgcatggatc

SEQ ID NO: 79312 - DNA, 268 bp, Arabidopsis thaliana landsberg
aagaaaagcagacactggtgattagtcattagaagaattaaagagctctttccaaattttaaggaagagcagtaacgagtttttttatccacaagactgataaaacacaatgtatgaaaaggaaaatagaaaccaaacacaactttgatacattagcagtacagatatttacaatgccgaaggacataacattctagaagaccaataattagtccagataaatgcaataatatcccacagtgtttcgagaagagagtgttttaacaaa

SEQ ID NO: 79313 - DNA, 523 bp, Arabidopsis thaliana landsberg
  unsure (1)..(523): unsure at all n locations
aactnnnnnnnnnnnnnnnnnnnnnnnnnnnnnnnnnnttagaaattatccagcctccgctgagggcagcnnnnnnnnnnnnnnnnnnnnnnnnnnnnnngcggctggaaccgtcccttctgccgctaagattaacaaggtatttatcgtcataattataactcactctgccaaaacccgcgttgtatttgtaaacagaattagtgacagaagatacagtgaccgtggccgccgacttaatgtcttccaaaactaaatcgctattgtaatccttcccttcctgcattaatccgttattattggtctgtaaaatggtggaacctaataaaacctccagtttgtgtttaccaaatgattgctggtaatggagttggggttccatttgccaggtgctggtnnnnnnnnnnnnnnnnnnnnnngttcgttgaacataaggcctggaagccggtgaaactgatgacaaggggaaacgtgtaatttgattcttctgcatatgggtaaacccaaaactggattgcacact

SEQ ID NO: 79314 - DNA, 576 bp, Arabidopsis thaliana landsberg
cagcgcccaggcgtgcgccttaaccactcggccacctcacctgcgcattcgggtcgggggtggttgaaacccccggcgcgggaaggcgcgcaatatactcagggaccggcgggtagcaagcacgatccgggatgaaacggacgagatccgcgtctatatctccggccgaagaattcgcgccagcgaaagggcccgccttgttgctccagaagaccctcgagatgccgaccatcgactcggccctgcccggccgcccggagccgattccgaccacgagcgcgcacttcatcaacggccatgccctgaaggggccctatcccgacggcctagagaccgcggtcttcgccatgggctgcttctggggcgtcgagcgcgtgttctggcaggtccctggcgttcatgtcaccgccgccggctacgcggcgggcgtcacgcccaatcccacctacgaggaggtctgcacgggccgcaccggccacgccgaggtggtgctggtggcgtacgacccgatggccgtcacctacgaggcgctgctgaagatcttctgggagaaccacgacccgacccagggcatgc

SEQ ID NO: 79315 - DNA, 580 bp, Arabidopsis thaliana landsberg
  unsure (1)..(580): unsure at all n locations
cttcggcatgcttgaactgcgccgtgctgctcagctccggtctttggtagtccgggctcagggtgcaggcgctgagcaaggcgacacacaacccggcgccgagcaggcgcgagccacgcccacgggtcagcgtctgcagggcacggtgaagtggggtctgggcaaaagtcatagcggggtttccagggcggcgtcggtgcgcacgccacgccaacggttgaaacggtgacgnnnnnnnnnnnnnnnnnnnnnnnnnnnnnnnnnnnnnnnnnnnnnnnnnnnnnnnnnnnnnnnnnnnnnnnnnnnnnnnnnnnnnnnnnnnnnnnnnnnnnnnnnnnnnnnnnnnnnnnnnnnnnnnnnnnnnnnnnnnnnnnnnnnnnnnnnnnnnnnnnnnnnnnnnnnnnnnnnnnnnnnnnnnnnnnnnnnnnnnnnnnnnnnnnnnnnnnnnnnnnnnnnnnnnnnnnnnnnnnnnnnnnnnnnnnnnnnnnnnnnnnnnnnnnnnnnnnnnnnnnnnnnnnnnnnnnnnnnnggaacagccccagcagcgagatcaggctgaactcgccgtcggtgacgtaca

SEQ ID NO: 79316 - DNA, 431 bp, Arabidopsis thaliana landsberg
  unsure (1)..(431): unsure at all n locations
nnnnnnnnnnnnnnnnnnnnnnnnnnnnnnnnnnnnnnnnnnnnnnnnnnnnnnnnnnnnnnnnnnnnnnnnnnnnnnnnnnnnnnnnnnnnnnnnnnnnnnnnnnnnnnnnnnnnnnnnnnnnnnnnnnnnnnnnnnnnnnnnnnnnnnnnnnnnnnnnnnnnnnnnnnnnnnnnnnnnnnnnnnnnnnnnnnnnnnnnnnnnnnataccttagactatatagcacattgcatggacataggtgatacctggttactgttaaattgtatactggaacctaagtggtttgtacatgatgcatcttgttatgtcttaactggttctagcgactaactacacattgggcatacggggtacgagcttgggtcatgagacattatcagtgctaaaagcttcaataaaaaggaagagggtaaagttttagcattta

SEQ ID NO: 79317 - DNA, 294 bp, Arabidopsis thaliana landsberg
ccattacttgtggctacgatttaattaagtggaaacgactcttttcttaattacttccctcttaagcgcgttatatgcacttccctactggctaatgtcaactctcaagtactaatcatttttattttcttgttacaaaaaatccattaacttccgaattaacaaatttactacaagctttatgtacaccaagtagaaaattgtaaattgaaaattccagaatttaaaactttgaaaatcacaattaccaacatattacaaactaacatcttctgttaatttgtttttgaaaag

SEQ ID NO: 79318 - DNA, 163 bp, Arabidopsis thaliana landsberg
tttgaccgaccagcgcagcagtcgcacgctgtcgttgacgccgcgctatggaaacggcatgcgcgaagtggaagttctctaccgttggagcggcgcgccggatgcacccacggtgatcgtgcaaggcggaatatctgccgatcgcaacgtgactgttattacc

SEQ ID NO: 79319 - DNA, 302 bp, Arabidopsis thaliana landsberg
ttttaaaagaccaaaatttgatttggtttatttattcttcaaatctcaagatgaagtaacatcaggtcttctatagtgcctaaagcatatcagaatcagacaatagcatgtatgttccacaataagcatcactgtgattgccaatggtaagtaacaatgtacacaaataatgacaacaatttttgtaaagaaacagctctcttatgaatcagagagaagaatttggaggaaaggaaagacgaagaaagcctaataattcaaccaaaattattgtgaatagttatttagtaatactctctaag

SEQ ID NO: 79320 - DNA, 538 bp, Arabidopsis thaliana landsberg
  unsure (1)..(538): unsure at all n locations
cttttacgttgggccaacggtgagcagttcaagcattttgcagattatcttaaattgaaatgtgaagaaatagacatggagaaatattttaacannnnnnnnnnnnnnnnnnnnnnnnnnnnnnnnnnnnnnnnnnncgattccccgcggttaaaagaaaatttaatgagcaaaatcaatgtaagtacctgtaagatcagatttgactccaagattaacagtgtagtgaaagagaataaccgtttcatcattaccttagatagcggtgaagaatatgaaaccggatttatcctaaatgcatcatatgcgggtactaaccagatccacaaaatcatgggatacgagactttgcccattaagtatgaattgtgcgaggtcatcttgtgtcaaacttccgataatatgagcaatttaggcattactgtgatggacggtccatttttttcggttatgccctttggttttggcgggtatcactctttgactaccgtaacaagaacgccccgctgtactttatatgatactttacctactttta

SEQ ID NO: 79321 - DNA, 539 bp, Arabidopsis thaliana landsberg
  unsure (1)..(539): unsure at all n locations
ttgctccatttggattgaaacttctctaattgcatgacttatccaaaacaacgtatctagacacattctgccgatatgaaaatattatcaacagttttttttatttttattttttttataaaaagttatgcatgtttagttttttacgaatttgataaatgacttactaaaatcccaattaatatcatatttctgaaaatcagtgtgtttttttgtttgtaaaccatatttgactactctacttgcacatttaaattttgtgaaacttgattgttaattaagaacgcaaaatggcgaatggataacatcatattttcgtaaacataccaaaagaacatgtatatctctgaatttcggaaaacaatcttaatggtagattccacgtaatagttagtctcnttgtgttcttacttcctcctcgaactttgcaacttggggcgattttttaataaattgttagtttacaaagtgcatagtccaaatggaccaaaacgttccaattccttgtgttcttagcattatcggcatgcgatataaaa

SEQ ID NO: 79322 - DNA, 570 bp, Arabidopsis thaliana landsberg
  unsure (1)..(570): unsure at all n locations
ccgaccagcttgagcagcttcaatctcggccacacgatccaatcaagtatattcgtttatgattaattgttcatcattttcactagggtgcatcaatttgtttgctaagctagggttttgcaattagttgatttctggtttttgtttcactgcttaggattactcttctccccgacggtatcgagaaagaaggaaggagatgggagacctnnnnnnnnnnnnnnnnnnnnnnnnnnnnnnnnnnnnnnnnnnnnnntgctctggtttcttcggttaatcatgtcttgtgggacatgaataggcccctggaaggtgattgttccttagaggttttcggatttgacagcgaccaaggccgtaatactttctggcattctagcgctcacattctaggccaggctctcgagcaggagtatggatgcaagctatgtattggaccctgcgaacccagagatgaagtaagagctttgttctgtgtttttttcccttaattatgtttctttggctaaaagagtaaaaaaaggaggagtcaatattgtttcnttcttggtatttcatctgtaatgttgc

SEQ ID NO: 79323 - DNA, 525 bp, Arabidopsis thaliana landsberg
ggccgtgagccatgttgctgcactgttgttgatccacgttggagtttctcatctatgattcttacaatacctttgatatggaagctcttcccaaacttgaaagtggttggttcctgaactcatattttttagttacggatatacgctaatcaaaatatatgtaaaatcgttgaggctaaatgatagcttttggtttcttacaattttgtgtttgaccctgagctaaatattatctcaactgtgagcatctatttaaactttggtaaactcatagtttcattgtccaggtatttgccaacccgagtctaagtcaacactacattcaccagatggcttcctgtattcaaaaggatacctgtgttctcccaatggaaacaagcccagaattccctggttatgcttgcctacttggtaacacgttggacactgcaaacgtggtgttgtcacagcctgaatgttcattggacatggtaggttccttatgtagtcgatttattgtatttgggtgtgtttgtgttagctact

SEQ ID NO: 79324 - DNA, 529 bp, Arabidopsis thaliana landsberg
  unsure (1)..(529): unsure at all n locations
gattttgggtaatggattataatctcgattctttttgaagatttcttgaatttgttcgtagtaggaagattttggtcttattttcttcttgggctatgagattacgtttgatgtttgttacctttcatggcctcattgcgattgattaaattcgatttatgatgattagggatttgtgtaaaaaaattcggattcgccgatgtaacaatttcgggttcttcttataattggaattgaattagactgaattaagttagtttttttgccgttcaatattatttgcgaaatgtgtgttttcgatttctagggtttctcatgattgggactaacgaatgtatcaatttgctaaaaaaatttgtcttcgtttgttctgcagctcgaaggagaaacccactctcgggttagtgatacctcttctttntgagtttttactaggacaaattttgatgttgttagcatttctttgtatacttagaagctattcttatgtacgtgcagaggtacgcngattaagacccgcaaacggaat

SEQ ID NO: 79325 - DNA, 624 bp, Arabidopsis thaliana landsberg
aaaaatagttaaataatttgtttaaactcataccaaataaaatataaaagcagaagacttcaacttgggagtagagccaagatttgcttcttaggtttataataagacacagttacataactagatttagagttttcaactctattgacaaaaataaaataagcaattctctcaattaaaagaaaatattaacaaaaaaatcaataaaaaaattaagggttattcggaccgcttcgaatctcgtcagattaagccccaaaaatccttaagtccaaacgggattagcctgaaaaacctatttttttttggacttatatttttaaggtcgaatccgctattttttaagagtggactgggccgatatacaaactttggttctaatttacacgcctacatttaaccaaacagattaattcaaaataacaaattagcgcaacgtactttatcttattaacatgaacaatgtactttttctcaacataaggagaaaattaatttatgttcagtaaacatcataacaagtattgtataggataatggcgagatccatatctataaatatatacaaaaatcggagctattaatagatattaatgaacccttcaatcaagaaccatcaacaat

SEQ ID NO: 79326 - DNA, 500 bp, Arabidopsis thaliana landsberg
  unsure (1)..(500): unsure at all n locations
ccgactgcacaccatccactgtttccgcgatcttctgcagtctttccgctacttcattggttctctcgtgagaggagcccggaggtgtctggatcaccgcgtagaacatgccctggtcttcattgggaataaaacccgatggcacatgcccattcaggaaccaggtgccggcgcagaatgcgatcagtataccaaatgtgatcaccctccggttcacaattgctctcagtagtttctggtacctgcccgtaagcctgctgaaccacctgttgaagccatcaatcagtttatcaaatacatttttcttcttcggcttgccatgatggttcnnnnnnnnnnnnnnnnnnnnnnnnnnnnnnnnnnnnnnnnnnnnnnnnnnnnnnnnnnnnnnnnnnnnnnnnnnnnnnnnnnnnnnnnnnnnnnnnnnnnnnnnnnnnnnnnnnnnnnnnnnnnnnnnnnnnnnnnnnnnnnnnnnnnnnnnnnnnnnnnnnnnnnngatg

SEQ ID NO: 79327 - DNA, 572 bp, Arabidopsis thaliana landsberg
gcgcaatgacaaggtggcgcacggctggcaggtgttccgtgacaatgtatagagtggcgacatcctgtacgtggtcgatcagggccagatcgtcaagggcggtttccagtacactgagtacgcctatcaggatcgtcatccgtgggtcgtgatccgcaaggatcggaccagcgaacacggcaagccgagcaagatcgagcgtgccggctgggtggatggcgtgttgacgctgaaggaagtcgtggccgatggcaagaccagcgaactgtcggccgacgaggccgccaagctgaagacgcaggccgaagcgatgtttgcgcaggcaaagaaggcggtgaagtaggcttcgcgcttttgcgcctgatgcgaaaggccgccttctcgggcggccttttccttgatgtgtgtaccaaggttggcggggggtaccggcggactggctgaaagcaccggcaccgccagggcggatgccggcgccctggatcagaacgcgatcttgacgcccatgttgaggttgttcgagcgttggttgctgtcgccgaaacgcccctggtaggcaaaccatgtgctga

SEQ ID NO: 79328 - DNA, 143 bp, Arabidopsis thaliana landsberg
gagaaaggcatgagacttagtaacgcccgaaatactgagatcggggccatgcttactttttcccaagggagcttgtatcaagtcgggagcgggactaccatacagttttaggcataaaaaacagcctggataggaacagaaag

SEQ ID NO: 79329 - DNA, 238 bp, Arabidopsis thaliana landsberg
acctgccatcatagaatgcatgaaaggtccgtgtttagagaccaggtgacaaggaactagtgtcgagctatactggacaaagctgatcaccgcatgacgaacgactctgctcacatgtgcatcacccatattaacacatgctataacgactccttagacaatcattgcagggtacgctaccaataaagctgactgctatatcacaagatcaagcggcatcatctccatcatcacacgg

SEQ ID NO: 79330 - DNA, 573 bp, Arabidopsis thaliana landsberg
aaccatattgggcaactaatatgtactcgacaaatgatttacgaacctttcataaaccaaaatatagatgggaaaacggaaaatcattcaaattcttgaagaaaataactaataatttgacaattgaaagtatggttgtcttcacattggatgggtagtcgcatttgacaattgaaacacggacttgtgtcattgtcatgtcacgtgcaacgtgaaacatcccaaacattatatatttaaaattattattatcggtttcaaggtccgaaagcaaaacagaatataaaaggcatgcaaaaggtggtaatcattcaccaataattgcaacatacacccacccactcatcaaaactattaaatgctatcacatatacttattttgcaaacaaaacttatatttatataagctgcaatagatttacattctaaaaactagctaatcatatagtcaacacaaactttgattagtttcttttacatgtatataaacgttcaaagtttttggggctaagatgatgaatcatcttatgataatatgtatgcatatgttaatgacataaagagagatggccc

SEQ ID NO: 79331 - DNA, 519 bp, Arabidopsis thaliana landsberg
  unsure (1)..(519): unsure at all n locations
gaccagcccggatatacccacctatccgaatattgccgatgtgagcggggcgggggttattttgatagcggtggcatcgctggcatatgccatgtcgaaggatatgcacctggcggccgaaatggccaatatcgcaggcggactggtatgcgaagaagtgggcacggtggctatcaacaaagagaaattcctgagcgagtgcgagttattgcttgcgcagggtgattaaatgcggtcttttacgaccatcatgcccttattccggcacccttggcccccgcggcaaaaaaatcctggacaggctatgctggttttcccggaaaccttatatttgaagagcattctatatgcgcacatgagaaagttgtaagagctacccccggggtagctcttcttttatgcctattttgcagcagcatgaaaacaacagcagttattgtggcgggcggcagcgggcaacgtnnnnnnnnnnnnnnnnnnnnnnnnnnnnnnnnnnnnnntggcaaacctgttctctgg

SEQ ID NO: 79332 - DNA, 593 bp, Arabidopsis thaliana landsberg
  unsure (1)..(593): unsure at all n locations
cactctatataggaatatctggcggtgagaaaagaagggtttgcattggtcaagaaatgctgatcattcctannnnnnnnnnnnnnnnnnnnnnnnnnnnnnnncttgattcaaccactgctcatcgcattgtgaccacaatcaaacggttggcttctggaggaagaacagtcgtcacaaccattcatcagccatcaagccgcatctaccatatgttggacaaggtggttttgctatctgagggaagtcccatctactatggcgctgcctcttctgctgcggaatatttcagatctctaggattctccacttccttgacagttaacccagctgacctcttacttgacctcgccaacggtaagctacctttctctttaagcttctagaagatgaggaaaaaccaaactcctttctaattcatgaaaacttggcaaacctgatgaatcccacctgatactcagaaggagacctcggaacacgaacagaagacagtaaaagaaaccctggtttcagcttatgagaagaacatttctactaaactgaaagctgaactatgcaatgcngaatcccacagctatgaatacaccaaagct

SEQ ID NO: 79333 - DNA, 594 bp, Arabidopsis thaliana landsberg
catgatatttttacgtcgaaactttcttttaacatgatatggtgataaaattattcatttagatgtttagtttgtgcagaaaaaatacaaacgatggaactattaaagtagaatgaaactgatagtaggatgatgcaagaatcggatccgatcatactaatatcaaatagatatttgattttactttagcataacgataataagattaggcacatgttgttctttaggtaatgcctagatgttctaagcaaattggtcataaattcaaatacgtacggaaacagtacccaagtgatatatctacttatctagcaaccccctcctcctccaccaccatcaccactgcaaccgccaaaaacgccacctttacagcagcaacagcaacttgaatccttcttcttttccttctttttggagcaagcaaatacggccatggttacaagttacaacgacagaagaaacatgaaaatcaagaacaaaacacccccaaaagcagcagcttctttcatgtcaaactaactgataaagaaacctctcactctctctctatattgttccttaaatttctcttcactcatatatatgcatgtgatc

SEQ ID NO: 79334 - DNA, 537 bp, Arabidopsis thaliana landsberg
cttggatcatacatatcaagaacattagaaacaccaacttcctcgactttttcaagcactctatgatcatctactactacttctatattatctatattattgttatcttcatgagcattagaattagaaccaccaatatcacctaagctttctttttcatgcgtttttttgcaatgaatttatctaaagctcctttttgagattgaataaattatttaatatgtttttttttttgccttttatcatagccagacatatttaacacagatttaatacccaaaattcaaatacaaacaaaatcaaaataatctaacaaagaaatcgtaagaacaaaaaaccttgataatggaggaaactatataaaaggcttgaagcttgttgaactgagaaatctcactattgctggagttgaaccgttgagaattgatgggaaagagggataaatcaattggtacaaagaattttcaagagaaagaaaaaatgaatgcaaaacacaagaactattgaaattgagaaaatgattgatttgttaagaca

SEQ ID NO: 79335 - DNA, 509 bp, Arabidopsis thaliana landsberg
  unsure (1)..(509): unsure at all n locations
agatctactgttacttcgttttgaataaaatctacctttttgagcctgaactgctggttggtctcattgatggaatacaacctgggggccagcgggtgcggtaaatgtttgaaacttacattggcctggtccgatccctcgctgatcaattgggtatgcgaactgaagaaattctccttattggcatattgcagcaccagcgtgaaattacccgggatggcattcctgtaagtactggaagtagccgtggttttgtgcgactcggtaaaagtaaggttaggcgaaccactggttgcctgtacccaaaacccctggtgtggcgcaatttgaacgcccgaaccggtagagaatannnnnnnnnnnnnnnnnnnnnnnnnatagatcatgatactcgatgctatacctgttgaagatgcaattaaattatcgagcgaaataaaagaggcgtatggatttccaaccaggttccagccgtcattgaccaatgtaatggccgaagagacatttac

SEQ ID NO: 79336 - DNA, 485 bp, Arabidopsis thaliana landsberg
  unsure (1)..(485): unsure at all n locations
gattaaacaacaacaccaagctaatcagccataacatcatgcatggtctgacctaggtttcgcattttcgtttcttttggttcacttggtctgtggttgcagtgcctcctgcttgagtagtccctgaccttgggcctgcagactggaaccattagtgggtttctgcggaaccatgaaaggcnnnnnnnnnnnnnnnnnnnnnnnnnnnnctccagagactcagtaaaaactctataagggatggaacagttagccatgctcccagacagaaataggtgcctgacaccacataggccccccaactccataatcctgtgactatcagccatgaagacaatgtcccaagctcctggtatcctggctatgactccacccccacagttaacctggcaatagccatgtatgttcctactcagatacctggcaactgcaagatagctcagcccactataaaagtggctgcttggactctgtctctgtctctc

SEQ ID NO: 79337 - DNA, 308 bp, Arabidopsis thaliana landsberg
ctcttggaatctttgatgaaatgaggagaataggttttaagcttgatggtgttacattacttgttgtattatatgcttgtagtcattcaggaatgattgatcagggcatggagtatttcaatagaatgaaaactgtttttggggttagtcctggtccggagcattatgcatgtttggttgacttgttaggtcgtgctggccggttgaatgcagctttgcgtctcattgaagaaatgccaatggagcctcctcctgtggtatgggttgcttttctcagttgctgcagaatccacggaaaagttgaactc

SEQ ID NO: 79338 - DNA, 583 bp, Arabidopsis thaliana landsberg
agatattcttttcattgacgagatccaccgcctttcaccggtgattgaagagtacctgtacagcgccatggaggattataccattgatattctcatcgatagcggtcccaatgcccgcacggtacaattgaccctgaacccctttaccctggtaggcgctaccacccgttcaggactccttaccgctcctttacgcgcccgttttggcatcaactcacgcctcgaatattacgatgcccaaaccctcaataccatcgttaaacgcagcgccattatcctgcaggtgcccattaccgatgaggcttcggtagaaattgccggccgcagccgtggtaccccgcgtattgccaacgccatcctgaggcgggtacgcgactttgcccagatcaaaggcgatggaagaattgacctggacattgccaaacatgcccttgatgcattaaaagtggaccagcacggtttggatgaaatggacaaccgtatcctttcaacccttatcgataaattcaaaggcggtccggtaggacttaccaccattgccactgccgtgggcgaacaggcaggcaccattgaagaatttatg

SEQ ID NO: 79339 - DNA, 285 bp, Arabidopsis thaliana landsberg
gagttcgacactataacggtaatcaagaatgatatctcaggatttttcactctcatatagtttcttttagcccttacgtctcaagggtgaacccgatcgaggctgttgcttatgggggggccgttccggtgggtttttgccacaatggctcaacccctatcacgtgtttcacacatacacgggtgccacccgccaatagaaaacaacgattaagaaggctgccaacagattgacatatgaggaatgaggaggggcatacttacaatccttcttcttgatccaact

SEQ ID NO: 79340 - DNA, 186 bp, Arabidopsis thaliana landsberg
ctgcatgcacacatatataataatatgtatataaccattacgaatgccccatactgtttattaagtatggtgacgaacgtaatgataacttgatggctctactacatttaaaggaaaaccaacaatcaattctaattgggttgttccttaaatttaaaccaaaccaaactcttcttaaaggagctt

SEQ ID NO: 79341 - DNA, 499 bp, Arabidopsis thaliana landsberg
  unsure (1)..(499): unsure at all n locations
gaggttttgctttgttgactcgtttgacccaaatgagagagagagtgagtgagtttaaagtgcatgtggtgtgtttgtagggccgcttgagaacacccgtaatcctcggcttcttttgacgattatctatctttatttgttgcctatacgtaatatatatggcaagttaatagtaaaaacaaaactgaatagtgtttgatttctaggatcgaggttttctctggggtttgcaagaatcaagcaccgttcgatcttttgctgttgggtgatgtgacggtggtatgctgagagattgctacacgtgggtgttctacaccaaaataatgttgttttaataagttgatgtatttgaaaaaatacaataggatctctcataaagtgaatacttctagtggtgagtggacttattctaggacatgaaagagaacaatgctaatcattcctttgagtgctaatactgttttcttatctaccatntacaacttctgttatataaaaa

SEQ ID NO: 79342 - DNA, 479 bp, Arabidopsis thaliana landsberg
  unsure (1)..(479): unsure at all n locations
atggttggtaactgtataggttcctgctgtggatcgtgcattgtttatttcannnnnnnnnnnnnnnnnnnnnnnnnngcctgcattatcggctgaaaaaatacccgcgctggctgnnnnnnnnnnnnnnnnnnnnnnaaatcctttctgcgcacataccgggcttacataagagaagttggcaacaggtgtggtagtaatggtaatattcgatgatgaactgtacacgcaggctcccgatacagtaaatgtgatcgtgtatgtgcccggagtacttgcagccacattgatctcaccggtagaagtattgttgaataccagccctgcagatgatgcactgaaaacacctgccaggtttcctgcaatcgcaggcgtgggattggttcccgaaatacagaatgttcctgatgcatacctgaagctgggatatattttttgcagtaccgtaactgtaaccggggctcttgggccggtacaac

SEQ ID NO: 79343 - DNA, 601 bp, Arabidopsis thaliana landsberg
cagaatatgttacatagtaagccaatacacatgcctgtagccacgccaaacctacccttccctgaaaacactcacaacaacataagccactcaaaaccaggtacacaacataaaccactttgtcttaaagtcttcttcttagttttataaaattagctatcttaccacaaaatatccaattatgaaagcatagagagtcacttccagggcatagtccttgtgtattaacaacatccatatcccagcagttaatgaagagacagctccaacagaaacagcactgagaaaacagaaggagctagtgagatccgagtcaatcagtttctccaaccctgttgtgcttctgaacttcttccaggtatcactcgaagcctgcatgaatcctttatcataggttccaacatgtacaaagccccatctgtttccaagtgtaatgagtttgttagcaatggtagagaagcaatcagcacctgaatacatgacctcatcgctgctccctgacattagattaacacttcttattgatcctcttatgaatacgatgattggaacatgcgtcgagccaacgcagatgctcccagtcaagtgtttcatagtgatg

SEQ ID NO: 79344 - DNA, 556 bp, Arabidopsis thaliana landsberg
ctccatgtgatatgaaccaaacttaaaatttgatcctgtactcgaggaggaacctctcgaaccacttgttttcattgaaagaagcactatcaagttgaaggggacattcatgtttgggcaagaatgaattattatccccactgcacccaaccggttcaaacccctcaactagtattacaaagcttcaacatttacattaacaattggcccaaggtgaattgcccctcattatggaacacttgtttcattctggagcaccatcgaatggatcgcacttgcaggttgtacgaagcacaaggtttaagcaatgtatgagaaaggtccattttcgaatatactatatgatctgtgtacattctagtcataatgtttatttgtcaataacttcagtattcaagaagggacgtttcagcgtttgtcgaggggcctttctcatttcattcccctcatcaatgaaagtgtctggcgtgtctgtggtcgctggtttcattttctcttctcgatatcattactagtatgtatacatcatgcaatagcttcctggatcaagttggat

SEQ ID NO: 79345 - DNA, 504 bp, Arabidopsis thaliana landsberg
  unsure (1)..(504): unsure at all n locations
ctgtacctgcggtgacgagaagagcttcatcagcgtgcaatatgccgcggacaatgtgttgatgtactccgggcagggcctcaaatgacccgtctgcacctgttgctggggttgtgcctggcgatgctgctgggcggctgcgcgacctccgccaacgacccgctggcgccaaagaccgccggtgacatcgacctcaagcgttaccagggcaaatggtannnnnnnnnnnnnnnnnnnnnnnnnnnnnnnnnnnnnnnnnnnnnntccgaggcgcactacaacctcaaaccggatggttcctacggcgtactcaatcgctgtcgcaccctgggcgatgagtggttgcgcgccgaaggccatgccaacatccaggagccggggcacaccgacaggttatgggtcgagttcgacaactggttcacccgcctggtaccgggcgtggccaagggcgagtactggatcctctacgtngacgagcactaccgcacggcggtggtcggtagc

SEQ ID NO: 79346 - DNA, 476 bp, Arabidopsis thaliana landsberg
aggtttagttagatcatacaatattcggatgttattatgtgtttattcttttgtatgaaagattcataattcttttttgctttgtttgattcatctaaaacataaattagggaatagagaaggagatgaaaataggagcaatgaaattgttgtccaaatgaaagcaagagtaaagcgaagcaagtcaaaaaggggaccccagaaaaaggaaccttataagaagccaccttgcagtcccccaactcatccagcataacaataagacatcatcaaaaaaaaaaaaaaaaaaagattaagacatcatcattagcctattggtaatttcctttcttaattagaaatctttattttaatcaaacaactaaatatgtcgacacattgagatttcatcccaaaaataaaccaggaaaatcttctttttctatggatgtaaatatggctcttcttaatttttgtaatcattgaacatagtcatt

SEQ ID NO: 79347 - DNA, 289 bp, Arabidopsis thaliana landsberg
caaccctgaagagagacgaccatctgggagcaggagcggcttttcattttcagaagccacgggagagaagctagaggacagggcaaggagagaaccagatgcggggaggccgacgagacgaggagaggatgagtttcagtcgagggcggcgcgagaaggagctgaggggatatgcatcggaggggggggggaaggaaggtgagaaggccacagatggatgaggggggagtccagcgggacgccgatagtagttgaagaagtggaaagccgaaagcaccagggaagggag

SEQ ID NO: 79348 - DNA, 302 bp, Arabidopsis thaliana landsberg
gcatggttgggattgatgaaaccgtattcctagtgatctttcaaataatcgaaaaattaaaaagaaagagtacccctttgatcgagaattgagctggccggagagaggaggcaaagacctaaactgattccttttcgatcagatgaaacaaattaaccgacgagagagagagtaccgagagaaggctttaaattttcaacttttaatataaatatagaaactcattaattgtgcaatttcccaggaaagtgaaaaacttcaaaaggattactatttgttttctcgtcggtgataaaaagaaa

SEQ ID NO: 79349 - DNA, 582 bp, Arabidopsis thaliana landsberg
  unsure (1)..(582): unsure at all n locations
ttaaacaccgaatttaattctaaactcaatcgtattaaatgagaaacgtaccattactttaaaatttaaattgaaactaaactaaaaatccggtaaaagttcttttactcatatcattggaaatagtttttgaagcaaagtaaaaaacactagaatagtgtaactagaaggaactactaatataaattttggttgctggtgagattctttttcctccttccccagcggacgtctccgtctcttcttctgcttctaacttgctccaaattttcatttcaatttttttgagcggactttaaaattctaagttcgcttatgagagtaatggcgtagcaaaatctttatctaactcttggctcttgtcttttttgtttgtttgtttctcaccctacgccggatcttgcttcttcgaacttcttcnnnnnnnnnnnnnnnnnnnnnnnnnnnnnnnnnnnnnttttcttgaatccactcaaaattttattggaaagtttgagttggttttattagatctgtatctttagagggctcaaaaattcgtcgagaaaaccagtctttggaagtgtagcattttggattcgc

SEQ ID NO: 79350 - DNA, 489 bp, Arabidopsis thaliana landsberg
tctaggttgcattagacggctttgtttgctgctcagtgttggaagttgtaataaagctttattgtttattttagcgattaactttgctgggtaccaaatcgatttcacgaccatcaactgtgcaagcacggcaaggctgtgaaaaacaaagatagcatttgtctactgtcaatggccgtccattctgttagcattcttcacaggtctgaaacagtgctggacacctttgtcacgaccatcttctcaaccaagtgctaatgttgctcagacactgtgttaagacagcctaaggataattatagcaattggcaaacacgtgctctctctccctttgatggtcaagtgcttcagtacacagacttgagctgtctaccgacatccaaggttagttagttagttaagcagagagactacaggtagtctaatttatagaagacgaaagaaagagtgcctgagatgaggccaagtgaagctaaatatatgaagatg

SEQ ID NO: 79351 - DNA, 605 bp, Arabidopsis thaliana landsberg
cggcacgatgtgatgcgtgaaatgtcagttagagacggataagtagtctcaaagtaatgaatagtagtctaatcgaaagtgaaaatgaacgttaaaatgttaataattatgtggttgatgatgttagagtaaacatcatcgatgaatacggcacaagggatgttgggaagagaaattaagaaaataataaaataaaataaaaagaaagattgattatggaaaggaatggaagaggaaaggagggagagacaagatagaacagctcttatgtggggttaatcaaatagtagttttgtttggttttttccttaacctaagtaccccacgcaccatctttatacgtctgtctatgcatgcatatacacacgcacatatgcattcatgtgtacataagctatctaacatataacaggtctgttatatatatgaactttaaataaatggaaaacaacaaaagggttttaagaaattgcatcattagattttatatttgtaactctctaatataatgcatttggaattttttgcatcacttccatttgatatgataccaatcaatcggccaacatagcacgagaaacccttctctcttagcgagaatttta

SEQ ID NO: 79352 - DNA, 539 bp, Arabidopsis thaliana landsberg
attacataaatttttgtaatgaataaacgtgttattataaaaaacaaattaatattttttataagttttaaccaaaaatatcttggtaccgtgttttttagtcaacccagagaaaacatcacgaacggctatttttaaaaattaaacaaaaaaaaattaagttctttgttatttctagaaaatggggaagacatgcatttgttggaagcacgtagtttcgatatggacactctcccacatgattattctttaagaactatacaaatcataaaatatcaccattcattaataacttaaggtgttgtaagaataataaagtcagaaattataactttagcactatggatataagaatacaacgaataatcacaaccataataaaatctctgtctgacttttgaatttggaactaatttagaattattttttgttgacagcaaatctttataatttaaagatattaagttaacatcaaatagaagtatcatactataactatagtcatattgaattaaagataacaaattaccataaaattt

SEQ ID NO: 79353 - DNA, 633 bp, Arabidopsis thaliana landsberg
taatacatatatttaagattttagcatagttgtataatgttgattcagtgaaagtaacaatcattgtcgaaaatagtaccatatatcatcgattaaaaaagaatcaagtaacaataatactactaattatattttcttcttttttgccaaatggaaataatactaatcatatattctgtacaaatttaatattggaaaattgcatatcgttcctattaatataaactttctcattgtaagagtatacgtcaaactattccatgaaagtaattcaaagtatagatgaatctataattctatatatatttaataatgaagatatataatataacaattgccatgcgtatgtgtattatgttataataagagcagtgtatattttagtttcactaagacctagactaagaagagctgggttacccttttaaaaaaagtaatttggaaaagaaaaacattaacatataaaataacctttgtgcagaaaggatatcaaagaataatataattgtgattctgtttttttgttataagacatttttgaaagggacatcatatattatttcaaagttatggcccaagacaaccatgtgtcactaatatggagtaatctactgtatttaattatcctcaaaa

SEQ ID NO: 79354 - DNA, 538 bp, Arabidopsis thaliana landsberg
ctaatctgttttgaatcttaggcgaggataaagatagcttgcttggggattgtgacacacaacctgttgatgacaatgctttgattaatgatcagtatatggagactcaggtcatggatactgaatgtgataatgaagaatttcttctttgtaatgaaactcaagcagttgatttgggatttgaaaccggagaagaagtacttgtagaggggaaacagttacttgaagcttctgatggtttggctactcaggttttggatctttgtgatgatgaagttgttgtggatagtgatgatgatgttactgatgtgttggagggcaacagtgatctctctgatagtgatgactcgggtagtaaagcggaaactgtgttatctagtgaagagaatagacaggatgctaatgaaaaggttaaatcagcagttgtctttgatgcttggtcgaacgaacatggagtttctggtgagtttcttaccaatattgcagagtttgttaatgaatattaaagttctcttctactttctgttgaaattttaag

SEQ ID NO: 79355 - DNA, 220 bp, Arabidopsis thaliana landsberg
aagacccgaggcaccaggcaaaccaactaaagcaaaacccacaagtgtacagcaccacacgccccaggaccggggccacaaatggccgacaaaacaagaaaacacaagttagcgaaacaatccacaccccgaaccaaatgaagcaaaactcaggcacaccgacccacaccagtacttaggcgagctcccaaggaagaccaaggcaaacccaaaaccacaa

SEQ ID NO: 79356 - DNA, 584 bp, Arabidopsis thaliana landsberg
aaaattaaagcgcaaaaacccaaatgtcacacaaagcatatatggaaaataaatgttaacttttttgaagtatatacatgcttataagctactctttgccaacaaattcgcaacaatgatttctagaactataatcagttgatgggggaagaaaatgttgaaagttgtacaatgaatcaagttaaagttaaaatacttttttcccgattctctgcaggttacatatatgtgtatatacacagtatgtgaatgatcaaaaagaagatttaatatatctaagcatgcagacaaaaacctattgctaaaaagatttgtaagaaccggagaccgtttaccaaacaaaatatgaagttgaattcatcccatttgtcactcgattagacaagattcgtcgaacgaagatatctattaacgatctactaactttagttaaatcgtgacaaaacacacatcattcatatttgatagtgaataagtccgggggtccatcgctttaactctgattgatatccttaaaattgatgcatagctttaaacaaccaatactttcttatggatagtttttcttcaacttctctaagggt

SEQ ID NO: 79357 - DNA, 530 bp, Arabidopsis thaliana landsberg
  unsure (1)..(530): unsure at all n locations
tcagtactacgcccaatggagtttcttagcccatcaaatcttagtatcagattatcaatatccctagggtttcagtgtttgctcgttctttatttaatccaataagccgttgtttatcaaatacgttaattctgccgtttattttgtagttgaggctacatttcgtcgtacattaatatcaacatggagtaattgttatgatccttaaatgttgaaagtcagttttatctctcgcgtggaagatatgtaaaacatgtaacgttgctagaacttatttttttttacttaacattacatgaccagatggccttgaaatcagtagaaaattagagatggaaacatatctagcgatttggtatgtaactatgcttgaactgtcttatatatcttaagtcttaacaacaccacattaattaatattcggaattaactcttgccctaatatattttctaatataccaagtgacttttaatctagtggattcccttgaagaaaacangaacactgacacgatatttctgacttctgt

SEQ ID NO: 79358 - DNA, 592 bp, Arabidopsis thaliana landsberg
gattgactttctgattattattttttattcgcaggtcacttgtttaggaagacggtggcagattctaattcgccgttgcaagagaaagcgcttgatgcattgattgcgtttttgcgagcagccgattcagatgctggaaggtatggtgttgtttatttttattgctttagaaatgggcagagtggagtgttcgtttgcatgtgaataattagtttgtttctgcttttgaaggtatgcaaaggaagtttgcgatgctattgcgctcaaatgccttacgggtcggaagaatactgtggacaaggcgcaggctgctttcttgctttgggtagaattagaggccgtcgatgtttttctggtatgtcattcattctatgtttttgcaacactgctagggttatctagacacatacggttaacccttgcactctgatgtatattcaccatctagccatagagttacttgctagattgctgatactggtatctgaaactagataggtgagctgacatagaaatgaaagtgctttataacccagaattcaaccatatactgatcttagaaggagtgacgtagaatatagcattgtggctc

SEQ ID NO: 79359 - DNA, 556 bp, Arabidopsis thaliana landsberg
  unsure (1)..(556): unsure at all n locations
ggattttttactccacaaaatcctgaaccagaattattaaaaaaaaaaaaaataacacattttctttgctctggtcccatatgtgatatgtcaccgtccttctccatcgccaccaccgtctcaccggcttctctagccgggactctggccttgaactcaaaggtagcnnnnnnnnnnnnnnnnnnnnntgattagtgaagaacgtgtgagattacgtctttgattagtggtgtatctgttttttttttgctgtaataattctgaaattagaaagactcaaatcacacacatatcagctttaacgtttctagattttgaaaattgatcaattaactgttatgtgttctttaaattcagtatacatttgttttttttgtagaatgttttgtgtagtttacattcaaagaacaatgatattaccaagacaaataggaatcttgagtttaaagcttgttctgtttctggagggtttaacaaccatacatctgtggacaatgtacctttttcctcgtgattacgtcgagctcaattaatcaggtaagctatcttagttttg

SEQ ID NO: 79360 - DNA, 505 bp, Arabidopsis thaliana landsberg
ggtagctactgttggtggggaaggagcttccgacgcagatgaaaccggctttaacgcacgtggagtggtttgttatgagaagaataagggaagacatgaggaagatcgcagcagagctcttcattatcattgttaagaaataaagcttagggttttgttcattgtttttttttttgttaatgacggaataaatgtttatatatgtgtatgagagagaatgagttttggttgagtacatatgaaaaaatttgagtaatggttgacttcaatcttcaaagagggccattcaaattcaaatagccgcagagaacgggtaaacatttcttaatcacttcgtatgaactaagggtttttttcttctctaaaagaaatgaaagtatgcgtcctttcaatatggttatataagtacttgctactggtcgcatgcatgaccaaaaaagtcttcctttgcttggtctacgagtcatactcatatactgtgtaaagaatgtgacaattcaggaag

SEQ ID NO: 79361 - DNA, 574 bp, Arabidopsis thaliana landsberg
  unsure (1)..(574): unsure at all n locations
gccgctgtcgaagacctggtccagcagcccgccgagcgccgagcggatccagccttcgggaatcttggctttattctcggcccagtccgtctggataagcccggccttggggtcttgcgagtggatggtgaaaccctggtccccccagaattcgacgaccttggggtagagatcctgggcgggtttgtccaccaccagccagtggatgtcgccgtcgcgcatgacttgcatgcccggcgtgaccggcaggatgctgtcatccgggcccttggcgtcgcgggcggcctggccttgctggtacttgctgtacgtggcggtgcccgcaggagcccggtaatgcggatcactgttggcctgcgtgagatccggcgggatgctgagaggttcgccggagaccgtgctcttgtagttcacggattcctggtcgctcatgaacttgttcagcgagcaacccgacagggcgagcaggctcaatcccaccaccgcggcggtggcgcgtttcttcaggcgcataatcgtcattttcagagtagtcccgcgtctttcnnnnnnnnnnnnnnnnnnnnncgatact

SEQ ID NO: 79362 - DNA, 253 bp, Arabidopsis thaliana landsberg
ctttcccaaaaagcatcatctaaagataacccttctttcacttttctacacctttgacttttaacttctccgaacctttactcctcgggcatagattctgggttcatcttatatataataaaggccttgatctctttcgacctgagaacaaagagagaacccctttccaaggccctcacctgccgatattcctcatcgttaccgaccggaagaaaatcccccctcttttggaaagccattttttaagcccccc

SEQ ID NO: 79363 - DNA, 499 bp, Arabidopsis thaliana landsberg
ctttttcgataaaaatatttgttcaaccaaaatgaattacatttaaaagagagtttttacttcattttaatctagatactgtagactaacctttagaattcttcaggatatctacttcataaatctattagttttgtaatcattctcagactatacgtcggaaaaaagattcggaagatgttcgacgtactaaccaaggaatattcctactctttagctagttcattaatttcccaaaacatttagcattaaaattgtatgtagattgaatagtttaaaagtttcaacagccggcaatacgtgtttgagacgcgtccctaccacattaaaaaactctattccacaaacttgttgagttttttggttgtttgtttaaccacaagtcagcttactattacgcctataaaagccactggcaaaagaagagttaaaaacgcatctaattagcccatctctctcaattgtcacaatatcacaacaaaaaaaaaaaaaaaaaaaa

SEQ ID NO: 79364 - DNA, 511 bp, Arabidopsis thaliana landsberg
ggccgatatatcgcaccccagtggtttgatagccaaaggttttttgaataacccgctgccccattgccatggagggaccaccaccacgcataaaacccttcgcggtccccgtggcggtttggtgatgatgggccaggattttgacaaccctatggggcaaactactctcaaaggggaaattaagcccatgagtgctgtgttggacggtgctgtatttcccggtacacaaggcggtccgctggagcacgttattgccgctaaggcagtggcttttggcgaagcgcttaccgaccagtataaagcttactgcgagcaggtgattaaaaacgcccgtactatggcggctgcgtttgttgcaaagggctataaagtgatttcaggaggtaccgataaccacatgatgctgatagacctgcgcagtaaagacctgaacggtaaactggccgaaaacacccttgtgaaagcggatattaccattaacaaaaacatggtgccgtttgatgataagtcg

SEQ ID NO: 79365 - DNA, 390 bp, Arabidopsis thaliana landsberg
ggtacagcccccgctacagcgccgggagcgcaggacacagttgtatcagaagtttcccattcagcctcggcaaaagcggaaagggagaaagggtttacaaaggaaattgcggcaacagagcgccgcctgcagatagagatctatgagaacggacagaccgatcacgatacagcaacgcatgacccgaacgggaagaaggtgcatcccaaatcaaaacaggaccaccgagccatccgcctcaccatcgacctagaacccaccctgccccataacgaacaaagcatggcagcagaaaaccagggcaagatcccccccacaacagccgcaccggcggagcatgacggaaaaaccaggaaacgaaccctgctctccaacgaactcagcaaaaca

SEQ ID NO: 79366 - DNA, 548 bp, Arabidopsis thaliana landsberg
ctggggtccgccctggctctttttctcgccccggccgcctttgccgaggattaccttagctcttcgccgcgccagccggcggtggaaaaggactgggggccatggcttgggccctaccgcgccggcatagtcgccaagatgggcgaagacttcagcgagcagtatatctatgccgcgcaaaatgccgcgctgccggtacctgcggccggagaacagcgcgtggtcttcctgggcgattccattaccgaccgctggaacctggcgaagttcttccccggcaaaccctatatcaatcgcggcatcggcggccaggtcagcccgcagatgctcgtgcgcttccatgccgacgtcgtggcgctgaaaccgaaagccgtggtcatcctcgccggcatcaacgacattcagggcgcgctccaggtcgagaccgaggcgcagatcgccgccaactacaccgccatggccgaaatcgccgaggccaatggtatcaggccgatcttcaccctgctgatgccggtcaataattacacgcccaatgccgttaccatgct

SEQ ID NO: 79367 - DNA, 539 bp, Arabidopsis thaliana landsberg
tgcccatcatgacccgcatgggccgcggcgtgtacgacgttctgggttcggcgggcgacttcgtgccctgcgggcactgggtcggctagccgctggcggccggcgagcaggatgtggcctggccgtgcaacccgaccaagtacatcgtgcactacccggaaacccgcgagatctggtcgttcggctccggctacggcggcaacgcgctgctgggcaagaagtgcttcgccctgcgcatcgcctccaacatgggctaccaggaagcgaagcagggcggcaccggctggctggccgagcacatgctgatcctgggcgtgcagtcgccggaaggccagaagcactacgtggcggcggctttcccctcggcctgcggcaagaccaacttcgccatgctgatcccgcccaagaccttcgacggctggaagatcaccaccatcggcgacgacatcgcctggatcaagccggggccggacggccagttgtacgccatcaaccccgaagcgggctactttggcgtggcgcccggcaccaacgagaaa

SEQ ID NO: 79368 - DNA, 458 bp, Arabidopsis thaliana landsberg
gggttcgggttcgccagcaggcgacgcaacgggtgaccctgcaacggttcaccgttgcgtccgattttgtcatacacccgaatggtgccctcgggcagggatgttgcattctccgcgatgcacgagtacactagctcgttcttgagccaaccttatgcgacatgcccgatgaacgttaactccgaatacttctgggttcgggacggcaccaccctcaccgaacaggttgagcagcgcggtcggccatgcggcgtttgtgacagtctttgcgggcggtgcgcttcgtcagccagcccacttattcccaccccaacaggacggctagcgctgacgagcgcgacacccgcgacggcgagcgccgcagccccgcctgcggcaaggaacgcggcaattgaccagcagagacagcccggtacccatggcggtgatcgctgcggcatgacggttcacgctggacc

SEQ ID NO: 79369 - DNA, 431 bp, Arabidopsis thaliana landsberg
  unsure (1)..(431): unsure at all n locations
catgtgctgtaaacgccattagctgtgtctttttgccagcttttatttattttcttttgtattcaacaatataatgaatttagagttttttaaagtcaattaaagtatagagatttttatttttttgaacacgaaagcatagagattaattctgttnttcaaccatataatacaatggctatcttattggatatatctatttacccacgacctgtctaacgtttgtaacgcggtagttcataannnnnnnnnnnnnnnnnnnnnnnnnnnnnnnnnnnnnnnnnnnnnnnnnnnnnnnnnnnnnnnnnnnnnnnnnnnnnnnnnnnnnnnnnnnnnnnnnnnnnnnnnnnnnnnnnnnnnnnnnnnnnnnnnnnnnnnnnnnnnnnnnnnnnnnnnnnnnnnnnnnnnnnnnnnnnnnnnnnnnnnnnctc

SEQ ID NO: 79370 - DNA, 538 bp, Arabidopsis thaliana landsberg
tgcgactgattcggtatttcgctctctgtttgcgaaatacggtaaacctgacgtgacctggacggaattcgttggatgcgacgggctcatttctcccggccgcgaaaacttgctctatgatctggtttattcaaaaaaggaacgtccgatcgtggcacagctctttaccggcaatcctgaggcgatgaaaaatgctgcatgtctggtttcggacatggatttgacggtctcgatattaatatgggctgtcccgatcgtgcggttgaaaaacaaggcggaggagcggcttctatcaagaatccgcaaaattctttggctatacttcaagccgcgcgcgaaggattcagcggcttgtcggctgatgaacttgcggagcgttctgacatgcttcccgtgtcgatcaaaacccgccttggctacaacaaagttgattttgaatggatcagattgcttctctctcagaagctgccggtattgacgattcatctgcgtacccggaaagagatgtccgatgtgcccgcgcagtgggaactcatgc

SEQ ID NO: 79371 - DNA, 482 bp, Arabidopsis thaliana landsberg
cacttcctttttttttgataagctataatataacttttatatgctttccaagttagatcatggtattgattattgagattattaaggatcggatatctgaataaatatttctttaaaattaaaattaccaatcatgtatattcaagggcctcatacagatcggtttaaattctaatttattattgcaatagacatatttttaacaacatgtactgttctttaaattattatttagcacaagattcatatataatatacgctattcaactttagacttatcttatagacatatatttctaaattttatgttgattggatatgaatattttagacttggaagtttgaattttatgttattacttttaagagaataccattattgatatattaatgctctaaaactctgaattaaattcttataattctatgttatatttgctggctaacatattttaaaaaactactgtactttgctatggggt

SEQ ID NO: 79372 - DNA, 559 bp, Arabidopsis thaliana landsberg
cgttaaatgtgtgtgtttgtgactgggaaaatattctctagttataagatattattttttgaacaaataattatcattatgtctttagtttcttatgtatgttagagacttaaagtaatacaaagtatttacattatgtggatgttagcattattttaatgctattactatatttatgtattgaaatctcatactattaaacaacaattaaattatactttataccacaatttttttttttttgggtcaaaataccacaaaaaattattatggtacaactcaacatggttcttatggcaagtagtctaaggttgtttggctgtcaattctaggttaaacaacatagagatttgttatgaaatagtgtgccagcgttgcattgctatagggagacgatcaatcacaacttttgaatcaaagcttcttacttcttttcaaacgtgggctctatagatcaccagttagttttatccaacttcagtaaatggattccgaaactttttattatttatgatttacatggcaatattttctgggacggcccgtgatcatctggagt

SEQ ID NO: 79373 - DNA, 380 bp, Arabidopsis thaliana landsberg
  unsure (1)..(380): unsure at all n locations
taaccnnnnnnnnnnnnnnnnnnnnnnnnnnnnnnnnnnnnnnnnnnnnnnnnnnnnnnnnnnnnnccgagttatacttgactaatataatatggtcattgtccaattattcatcttatgtagtcttacacaacaaaatggttaccattgaaaaccaaaggacggtgaacaaaagaataatgatcattcccactacccattactatctaaatggttatcaaaatctctttcgtcgacaaagtttacgtaggggatgaagcactgaatgcagagactagggatgatgatgcttgattcataaactaaataccaaggtatattattaaagtgctttaaagaaataaacacaccaattgaaaaacgaacgaaacttctacaag

SEQ ID NO: 79374 - DNA, 622 bp, Arabidopsis thaliana landsberg
  unsure (1)..(622): unsure at all n locations
ttttttcttttctcaaaagctttttataaaaaaaaaaaaaaaccataattttttagatttttgccacaatttaattcgtaaaacaaaaacgtaattgacacaaaaagagtctaaatttacacactgacggcaaaaagggatataatttatcgacaaactcacaaaagtatcggcgaagaagagattggattctctgtttcagttccttaagagtttgaggagattctctgtgtataaattgagatggttcctcccataatttataagtataagcgaaggaaagatcggcgacttggtagggacgatgatagttcagtgatgatgactcgtcggagacccgactccgattttatcgaggtaagtgatgagaatcgctcgtttgctttatttaaggaggatgatgaaaaaaatcgtgatttgggtttagttgatgatggttccacaaatttggttcttcaatgtcatgatgatggttgttccctagagaaggataatagcaatagcttggatgatttgttctctgggtttgtttataaaggtgtgaggaggaggaaaagggatgactttggaagtataacaacgagtaatcttgtttctcctcaaatngctgatgatgatgatg

SEQ ID NO: 79375 - DNA, 344 bp, Arabidopsis thaliana landsberg
actattttgttctcgcgactcattagattcaaccattacacttggtgaaatttgatgaaattttagctcaatttacgaagttacggacactttgtatgtaatttgaaattatactactgtttcttgtatcctttgttgggggaccacatggttatctcggtaacgaaacagttaaattagttaatctagttatctgggtaaattacatgtatcatctcctgattggctgattatgcctcctacaaataattcttaaaagctaatcatagttagattagtctaagctgtctagttactagagataatcagctgaacacaaagttaagttcaatatgttatgtcaa

SEQ ID NO: 79376 - DNA, 495 bp, Arabidopsis thaliana landsberg
  unsure (1)..(495): unsure at all n locations
caacattattttggtacacctcaccctacatatgtagggtttctactaatcgtaagtcctgttggttttgatgttgatttgatcatttattcgatatggagcataacaagacatgggtcaagagaagaccaaggttgagacgatgatcatctatataggtaggaacatacataacttgtatatatgtacaaatgtttggattttttgggcttgggtgccctttgatttaatttgttagactgacttaatttaccaagaaagagtgtagtgatgagtttgtagactgattttgccaaaaaaaaagtagtttgggttttgatctncgatcatgtgaaaacctttactttaaaaatggtggaaacgttgtactcacgcgttgcgtgttgcatgttttatatataagaaaaggcgagaatgatatttgtgaattgaatttcttaagatggctcatttttttttcgccaaaatatttttggttggtaattcatatataag

SEQ ID NO: 79377 - DNA, 465 bp, Arabidopsis thaliana landsberg
ttaagcacaaacaatagtctatggtttttgaatttttgttctgatttgctttgataatgggggctgggtagaaagataagcgtatgacattggcaattaacacgcaaatcactaatgtgatatgtaaaataccgaagtgattatttgagagatgatttgcgggaatgttacttttcgtgtaaattacgagtttagaatttccaagttacgtgatagataaacaatggagacagtgaagttgactgatctacaatcaaaacgctttatgattggccataatgctaataagggacccattgtctgttccccatctcctttgcacacatttatcaacatgtgacttacttcttcctagcatttccccctatcgtgattcccccactatctacaatcgcatgctctctctcatatatgagaatcataccacgaaaacagtaattattagctagctggacacaatctatg

SEQ ID NO: 79378 - DNA, 587 bp, Arabidopsis thaliana landsberg
ggatctgaaaaccagttactttatatttgtttgggttaaaaacttcaacattaatactgtagcagttataacctaaacaaatatgaacggtcaaattaattagttgaagagtgttgaagacgcaaagaataattccaaatgaaggaacacaaaaatccatcatggtattgaaaggcataaagaacataaaagtactatataaataaattaaataactaataatttgttaaaagaaaaatataccaaatatatttgtattatgtgtgagagaactgagacgaagacaagtagtttagagaaaaaagacaagtaggttttgagccgaaaggtaaaagtaacccaatatttttccaacgttgtaattaaggataaaataaacgaagattgaaagttgaaacttgaaagattaataaaccaattccttaaaacattgtattcttcgttttttgttcttttttcttttgtcgtttaacgttaatagtaactttttaacacatgtctcgtgatgatcttggttttcagaatctcctcttaagatattttacgttataaaatttgaatgtgatggtatatatatatatatatat

SEQ ID NO: 79379 - DNA, 509 bp, Arabidopsis thaliana landsberg
  unsure (1)..(509): unsure at all n locations
caaatctaacatggacattgacagtatccatccgattgctttcaactttatgcactttacttttccattggacttagaggaactcgtttgatcctatttgatcccgacacatgtgaaagatatatgaataattttaaattcataaataaagctcgcagtaattaggctttgcgagaaactctttaggtatgaaaactcggtcttaattcttattagtactctaaaacttagattaagcaataatcccaagagatcaccagaactaattacatgcgtcgctaagaaatgcatctaaactaaaaaaatgatatttaaccgaaacatatataacttttaactttaaaagttgacaaggtgctaatccctcaatattgatgctaagtctagtttttttttttaaatttgctttatgattcttgcttattcgttttattgattaanggtgtgacacttaacgattatggctaacttagataaaatcagcaagtgttttattgttcttttgcacc

SEQ ID NO: 79380 - DNA, 499 bp, Arabidopsis thaliana landsberg
gaaccggagtcgggtgctgggcctgcaggcgggtcaggccacgttccagcatgcgggccgccaggcggcgaaaccagggcagctgggcaggaggggtaaggttggcgggggcctggggttgctcgtgggccacggtcactccgttgaaaaacaaaatcagcgggcatgttcgccgcatcgacaaaaaatcgccagcgaatgcttgcacatcagtggattaggcgatgaagcggataaaacactccatcgcaattaatctattttactgattcttttaagccgatatttacgcttattttcgatgcttctttgacgcattatggcctcattccactgattcaaggagcacgaccatgctgcaactgcgaccgttcgaaagccttggccacgccaaccacggatggctcgacgcccaccaccatttctcgtttgccgagtactacgacccggcgcgcatgcactggggcaacctgcgggtgtggaacgacgacctgatcgc

SEQ ID NO: 79381 - DNA, 248 bp, Arabidopsis thaliana landsberg
aaacttcatccaatttttttgacacaaagtgtattaatttagattgttcgattcttatttatgtctaactttcttaggtaaaaaagctggaatttgtaaatatccccaagcttcaatgaatctagacattaattcgacagataagatttgcgtaaaatactatagaagatttagatgtatttcatattttcacttatctaggtttcataattaaccaatcagcgaattggtataaattaaagttggga

SEQ ID NO: 79382 - DNA, 547 bp, Arabidopsis thaliana landsberg
tactacttggatggttttgaaattatggtatctttttatgtcgcaaataaaaactagaggttcacggacttaaaggagacaagagtatcatagccttagatttattttccaccgtgtttctaaatagtgggattctttcgagtttcgatcaaatgatttttcgcttagatttcgttttgcatcacatatttaagttgttgcttccctctattggttaaagcgaccaaacaactttgttacacagcaaccctaagtcgtgtcatagccatctaattctcacatcttctataccgcataaaagttcgataattattaattagactaatggaaagatgccacctagttaatatacaaattaagttgggacatcgtctcttattcttacatatgtcaacatcaagaatactttgttttaagcatgacatgattacattaataaagcattaccccacacgccgaaatgttattcttatttttatccgtgaattttttctatgatcaaatttgtccgtctaagtggattgaatgcaaatgtgagtgtttaata

SEQ ID NO: 79383 - DNA, 536 bp, Arabidopsis thaliana landsberg
ctcccattcttttgttggtcctattacattttggcaaaacaccgttgtaatagtcgattaatccatatgcttttatcaattttttttttattttccaaaaacttttcatagctcctggatatgtgcacaataaatggaacatcaagaaacgccatgtttagtgtgaaatggacatgagacttttcctaattgtttctaagcaatgacatgccaacgtcgatatgctgccacagaaaatatgtaagttagtttatgtaaagaaaataatttattattaataaaaaatacaatttacttacatcttcacttaaccaagtttgtggatcaataagcttcacgaaaaattgcttgtctacttttatggtgcccaaattgacaattctatttcagcaatcaattatacatgggtttaatggctataaatgcaaaaaagaatatttttttgcgaaagtatatacatgtctattcttaaccatcagtcaagtcagttagcagtgctttcatctactagagcaaatggatcatattgatctgag

SEQ ID NO: 79384 - DNA, 524 bp, Arabidopsis thaliana landsberg
  unsure (1)..(524): unsure at all n locations
tccacctttgttttgttgccgggtgaattagaaggcccgagggaggggttaaagtaacacaggcattccggcattcaacgggaaataaactactcaagaactggacattctgttctgtcgtattctataatacactgagnnnnnnnnnnnnnnnnnnnnnnnnnnnnnnnnnnnnnnnnnnnnnnnnnnnnnnnnnnnnnnnnnnnnnnnnnnnnnnnnnnnnnnnnnnnnnnnnnnnnnnnnnnnnnnnnnnnnnnnnnnnnnnnnnnnnnnnnnnnnnnnnnnnnnnnnnnnnnnnnnnnnnnnnnnnnnnnnnnnnnnnnnnnnnnnnnnnnnnnnnnnnnnnnnnnnnnnnnnnnnnnnnnnnnnnnnnnnnnnnnnnnnnnnnnnnnnnnnnnnnnnnnnnnnnnnnnnnnnnnnnnnnnnnnnnnnnnnnnnnnnnnnnnnnnnnnnnnnnnnnnnnnnnnnnnnnnnnnnnnnnnnnnnnnnnnnnnnnnnnnnnnnnnnnnnnnnnnnnnnnnnnn

SEQ ID NO: 79385 - DNA, 330 bp, Arabidopsis thaliana landsberg
  unsure (1)..(330): unsure at all n locations
tgatnnnnnnnnnnnnnnnnnnnnnnnnnnnacaagcttctatttcgaggggtggtgtgtctacccccaccgacgccatatagaacactctccattgagtaactgactatgagggattattgtattggacatgcactcacttattgataatgagtctgactgcaagatactttgagactaatagcaagaccacgaaatctactggaatcaattcttttacgacgcattcccacgccctacttccaactaattcacatttaattgggtacctaagaacgtcagacacccacatttgcgcatagcacaacatgatcaccatatgagatacct

SEQ ID NO: 79386 - DNA, 468 bp, Arabidopsis thaliana landsberg
attagcattaaattgagttagatttttctttactaattaaaaaaaaaaatactatgtgccttaaatttatttaactttttagaaagtttgtcttttgatttcgaaaatgaaaattcataaatagtgtcttatataatagttttatttataaatatggtttctctacacctactcagaaagttagtaagccatacatttggattcgattattgaaagagattgaacatcaggtgccaaagtgtctggttaattggtggtttaacttaaaccacttgcctacataaaccttccacgttttatactaataatatgtacacgaaattagaaaaacatattacaacaagtcaacaactgtggtgaggtccttttgaattgtaaactttgtgttcatttgtttatttaatcgaaattacatgtgagatttttttggcatttttttttttttttttttggacaaaggcttctttt

SEQ ID NO: 79387 - DNA, 598 bp, Arabidopsis thaliana landsberg
  unsure (1)..(598): unsure at all n locations
aaaaaaaaacaatcatatcacatagttaataaattatctgtctcgtttaaatcgtttttaaaatcagatctgttaaatctacaaaagtgattttcaacacggtgtgattcttataatatttagtccaacgcttcatggaacgcaagtaccacttagtataattaaaagtccttctcaccgagataaaaaacaaaatctcgtaattacatcatcccacgattaagacaaacacaaagaagggttcctttcctttcaacaacaccggtattatatataaactcatagtccattggtgctctaacatgtcacaatttgggttataatatgaattatgtttaatgcattcgagttctaataaaaaaatatgtaagtgtatataatgcataagaaaaaaatgaaacataacctttatatcgtttaacttatgagaaatcagaatataataatgaaagattaattcattatgttacataaaagttacaatgttaataaaccgtagttaaaatttccaggatttacctatctctttctacgcttatttaagcanaacgttagtggtagttttcaaataaactnttacaaagccaagagcccaagt

SEQ ID NO: 79388 - DNA, 421 bp, Arabidopsis thaliana landsberg
  unsure (1)..(421): unsure at all n locations
atcgcaccacagcctgacggagactaatcactaatcattgtcacacgtgatcattcatttcgagaacgtctcagccagttatccaagttttgtcaccgacacaaagcctatttaatatatagagagcagagtccctacttttacaataaaagatggcgtgttctactgagcgctcgctatatcttgctatttcgaaaaatgattggtctagtgcgaagtggctcgcgagtcaaggaaagggaattaatcttgttgtaagttaaccaaaagtctgttcgagtttacaatgaataaaatattaacccatgactctgcanataaaaagcatgtagacggcaactctatgttacatttggccgctaaaggtggaaatacgaatcttgtcaaggtccttctggacaaaggcgcagattccaaggcc

SEQ ID NO: 79389 - DNA, 305 bp, Arabidopsis thaliana landsberg
cgaccagcccgggcgccaacgggtccagcagtgcggtgatcttggcgatctggccagccgggctgtcggcgaagctttggtagacccgtttgctggtccaggcgcgggcgctgtcggcgccggcgggcaggttcagctcgggcaatcgcagcgcccgtccgtaccgggcggtctgttcctcgaagcggtctccccacgactcggtttgtcagccgggccaccgtccggccagatcgcggcagatgcccatgttgtccgcgcagagccactcggtcatcgtccgggggccgacatcaatgtggaca

SEQ ID NO: 79390 - DNA, 565 bp, Arabidopsis thaliana landsberg
ggatgccaagcaatacatcgatggcgtgatttcttacagggcgttgatatggagatcacactcgttattaaagttcctgccaataccagtacagatattcattcggtatatggtatggtggagatggtaaactttcatgcgccggcaaatgtggatgccacttatggcggtatcgatgccacagtaaatgaatcccagaccgggaagctgaaagccactacgagctacgggcagatatataccaacctggacctgaagattacggagaaaacacaaaaggactttttcactttttttaccgccgaacccggtaaaggccctgaatacatcctgaaatccacttacggaaaaatttacctgcgcaagccttaacctctttttctactgttaaagaattacgcgggggggcttgttaatgccctgccttttttattcagattttgttttaccggcaagcaactttggaaagatttcctgcagctgttttgcactgatgattattttacgatcatcaccccagtacctgtaataatcagccctgcgccaatggctgttttcagggaaa

SEQ ID NO: 79391 - DNA, 464 bp, Arabidopsis thaliana landsberg
atttatcctatgatttttgataaaaaaaatttgatttacatggacggctacagttgtgtgtatgtgtgttaatgggttttgtttgtttttatttggatctttttgttctgagtttttgtttatattgaaattttgtataagcattaaggaaaccatttgttttcataaataggtgattacttcgaatagtcaaagaggaggctttgtatatatcttttctaatggtgggctagaaaaagacatggaacaaatggaagaatcgtaaagatcaaagacttaaaaattcttaacatttcatataagtttctcacaaacttggaaaagaggtgatcaaatgggtcattcaatagattagtactcactctgtgtatgtctaccaacattgtcatgttgagcattctcttatatacattccatctgagatattgaatggaatatggacactcttgatctttcattatgag

SEQ ID NO: 79392 - DNA, 466 bp, Arabidopsis thaliana landsberg
ttccattacggcattatcttacatattcttatttcatgtaataccttgatttttgataatatagttgcgtatgtagagcgctatagatataagcaaaaatcaacagtaattctaagatggatgccataccaaggaaataaataaattgtgtacagacttgtttataataaagaacccaaacgaaagagagggaaaatttgaagagaaatataacactatagatgaacattaagaagagaagattcatatatatgatagtgccttaatggttgtcaaaaacatgtggagacgaataaaatattgacactgtacaaagagtggtcgaacgatacttttccatgaaactatatagttgatacctcttaattaattcggtcatatgatggtgtataaataaggcttgaaaaaacgataccacctcaacgaagaaacatatgcttcatgattcttgggggatgattcactg

SEQ ID NO: 79393 - DNA, 537 bp, Arabidopsis thaliana landsberg
cgagggcggatctgtgatccttaacggcggcgatgcatctcgtggcactggtggaagtgtttctctcagtggtggcttgagtagtgacggcaataccggatccattacaatcatgactcatagtgcaacatctgtcaagtcgacacaagagagtggcagcattgcacttcgcacaggcgactcggccactggatccgctggtagtatttccttgacaacaggctctgcagcctctcaaaatgctgctgttggagatgtcaccattgcagcgggaactggtgcagtcggcggtgctgtccaaatgtcgtccagcgatgcttctctcactttgggacaagacgtcaagctttcttctgttggtgaggcctccgttttcgtgtcgtccggcactgccgccactcctggaacgtcggggtccgtctctattagcacaggcagcaacactgcgggtgcatctggtgacctcttggtccgtggtggagtgggtgcaggcgcagtcactcttcttgctggagacgcaacgacagcaactcagac

SEQ ID NO: 79394 - DNA, 567 bp, Arabidopsis thaliana landsberg
ggtcgcccggcgtgaaatagaatttctcgtagtaggccgggtcgtccgggatgtgcatcttgcggtacgtgccggtgattgccggcgagcaatcgaacaccaccgcggtgttgtggtacaggccggcggcgcgacgctcgaacagcgacgcgatcaccaccagctgcagttcggcggcgagcttgccgaggcgttccgtggttggcccggggatcgtttcggcacgctcgaattcgcgcacgtcttcgtgctggcaaaaatacgggccgttgtggatttcctgcaacagcaccagttgcgcgccagccttggcggctgcgcgcaggccggcttcgatcgcgtcgagattggcagcgacgctgccgtgatcgatttcctgcagcagcgcgactttgagggttttgtgcgtcatggttgcagtttagccgtgcgcatacacatcgtcattccggagcgggccgcgggcccgaatccggaatcggctggtagcccgggcccgcacccggataccgatttcgggttcccttgccggacaagccggaacggcccctgatgacgaaaggggga

SEQ ID NO: 79395 - DNA, 495 bp, Arabidopsis thaliana landsberg
  unsure (1)..(495): unsure at all n locations
acatggcctcctggccttccttcatccgcgccttgtagtcggccatcgagacgctcacggcgtcgttcgtcgaggaggcgaagcgcagcagcttggcgatgcgctcgcggtggccgaagtcctcgcccaggccttccttgagcacggcgccgaactcggcgtagaacttggcgaacttgcccttgtcctcctcgctcgcggcctcgtcctggnnnnnnnnnnnnnnnnnnnnnnnnnnnnnnnnnnnnnnnnnnnnnnnnnnnnnnnnnnnnnnnnnnnnnnnnnnnnnnnnnnnnnnnnnnnnnnnnnnnnnnnnnnnnnnnnnnnnnnnnnnnnnnnnnnnnnnnnnnnnnnnnnnnnnnnnnnnnnnnnnnnnnnnnnnnnnnnnnnnnnnnnnnnnnnnnnnnnnnnnnnnnnnnnnnnnnnnnnnnnnnnnnnnnnnnnnnnnnnnnnnnnnnnnnnnnnnnnnnnnnnnnnnnnnnnnnnnnnnnnnnn

SEQ ID NO: 79396 - DNA, 379 bp, Arabidopsis thaliana landsberg
  unsure (1)..(379): unsure at all n locations
gcgacgctttggaactataacatggccaaggacgtcgttatttcattacgacgtcaatgggtttcactgggatggggtgaattatactgcgccggattcgggtatacaacccgacggccatagcgcgttataattccgagttcggcacttccggccaaccttctccttccgatccgaatttttccgattggcgtcttcgtgnnnnnnnnnnnnnnnnnnnnnnnnnnnnnnnnnnttggcatgaactgaaaacaaaccaggtgatttcgcgttctgtatctggcatatcacagagacggctctatacgcttgcttccaggattgggcgggctggaaccgacatggcatgatctatatctgcgtggcaatgggttacacg

SEQ ID NO: 79397 - DNA, 480 bp, Arabidopsis thaliana landsberg
cgggtgcccgcggtgccgctgcgactgccggactcatggtgcagtttcagttcgcggcggcagtgcagcagtgccgggggatagttcccgaggttggcgtagatccagccgaccgcgttctccgaatacgcgaccgccgcgtgccccccgaagagccggcgcaaccgcagcgcctccgtcgcgtgcgggagcgcctcggtccaccgtccctgcatgtgcagcagcacggccagcgcgtgctccacccggccgatgttggccttgtcgcccacccgggtgaacagctcgaacgcccgggacagctgcgcctcggcatgcgataccttgcccagcttggagtaggcgtgtccgagctcatagtgcacatgggcgagggcgttcgggtcggacagccgccgtgccgtctccagcgcgatgcgctggaccgacacatactcgtgcagcatgccgcgacgcttcaggaacggcgcccacagccag

SEQ ID NO: 79398 - DNA, 351 bp, Arabidopsis thaliana landsberg
caaaaataaatgtagagacaacgagcgagaagacacaaagccaaagattcatatggacacaggctattccatgtcagcctagcgaagcacaatcctggggccgagaaggcttcgagcatggtcatccgtagagacagacaggtactctggtgccaccaacaacgtatgggcaagatccatacggccatgtaataacctgagccgcaggctaacgacaataagaccacatggtgcacgagcaccggacatgagacatcaacccagataagtgcatgaataaaactgaaaaaggaacagtgcgaggctccaacaataaccgagccaagccatataccctttgacgaggcatct

SEQ ID NO: 79399 - DNA, 486 bp, Arabidopsis thaliana landsberg
  unsure (1)..(486): unsure at all n locations
aagttgctctagatgatgattaaagctagagagtagagactatggttgaaaaaagtacagtagatatgtgtagaagctatggagcatatataaatatagttaaagcttttacacatgagattgagtgttgttgatattgtttccaaaggattgatcaaagtttccaaagagactaagaattgacctctggatatatacacacagctgtagaagatataaaaaatactttgactacttctttaagttagcatctctctcacgtactacttatgatcttattaaagttataaagagacaactgtgatgatactcaatttcactagctacttatcatttgcacataaagntattttattcttcttgcaaaaacatcatgagatcgatacccattttgatgttcttgatgcttttacatggagatgctcttaaggatctctttctatattattgtcataatgaaatttaaagtttggctcatcaatatat

SEQ ID NO: 79400 - DNA, 132 bp, Arabidopsis thaliana landsberg
accgattctaaacggagactaattagcactgaaccgcacctttgattatcttatttttaaaagcccaccaccgctctccattaccggtgctatctacggggaggtggacttcctctagcttctgctacttaa

SEQ ID NO: 79401 - DNA, 535 bp, Arabidopsis thaliana landsberg
tccgctctgatacatgaaatacagttccgaaaccgcggtttcaaaatggcattttcgaagatcactttttaatgcatcttaaatcctgctttcgtgcctttcgattgtcttttttaaggccattaatttttcgatccgctcgacagcattactttttctaagcgtatatttgtaagcttgctgggcgttaaagacttggtttattttttcttccatcggtttatatttgttaaatatagttaaatgaacagcaattgcattaaaaatacgggtgtttaacccatattgcatatatcgtacatctctagcgtaatgaagatgaaaccatcatgatttttcaaagctcacttagggtgaataaacggcttcaacctactggaatactattgaaaacataggcaacaattaaaaaattatgatcgcttcatcgcaattgaaaataaatatatacagatgaaaaaaatattttttatttactggctaagtatggctttcaactatgcagaggcacaaacagccaaaccagcagtgctga

SEQ ID NO: 79402 - DNA, 582 bp, Arabidopsis thaliana landsberg
cgcctgctcgtggagaacatgatgcttggcgtcgaacggcttcccggggtccgcccgcggccagtcattgtggaaatacagtgccgcgccgtggtcgatcagccagatgtccccgtgccagaccagcaggttcgggttgcgccacgtccggtccacgttctggatcagcgcgtcgaaccagagcacctcgctggcaagctgctcgtcggcggtccagccgagcgggtcgaacccggccgagcccggcaggaagtccacggccaggttcaggccctcgctggcccgcagcagatcctggatctcctcgtccggctcgctcggcgcgatgcgcccgtccagccaggccagggcgaggtccggggtccgcaggccgagacggcgcgccagctccccgcagatgatctcggccacgagagcgagcgtgccgtggcccgccccgcggaacttcagcacgtacgtgccgaggttgtccgcctcgaccacgccgggcaggcttgcgcctttccgcagtggcgcgagatagcttttaacggtcacgcgttcaagcacgggcgacagattaccggtgcgcccgtactttcg

SEQ ID NO: 79403 - DNA, 513 bp, Arabidopsis thaliana landsberg
  unsure (1)..(513): unsure at all n locations
aaaatatgtgtgaaactattaaatagtacgaaacaatcttaacgttctttaagatgtcaaaaacaaatctggtactaatatcaaaaaccggtaaacgaataacaaactacttttgacgaatgggttcccttgtcgaagttccttaaccatcgccggttcttttgttgatttgtatgtcaacatgtttaactctttctttgttcgaatcaagaaaaagacaaggaaaaatcttgattttataacatgtttcaagtaggcagtttcaatgaggcaatttggtttgttcatgcatgtaagtgagctaaatttttagttagatggttttatgttcgttcttgcatcatgatagtctcttggaaattactctcatatggtcatgtggatcatacggnttggttagaagtagaacttagaaggatttgccgttctgtatagattagtgcttgacttggtgagaattttaaatttctaattgaccatattacgtatattgctagtcgtctaagaataaga

SEQ ID NO: 79404 - DNA, 127 bp, Arabidopsis thaliana landsberg
aacctgtcttaccatctcaggacatcagattgttccccttgacgttgaaagaaactcaactgtggggaaaccgttctctggccgcagcgaccaaagggcgatgatgaagactaactaccagagagac

SEQ ID NO: 79405 - DNA, 555 bp, Arabidopsis thaliana landsberg
  unsure (1)..(555): unsure at all n locations
ttatatattctatttatttttatcttcattcatttgtggccgttataaaaaatgtttttattaacttttaagttctctaatacagtaaacaaaatttgtactagtttgctagattataacaaacgcaaaaatttatgtttaaaataatgaaaatctcttcttccttgtttttttcgttatccagttgcgcgaatttgtttcgctcttgcttccaaaagattatgggttgccgagacaaataaatagtttcttactataaattgaggattggtttggtatgaaataaatgatagatgcaaaaaacaaacaaaaactatatagaaaataagtagataaatcactatcaacgtgagatgggcctcgtatatataacataatataaataatactatattatacttatagctntacatgcaattattgaaatttcttatctcccaacgtacttgaagcttatcattcttttgatcagttcangatgtttctaagaggattggtntcactatcttttataacaaaagtctatataatatatatacatatatatatgtattt

SEQ ID NO: 79406 - DNA, 477 bp, Arabidopsis thaliana landsberg
aagctttgaattaaaattcattcttatctttgtataagaaacagcttaaatatttttactttgccttaacagtaaaaagcttttaaccaaaaacattgaattcaacctactctcccaaaaatttcacctttaattttttttgaaaacaatatttaccagtttagtgcatcttgttgggttgttccttgtcctttctctctcagaacgatctttacttttactttttcagtatttacctctctcttctctctagtctctctacttagctgcctcgcttttgctccttttacctctttccatctttcaatctcctttgagagagagagcatatgaaaaaaacccacaaaactcttttctccaaccattaccatctcatgaacactctcacaggaggctctctctgtttacagagcctacccatctaatatttcttcatctgagtctcttttacttctctaaagtatcgatctttattct

SEQ ID NO: 79407 - DNA, 459 bp, Arabidopsis thaliana landsberg
gatctccaaccattaatctgttgactcgttttgtttttaaacgagtccgtgcaatcgacaagggagggggacgagttcagccccatcatggccgattcgattcccctaatctggtgttcgagggcattcaaatcatccgatacacaagagccacatgtatgatcatatgtagcagtcgatagagcattactaggaggagagtcaggagatggctcgagcgtacaaaaccgtctacgagagtggttaaccggtgagtacctaagcttgtcaacagaggtaggctcaaaatcataagcctcaagctcttgtctaggctgcttgtacatatctagtcacttcaatgatctgcacaataactacacgtaaaaaaagatcagacttaaagactcatcttaaaccatgctagagaagctctaaattaccctgaattatttttgtaactgaaatcaacataacctc

SEQ ID NO: 79408 - DNA, 504 bp, Arabidopsis thaliana landsberg
  unsure (1)..(504): unsure at all n locations
gaaaaatcccttaaaaaccagtttaagggctttgtgctgatttggttattttaggtgctgggcgcttatgggggtagaggagtattccaaaggaaggccgcttttttagcaggtattcccattgcgctcgataatctaaaaaagttcacggataataacgtaatcggtatagaacttcctgaatttgaaagaatcctggggttgattacagggccggagacaaagacaaaatttataccggtccaggctacggggcaaacgccgctggtggtagagattaacagcttttcatacaaaaaaggaatccccaaagacaacagcagtaacggtggcggttttgtttttgactgccgcggtattttaaatcccggcaggcaggaggagtttaaaaaactatcgggtcaggataaaccggtgcaggattatctacnacagcgtaccactatgaatgaatacctcaatagcgtatttgatctggtgagtatctcagtggaaaattatatt

SEQ ID NO: 79409 - DNA, 582 bp, Arabidopsis thaliana landsberg
  unsure (1)..(582): unsure at all n locations
cggcaacgcccgcctttcgggacaaaaggaggccatttaaccaatagttcaagcacttatctgttctcgcctttctaatggagatctctgggtttactttcttaggtctacctctgcctcttttggtttccagtttccgtttcttactcccttcagggactttactttcatcctgcagccgaataacatgcttcacttgcctgccagaacgtcgcaatggtttgcttgcaacaacctttttatgattctttaaccttatggcaattctctctgccattgaagtcttagtcttctttaaccgaggtgatttgcgagcagctatgactcttttacgcttttgcgtctgaactccaatttttttccggacactcccagggggccgccctctttttcgtacggtgggtcgttcttttgatagcacttcacttttgcatggaacacatatgtacatgccttccttctctcccctnctgatatgctttttgtgaaatactcctcgagttcttaaaaataaaatcaataatacatctatgaaagatcatgttagcgaagtctcacttggtggggaatgagtctaactag

SEQ ID NO: 79410 - DNA, 557 bp, Arabidopsis thaliana landsberg
  unsure (1)..(557): unsure at all n locations
catgatccatgtattcctaacttctaagtagctgaagaacgtccaaataaaagataacaaaaacacacacacaataataaataatcaattagatatatttatgtacatctccatatcttttactggctgagaatttacannnnnnnnnnnnnnnnnnaatttgggtcactctttcgttaggtcattatcataggcaacagccctctcaatcaatagcatgatacattaatgttaaaaagattttaaaaactcacataaatacatgaagatgaacgaatctaagttggagcgtacgtactatatattagtaatatatacatggaattctgtagtctctatcctctgccatctctacacagttgtgctctgatggggtgacatagaatttatgaatacggctttcttaaatatactaaatatttcattttggtagcatgttttgaatgcatgaatatagttagcttctgtgagatttagcctggtaaaaataattcgactttgatttattcaaaattttgacttacaagtgtatgttatacaaacaatgtatttaaaat

SEQ ID NO: 79411 - DNA, 547 bp, Arabidopsis thaliana landsberg
  unsure (1)..(547): unsure at all n locations
gcaatgatatccgtaagtggtattacatgtgctccacatggcgtgtgatgtttttataaggttttattggtgagttatgaactaccgagtactgactatgtaagactaactacttaatatataataaatgtgtgcgcagactatgtcctcgtgatcatagtgcgcagcacttgggcgccaggttaggtcctcgtgatcatcatgcgcatgctatgttctcgtgatcacggtttcaggtctaggaaaaaaggcacgtgatgtataccctagagaggcatctccgacactccccctcttagaagaggtccggcttgcgaagcgtcttacggtactcttgaagacactcttgagcattacggagatcatcgagtgtttgccatgtgctcttagacttgggataaccggcccatttcactaggaagcgtatcgatttatcaggcagcttcttgtgtttgagtatacgttcgacctcgtattcatcttgatagtacgaaccatcattagttataagagggtcgtcatctgctgagatgacatncgaatcttg

SEQ ID NO: 79412 - DNA, 592 bp, Arabidopsis thaliana landsberg
tatcccaatataagacgaaataggttcggattttgttcccttcatcgtgaaataaacatgcgacctttagctacgccaccgcccggaaaggccgaatccaagagcggcgatcaccgtgccccatttgcaacctgatacctggtggatcagtcgggctgagcgcggactgcggcacagagcgatgccgtgttcatgcggcggtttgccgagcgccccgaaaacccgcgcgacaatcgccgctgctgagggtcacaggccaaaacctgcgtaaaaggcgtattgaagatacaacggtagtgcgatgtcacgcggaattcggcccacaagcggacgaacgaggcgatgaccatctcgcgaaatgcagggatggcgaccggcagacccaccggagtggtcggaacgtcagtggtgcgctccttggtgcagcagaaagacacgatgagcgattgcgcatatttcggtcgagcggtcgttcgaaaaatgcggagacctattgagaccaatcaggaggtgcggttcttaaatcgtacgccaacaccaccgccgttcttcggaatgaactcgattccagcattatcgagtacagatctta

SEQ ID NO: 79413 - DNA, 597 bp, Arabidopsis thaliana landsberg
gataaaagtttagaggatctaactaaactattcgctttagaattacataaacgaagaatagcatcgaaagtctaattaggagaggtagaagttaaaaaatttgggaagactactgaactaaacaaccaagaaagcgagaaagacgagaaataagaaaattaagcacaaaatcttatcaaaaaaattggagaaaactaacaattcttaaaggtattgcaccattgagacaagctctatacaatctgtttcaaatacctaatcatttattatgagagatatgaattatggcccatattattaactaaataatatccaaacattcaacaaaataaaatagaaataggaacacttaaaaatatatttgtatcaatatttgctcagatttatattattcattacacaactattacttctttgaccttaaaatgttgaacatttattgaagcatcttagatatatcatttctaactttttttatatagttgaattgattgagaaggttctgatagacttttaggattgttgtcccttagtgtggcttttgaaatcagtttaagttatgtcatttgcggcatggttctcacatacacacatgga

SEQ ID NO: 79414 - DNA, 562 bp, Arabidopsis thaliana landsberg
actacaaacgtacttaataacacttaataaagtatgtatttcattttaatttggtattacttctttagtttcttggatctgaaatatacatgatttgacactgattttttttttttttttttttgataatatacatttttagtggctttaaaggaaattcaaatgtgtatttcacttgcactctcatcatcatttagctaggaggtttacaaaacagaaggtcttgaccatgaaaactctcaccaaagtgtgttgggacaccgagaatcaaaaaaacttgtgaagggtgacattttgaaatagattttgcttatgtggccgatgatatgatcatggaacaaatggataattggttactaaaaactattgataatggattatgcacttatgcagtgtatcacctctgtttctaaaacagtgaaatatacaatactgaaatatgtaaagtattgggtaaaattgtcaacaaacatcttgagatatttcttacagaaaactgctacaaagattttaattacatcgacaagaacattaaactaatgtgattatgtggacaaccatt

SEQ ID NO: 79415 - DNA, 488 bp, Arabidopsis thaliana landsberg
attgttccctgatgcgcctgtcgtgccgcatcgaacaagccgagttcgcggaagatgcgcgtaacgccattcagctccgaccacgccgtctcgacatcgacattggtctcgcctgcggcggcgcaagcgaaaccgatgaggctttcgatgtggctgccgctccgcaggtagatgtctgcgaacgtgaaccagccttgacgccgtcgccgcccggtcccgctggaaaggcgaagagcctgttcggccaaatccctggcctgctgcgagcgccccgcagaaatgtatcctgcggccgcgaacctgaatgcggaaaggtcgtaggtttggcgcttggtatgggcattgatggagccgacgactctgagaagaagggtgagtgtcttgacgtcaacatcatcactggcttcagcggcgacgcgatcaatgacatgcatcaggttgatcgcgaggcggtcagggtcgccagggatcaattcccgtggaatcgt

SEQ ID NO: 79416 - DNA, 218 bp, Arabidopsis thaliana landsberg
gctaaatgacactttttggagcagtggatttttcgttaccatcaatctcctcttttagtatctctccccattaaattcctcctttatagaatgtgctcaaccatctctgattttcatgctttggaagagctctttctggagaagattctcgattcatgggggaaccggccttaatggctattgttgttgctagaagagggcatgaatcccatatgcat

SEQ ID NO: 79417 - DNA, 474 bp, Arabidopsis thaliana landsberg
  unsure (1)..(474): unsure at all n locations
tttggataaaaatatgtgaaatgaaagagaagagcttttatgtcatcagaaattcacgagaagcagcacaggtgtacaagtcatctagcagagtcacaccaatattctagcaaaagaaaccaacaacaactggttagcaagtttgaatgatttagcaaaaagataatagtccataaagtagccgacaaagagagtacatagggcagaaagactgattcctcgaagacatttcttgcttttgatgaatcattaatcaataagttcatagcaaaacttgatataaacatttagaacgtggtgtatttgaatgtaaaatcataatgacagcaaaatatattaacgtttcnnnnnnnnnnnnnnnnnnnnnntaaaattgaatgtgtatgtttgagttctcgcagatattaaactattccactgaacagattcataaattacttttagggcctaactccatacgtataatttgtgact

SEQ ID NO: 79418 - DNA, 614 bp, Arabidopsis thaliana landsberg
  unsure (1)..(614): unsure at all n locations
catatgtttctttctcttttatttgggtcatagccgcgttcaattcgtgctttttgtcaaatgtaattacatgattgaactaaaaaaacttattactgtttttcaatcaacttattaaccttgattttttttataacatttttataacaaaataaaaataaaaattggcacatgatcaaatcatcaatctcaaataagataaaaccaaaggtgtaataaggttcatttttttgtggagaaaccgagtcaatgctaccaaattgcctatataggcttgaattttatgtaaatgcttttttgaatggaataatccgattttttattttattttttcttatggaaaattataacatggtatagataaaaattttgttttgtaataagtgatatttggtctaacggcgcgtatgtatagttcttttacaaaagtgagtaatagtggttttctggttcaaatactattgagaatggtatcagttntgatggacaacaagtgtatgagactnncgcgatacttctcaataaccattnnaccattaagaatacanaaattagattttcgactatactttggttcgatacatatacatgcatgcacaccatacaactaaaac

SEQ ID NO: 79419 - DNA, 374 bp, Arabidopsis thaliana landsberg
acacacaacctatgagctaaagacttacaggctaaagaacataaaccctacagtagaatcaaacaaaaagacacactcacaaaactctaaatcatcacctttgagtttatcgatgaaacaaaaacgaaaccctagccgaaacaagagaggatttttttctttcttttttttcaatgtatctcttttgcattttgttactctcaaaatttagctccgacctgagaggaaaaatggttcagtgacagtagcataaatcgaggattcttcgcttacagtattattcgtctacgacgcggttacattataattaaagctgctcttaccatcttgaccggtcatacagctgacttatgttattgactttgctttatgtc

SEQ ID NO: 79420 - DNA, 585 bp, Arabidopsis thaliana landsberg
  unsure (1)..(585): unsure at all n locations
tatacttttgtctaaccaatccaaagacaactttttgtttacaagctgtacgtttgtctaaccatttcaaacgtttgacagaaacaactttcatgaatttttcttgcattacagtattactctgaaaaatcatagaaatgacatctttcgtccaaacttcacaactgttcaacagacgagaactttacgtcgtagaattatgatttccggtacttaatttgtttatttctaatgtctaaatcatacacacgagcgtgaaagtttaaaagtataagtattggtcaactattaaacttacaaatgcaaaacatcaactcaaactcaaattcgagttcatcgattatatattttagaaaaactaaaggtaaaatataatggatccgaactttatttaacaagtttatcaaaaacaaacaatagtatcccttacggaaacttgaacaagtctccacctgngaaatgtcacaactcacaactataacagcctggcatcagtagtagtctaaacaaacatactcctgatgatgaactatctgaagaactaaatcctcaagtctcaacgaagcgtgttgaaccgtatagatg

SEQ ID NO: 79421 - DNA, 561 bp, Arabidopsis thaliana landsberg
aaggcacgccaatatgccggcccgctcgattcctatggccaggtggtcgtgctcttcatcggccataactatcgcgtggtgatcaccggggtcggccgcatctatgtccagcaggggcagacggtcggccgtcacgaaccgctgggccggatgcccaatctctccgagaagaaagccattatttacatggaactgcgcaagggcgaagcccccgtcaatccggcaacggcgcttcagttgaccagtcggtagggctggccgcaaaactaaatatgaccgccccgtttacgccatgttcgcactcttatatgctaaactgattgcatgcccaccgaggatcagatgaagaatatttaccttgccggcgccgccgctgtcgctctgagcatcggggccgtggcctatgccagccagccggcattcgcgcctcgttcggatacctacaaacaactcgaactcttcggcaatgtgctggcgatcgtccagcaggactatgtcgtcccggtcgattcgaagatgctgatcaatgccgctctggaaggcatgctcggttcactcgat

SEQ ID NO: 79422 - DNA, 330 bp, Arabidopsis thaliana landsberg
cccaacaatgtaccctgggcgatgcctctttataggctgtgtcctatcacaagctaaccacgtaatctccgtttacatgcacgagttgattgaaaggaccatgatccatagagtcactatggactacggattagcacttcagaatgtgcgagacactaactgagagagagtaacaacaaagtatcacagggaaagcaataatcacgagtcgtgaccagagaaaccgtattgactggtggacctaacagaaagaatatcaatagagagatctgtatgtctagagacatagcatgtaaaagtcatgaacttagagacttgtggacgaacaaa

SEQ ID NO: 79423 - DNA, 178 bp, Arabidopsis thaliana landsberg
ccacggttcaccatatatatataatctaatactgccaagcttctatggttcttctatatatttccttctgcaacgatggacactgaacctcattagcttgatctatgccctgacgacatgcttatatagcagagtccgccgtaaccattgacctcatgattctcacttggaaggacct

SEQ ID NO: 79424 - DNA, 598 bp, Arabidopsis thaliana landsberg
tttggtgggagcgagcggccctgcttagattaggtaggcttcacaaagcttttattactcttattacgactatgtatatatattattgtctcaattggcatcatattctattttatttcacgtggcccgccattttcagatgttttgttttctattcagaataactaccactctttttagctgaagaacataaactagcacttccaaccgtatatgctataaaatgaatggtaatgtggctttaaacaatttgtatgtgttttggatgaaattatgcgtatgttaaaatgttgattgggagagtggttgttcttcaaagaacttcgagtttacaagctttcgaaaaaaagattcgacatctaaaggacaaacgagactaccattcttggtgatctaaagagtaatatccatggagtatgctgatttagtccggttgctttatgtgttcaacatatgctagatgcgtggatgtcgattgttgagcgtcgtcgcatagcttttgatgataaagataacttttgtgcttattgacattctatagatctcctaatctactgatagatctcataaatggtaaaaaaaaaaaagaatttgaaga

SEQ ID NO: 79425 - DNA, 509 bp, Arabidopsis thaliana landsberg
  unsure (1)..(509): unsure at all n locations
tacatgcacaccacatgttcgatgaaattactaaaccatgtaatcgttatcaaatcctcatctattttcttaaatgttgcaggaatctgggaaagtaatcgtttttggcttaattctgatttgggttcttacttatatagtcaacatgcttctggtttctcctgcttgtagaggtgtttatcttcagactatagatccaaagccaattgatttctcagctagagcctcttatgcactttgctttcaggtaaccatttcatctcctgtaactttgatcttgttgattcctatcttgaagttgtaaagtttggatttttcttcttttatgtagattcctacttcaatccctaaaagagagtgtttgatgaggttaggaacggtcttttgttttaatcagaagcatagagagcagacaagttttaagaaacggtatgtatctacgcagaatgtggatcttcctcctattntaccaaagaacaagaagaaaccttatcctattccttttaagc

SEQ ID NO: 79426 - DNA, 294 bp, Arabidopsis thaliana landsberg
cgaattacttttaggtgggggacatgaatcctgggtagttgaatgagatggtatgccttttgactaaagaatactgcttctggtatgatatcagacaatggcttgagtgacaccccggtgagcatctatggccaggattgtgttcgttgccgttactaggtcacctaacctagtgtaaacctcacgatgtgcattggcctcctgctgataaggactgaattgacttagagccgctgaagacaacaaagagctgagaacctattgaggatgaacgacccttcgaagaggaacttg

SEQ ID NO: 79427 - DNA, 441 bp, Arabidopsis thaliana landsberg
agtaaatcgggagtgtctgatccagtggctactaatgaggtttttcagaagttatccattttctttggtgattatgcattgtatgcttatttgatctgggggacagtactctaggtctattaaatctttctccctcgtcacgactggctttgatgtgttattgccttaagtatattcaggaatgaattgatgatcattcttgtttttgacttttgagttatgttgttacttctgatttaagaagatttaaacttttgtatctctttctgagatatgaaatatgtacattctatcctctctgacacctttgaaatcttgtgctgatgcagatgtagtccagacagcacttggctttagtgtctatacagctcttctctacgcgtgggcatggacgttctcgataggaggagaacaactgctcggccctctttacgataagct

SEQ ID NO: 79428 - DNA, 551 bp, Arabidopsis thaliana landsberg
ggttagtcgcaggagggttcaatcgtgccatctgcttccatagtggcagtgtcttgctcgtctccagatctgccaggagttgctcctccgagtcaacaaccgcggtagcaacctctgtagtcgacatgattgtgttttgagtttgattaattcagaattgatgttttctggtgttccttcatgtccggtaacgacggccaatattatactcggggttcatcgcggcctcggatgcgtgatgctcgcaccgggtatacatcgggaacgcttccccggttggcggttgggatcgcggggaagggggaattataagctatgcaggggcgagcgctagatcgaatcacaaatcaaattccgtgttttcgtcctcgtctgctatcggaaaatgtcgtcaactactcggcttgatgaggctctgcccggtggttctctaaggctagttttgtctaccaccaatccaagggcgaacgataataacatagacatctacaggccccagctatcccagcaactgcctcgcctttctcagttctccacctacagctgaagct

SEQ ID NO: 79429 - DNA, 543 bp, Arabidopsis thaliana landsberg
  unsure (1)..(543): unsure at all n locations
atctcgagatcatccattgcgtcnnnnnnnnnnnnnnnnnatctatgctctttgtcggcgttttcttcgtaactgctttcgtctgcggaatcggagacactagtcgtagtcgaagtactgaatctcgatgatctgtaagaacgtacagagacacattcaggatctaaatactcacggttcgcttttaaaacacgatgaaactctgattcgagaagcttcatcgccgattgcattagattctgtgcgtagattagcttctccgaggaagggttaacggaaaccaaacgatgcatcgtgctttgtagatgtctaacggctgtaacaaannnnnnnnnnnnnnnnnnnnnnnnggtggagaagaggaagtcgtcggaggaagaagcagccggagaagtccattttgatatgacggtgttgatgttgctcatacattcttgaacagctgattccgcgagagagagatgagctgttggttttctccggtggaggagatgatcggaataaatgcttccccatttttggggtttgctctgttttattttt

SEQ ID NO: 79430 - DNA, 194 bp, Arabidopsis thaliana landsberg
accgatactgcttccttcatcttgacggccgtttttacggatccgtttttttaatttcatctctatttatttgttacatgttatattgtcatgtcatgttacgtcactttgtttaactatttatcattaaattcacttttttattttattctgggcacatattaattgtgctgtgaacagcctgcataatccat

SEQ ID NO: 79431 - DNA, 139 bp, Arabidopsis thaliana landsberg
actaggaaaattcatgtaccattttaaagtactttaaaaatatctcgaatacataacaataactgtagatttgtaaatataaaagaacgtaacccccatttccccattcctttcaccaaccaatagcactttaaaataa

SEQ ID NO: 79432 - DNA, 470 bp, Arabidopsis thaliana landsberg
aactccagatcatcgccgatccgatccggttgctggattcggtattgatctgcgtcggcgcaagcgggctgctggtgacgtcgaggaagaatgcggaaaggcgtggcctgaccaaatgcgttgtgccggttggttacggcgaacgcacaaattatcgggcgcgcgagcctattgtggacattaccgaaaccgggcacctgcctgccggcgcccgtgcgtttgcgcaagctggcttgaagccggacaagatcgcttcattccatccttatgacgattttctgattgcgattgtcatgcagctcgaaatgctcgggttctgcaagcaggggcagggctgctactttatcaagacaagagacctcagccacacaggagatctgccgctcaacaccggcggtggtcaactgtccgcagggcaggtgggccttgcgagcggcggaaccaatctgatcgaagcggtgcgccaattg

SEQ ID NO: 79433 - DNA, 438 bp, Arabidopsis thaliana landsberg
attgactcttattcaatttgacaacggatgcattttggatcgattttcatgcccctggagatataatctgaaagttgtaggtaatgctcttgaaatagtacgccagagcatgtattttatctttgggattatagaacttttccatatctctgacttcacatccactgacccctggggagctgctggttataatttgacaatatgtcagatcatgagtgagtcaccaatatccggattttaccgtatactctcctgaaagagtgtagtaccaaattacagaatcctgatgtccttcccgagagagacgaatgctcttgaggtgatcgtggacttcaggacttatacgaagaggaattagattatcattcctataccggcgtaatccgtttatggaaatgtgacttatcattgatgtattactaacaagtgttatgactt

SEQ ID NO: 79434 - DNA, 555 bp, Arabidopsis thaliana landsberg
atccactttgacgttaattttgtagtgtatattgtgtacactgtctcggaattatagaacgattttttcttttttaaaaagaatacccatcatgtaattaataaataatacaaattattgcattgctttcaatattaaacgatacaaaaaacacaagtcttttcaatacttcaactaccgaccacgatatagattagtattcatgcatgaaccaacatctgtatccaataaatcctaacttgaattaccctcgtttagactctttttgtcaaaacaattgataaaacaacgaggcattaaaaaaaaaaaaattcaagtaactttcttaaactagtttggaaaaatgaaacccgtcattgttacattataatgcaaatgttaaagtgggcatcaaagctcttctttatgtaaatgtacttagggtgtaagtaagtaaaagagaagtgcacatgcattgcctcagcgatatatcattatttaaaggcacaaaaacggaacacccatgtgctgtgtggtttctgtttttctttttaaatttgtgtgattaattttttg

SEQ ID NO: 79435 - DNA, 223 bp, Arabidopsis thaliana landsberg
  unsure (1)..(223): unsure at all n locations
tgaaaaggaaaccgacatggaaggggagggtgtacttttctaagggtcatcccatacccggatcggatatgaagcaaaacaagtgagggaggatgaggannnnnnnnnnnnnnnnnnnnnnnnnnnnnnnnnnnnnnnnnnnnnnnnnnnnnnnnnnnnnnnnnnnnnnnnnnnnnnnnnnnnnnnnnnnnnnnnnnnnnnnnnnnnnnnnnnnnnnnnnnnn

SEQ ID NO: 79436 - DNA, 584 bp, Arabidopsis thaliana landsberg
tagctattgtaagtttacttatctatgttttgtatttggattttcataaacacaccaatgtgacgtagaaatctgatttgcatgatttgtatttggatttaatccgctaatttttttagctatttaactattttcatcataaattacaattaattttcttataaatttccttaaaatcagtacttattccaccatattatgcaattttcttataaatttaaatttacatgtagaaaataaaacaaataagctaagcgcgtttatattttttttacgaattcaaaacatccaaattcaaaaacgaatataactttttccctttagtcgacactaaactcatcacaaatttgaaatagtaggagaccatccttaaatcccaaacaaaaatactttatattgatgtcgcttgaattgtcaaaacttccatctaaataatgagaaagaaacaaactacaggaaagaaatttcagtgaaaagttgacgtggacaagttagaattcgaagttctgatctaatccaatgatatttggtgagccacaaaaccattatccaaaaagacaatgtacattccgacccaaccacaa

SEQ ID NO: 79437 - DNA, 572 bp, Arabidopsis thaliana landsberg
cagatccataccaacataattttaatgattgggcatatacgcaagctaatggtcctattaatacctcgtcaaattgggctggaggcggaggtcctgtagcttatggtggcaatggcgggaacgggaatcctgcactttatttagaaaactggactgccgattccaccgcgaacattttagatcattggtttaatacattaggacttgataagaacagactcatgtattggaacatggataatgagccagaaatttggaagggaacgcacgacgatgttgctagttctgccattactgcagagctgtatatgcagaaatattttgctgttgccaaagcagtacgtgcaaagtatccagatataaaacttgttggccccgtttctacaaatgagtggcaatggtatacttggaacagctcaaaagttacagacccgaatgatggaaaacaatatccttggatgcagtattttataaaacgtattgctgaagaagaagctgcttctgggatacgtctattagatgtgttggatgttcatttttatcccggtacaagaaatgatcccactacaaca

SEQ ID NO: 79438 - DNA, 378 bp, Arabidopsis thaliana landsberg
caaacacggaagccaccaacccaacgtcggcgactacaagaacacatatttatgttataacacggcaaaggaggaaaccggaggagaacgaacaaacagcagacagcaagctgtgtcgaggacacacagtaaactgcaccaaaaacactgaaaaacaacccgacagggcgaggcgagaggtaccgcgtggagtaatcataaccgtgctgaatcacggaaggttccaagggcagctccaggtaaaccggctgtactgttcaaaacaacaaccagcccccagagatagacaaacagatacagactagaacagccagagacattagtaggaagagaagagagggaccggcgccacctacagaccgctgacggaaacgtgga

SEQ ID NO: 79439 - DNA, 597 bp, Arabidopsis thaliana landsberg
gacactggtgagaaagtcccggtcggcgggatagagcgtgcacgcaaacatgaagtcttgccatactagcaagcccagttcgtcacagagatcgtagaaaggctcgctttcgtagatgccgccgccccacacgcggacggcgttcatatggactgcggcggcggcccggagatcgcgatcgtagcggcggcgagtcaggccggcgacgaaactgtgcgccggtatccagttggctcctttgagaaagaccggacgtccgttgacgacgaagcggaacgattccccccatcgatcgggcgagcggtccaggcgaagggtgcgcagtccgatccgccgtttcaaggggccgagcgtccggcccgagcggtcgcgaaccgtgacggcgagatggtaaagcggttgtgcgccctgtccggcgggccaccacaattgcggggcgggcacggcgagtttgcccgcggtggtggcggcgaaatcgatgctggcgaccgggcggcccgccagcgaaagcgcggcggtgacgactgccgaccggtcggggcgggcgagctccgcggtcacggcgagggaaaccgcgccgcggctgcgtgatgctga

SEQ ID NO: 79440 - DNA, 412 bp, Arabidopsis thaliana landsberg
gcaccgtatcaggttaattgtggactctaccccttcattaacaaaagcgttactgtgtcgacacaagggttcgttagagtagagctgattgcctatccaacatttaatatgcatctgacagaagaaattgattatccgacagacaacctctgctaaatctttgggagcgaaaagaagattgaggcgagggcttctaagctaataaaacatgcgtgtacatctaaagcttatgcatccactctaggacatcctaaacatagatggtagggaagttagatgctatctcttttcatactgcacatgcagacagctgcctatgactccatctgctggctgaacagatgactctattgcccatgactgcttgatcacgtggctcattactagcttgtacagatggagtcagagctcc

SEQ ID NO: 79441 - DNA, 332 bp, Arabidopsis thaliana landsberg
gatcaatcatgcctccatatagaaaaaacaaaattgacggagacaaagaaaaaaaaacacttatttttcattgaatataaatgcaaatattattttgaaaaagtagaaaaataaagagaagatggggtttaaaggcgggaccggtccgtcatcaatgccacctccctaactcctttctctttctctctttcagctacttgcaacaaaattgcaaaattgtcgacagaaacttctctcaaatttagttcctttctcatttatccactgctcttaatccaacttcaatatctctctatcctcacaatattgggggtgtttctccttcaactttc

SEQ ID NO: 79442 - DNA, 523 bp, Arabidopsis thaliana landsberg
gcctacttcttacatctcaaaagtacaaaccatttagtaaattaatgaagaaaaagttgacaggaaaaatttggagactccaagtcttgcccaaggaatttgtcattgcaactaaagataaataagagtactgtcttcaagttattaactcatattaggttgtaatcggttacttaatcaaatgttaactatataacaactattaatattgtaatatgtggtccattgactttattctgttaagagaatcattaccattattattgcaaaacctcatgattaaggagcattgcatttcttcttttgctattctacctttcggctcggccacattgtttcttaattctccaacactttttaattctcaaaacatttaggagcaatctattcccttattctttttaataaactaaaagtccattttttacaacaattacaattgcgagctagatttataaatgttatgtcacgacagctgccttttataaatattctccgttattgaattctccttgttcagtga

SEQ ID NO: 79443 - DNA, 719 bp, Arabidopsis thaliana landsberg
tgatatttacatgcaatgatcattttaatactcctaaatttctatagtattaaatagttaactccaatttatcaaaactcaaacttatatgaaaacataaattcggactgactataatcaaattctaaaactaaagcttgaactacttacatcacctaaaactctccaaatcaaccaatctagaaaaaatatttgcttgaatgggatgtcaccacctaaacctcgcctaaccgaaccaacttaactaaaaattagccattactagacatattttcttacaacaattttaacaaaaaatgtaaagaaaaaactttgtactttacaatgtagtcacctaaaccatgaagaaattgttccttgaatgatcgagatgttaatcacctaatacattcctaaccaaaataacctaactagagttggaacttgaaaacataataaactatgccttaaattttcacatactgatattctaaaaccaaaagaaaaaatagcattttacatttttacttcattcacaaattttgttagattaataggaaaaacaaattagcatgagtagattctagaccttttaacttttgtactttaaagaggctccatgcatatctttataggcgtgcacatatgccccaatatattctcatcttatttcacactcttcaattcttcttccttaaccataatcatcaattacttcacatttatgaaagaaaaaaacg

SEQ ID NO: 79444 - DNA, 624 bp, Arabidopsis thaliana landsberg
  unsure (1)..(624): unsure at all n locations
tattaattactgaagacagaattattaacataaaacgtattgataattattatttaatttaatagataaagacacctaaacaacaaattatccccttcaatatccttctatattaaatgaggaaatactatggaagggtgtggaagggaatttcatgatccatttatctttgttcatcaactaaaataccgaagtgttgaataggttgcttaatattataaatttataattttatcactactatatcgtgatgattcgttaattactaaaataaatcaaaaacaaaaacaaaatctgagacagtttgatctcagctattctttatctaaattttaattttcctagtttacatttttaacttgatttacgtaaaactggaaggtccaaaccgatttaaggttatataacatagagtaatataatatttgttgaaattccaagtattaaatagttttgattttttgaaaaaaaaatatactccactaaatttttggatgatatatatagaaaataaattacataaaatattataaatataaatatttgttccaaaaaatatatttataaagatcaaaaaatatagttnggtttcttttataaattattctccgcgacaaacccctt

SEQ ID NO: 79445 - DNA, 554 bp, Arabidopsis thaliana landsberg
cgcgtaactcgatcttaggttgaaagtatggtactattcgtccatgtctcaacgcgttcgtcaacgtttcaatgctgatatcatgcggagcaacgttacttttggtcgtgagtccggttttcaggccagactgagcttccgacaagagctttgccagctcggatcgccgcaccggcttggttagtacacctatgacgtggaggccgtttgcttgcgccgcttggcgtgccgcccccaatacgctcaggtcgaagccgctcaccaatatcacctgagcattcgatctggatcccagttcgtgcaggacgtccagcccgtctctttgcggcattttaagatcgatgatcgaaacgtcaggcggatctttctcccactgatggaaaaagctttctgcactgtccgatgttcgcgctattcctccgagtgatccgacaagatttgctatcgtcgccgccacatcattctgatcatcaagcaccaagactgacggatagccggattgtttcttcaggtctgacatttaccacaattgttgctaaagttgagacaaaata

SEQ ID NO: 79446 - DNA, 490 bp, Arabidopsis thaliana landsberg
cgcctacggtgaactggaacggggacttgccgccggcgggcatccggccgaccgttcgacgatttcggcatgttcggggttgccgccgccgtcgcctggcacttcacccggcagatgcttcctcaagcggtttccgcccaccgggatcccgccctggcggagttcttcgacgcagacgtaggcatgcccgagttaagggccgccgtgcatggcgacggtctgtgccagcagggatgctcttccttgggacccgggacagcatggcccggaacggacttcttccgaaaaggaggaaggacggcctctatgccgggcaacggcacacgaaagcgggaacgaggacacgcccggattctagcgctgaccgctaacagcctcaggccatgcgctccagaaaggtcacattcacttcttactgcaggcggaaccccacgctctcgtagagccagatgggccgagcgttggtcttcacacgtgcccgaacggggtg

SEQ ID NO: 79447 - DNA, 356 bp, Arabidopsis thaliana landsberg
caattgactaaatccagaagaagaacaacaaaggtagcagctaggtcggatgtagacttctactactctacttttttcaacccccaggcggaagaaggggatcgagagaaagaaatatcacatcagcggatagtgacagaaaaccggaatcaaaaaaaaaaggaccttaccaaaaagcaagaaatacaccactaaaccaaacgaggaagagcacaaatgcgggatcaaccaagcggaaaagagcaaaaccgacaaaaattgagtgaaacctaatgaatcgacgccaaacaaagaattagaacaggatgcagcctaattgaggctaagacagacatagaaacccgaggcagaaaaaa

SEQ ID NO: 79448 - DNA, 660 bp, Arabidopsis thaliana landsberg
ctattctggtagacttaaaagttatgcgggttatgtcaaagaactacgtgaaagtttcttcaggaacaactctaagtagaagcaagaaacatccttaaagagagccaccaaaactgcattatggtggtcgatgacgatgattttctagctggaatcctaacacacggtgacataagaagatacttgtccaataacgcctctacaatcttagatgtgagtagtgaaacaaaacaaactccctcagtctcatcgcatttagttgaaccgagtttaagtcttcgtctcttgcaggagaatacatgtccggtttcttctgtatgtactaagaaaataagctatcgaggccaagaacgcggtttacttacttgttatccagacgccacagttggtgtagccaaggagttgatggaggctagaggtgtaaagcaattacctgttgtaaaacgaggtgaagtaattcacaaagggaaacgaaggaaactgcttggcctccttcattacgattccatttggacttttctcaggtaaaaaatatctctttttactaaacactagaaatctaaaatatgaccaaaaccaaagttaaattttttggttctctttgtttttgtaacgcagagatgaaatgagtcgtaggagatcgatcaacgaccggagaaa

SEQ ID NO: 79449 - DNA, 547 bp, Arabidopsis thaliana landsberg
  unsure (1)..(547): unsure at all n locations
attcgaaacctccccctcagtgaccaattttgcggttgaaacgccatccacagcacagtttattgaatttttggacaactttgcaaacgacttgaaggaattactggggagaacgggctcatcctcacaggccatggggatgattggaaactttgcggaagcgttgaactctggacagctatcccagtccgctttggaccatgcaagagcaaagatgacagatttcttggaatctcaaagcactnnnnnnnnnnnnnnnnnnnnnnnnnnnnnnnnnnnnnnnnnnnnnnnnnnnnnnattgctggagatgcgcctgccgatttggagacggaggctggacagaatatggccagttcgttgactcgagtcgtcaagaacaacatgaactccttaaagattttacttttgggtggttcattagggccgaccattaacattaaggaagctttcaaagctactgctcatgttgtcacacaaagccactcaatcggttttgactagtgattatcttccaacacgagtcccagcgacttagaaaccgacttt

SEQ ID NO: 79450 - DNA, 512 bp, Arabidopsis thaliana landsberg
atatttttcgctttactacacagtttgtttagatattattatgatgatagttttgttatttgtgattttttgggattggatagttttttctttcgttgggatcggagagtgaggagatttttaaaaacgggcttcgttgaaaaatgaaaataataaaaccctagtaaagaagtctccatctttttcaatgtagccataagaaaccacatccacaactgattgttaaagactgaagagtgaaaactaatgggctttgattgatcagtaggttaaaacagaaataaagcccatctaaatcttggatttatattcagtaataatttatatgaattgcgaatattctattttctcagtaagaagaactaaagaagacttttattcaaagacaaaaccgggttaaaaccccgattttttacaacagaaattccattcccgaaacccaaacaacattaaggtgagaaaaaaaaaaaacaacatcaaatgatacaacagagaacaatacagaagaatca

SEQ ID NO: 79451 - DNA, 609 bp, Arabidopsis thaliana landsberg
  unsure (1)..(609): unsure at all n locations
cgattaaagtcgttggagtgttgtagaggatgacgacagatcactgcaggatggaggtgcaagtcaggcagaaagtaagcatgacgaattggaggaaaccaaagaagaaagtgatgaaatgaaaacaagtcttggtgtagagagaaatggagataagaaagaactagagcaccagtttgagtgtcaagagaatgaaacatatagaagcaatgtggaggcagctgagtcttcctgtcgttttccaaacggagaagaaattattggcgcagcaacaaatggaaacatgaaagaaaatgagggagaggagggagaggagagttgtctatcatctatggaagaagagggagatgctacttctgatattggcgcagcaacagatggaaacatgaaagaaaatgagggagaggagagttgtccatcatctatggaagaagagggagatgctacttctgatatttcacanaacatagcagagacagttgaggaacatctgaaaaagatagatgaaacatgagagaaagagagagtaagaaagctagagagagttatggtagaaagagctattcgtgaagcccgcgatagggcatttgctgatgctatggaaagagc

SEQ ID NO: 79452 - DNA, 525 bp, Arabidopsis thaliana landsberg
  unsure (1)..(525): unsure at all n locations
catactctcatcaaggtcaacaccgtttaaacttcagtattggattcttgttttagcagatgttgttatcaatattgctggatattcccatttgcttgtttacttatttaatctcttatttgatatgagacccgacttggaagtaatttacatgaaaattggtcaactgatgaagaatgttggctaaaaacttatttttaaggatttaatagaattttatcatccttctcttcggataatgtattccacttcggtggtagtttgtctctccagaaaccatacttactcctagtgcatacnaaggtggtgccttatctctcgcgagcaaattgaggactctgtcatctgaggcatttgttaatctcttaactgctatatttaagattgttcaggtaatatatgcatcaattatggaacttttaattctttaaacaagcattattagngaagttatacatataaattctatgttaaacctctggaagcctttntactttggttttgatacatctaccatataataga

SEQ ID NO: 79453 - DNA, 580 bp, Arabidopsis thaliana landsberg
ggatcggcggttttgcgggcaactaccagcaattccatcgcgccgacggcaagggctatgagttcatcttcgattgcgtgatcaagcttgataaaatcaacccgtcgacggcttcgcgcatcgtcacctcgctgtgcggctggcagaactataccggcgcgagccgcgacaagatgatcgagcagttgcagcgcatcgccgcgacgccgaagctctcgaccaatgtcgccgataaggtgatgaaggcgctgccggaagatggcagcaagaagaaggccggcccggcggtttaaccgtgaacccgcacttgaaactggagaagcaggccgcaggcgcggcctgcggcattgacgaggcgggccgcggtcccctcgccggtccggttatcgcggcgtgcgtttatatcccggctgagaaatacaagctgaaatgctggaaggaagtgcgcgacagcaaggcgatcgcggcgaagaagcgcgaagcgctttatctggagattgttgcgcatagccatcatggatttggtgaagcgacggcggaagagatcgatacgctcaatattcatcacgcgacgctgctg

SEQ ID NO: 79454 - DNA, 617 bp, Arabidopsis thaliana landsberg
gaatatcacatcttttgcttgttccctttaaatatgttactaagtagcaaaatcaatttctgatgtttccagatgagtcaccgaaactaagacatgaggagactggtcttttatctatgtcgattgctgaccgtgacaagttcggatcacactttcatattaccttcaggccaaatcagcagcttgataggtttcctctcaatattactttgtttatttcaggaatgtggattttcctttgggcattgtgttatttctgactggtttatattttcatcagaaataatgttgttttcggaaagctaattcaagggaaagagatattgaaaaaaattgaacgtgtgggtgatgaggaaggtaaacctactgtcagcgtgaagataatccgttgtggagaatattctggaggtacgaatctgctcctattggtttctactacataagtcatgatttcacaattataaccaatccatgcagataagaagaaaagtgatggtaaaaaaaatggaaagcacaagaagtctctaagagtgagaagaataaagaggcgaagacactcttcatctgagtctgagagctcttcagattctgagacagattcctcagaatctgatagt

SEQ ID NO: 79455 - DNA, 580 bp, Arabidopsis thaliana landsberg
gaaactcctctaatccattttaaagtttagagaaacactctcaacgtgcaatttagtcttctttttaccatttctttgttaaatgtgaattgtgttagaatctttttctccatgactatttccaaaaactctgttctcagtttttaccattactttttagatttaatttttaatgatacagttggtacaaaattcaaatacatctgagagaattcctagctttttctttctattaactaaattattaacagatctccacttacacgactatatatgttgtatcttatttagttcacaacaaatatcataacagaaacacttgttagatatcaaaaggtttcttttagattttgttatagatgaaaatttataatcctcaattttaattaaaaattaactcaaagttatttgtgcttaaaaaataataatgtgagagcaaatattttattcctttcctttaacatttttctttgctatttatatttggtctccattatagtgatagatttttctgttgctttcttcgttttttgacttctttcgctatatttaatctttcccttttccttatcttctccat

SEQ ID NO: 79456 - DNA, 762 bp, Arabidopsis thaliana landsberg
ctttaccaacattttacaaaaagtgtcaatatcaatatagattaactagagataatccataatttgaatggaataaacattcctaatggtcttaaacgtttgaaacttagtaaatacttcaattgatgaaagaatatttgtctataggttatagaaattctttttggcttgtcaaaaaactttatagttaccgttgaaagattttcagtgacaacatgccacatcaaatttgttctacacgtaacattcttcaaatgtttaatcagtttggataatgtcatttagaagtactcctttatctaaatgaaatagatatgtatacaagttatattttttgagaagtagagaatttttttcttttctttttaacccgaaatcatagtagaaaagtataggaaaccattaaaccaaacatgaaatttagtcttacgacatatttatgtcataatgatgagaatcatggagtacagtataattcaatgcgatttaatatcccgtcaaatcaaactacactcatgcataatagtgagagacatgaattgtagcattttttggcatttaagtctacttctatcaataaagtttgaatatcattttcttaaatgacattcgacagaaatgtagaaatcgtcgtacatgtgttaattattgaaatttcgaaagataactataatggaaaccttacagatatttttcattcttctaccttttttccaacattcttcttccgtttatttttctcgaaattatttacattggtta

SEQ ID NO: 79457 - DNA, 196 bp, Arabidopsis thaliana landsberg
acccaaaaagaagggcgctccgccccgagaaaacaagctcgaggcctccccaccccggaacaagaccgggagaaaagaggaaacccaagggccgaaccgccgaagccccaccacgccagaaggaggcccaacaacaaccccaagagccccccagggggcggcagggaggcggaaaaaggaaagagagagcaggggc

SEQ ID NO: 79458 - DNA, 138 bp, Arabidopsis thaliana landsberg
aaaaactcaactgcagtcggctaattggatagttgtgcatagagctttaatggccattaaggatattgacggaatgcgcaatgctcttgatgtcgaatattacgacattctcatgaagtaagtgcaaagttttttttt

SEQ ID NO: 79459 - DNA, 559 bp, Arabidopsis thaliana landsberg
agtaacggtagttttacaggcacgtttctgggagagttgtgcctggtcacactgttggctcactcagactccaggtactcacttttctccttttttttatatcggttaaaacatgagctcacactagaaatggaaatgactgggtttgttattttgtttatcggcgttaggtgaagagcggaatagatgaaagaccattactgcaatatgtatatgatgtataccatgatttgggtgtacaagacttgaccctgcaaactgattacacctaagctgcatctgcctcttctttgtttttaaatgctgatttgaagatttttggatgtatactagagatcatggttctttaggaatataaatattgtgacttttcaagttgtgactttgagatattgttttgtttgtggtgcatttatgttgattttcaaccacacagagaccacaaacctattgattgtaaagcttgtggatattgtggctcataatggatggcgaattaactcatatatcatttgcttatggtgaaaggttactcccaatgatccaatatgagctgaga

SEQ ID NO: 79460 - DNA, 483 bp, Arabidopsis thaliana landsberg
acggggctgacattgagggtgacgaggacttcccatttttttaaaccgaaagatcggatcttatggaaatcggcgatactaatgtgactagagagttcgaaagagactaaccaatttgctagggtttcgatactacgaaatttaacacttaatcgtttgggaaatcttatcttgtgatattccacatgattaggatataagagcatgttcatgaaagagtcctagggcctgtgcttttctcaatcgctcaatgagagacagtgactatgggtgtgaaccttaaactttctttattaggaagcgactgcgcttatggttgacctcttaatgggaatcactcacctcttcagattattatttctttacgacctgaaataatttagtattatgcgcctatttaatttcgattgtttaaagtgtggatttgtaaatatggaaggaccaatcagtgttctccttattaccccattgtttgaactatta

SEQ ID NO: 79461 - DNA, 272 bp, Arabidopsis thaliana landsberg
tgcaccagggagagtttaactaaaagcatagcgtttagttagtacggcctcacaatatccacatcgtgacagttggagaagcgaatataggcgtcggaagttggaatggttacattgtgcataggcaccagtagcgtattgtcgttgacaggtgcgggggcacgtgccctggacctgctttatagattgcaataatgagtgcagtcactattgagacggactctttcggtatataatgctgtggaatcgtgggacgtatcggaaccggactt

SEQ ID NO: 79462 - DNA, 105 bp, Arabidopsis thaliana landsberg
aaagaaaagcactccattactgatgggcccaggaggactatcaagaaatgggatcctaacacaagccaagatcaactctatgaatggattgacatgtcatgcagt

SEQ ID NO: 79463 - DNA, 570 bp, Arabidopsis thaliana landsberg
atccagttgaaaaaataaattaaaatgtaactgcaagttctttttaaactccaggttaaaacaacaagaagcagtgggtccatacgttctattaattttccttcatagaagttaatcaaacccacaaatgaaatctgaaggaactgatttggggatcagaaatgtagtggtttcaaatcagcagcattgtaaactacaagaatatgaggttaagaaatattaccagtttagaaagatcgattccagaaagattaactcctcggaacctgactctttcggtttgtatacatttgatgatatctatacgcgttaattcagcttctacttcaccaacttcttttctcgaatcttttattccatctttcagtccctgaaataggaagagaatgcaatgtattacatctccaacacaaattatttctgtactccacagaaagtaaaactccagttactagctaagaaatgaaaaacaaaaacgagaatagtaaggtaagagagaaacttagcgtacaagaagctgatagtagtctgcttcccgcaaaagttcagaacattcaggatctgacagac

SEQ ID NO: 79464 - DNA, 526 bp, Arabidopsis thaliana landsberg
aattcggtggcacatcctctgacgattttgatttatgattcacaatcacatacatgtgggcatgggggaaaaaaaaaaaaaaagggggacctacgttttattattcttctgacattattccattgcggatcataggattctaaaagtatgggaaaaacatattcatgtgacaagagtctaaatttattgcgaaatttaatgctgaacgtgttacccttgaatacaacaaccatatattcgttaatgatcttagttataacgtcgttgtttaaatcatcctaacccactagtacgtaaagaaactcattctgtctgtctgtcccacacacatttaaattagtttaggaagtggcttagataccgactaagcgcttgacatttagattatgcataaacgacccgatcaactgtctaaaattttatagagttcatgttagggaatttcctaacttcaattaaggtttattttcatacatataaatggtaaattttatactaaataaatattttgcttaaatttttgtta

SEQ ID NO: 79465 - DNA, 558 bp, Arabidopsis thaliana landsberg
  unsure (1)..(558): unsure at all n locations
taattatatagtttatgcatttcaacaccaacaattctttcatatattataaaaatttcttttgaaaccacaaatctataagcatgaacttatgaatgactaaatataactttatttggataatataaactattaaaataattaaaattgaatttgtaagtttatttatagattaaaaggttgtcttattgcatgatatttacatagcaatgtttataatttattatattttaattgtaaataaaatttggttacttttggattcttgattctttaaggcagaaacttcggttacaacctcatccttcttcccgagttcggagtcggaatcggaatcagtttcttcatccgatgaagagtcttcaatttctctgattggagtctccaattcatcttcgtcacttgaagaagccgtcagcggattgaaacgtttatgagacatggaacgatctaaggtttataaagtgactttagaagttgaaaatgagattttgctttgcattaacacttctttacgttccttaatatatatagaacaaagncgtttctaatattttc

SEQ ID NO: 79466 - DNA, 351 bp, Arabidopsis thaliana landsberg
  unsure (1)..(351): unsure at all n locations
tacttcgcctgatcatgggatatacggcccaaagaagttgcaaacggacggttgtaataggcgcttttttgtctatttgccatcgcaccactcttgatctgattggcatcgaatcccctctgatcgaagcnnnnnnnnnnnnnnnnnnnnnnnncttgaacgatctgagtgactagtttcagatcttctccgacagtgagactctctgaactttatcgggaatccatgtttctcttctgctcgcaataactatttcgcccataattctaccatcagggatgaagcggactgtagataactaaatcgacggttctgtgtctcaaaatcaacacaacagagtgctcccctcga

SEQ ID NO: 79467 - DNA, 552 bp, Arabidopsis thaliana landsberg
gatcctaaaacattcacatttgctattcagatttgtgatctttttcatcttcttcaattctctaatccagcagattttttcttttatatctggttgcaacttgttgttctggttaaaatagttcacttctagagtctcttctctaaataatccaaatgaagttgttttgcttaagagtctttacattttctatctgctttgttctccattgcgatgatatggtttcaagtctccaaaaaccgttctcttttgcctttaagaacacagaaagtaaccagaaataccaatatctatcaggctaaagtgcaattggaatgagacgttctaatatcaagttagggaatagtatctctttcttaattatggcgcattatgcgttggtttttggctgcagaacccagctgacaagagggagattctctgcgatgagacactgaagctaatctttgaagggaaagacaaagctgggtttctggagatttcaaaactcttgtccccgcactttgtgaagactgctagaccaaataactagcttagtttggaaactcctga

SEQ ID NO: 79468 - DNA, 561 bp, Arabidopsis thaliana landsberg
aacaccagaagaatgtgcgcagaatgagttggactggattactggtgcaatgaataagcggtatactttagcctcatctgttaataataagaaggggaacaaaattcattatgaaaattaaacccccttgtatggttaagaattgtgaacgcccggctacgcgacgagaatggtgcaataaacactatgaaatgtggcgacttcatggcgatccaaattataagtgtaaccgtaaaaagaataaagcgtctgatttaactgtttcttatcgagcagtacattctaggctaaagcgatctttaggcccaccctctaactaccaatgtactgattgttttgaagatgctacagaatgggcttatatacatgactgccctactgaaaagacaaacgctacaggaaatccctattgcgtgcatgaagaccattatcaacctatgtgtaagtcttgtcacgcaaagtttgatgaagtaggtacgtatgagcgaaatcctgactaaggacgaaacctgtcctggaccgcgactttgtaactcctgggaaatgtcagagaaagaacgt

SEQ ID NO: 79469 - DNA, 149 bp, Arabidopsis thaliana landsberg
  unsure (1)..(149): unsure at all n locations
agaagangaacacaagagannngnnanngnngacgaaggagagaaagaaaaaagccaattttatagagttttgaaaaaaaaagagaggaaacggaaaactgacactcagcaactgtagacaaacccacctccgaaaaaatgcaaaagca

SEQ ID NO: 79470 - DNA, 290 bp, Arabidopsis thaliana landsberg
agagcacaaagaaggaacccagaaggaaaccacaacaaaacaagccacgaaaagacgccgaaggccgcaacgaaacacccgggagacgcgccaaacaaagcgaagggccgcaacacaccagcaggaaaagccagagaaccaggacccccaccgggacagaacaccaacaaagacgagaccccaccgcgacaaccaagagcccgcgcgagcgccgcagaaaaacacaaagccggcaaagcaacacaagcacacccgacagcaaaaccacaggcagaccccaaaacacgaag

SEQ ID NO: 79471 - DNA, 610 bp, Arabidopsis thaliana landsberg
  unsure (1)..(610): unsure at all n locations
tccagccaaggcattgattacaacactccataatgaaagtatcattcacgcgccctgttgtgcacattcccatcttgggctggtgtccttgcggaattccgcagcatcgccctcaactcatcactgatgtttggggtgcggagatggacggtggaaatccgcagtatctcaggacgaacatgtaagctattttactccgtagatctgtttattggggggatgaaggtgtggtcgtagctggagttcctcggctctcaaatcctctgcacgcccgttgtcggggattgaatttccaacccgcagaatctattgaacatcatctgataagcaaagatttttctagatccgccacaatcttcccctcctccgtactgatgtcattctgcagtcttccccctagccggttccaaaaacgaaaaggttccatccatgccacgccaggatcccgcgatggtcactgcgacagaaactacgccgacaagtactggtccaagatggccgaaaatttctccataggcaccccttcttcctcaagccaactaccaagacaacagattccagaatgtacgggagagtngtcatagctcttaccatttacagtacaacatgc

SEQ ID NO: 79472 - DNA, 416 bp, Arabidopsis thaliana landsberg
cccgcggattcgtcaggagcatgatctcttcaatgagtttatgcgcttcttttgaaacctttacgactacgtcaattgggtccttattctcatccagtttgaaacggatctcttccgagttgatcatcaaagcaccttgtttaaaccgctcttttcgataaatttttgcgattttgtccaataaatgcaattcttccttgtagggaccttctgctccttccaaaatttcctgcgcatcttcgtacgcaaaccggtggtcggaatgaatcacggctttaccgaaccattcgttagacaattttccagtttcatccaattcaaaaacggccgaaaaagtaaatttatcctcctttggtcgcatggaacataccatgttggaaagctggtcctgctacatgggaaatgacaccgtcaac

SEQ ID NO: 79473 - DNA, 537 bp, Arabidopsis thaliana landsberg
  unsure (1)..(537): unsure at all n locations
aaannnnnnnnnnnnnnnnnnnnnnnnnnnnnnnnnnnaaatgtataataacactaaaaggaaatgacatccaaaagcccaatttgaaggaaaaatagaaattgaggaaaatgaagaagataaattatacatctacaaagaaaggaagaaaattaaaacatgtacggcccatttagttatagtattgactaaacgaattgtgtagttgtgccaaaattttggcccatttaattagtgtcaattccttttctcgatacaaggaaggaatcattgagattttcaatttcacaaatgtggcttgaagatattattttatcggtgagatataaaatcaactgtcataaattaagattcggaaagttaaaaattaaaacttttttttagtagctaaaaacaaattgtgctacaaaaagttagaaaaaaaaaaagagaggaaaaacatgctaaacgcatagttttgtataaatacacgtgctctttacttctncattctcttctctttacagctaccactcggatgcagatgtattttatctg

SEQ ID NO: 79474 - DNA, 388 bp, Arabidopsis thaliana landsberg
  unsure (1)..(388): unsure at all n locations
ttacactcctctactaattggatggttccttttaatttatcttatcatgaagcatctatagncaagtccaaccactactatatttttccaatactaaaccaatttaccaaccttttatgtgtagcaatcaaagtgaatcaagtggtgctaatctcccacaaatcttaatcagaatttctgtatctttttcatggcagagaccaaaccacatcatatgggggatctaatcttatccggcgttaggaatcaaaatagtggactttattaaaggcttttttttggtggcacaaccagaatctatttggggaatattcattggaattaaaatggaaccaggttgggggataagcaattcgggtgatatattaaaccttgggcaccaaaaaaa

SEQ ID NO: 79475 - DNA, 514 bp, Arabidopsis thaliana landsberg
caacaaccttacccaggtccaccagcgagaaatggataggatattttaagaatgttttggaagtgctgctgcagttcaggaaagaacagctgatatcttccgtagcattaaatacactggttaaaccgggatcaggaatatatcctccggctttagtacaggtgtggggcggcacatccggaaataacatgcagctattgtctacgatcaggcccaagccggcgaccagggaaacaaaagattatattgaagttcttgatggtcgctttgccccccgtaagctttcttatatcaaggttgtagccaaaccaataccagatgttcccaaacctgacgaaaaagccagagcgcgggctcttgccaaaactattgcttccctgctgcctaaagacagggcaatattcctcgctaaacaaaaagaagctaaggcaaaagccgatgccgaacgtataaaacaagaagcagaacgttgtataaggggcggtgcccgcagaggaaaagactgaatacgtga

SEQ ID NO: 79476 - DNA, 297 bp, Arabidopsis thaliana landsberg
gaaacaaaccaggggaacatgagaggaaacttacgggaacacccacccaaaccaggcagaaataaaagccgcggcagcccaaaaggcaagagaccgaacaaacacacccatcggagaagaacatggcgaagcaaaagcccccaaagcagagaaaaaatgcccagcccgaacagacccaacgacgggagggaaaaagccggcctgcgatcgaagcggacaatagtaaatcccttgagaaaccagaagaagaacagagatcccgccggagcaaaagtaggtaagttaaagcaaacaacc

SEQ ID NO: 79477 - DNA, 473 bp, Arabidopsis thaliana landsberg
  unsure (1)..(473): unsure at all n locations
gtgcaaggaagtctctactctctaaagcatgggatttttgtttttctaataagctagtggctcgaagagaagtggacttcagaaagctatttatctattaattagatgtagcaaatcacccacaatgcatacagctgctaagaatacctgcaagccacgttgtgtaagatgaaggatggcccaggatcaataaatccggcttcagcagcacattcttttactttaatgtacttcaacagaatctttctcattaccnnnnnnnnnnnnnnnnnnnnnccagctttactgctaaacatagtttcaagaaccaaagaaccaaatttccaaaagtttaggttggaatggtgaatgaaatcagatacagagaggctctcagaccataaagacaaacaatgctacaatgggactttttctaagaaacaaaaaactgagggagatttattcagacttcatagcaactgtgaatccatatg

SEQ ID NO: 79478 - DNA, 609 bp, Arabidopsis thaliana landsberg
  unsure (1)..(609): unsure at all n locations
gagacaaagctcatagttgagaaatgggtcagaaagagaaagtaagggttcttgtgggagttttaatggcggattttgatactagtgacgtcaaatgactaaaaagggagggaaaatggaagatagataaaatggtttcttcaaagagaagtgtgagagagacaaaaaagggtaatcaaaatggcttaagaaggaagcgaaatcaagaggtggatatactttcttcttcgtcttcctcttgcttttgttgtgcttttagtttctgagattttcttagggtggctttgtgaagaaaaggagtcataaatgctagtagcgagaagtgggttttagtttttacatttgtgattcgtttgtgtcagtgaaaaataaaaacaaatgtaattttatgtcgggaatatgcaacagggaaaacggctgtccgagccttaggttcggagtaacaggtcagcagcttcgagagaaaggaagagcctaggtgggttgttgactcgtggtggtgngggtcgtgactcacgtgacatgtgtgtacttttgggctttatgtctgttgacacgtcagctaactgttttttttttaacgcagtttaattacttaaccctaataac

SEQ ID NO: 79479 - DNA, 466 bp, Arabidopsis thaliana landsberg
cgccgggaaggacccgaaggcccctcccctatttgttggtggtcaacaattcgcggacggccctgccgactctcgcgcgcaccaacttcaaggcgcgaagcgcaatccaatttcattcgatgttcattggtgttttgatgcgtgcgactcgaaggcacgccaagttcgggtgggtccaacttctctatagggaatccacggatatacctactacacccctatatagtaaccatatccaagctgtggctatatagaatctgaacccctaggatagggaagggcaacatggatcgaaatgcgcgtgcgagcctgtgtttaaaggcttttcgtgtgccccacaccttgccggtttgacagaggcgaattaggggccttataaccgcgcctccaccccacggatggacggacatggccaagaaaatcgacgccgcacaattcaagctctacaagaactatcagacgatcc

SEQ ID NO: 79480 - DNA, 561 bp, Arabidopsis thaliana landsberg
  unsure (1)..(561): unsure at all n locations
tggtgagatcccaggcaggcttcagaagattttacgaaatatatacagccactttcgtggcggaaggcctggccatactcaacgaccacgaagtacatnnnnnnnnnnnnnnnnnnnnnnnncccaaggtaaccggtgtggaattcttcagcatcgtaaggaaggcgcaccctgatcccatgcgcatactgattaccggctataccgatatgggtgcactggtggaggcgatcaactcaggcgagatattccgttatatcaagaaaccctgggacgacctggagctcaaaaccgctatccagaacgcttacgaagtatatgagacccggctggcgctgaagaacaagatcagggaactggaaaggaccaatgacgaactgaaccgtttcgtatatagtacctcccatgacctgcgctcacctcttgcaaacatcctcggtatcctgaatgtggccaagctgcaatccccctcggaagaccccacaggtttttacgatatgatcgagggatgcgtgaacaagatggatatgttcatccacaagatcatcgagtattacaagg

SEQ ID NO: 79481 - DNA, 582 bp, Arabidopsis thaliana landsberg
  unsure (1)..(582): unsure at all n locations
acacaaacaaataatgttttttgtttcttcaatttttggaaaaagatttatttctactaaaaattaaattaaaatacgattgtaagaataatcgggaaataatatattgaaaagattttgaattttttgattcgttgagctatgtagatatcattttcccataaataaccgaaaaaagtagaaaacaaaaacatattgtaaattgtttttttaattgtttgggtaagatagtgctctgactaagcccatctgtaataagcccataaaacttttgagatattttttattgggctcatattaggccagttgcacttttttttttaatccagtcatttgtggatttaacagaaattttaacaaagttccgttacccgcaatttgtgnnnnnnnnnnnnnnnnnnnnnnnnnnnnnnnnnnnnnnnaaaaagttagcgactgaaataagaagtcactaaaaatttgactattgaaatgaaaagtcaataaaatttaaacgtattattttacccgacactaaggttaangggggattttttttttggtgttggtggtggtgtatttttgaacatttgaagatcttct

SEQ ID NO: 79482 - DNA, 472 bp, Arabidopsis thaliana landsberg
tgttataaaacttttttctatacaaattagtaattaaattggttatagttaagttaagtggatacatatacaaaattggtccgagtctcgtatccgtttatgtggttttaatagctgaaaaaacaagtttatatatcttaaatatttacgtttttagagttttataaaataattaaacggctagtcaatatttatgaattcagaaataataattttgataaaatatatgtaaatgatccattaattaatcacgttgtataatccagttcctcaaaataacaattgtatttaatctcttacgagttacgtctcaaaacaaaaagtagaataatgtaagcactatagatgtacgttgagagctgatgatgatgatgcttatggtgctgtgaggttttggtggctgggaggggagtgattagtcaactagttaggccaaagttgcaatttggggataggactgaatgagcctttt

SEQ ID NO: 79483 - DNA, 379 bp, Arabidopsis thaliana landsberg
tttttcctaataaaccaagaacatcacagggggggtgtatatcacacttatggcccacacaaaaaaatcgataagtggagtatcttcgctatgtataagtgaaaaaaaatccgatctagaattcgaacaagaccataaactaaggataaaggcttatgttcttgggttgggcagtcatacccctcccagacccaatactctaacaccaaggcccaccgaatctgaatgacagacgtgtattgtgccagtcatatacaccgtcctaccaaagaaatactaactaccagtcctatacatgaccacacatacttaaccaagcgagcggctattaagctgcagcgaaagggagggaacttacaatctaatgcacatgaagtga

SEQ ID NO: 79484 - DNA, 456 bp, Arabidopsis thaliana landsberg
aaaaaaaaagaaagagaagggtctagctagtatttgtgtcgatcgtgtggttaaggaaaaagaagggggggggacgcgtttgttctacacttatttaattatgtcgggacccgcttctggtcccctgctgggcctctctcttacatttgttttcttttttactagcgataaataagatatgagaatgagataaatcatcgtagtcagttacaagtttatacgtggttttttttaagaagtagagagaaataaaatatctatttcaattaaccacaaaaaaaaaaggaggaataggccctaaaagagagagagataagaggctacttcggtgttggggtttcgaaagacaggatggcaaaagtgtaaataggtcgcaagttggaggttgatcgtattagggaagacagactgaccgatcgtatattgctgacgttcacccactgacccccaaacaac

SEQ ID NO: 79485 - DNA, 245 bp, Arabidopsis thaliana landsberg
cattttttattgcgtacgctatcctcttgtattcaatttagattgcttctgatttctgatggtcttaattctattcatacataaattgtttttatttggggctgcgtcgagttgataagacgtaaatggggatcctgccaaactcgccagtcaattttcaaaacttgacctactgatttcattcatgtgatcgtggtgttatcaaaaggtggacttactgaggatatgctgagtaggaaacccct

SEQ ID NO: 79486 - DNA, 521 bp, Arabidopsis thaliana landsberg
  unsure (1)..(521): unsure at all n locations
ttgcgcgcccgtttgccaaaaaagatcaaatttttggaacaatcatatatacccgatacctcccttccngagaagcaacgattagcaagggaggttcggcaattggctccgtcgccgcagataactgctatgaatggagctcagggaggttcgtctctaggctagcttttgatttggcagttttgatgaatgattgttaatctctaactttctcacttctacattttccagctgactttacaccgtttattgtcccggcagcgacattgggagcattaggctatggctatatgtggttcaaggtatcttatagagttccaataacaggtatatcactaaagtcttttgcaggataaattttctctgaagctgaagtcttgctctgtggcagggaatttcattctctgcaatcatgtgtgccaccaagcggaacatggaaaatgccctgtcgcacttgaccaacctttggataccgcttcagatgctattttggttggtgcttcttccaacaattgctgcta

SEQ ID NO: 79487 - DNA, 601 bp, Arabidopsis thaliana landsberg
attacaaaaaaagaagaagaagcatattttcttaacatagttgagttaagcgttggactgttctcaaaatttagtgttgcacagtatttagaatctgccacgaaagattggacagtctctcaaaactaattataaagttttctataatctccaaacacatcatttataaactttctattcatttaaaaaactgaactattaatattttactgagtgcagcagcagctaatgtatgtgtaatctttttaatcagtgtgaactttaatttacatatgctttttccaaccaacatatgatgatgtcgtaagcatagtctcgtttgttttgtctgtatatatgattttacaaaactataattaacgttaacatgaaagagaaagtgaaaaagaaaaacaaacaaaaaaaatagcgaatgatggcagtaatagaaatagtactcacgtcatcacgtaatttgtgtttcgttcttgaattttcagcacctatgaaagattaattaatactactagcttatttagttaatttgatattttgttaatgaatcacagtcctcaagatgatttaaaacatattgtagattaagcgatactactatacaaac

SEQ ID NO: 79488 - DNA, 219 bp, Arabidopsis thaliana landsberg
  unsure (1)..(219): unsure at all n locations
gactctcngnctttgcagccaacgttacgtttacatccaacaacaagccnncnngggaaacctaaatggaacagaaaagccccccagcccccnggcgnncggcaagaancaagcgnagacacccaacaaaagcgggggcagcaacgggccaaccgagcccaccccaaacgaaccncggcacggcnccgaggaaccccgacgaacaaaccacncaaccaa

SEQ ID NO: 79489 - DNA, 500 bp, Arabidopsis thaliana landsberg
  unsure (1)..(500): unsure at all n locations
attataaaattttttattaagtatatcttttatgttgtaagatttttttttttggaaattataactaaattaaatggagtatgggtttagttttaatgaactaaccacaaataccttaaactaacgctcctttgtttctcgagaaactgacgaaatattnnnnnnnnnnnnnnnnnnnnnnnnnnnnnnatttttttataaccttcgtaaaaccattatcaactccatacctaaataaccaaattaattagttgacattttatatatagaaaacatgtatgaaaaatacaaatgcttaccaagttgttccttccatacgacttggatcaatctcgacccggagcgcggagtaattggtctagcgtcatagactccagtggatttgcatgatcattatgttgtggaatagccgatggctctatctccggaacttccgtgtccttcatgggaaactatccggtgattgggtttgagaaccaaaattttgcccactaaacaat

SEQ ID NO: 79490 - DNA, 576 bp, Arabidopsis thaliana landsberg
  unsure (1)..(576): unsure at all n locations
ttgtcctgcctcttttttcttccactcttggactaattgtaaagggtttaatgattttcatatttctaattgaaatgtacgtgcttatgaatcccatcttaccatctgagaggagcaccgatgcagtgaatttatttctgtccaccattgaaaaactatctgacttgcagttttctgatgaagatttcaatcagctttttgtaagttctcgggtaacacaaccatccaaagacatgattgatatcatctaaacacaatcgtgttggtatgcatatatattaatatatttatgcctctaatggcagcttgatttacagttggagaataagtacaatgacaaagtctaagtgaagcttatgaaagaagcagaagatgcacttgctagaaaaattaatgaagtagtcgatttgacggaacggttacttcaagtcgaagccttggagctcatacataaagcacagttgcagcttaggacagatactgaaaccgcggtagccatagaacgtgattatnnnnnnnnnnnnnnnnnnnnnnnnnnnnnnnnnnnnnnnnnnnnnnnnnnnncatgagagaatc

SEQ ID NO: 79491 - DNA, 519 bp, Arabidopsis thaliana landsberg
  unsure (1)..(519): unsure at all n locations
acccgcagccgcggtgccaaagtgnnnnnnnnnnnnnnnnnnnnnnnnnnnnnnnnnnnnnnnnnnnnnnnnnnnnnnnngggagacgacgaagtcgaatatgtcgagcccgattatccaatcgagcttgaagagtccgtttcagacgatcccttcgtcggcaagcagtgggcgctcgacaaaatgcaaacatcccaagcgtgggatctcacggcggggaacaaaaaagtcaccgtcgcggtgatcgacagtggcgtcgatatccgtcaccctgatttagccgcgaatatctggacgaatccaaaagaagtcctgaacggcaaagatgacgacggtaatggctacgtcgacgacatccacgggtgggatttcgctcacaacgacaattcaccgactccggattccgccgcgggctcgagtcacggcactcacgtcgccgggatcatcggcgcggtggtcgataacggagtcggcgtggcccgcgtggctcccgacgtgcggattatgccattgagattt

SEQ ID NO: 79492 - DNA, 503 bp, Arabidopsis thaliana landsberg
aacgtgatcacccatgaagaatttgccgccaaagccaaagcagccggtgtgctcttagctgctgcaaccgatttgttatggctggcgctgttgtaatcaccaggcgaatggggggcacatgtctcggtgggcaattcacagcgttttggcgttcccatgggtcatggaggtccgcatgctgcattttttgcatgtcaggaagaattcaaacgtttgatccccggccgcatcatcggtgtatctgtggatgctacaggaaaacatgcccttcggatggacctgcagacccgggagcaacacatccgcatggacaaagctacttcgaatatttgtacggtccacgccttgctggcgatcatggcatcaatgtatgctgtataccatggcgagaacggtatcaggaacattgcggctgaagtgcacgccaaagcataagttaccgtcaatgctttgggggcgctcggttatgaggtaacaaacaccgggttttttgataccctgca

SEQ ID NO: 79493 - DNA, 327 bp, Arabidopsis thaliana landsberg
  unsure (1)..(327): unsure at all n locations
agcctgtagtttactcctccttaccacagtnatgcttttataacacacgcgacactacaagaagacggacggagttatctaaccaggtcctctgagggctctcagagactgaaccactaaccaaaaagcatgcgtgggctggaccaagtccccctacacataagtagccgatgtgcagcttgctctttctgtgattcccctaacaatcggaggggctgtctctgactctgttgcctgcctgtgggctgggcttctagttgagctgccttgtctggcctgagtgggagaagataagctgcttatcttctcccactgggtggtggtggt

SEQ ID NO: 79494 - DNA, 292 bp, Arabidopsis thaliana landsberg
  unsure (1)..(292): unsure at all n locations
gnnnnnnnnnnnnnnnnnnnnnnnnnnnnnnnnnnnnnnnnnnnnnnnnnnnnnnnnnnnnnnnnnnnnnnnnnnnnnnnnnnnnnnnnnnnnnnnnnnnnnnnnnnnnnnnnnnnnnnnnnnnnnnnnnnnnnnnnnnnnnnnnnnnnnnnnnnnnnnnnnnnnnnnnnnnnnnnnnnnnnnnnnncccgctacaggtgccaataagacctaaggttgtctcccccccaaattaaaataaatttataattaacaaggatcaaaaacatgggagacggaacaaaagcttaaa

SEQ ID NO: 79495 - DNA, 620 bp, Arabidopsis thaliana landsberg
catgagaaaaacagtccatggtttcttcgtcgaagaaagctgtaaatctctcgtcttatgtttgatcacacaatatcataagccaccatggaacttcatcctaaatttatactgatggagttaattcgtaatctacaactttcaagttttcacaaatcaaatgaaatccttaattcatagcctaaaaaatcatagagaaatttggaagttttcctcaaaaaatcgatgatccgacgattgactagaatccgatatcaatgaaattttggtatgattagtcgatgaagaagaagaattgtagtccagcgtggagcatgtctaatatttatggtaagattccaacttcgtcccgtaccagattagtaccatatttaccaattgactttataatctaaaattttatcggtaatgaatccgaagaattgccataagcaataaataaaaaaatcacaatagaattttgaatgtaaagaccgttgtgaacattctataacttatgaagtcaagatcattcgtatcatcatctataacataaaaaatgaaaaggagtatatgttttgttggacaatactatgaaagatattaatgggtttcaactttcaagtaagtgatcaataccc

SEQ ID NO: 79496 - DNA, 484 bp, Arabidopsis thaliana landsberg
tctcaaacatgaaacatcttacctcagaactcactgttctttttctcttgaaactaatggcctcttccttatggtaatcatgcaggtcttggctagcaaaacgaaaattaatatggtaatggaacttgttaccggaggagaattgttcgacagaattgtaagactcttactagcctctatgctcaaagcaaaaaagttttttttctttttttgacgagtgtcatttttgctaaactcacactttgatgataactctcaggtttccaacggaaaattaacagaaactgatggaagaaaaatgtttcagcagcttatcgatggaatcagctactgtcatagcaaaggtgttttccacagggatctcaaggtctgcgattctctcactgtgtttcaaaccatggaaaccttatggaatagtgactgatgtttttctatattgcagctagagatgttcttcttgatgcaaagggacatataaagatca

SEQ ID NO: 79497 - DNA, 537 bp, Arabidopsis thaliana landsberg
  unsure (1)..(537): unsure at all n locations
atgtgcgactgcaattatgaattatgcaacgcattgtcgatttttgggtgcttgtacgtgaataatttttgaacaagaatcttatggattttgagattaaacgcatgtcgtttgatagatcttagaggaaagaactttaccgatagtcgtatggattatttatataaaagttccaagaaacacattatagaacgttaatcaaaattttctaattgaaattattagttacttgttcgtgattattgattcaaccaaattcttctattagggtctttttataggcaaacgtatatatattatttaatatattttcaaaaaaaaaatcctcttcgacattttattattgtcaaatgaaacaaaatatattagaaattaataaattggaataattaagaagttatgttttggtgatctatagtattatccacagtaaatatcacaaattatactagttgaacaaactatctacaaactcgttcaccatgcggataccatgaccttatgaccactcgattggnggaaaacaacacacgcatg

SEQ ID NO: 79498 - DNA, 538 bp, Arabidopsis thaliana landsberg
cactttacctctaaaattgtgtgtatattttgtattttatgttttgtgcgatgtttgcgtaaatgtgatcgtgggtagaagtttatttggttagggtctctctctctctctctctctgctacacaaaatcgagaagcatcaaacttggaaattcatcagaagcttgagaatgttggaatcaaataaatcttatatttgagctgaaagtttgctacaagtggacctcatttgacccaattttctaattaaggcccatatgtttttcagacccaaacttttttattttataatttctttttaggggttccaaaaaaataatagcatttgcgttttgaacttctaaattctaagcatggtggaataagatttaatgattatggtcttagttgctttaaaatttatcacggatgtttaaaattaaaagtgtgatcacttgaatagtttgtgtctatgcatgcttctgtgaaatatatacaaaactttttgactaaatcccaaaattcaaatctgtataacgaattcctttgataaatgtgac

SEQ ID NO: 79499 - DNA, 275 bp, Arabidopsis thaliana landsberg
ggagaacaaagatatttacaatgtggacgtacgacgagtctgttcttcacaactggaaaaaggagagctaggtagggctattctttggatagaatatacacgtatgccagccaaggtgaatatgacatggtggagcgacaacgaataatacacatgtgacgattataaatgtgaaagattactgcgaaaacagggacattataatataactagattatgacaggactgcctagttgacatgcatatagcctgattaaatgcatgtgacttgcagg

SEQ ID NO: 79500 - DNA, 532 bp, Arabidopsis thaliana landsberg
  unsure (1)..(532): unsure at all n locations
acataaaagtgagcgacacaaccaaccgggcaagcacgacngaaagagctacgggaccancaatacaataaaacaaannngccaaaggggnngcggcaggagcccacgcaaaagacccaaccaacccccgccaanaaccacgccaggaaagnaagaacacaaacccgggagcccaaacaagaggcccaaaaaagaacaaccangcccagacggaaaaaccaancagaccaaacggggnacanccaacgacaagnggcgaagagcccaaccacagagaaacncccaaccaccccancaaagaagnggaagagncaccaaacggggaaacgacaccccgccacaaggggaagnngcnccaaagccaanaaaaagcaacccacccaanagnanaaaacacccagaaaacnggccaaaaaaaggcgacccaagccgaaagaacacaagaaccaacccgncccggaccaacgcaaggaaaacaaaacccgaaaccccccaanccggcagnaaccaggaaccacgngcaaccaaagca

SEQ ID NO: 79501 - DNA, 480 bp, Arabidopsis thaliana landsberg
  unsure (1)..(480): unsure at all n locations
taaatnnattaaaaaaacctcggaaatattaagcagtccatgtgcactagttcccccactatttaattttttcaatacacaaaaccttctccagcgccaatagagtccaaattatctttaacctccacatgaggctgcatttcttttctcttttggtctgcatatctttcacgcaactatgataatattaccttttaaagttaaaatatgaataactttgttgccagaatttgccaattgacgattcctcatgtatgaaaagaatcataaatcttaatttattcgtagttcattttgaacatctcaaaattccgtattaactattagcagcacaagaaggttgtcattaagagtgtttgacaaccatggacgaacgtaactgaactatctctatctcgaaattatgccaaatataactaaattatatacttcgaaatcacaaggtttactaatacgtggccttatagtaaaacctgtgat

SEQ ID NO: 79502 - DNA, 446 bp, Arabidopsis thaliana landsberg
gaagacataaaagcaagacaaattagggttttgacctggatgttctctttagggagaagagagcggagagacgcgtagagagaagccatttcttgtctccttcgtttctcaatttctttatgtactaacttctccatgttttcttcgttattacaaactctcggcgttttactacgccttcttttcttctcctgaaaattattcatctagaagtcgttatacgttaattattttgaacaacgattcttcttgtaattatgattataataatgatgatgatgatgagacagaaggatctgatcttgtgctctgggatttgctctagtcagggatttgctgtcaagttgaataatatgggagtcggaaaaaaaaaaagatatgggagtcggaaaaaagatagtaaaagggtttggttataataattaaaacttagagaaaaaaattcc

SEQ ID NO: 79503 - DNA, 576 bp, Arabidopsis thaliana landsberg
cggcagacataggtcttgtacttggtcatgcagaaggccgagaactccgcgccattctcgcgcaggaagttttcgaccttgactgtgacctccggccacgccggattgaaggtgtcgtcgaacgcgatcacgccatgcggcgccaggcaatctttcgccagctggctgtcggccacgacatgcggcagcatatgcccgccatcgatgctgaagaatcggatttcgctcgccttggccctgatctcatcggctgaaagccgcgtgctatcgcccttgatgaccagctcctcatcgacagcaagtccgagacgccggccattctctaggaaacggccatattgcggcgaggcgccgtcatcggtctggccgagatcgaagggatcgatcgccacgaccttctgctccggaccgcagattttacggaagaggtaatatgagcgcccgtagaacacgccgatctcggcaatgccgccggcaaggctcttgctattttgactttgcaacaacgagaggaacaccagtgcatggcggggatcaatgtatccctcgatcgtctgcaagtcatgaaagatgaat

SEQ ID NO: 79504 - DNA, 276 bp, Arabidopsis thaliana landsberg
ggtaaacgatattacactccatgcttgcttgcataatgctggaatgctgtggtggcatgaccagtcatctatgccctcgctctactgcctatgggcagattcctaagctggcagacttgtatcctcaaaaatgcctcaccaggacgcctagtgctttgcgcacgcgccttttcttctggtaaactacaattgaatgcttcaagtgccatgccttgcttgtttaactagggtcccccccttctggtgctccaaacaccctcttgactctcttacact

SEQ ID NO: 79505 - DNA, 150 bp, Arabidopsis thaliana landsberg
gtcgaccaggaaatggaagccgaggctgtgaacagccgatgatttaacacctttgctctgttttggaccgctgctagttctgaagcagatggtgatgttgctcaaagggtcagaccacttatggggtcaagtggccgctctagatactgg

SEQ ID NO: 79506 - DNA, 463 bp, Arabidopsis thaliana landsberg
acacgcgcgcgtcctcgctgtggcgcacgtccttcagtgcggtgttctttttcgcgtcgaccttgccggcccagccggggcggggcgcggtgggcttgtccaccgcgcccagcgcgacctgcgagagcgtgttccaggccgtgcacgcgtcgcattggccctgccacttggcgtaatcggcgccgcagtcgctgcagacgtaggcggtgcggggtttgctcgcgatcttggccatgcgggtcgccggggaaggacatccctactttaccggctggcgtcgccccggttgagacgcgcaaaaaggcgagcccgcttgcgcggacccctctgcaaaaccttccaggacgtcgcgactcgcgaatcgtctgggcgcgacagtgctcgcctcatttgacgatattctgctgcgcgttggccgcgttgcggatgatgctcgtcagagcgtgcacctgactgatgaatc

SEQ ID NO: 79507 - DNA, 237 bp, Arabidopsis thaliana landsberg
atcactatactaacaccatatgagctatattcagccatattagatacataggggttaaataaaaagtaacaatgcttaagtgcctcttcaaacagtgtcatactatatgcactcataaatgaatcctcaactaaagagatcaaacatatcaaatgctaaatccatataaaaacgaacaatatgctattatacatacactcccacattaatctgaaatatatcaactcacgggattaa

SEQ ID NO: 79508 - DNA, 420 bp, Arabidopsis thaliana landsberg
gtcctgcgtctgtgctcggctcagactctgcacgggctcgtggttcgtctgttttgttcacacgatcgggcatatgacgcacctgggcgttggctcgatcgactatatccgcgtggagtcgccggatggtgatcgcctcacgcgggcgttggcttatcggcctctgctcctgaccgggctcctgctctaggcttacagactgttatatgccttacctcagctgtatggacagcccagccggctggtctcttatactgctgaagaggccctgctcgtagctgtactagaaacccacaagactgaccttctaacgaggccctctcgtatcagtgcaaagctgatatacctggtcatctagcaccctgacctacgggacgtgcttatgagcttcttcgagcacactgggtagctatggcatgc

SEQ ID NO: 79509 - DNA, 534 bp, Arabidopsis thaliana landsberg
  unsure (1)..(534): unsure at all n locations
gttgtcgtcggccatgccacggtcgggcgggtcggcgtgaaacggcagcaggctgttctccccggcccgcaccacccgccgatgccagtgccgcgttaccccgaacatgtcggcggccaggtcccggatctcatcggagagctgccgctcgccgaccccggggcggaccatgccgcggcgctcgatttcgtcgaacagcgcgactgccttggcctgcgcgtcgcggagccgctcgacacggatggattccggctcgcgcggggtggacacgccagcgatcctatcggcttgccttagactgcatctcgatcagataggagaccgggtgcgggctgaagcagcgcccagcacccgggctttgcggagctggcaacgccgggctctggtgcgctatctgaccgccaagccgcgagatttcctgatggtcgccacccccggcgccggtaagacgacattcgcgctgcggatcgtcgncgaactgctcgccgaccgcaccgtcgagcggatcaccatcgtggtgcccaccgaacacct

SEQ ID NO: 79510 - DNA, 545 bp, Arabidopsis thaliana landsberg
  unsure (1)..(545): unsure at all n locations
aggaatacggcgggcttggtttttctgcgaatgcgcattcggttgtggtcaccaagctggccaccaaatgaatcgcgctcgccgtgacggtgatggtgccgaactcgctcggacccggcgaactgctgatgcactacggcaccgacgagcaaaagaagaaatggttgccgggcttggtcgatggcagtgagattccgtgttttggtctgaccggccccgaagtcggctccgacgcgaccgcgatgnnnnnnnnnnnnnnnnnnnnnnnnnnnnnnnnnnnnnnnnnnnnnnnnnnnnnnnnnnnnnnnnngttttcaaaacgctacatcacgctggcgccggtggcgaccgttgtcggcctcgctttcaagctgcgcgatccggacggcttgctcggcgacaaaaacaagatcgactacggcatcacctgcgcgttggtgccggcctcgcatccggacattcacattggtcgccgtcactatccgggcgctgcgttcatgaacggcaccatcgtcggtcgcgaggtgttcgtgccgatcgacgcg

SEQ ID NO: 79511 - DNA, 518 bp, Arabidopsis thaliana landsberg
tggtgatgcatctgtatcacaccccgttgaaccaggtggctggaaccaggtaagttttatccaaaacaaaggtcatttaactttttggttaaacggcactaaaactgttgatgtacaaattggcagccctgagtgggaaaaagcatttaacgaaagtaagttcagcaaaggccgtggttttgccgacttcatgaaagttcaaaaaggccatatcgctatccaaaagcaccccggtgcaagcggttggaaaaacatgaagatccgcgagatcaaagactaataaaaaccttgcttaaaacaaaaacccgctaagtccgtcgcttagcgggttttttgtttataatcacaattaaattattcagatttgcaaacatgagcgcagcacaacaaggcaaacttttaattattgacgacgaggagcgcctgcgccaattattagcccgcattctgcaactggaaggatatactgttatacaggcggcaaccggtaaagaaggactgcgacaactggataacta

SEQ ID NO: 79512 - DNA, 340 bp, Arabidopsis thaliana landsberg
  unsure (1)..(340): unsure at all n locations
ggacaccccccgaacccggcccaagaaacagacagaccacgcaaaccggccagaacgaaaaaaaaaaacgggaaccccaacgacaaaacacagaaccaaagacagacacaacccagagaccgagcgaggcaacaaaaccgcagccccaaaacaccaggaaccagccggacgaacccgcacggccacagcggcgccgcaaggacaacaacaacacnagncanaaagcagcaaaccaaaccacacaaagaaaccaggcaacctcaacaagaccggcaacagagcaaacccgcagcacaagggcgccaaaagagacaggaacagggaacccgaaaggggccaa

SEQ ID NO: 79513 - DNA, 362 bp, Arabidopsis thaliana landsberg
aacgcccgggggggaggcgagccgaagccaagggcgaccaaacacgaccggtaagaccccaccgagttggacacaacgaagggagacgcacgagcacggcaccgcagaagcggccccaaaagcacgaggccggaaaagccacgccaaggcccaggcacagaaacgcgcccaggaaggagagagacacaagcaaaggaaagaccaagaagacaagaaccaagacacggggagcgaagcagaggagccggaccaaagccccgaccaaaaaagcgggacacaaaaggcgacaaacggagggaaaggcaacccaaacacaggacgcgacgccagcacaccagaacaaacggccacaaaacgacaag

SEQ ID NO: 79514 - DNA, 418 bp, Arabidopsis thaliana landsberg
tagactatggccggggcggcacaggaagtattcatgtttaaagcaggattccacccgcttgggtgaaggcccgaagtgggtatgcagttacagagatattaccgagctgaattcgcacgtccaacggcaatatcgaattgccaccctgcactccgtgatgtgcagcggcatcacccccgacacaatagacgatcaatacgtacacagtctggctggtgtcctgaacgggaagccataccgctataccacgccggcttacccgctgaaccgggaaggaaaaaacaacggcgttctggcctgaggcaatctcttcatgctgggcaatctttccgggaacagctcgcaaataaacaccaaaggcatgattctgaggctggaagagatcggggaataccaggatcatatgaaccggatgatg

SEQ ID NO: 79515 - DNA, 556 bp, Arabidopsis thaliana landsberg
actcatacaaatactttgcccaatactttgaagataatattatttatcaaaagttcaaaactatcactgaatcacatattgacgcaaaagttttttttttttataacgttttataataacctaaagagtgtcaaacattgactaatatttgaagtttttctaatgcaaactaaaaaagaaaaaaaaaagaaaaagaacaaacagatccctcaaattaatgaggaaaccccgaggttggtttacgaacccaagttgagtaaaataaaagattagtagtaatatgtggataagaaaattgtaaagttggctttatggttaaagaaaatgggaaaaaaatagtggtggttagattgaagtggtccagatacgccgtcaaagcaaaataaaactccaaaatgtagcggcccagcccatttaattactcctataaagatggtccaattgcaaatgaaaatgtgttaaaatttcggaaagcattatttctactacgaaggaatttaactaacttaataaagaaaatattctaaactttggaccacaccaattattatacaat

SEQ ID NO: 79516 - DNA, 108 bp, Arabidopsis thaliana landsberg
gaaacatcaaaaacaaactcggggaacacaggattgaaatttcaaacgcagacgccaagaagaacagggggcgtgaggaacatggacacaacgggcaagacccaatga

SEQ ID NO: 79517 - DNA, 587 bp, Arabidopsis thaliana landsberg
  unsure (1)..(587): unsure at all n locations
cagcttctcccatcagtccgcaaatcgtgtaacccgtgagccgtccttgcaaaacccgagaagaaaacaaaaacagtaaaggaaaaccgaaagagaaaaaaaaggcatcgtgtaaaaggcgaaaagagatttgggaaatggcgtcaaagtgtatggccatgatcatctttgttagaaccggaaaaatgagacgaaaatgagacgcaaaacgagacgaaaagggggggaaagagagactctcatcctcgtcgctgtcctacttgtccccatgctcctggccattgtaagcccacttgtcagcgtgagccggcatctgaccgtcgacggcggccttttcggcgtcctctggcttcagggccgacttgagaatggtgcgcgcggtgagaacaaagcgtcgcagacctagcgacttgactccgtgctcataaaagtggtggatcttaatgccgtgcatgaccatgagatcgccatggaagaggtgaaactcaagaactggcttgtattccgttttgtttcgtgcggcacggnggaagatctgcttcttctttgggcggaacatcatgtgcgcaggggagcccatggagaac

SEQ ID NO: 79518 - DNA, 513 bp, Arabidopsis thaliana landsberg
  unsure (1)..(513): unsure at all n locations
ccttatcttttacactagcatattcatttacctaaatagttcttccctttaaacatttaccagattcactttatttctttgactcgtcagaatcaaaaaaaaaaaactacaaatccataataaaaacaccttccacaattcttgaagaacaatacaaatcctgagaacttgaacaggcagaaccgcaagaggacaaagttttaggtatgtcagttgatcttacatttaagaaatctttgttatttatacttgttagaatatttttattctgtttaaattttatgatatatgcagttttacattttaatgatttcactttagtgtttttcttgctccaccgtctggcttccactgattttgaatggtgattaaaaataaaataataagaatgataaaaggtgtctaatcgattatggatttgtttacgtactaacgtacaacagaaatattttgaaaaatcattttcaccaatatgtgtcataanttggagatattggtaaaagaatttcatag

SEQ ID NO: 79519 - DNA, 414 bp, Arabidopsis thaliana landsberg
ggcaccgagaaggccaccgtggcaccggaagtttttgttttgtatcgccggcgccgacatcgtgctgctggcggtgttcaatccggtggtgagcatcggcgccatcatggccgtgcccggtatccgggcggcactgcggtccacgccggcaccgatcgtcggctactcgccgatcgtggccggaaagccgctgcgcggcatggccgacaccggcctgcgtgtgatcggcccggagtccacctcgcaggccgtgggcgcccactacggggcgcgcagcgcaatcgggatcctggactactggctggtgcatgagggcgagcacgccgacatcgaaagtgtgacagtgcgcagagccccgctgctgaagagcgatccggacaccaccgccgatatggagcgcaccggactggaact

SEQ ID NO: 79520 - DNA, 568 bp, Arabidopsis thaliana landsberg
  unsure (1)..(568): unsure at all n locations
agaaattgacttaaatataaaattcctgacgaagtaatatatataagattgactcataaataaatgtttctgaatgtttttaaagtttttttaaaatacatatttgcagtataaaataataaaaaacatatttaaaaattgtttctaaagacacccacagtttctatactttattttaaaatgatatatttcaattcattttcaaaattttgacaggtttaaaaaaattataatgtattttcaatatctaatataataatatataaatatatattgttttattttaaaatctcctaaactgcctaaatcatctaggcaccgactaaaaattttaggcgttaggcggaaggtcgacgtcaacatagcgccgaggccctcttgaatactgataatagtataaattaatagcgaactaatagttatattttacatttataaaagaccaaacaatttccgtgaattaaagtttcaaaacttgtataggtatattntgaaagcaacaccttgatagatttatatcaatggattaacttatgtgcagtagagattaaatatcaatcaatacata

SEQ ID NO: 79521 - DNA, 532 bp, Arabidopsis thaliana landsberg
cggacttcctgcaagcatcgctcagatcacagccgctgtctcagaatatttggccaccaaaattaagtttaccttccgtatgcacgatgacatgggtcggatattgtttattgacgcgttgttgaagagggtatatatgagtttcccactttggatgagactgtcaccttcgacttgcaaacccaagcaggacgtatgttagttttgcaccgcaaggattcgagtctgatgatggtgagcagcattcttttacatcataattttgatgatgaccttccctgtgtttttggcggtatgaaattgttgactggtgattaagtgaaaactcacaaggtttcagaatatcgtttatgaaaaagagaaccggcaaagagaagttatgaaaatggttctatcttacgatatctcttccttcatgaccaatcactaacctctgcgttttcagatggggttgaagatgccaatatattggtcagtgcactatcttttcaatatgctgctgtacttgggtgtagtcatagtactcatcatc

SEQ ID NO: 79522 - DNA, 373 bp, Arabidopsis thaliana landsberg
  unsure (1)..(373): unsure at all n locations
gtcacggccagaggctggcgtccgcccgacccggatcggtccgaagacaggccattgggtgatctggactatgtcgggacggatgcacattacaatgtgatcgggcgtattccgcatcgcggnnnnnnnnnnnnnnnnnnnnnnnnnctgctcaatctaggcgatgttctgaaacacggggcggacgagcagcttctaccacagcagttcttcgacctagtttggtgcatcaaggcgaatgggcgccgtcggtgacacaggaatagcagtcgctaaatttggtgtactggcacagtaattcgcggcgcggcatcgtccgcctgaccgaggcaagcaaggcggccaggacgttcttcnagcggcagggatggac

SEQ ID NO: 79523 - DNA, 580 bp, Arabidopsis thaliana landsberg
  unsure (1)..(580): unsure at all n locations
aacggcccatacgaatcctcaccaacataagttgtgttcatatcaacttgtccttgagtatcatatgtacgttgaggacgatacacatcggggccatttccaactcaccatccatcttgaactccaatatgggatccagtaaacattctttctaagaaatcttcattggctaaacttctcttacgaaatcgtttagccagttgagtttcctaaatattttaaaaagatttgtatattattatctatacttacgtattaaagttctaaaataaaagaaaaaataatttaatatatataatgaaatgtttacttctattcgagaatcccaccattctttatccatggttattattcatgtgctatgattgatggatactgcggtggagccgcatagtcaacggtagcagtcataccagagcttcaaattttgaagatcatttccaaaagttttccatacgaaatcagatccaatagcttctttgaaactattcctcacacttagtttcccttctctacttanaaagtgtctatccaattntctttatcaagtgagatagaactaactctatgatgtttgaga

SEQ ID NO: 79524 - DNA, 338 bp, Arabidopsis thaliana landsberg
caggaaaataagttaaataactcacatgacttctgagaatctgaatccttaatgacactttaacatatggtctattttttgtagagattgcttaggaaaaaacttattttttttgtttcagttttacatttgaatgaaccgtgttcaacaacacatacttaatatacaattatacatgcactgacattaatagctatttttaatgattgatcttcatatgaaggtattccatgacgcattaagcggtggagcccctcatagggcaaggttacacatgttgatggcagcaagttcttttttttatctccaaatcacaatagaattagattagccagaag

SEQ ID NO: 79525 - DNA, 556 bp, Arabidopsis thaliana landsberg
gcggtcagcccggcgctgccgcttccattattattaggggactaggtacgctgacacaaaattccctaccattatatgtaatagatggcgtacaaattactgcggctaatcctgccgatgatcccaatagtcatccaatgggattttccaatatcctgtctactcttaacccggatgatattgccactattaatatacttcaggggccgtctgctacggcaattttcggggctgccggaggcaatggcgttataatgattaccaccaagcatggccgggtcggtaaaacgaagattacggcgagctcactagtgacaatgcaggatgtgcccaagcacatctctgtcatgaatctgcccgagtatgccagctttagaaatgaaatggaaaaggcgggcaacctggccttagaatccgttttcgctgatccaagtgtactgggaccaggcactgactggcaaaatgttctctatagaaagagcctattacaaaaacatcaactatcgcttagtggtggctcaggtgggacaaccttttattttcaggggaatatttt

SEQ ID NO: 79526 - DNA, 538 bp, Arabidopsis thaliana landsberg
accttgccgcgctgagtttccatgaaaccaagaacgtgatctcgggtgaaggcggggcattgctgttgatctacgagcgcttcgtcgagcgcgcggagatcattcgggagaaggggaccaaccgaagcaagttcttccgcggccaggtggacaaatacacgtgggtggatattggctcctcgtacttgcccagcgacatcattgccgcctttctggcagcgcaactggaacaggccgacgccataaccaggcgccggctcgacatctggaatgtttaccacgaggctttcgcggaacttgagaaggaaggcaagctgcgccgaccggtgatccccgcgcattgcacccacaatgcgcacatgtattacctcctcacggccagcctgaaggaacgcacggggatgctcgacagcctcaggcaggccggaatcggggctgtgttccactacatcccgctgcactcatcacccgcgggcatgaagtacggtcgcacgacgacgccgttgccggtgacggacgacgccagcgagcgattgat

SEQ ID NO: 79527 - DNA, 381 bp, Arabidopsis thaliana landsberg
  unsure (1)..(381): unsure at all n locations
tgagcctcccttgcttggagctttaggaacacgatttgaatgtgataccatggtaatattcaacaaaggccggggatgagctagttacatgaacctaaacgccannnnnnnnnnnnnnnnnnntgagatgagaactgcacccttgaggttttgttcttgcgactcgaaactagttttcaagaatgccaaaagggtgttgacgccttactccacatcatgcatgcagacttagaaatcaaaattgacttcctttggaggatgtccaacatcatgttttactatgaaaatgagactacctgcctgaccgacccatactgagaaatcctttatagcagaggaagggttcgcactgatcggagcacccttgcgagccataacact

SEQ ID NO: 79528 - DNA, 254 bp, Arabidopsis thaliana landsberg
aaagctgagatcttccatatctttgtattgctctttttggctgtcttatctctatttcacttctaaatcccgaccagaaaggatgacattggtacatgttcaatctcggagtgcaagatatggtgtggaatgagatgtgctgctatttatatttgctcttgcatctctttggctttgtactcagagtgacatggtgcatgaatagtatttccgagtatgatcaataatttttgagaaactattaggcgtcggag

SEQ ID NO: 79529 - DNA, 599 bp, Arabidopsis thaliana landsberg
  unsure (1)..(599): unsure at all n locations
tttcccgctgaatagcttattgaagatcaacccagcgccgattggaataatcaccattttgataatatcctacatcatgtgcagcgtgtcgatttttaggaatgcgcccgcaagcatgctcatgagtactggagttacgatcggggcgagcatggtggaaatggcggtaatggtaatggacaatgccaggtttgccttcgccaggtaagagatcacattggacgccatgccattcggtgagcagccgatgaggataattcctgccgcgatttcgggcggaaagccgctgatgttcgcgagtgtataaccgatcgttggcatgatgataaagtggctcaccacgccnnnnnnnnnnnnnnnnnnnnnnnnnnnnncccctacaaaatccccgaaactcatggaagtacccattccgaacatgatgatctggatgagcggcgtgatcagcgttgaaagtttaaagtcgcctacagtgaggaaatgctgagggtagtataatgcggtagttaccgccgcgaaaatcacggtggtgtaagtgaaaccttntaatttttcannnnnnnnnnnnnnnnnnnnnnnnnncaggaagaatgcaatga

SEQ ID NO: 79530 - DNA, 344 bp, Arabidopsis thaliana landsberg
aagcccgtgcgttttccagatgtgctgcatgcgtatatcccagagcatttgcttaggatcaaatacattaataccacataatcaggccagcaaaaagcatacatggaaacccgttgacctaagaccaactatagtatacagaaccaactaacctatattgacagaggtattgtcgatggcttatgcataaaacggtgcatcccacctaattgcagctttagcgatgaccagatttacctttgatagaagctgcctagggtgcctaaactacataaaggagtgaggcatcaaacggtcaaggtgtcaaactataagaggtgagcccataagggaacgtacgatgg

SEQ ID NO: 79531 - DNA, 108 bp, Arabidopsis thaliana landsberg
gccccatcacccacccagaaagcgaggggggcacatgtgaggagagctagggcgcaagcggaccacgggcggagggggaagagccgctccgccacgggacggagggcg

SEQ ID NO: 79532 - DNA, 257 bp, Arabidopsis thaliana landsberg
acattagcggaggagattagatctgtgattaaatccaacggtggagaactcacgatgggagctattgataaaatggagttaaccaaatcagtggtttacgaatgtctccggtttgaaccaccggttacggctcaatacggtagagcgaagaaggatttggttatcgaaagccacgacgcggcgtttaaagtcaaagccggtgaaatgctttacggttatcaaccgttggcgacgagagatccgaatatttttgatcg

SEQ ID NO: 79533 - DNA, 603 bp, Arabidopsis thaliana landsberg
  unsure (1)..(603): unsure at all n locations
tcattcttaacttgatatggtaagacgtgtttatagatacactcactgattttataataaaaatgctatgatttttgaaatctgttaaaatcaaatctttatcaaaatgtaataaaatcaataaacgaggaatatcatatttcaaatagtatttgaaattattaagcgaataaaaacacgatttttatttttaaaaactttggtatctacgatatgataacacatgattatgtttggatttccaaatcaattaaaatcggataactctcactaattttctcttttatatgttttagttggcacaaattaaaaaaaaaaattctatcccaaattttttaaatatatgtattattggttaggtttttaaaaaagaacaaatatgggttatttcgtttattaattagtttcgacactctaacaaatgttttgtcccttacctaaagagaagacggtcatgaacaaagcaaagaaaagagtcnnnnnnnnnnnnnnnnntcccatgactcatattggtaaaactatcttctctctttcacacttcttctttttactttggactaatgatttaatcaaagatgtcattttaacatatatgtataaaac

SEQ ID NO: 79534 - DNA, 524 bp, Arabidopsis thaliana landsberg
cgatgatgtaacagatattgctgacttcttcggaaccttaaactcgccctcagtcttggcattatcctttttctcaattgcccttgcatccaaacctacaaatgtattatccccatgggttcaatacggttccaaaacaagtaatcaaaatgcaaaagctcacaaatcccaactcatacctaaacgggactttctctcaggagctttaaaagtcaatttatccttcacagggacaccaccattggtttccttgtcggcttctaacgtttccgtagttttgaatggatcaacctatatcataaacaatacaattactgcttgtacacataatcaagttcctcaagcgcaaaacaacttaaaaaatccgaaaatttggcaaaatcagcaaatcggaacttacccccattactcagtcgacgatttgagctcaaaaccgaatcttcaatcccggaaatcgaagacagcttcgtccttcgttccttatcggcgagacaacgactccggcgaggatagattactttccc

SEQ ID NO: 79535 - DNA, 550 bp, Arabidopsis thaliana landsberg
  unsure (1)..(550): unsure at all n locations
annnnnnnnnnnnnnnnnnnnnnnnnnnnnnnnnngctctatagcagtaaatgacatgaacgcagccttttggatggtttaaaatgttcagcttttcggcggatttcctaatggcggaggtacccgaaacctttccacaaatcccaccgttttgagcggcgatatcgnnnnnnnnnnnnnnnnnnnnnnnnnnnnnnnnnnnnnnnnnnnnnnnnnnnnnnnnnnnnnnnnnnnnnnnnnnnnnnnnnnnnnnattaccagagggaatgcaaatagatacgacttaataacagtaaacggccaaaacgtattggctgatctcggcggcggaatattcagtaattcatccaggcccaccctgacgaatgtaaagatttcagacaacatggctatcaacggcgccgggataactaatatgttggccaaccttgtcttaacggatgttacgatttgcggcaatacggcttctttcaatggtgggggagtaataaatattactaacggaactgccaattatggcgctgacgccacctttacaaacgtaatcatc

SEQ ID NO: 79536 - DNA, 541 bp, Arabidopsis thaliana landsberg
tcgcgacgaattcggcgcctggaatggcgtctgccatcgcccgcatcacgtcgggcggcttttgcatttcctcttcgcccgagacgaccagcgtcggcaggtcgatcgacgacagacgggaggtcatgtccgcacgctcgcccagccccagcgacgtcgccgcgatggcggtcggatgctgacggcgcagcgtcttcacgatctccgcttccttgtgccaaagagcctcgcgcgtctgcttcgccagcagtttcggcgagaaggcttcggcgacgacgtccgacccgcgctgcatcgtctcctgcgccagtttccggcggtcggcgacctttgtcggcgaatcggcgtccgcccgcgttccgcacaggatcaggccggtgagacgatcgcgatggcggcgctcgaattcgaacgcgacataaccccccatcgaggccccgcacagaatcgcgcgatcgatcttggcatgatcgagaagccgcgccacgtcgtccgcgaacagttcgggggttcgcgccgacggcagactcgagccatgcga

SEQ ID NO: 79537 - DNA, 584 bp, Arabidopsis thaliana landsberg
cctaagttggaataacatccaatttgtataattattgtaacttccaaatttcaataccatatgtaagtcgagagaccataaacattttaacttatacattattcctccttttgtcttgatattccatctctctagttacctattgtcttgatattccatctctttagttacctattgttcctctttttttaattcttgattccatatctcgacttggtttgtaacccagatgatgatttgaaagtgacttacttacagaatttgtaatccaaagtttatagttgatgttttagaggggagagtccccacgaaatgtaccgattgttataccgaaaactcgttaaatcttaagtatttttaatgttttactctcatgcaattgaccataaaatttaagtatttatcaagttaatcacttacaaagtcgtttaatcaacaatttttttttattaattttttgcagttggctaaattaaaataaaatatatatgtggaaaactaattaaaaactttttctataaccatccaagaatttagaccaacagttccgttttctaaattagtaatttcaaatttttacttaa

SEQ ID NO: 79538 - DNA, 576 bp, Arabidopsis thaliana landsberg
tataattcatcaaacctaacacattttcagtagaaatatctctgacagaaatattatttcttgtccatcaaactattaggcttttgttcaagtttttttttctttttgggggctgaaattgttcagttataatgaatgacaaaaaataccattcattttctagtacacactacttactgcttccactatattataagccatcaatcatatgtagtatcaaaagaataaccaatgcaaattcacacgctgcatgcgaaacaaaattttagagtttaggtattttctttaattactaaaaaaaaagtatctaacggtaaactttggaaatcgtagaaaaaaattggtggccgtagacagaaatcattttttaaaaataaagaaatttatataatttggatgtattacaaatcttttcttgtctacaaaattaaaataaaataaaagtaaactgcaaataaattgaaaaaggtgtagcagtagccacctaggcaatttaattgataattaaccggaaaaaagaaagacaaacaacaattaataaaaagaaagttcactttaaaagatgcttctttcctc

SEQ ID NO: 79539 - DNA, 319 bp, Arabidopsis thaliana landsberg
acaaaggctgtgaagagggtttttgcacatctgaaatcgaaaaacatattttgggaattttcatctagtcaagtccctagcaatatttgttatcttcttgttcgtttttactttgcagtttgtagacttttcagatgttccatttgctactcaatgtgttgttccttacagtgaatgctcttatcaggcaggttttagataaacttgtcacagaaattagcatatattgaatgcgagattaccaatactaggtaattcaagctagataatcaatgcaagttgtgttcatttagatttactttgatctggagtcatatgt

SEQ ID NO: 79540 - DNA, 567 bp, Arabidopsis thaliana landsberg
  unsure (1)..(567): unsure at all n locations
tttcgaacgtcacaaactgcagcgctggcatgtaactcagcgccaccagccccagttcgttcaatcagtggaccatgttctaactggaggtttgacagctgagtcagcgagactagggccaggacccccgcgtttgttatgctgggcagcccccgaatgtacaactcctgcagcccccttagcaacgaaatgacggcggcgaaacagcgatcgtcaacctctggagccagccgctcgagatcaagcacttgaagcgccgtatgtcgaggtagcgccagcatgtctgcgccggttgcggggctgtagctgtgaagctgtagcagacctgaaccacccgaagcggcgaccgccggctgcagccgtgcgatgcccacatccgtgtcgaagtctgtctccgtgctgacgccaatgtccagattttcgaggctgctgctgacggggatgtcgcgctgccgccggccgcccggaatgccctcgccgtaatcccggatgtggcacacgagctccgtcagcagcggcagcgacannnnnnnnnnnnnnnnnnnnnnnnnnnngccgtggttgacc

SEQ ID NO: 79541 - DNA, 108 bp, Arabidopsis thaliana landsberg
gttgcgatagagataaatatcacatacagttcctatgggtttctattgtgtccgtataagcagctgctgtttatgactaagtcctctgagtctctggcccaattttgt

SEQ ID NO: 79542 - DNA, 602 bp, Arabidopsis thaliana landsberg
  unsure (1)..(602): unsure at all n locations
agatagccaattgatgtatatttgaaatatgtataacatacgtagtccagaatatgaaatttttgtttgttaatattgagtgttaactcattacattaaacaagtttaattaagatcattagacgtatcactaggctaaagatacatcatcttttattagaatctattattcaaactaatatgattataatgttatttatatgttttacgtatgcaacatagaatactactacacagttgctgattaatattccaaaacaataaaggaagcttttgttttccggaccacatgggaatgtgttaccaactatctctttactttgacatgtaagatatgtaagaatcttcttaaggttttgaggctcagaagacaagagcatattttccatttatcgtaccttttgacggcaaagctaaataagaatataactttttcaactttaattggtttatcatacatctctagtactgtctcatcattttcaattaattttgtttataacttaagtttcgagacaaaaagctgagttttggaggatcatccaataatatcgttatactatgtatcggnatattatcaaatagttttgcacctaagatat

SEQ ID NO: 79543 - DNA, 419 bp, Arabidopsis thaliana landsberg
ccaaatgcaaaaaggatgacatcccgactactctcctcgggtatttctatacaccggacagcctgtcgggggaaaagcccctgcctttgtatatggatggggtcaaaaaaggctacctgccttatatccgggctgcctatgaccggccgctggactttgccgacccgattctgaaaaggacggccctgccgcttgaatttatgatcggcacgcatatttttgaaagccgagatattgacggccaggtggcctcatacactaccattggctcttgattattataacggaggatccagcggatatgtcaccagctacgtaggcggggcgggcatttccacggaggacaacaccgcggtagtatggctgaggcactgaactttgtactgaccggccagggcagatattgtttgacagcatga

SEQ ID NO: 79544 - DNA, 521 bp, Arabidopsis thaliana landsberg
gcgcagcgatcgggcgtgagatatccacccaaggcggcggcttcgatcttctttagcgcctgaatggcaactgtctcactccccatcaaaagtgatcggggcgcggggcccccgcattccttcacagcctccacaacctgctctctggtccagtatcgtctaccatcatccgcctgataagctccggggactcggttgaggtattctgaaatgccgtcggtggcagctttgtacggcagctgctcgatttggctgagaagctcgtcacgatgagccttccacatagcctcgaagccacaagcagtttcgtagtcctggtagggaacccaatcgccatgatcattcttgttcatgaccgggcgattgcggctgtctcggccgagttcgaaacggtctaccttggatgacctactgtcatcgtaagcccggccattgtttgccatggccttcatcacgtcatcgatgatgctgacgcatagagccttctgctggtctgtgcggctgtcccagaagtccatgct

SEQ ID NO: 79545 - DNA, 310 bp, Arabidopsis thaliana landsberg
cacatactaacttgcgaacgtaaggaaatggtcgaagtacaaactgattcgggtgaatggcttatttttattgggttaggctaaacgatatacagattgtgttaattatatgataacactctatggacttcactacttgatatctgtgctaactaatgttatattgaacctgcccattttgtaaccatgcccaaggcgcgaggcctgtggttatttgatcgacggataagagagtacagcatacgaatttgcgaaccgctaattgtgagttttatgcattttaggataagttcaaattcacaccgccgtt

SEQ ID NO: 79546 - DNA, 677 bp, Arabidopsis thaliana landsberg
atatattacaagcatctgaatatttggataagtttgattaaaaaaattagaattaaataattctatccaatcttatgcatactatctttgattgggtaatagatatgataaaaaaaataaaaataaaaataaaaataaaatgcaccacaaaaataattggaatttgtcagacacaaaataatttagataatcttggttggatacagatagtcacagaaacatgggtatacacaaaaagaaaatgtcctctcgcctaaaatatgtaacaaaatgagtatgaaaataaaaaactcgatgaaatgcacaataataaaatgaaatttaactcgatgtaccctaattttgggaaccagtaaaattgacgacaaaatcactaataagaaatgaaaattaaaccatcagtcattgatattataccttgaaagaatcaaaacgattttggtgttttggtgtgtgatcttctttctttctttctttcttcaagcttctttcaaaacagctttccttttgtgttctttcacatcaccaattgggtttatgaagactgaatcaacacataaccctcctttcgagtgcgtgcagtcaatctgtttcatcgaccattggatttctgtcgatggttctgatccatttactatgaattctccaaccctatactcgatccagtaaccgcgttt

SEQ ID NO: 79547 - DNA, 589 bp, Arabidopsis thaliana landsberg
  unsure (1)..(589): unsure at all n locations
ttcccgactcaggcaagctggtgcgtgcctatctgcctgccgagttgcagagcgaggatatccgcctggattggggannnnnnnnnnnnnnnnnnnnnnnnnnnnnnnnnnntggcatgattgccaagctcattgtgcgaggcgatacacgagaacgcgccatcgctaagatggagagtgttctgcgtgcttacgagattgtcggtgttgctacaaacatcgagtttctcaagcgactctgccagactgacgcctttgttgccggtgacgtcgagacaggtttcatcgacaagtggcgagacgagctctttaagcctagacacatcaagaacgaagtattcgcccaagcagccctgggcatggtcaactttgagcttcgaaactctgtgccccatggccagacgctgggctttggcgaggccaacaccattggtgaacggaaacttgccttcaagatcctggacggatacagccaggaagaaggcgaggttgtagaggccagtgtgacacagacgggccacaaccttttcaacgtgtcgtttctcgcaagggcgaagagacacctcaggtcttcaccaacatcgcatgc

SEQ ID NO: 79548 - DNA, 567 bp, Arabidopsis thaliana landsberg
  unsure (1)..(567): unsure at all n locations
cttttagaatctgtattacaacaaggcttctggctgcaggattcttagagctaacctcttgctttcttaggtttgaggcacagcatgggggattatgcgctgtaggatttgtatcagcacactgtttacataggatccccactgtaagttattttgatcttattataaactcattgggttgtatcataagtatggggaaaccttggttctaggaatctgaatgatgcgtgtgtctccttttatgttgcatctaattagcttgtgatatgacacctgcaggctgcagttactgcctatacttgactatttagttacttggaaatacaaagtcacgtatttaacattaacatcgaagctcttttggttaggaacatttttcaaataggaagtagcttgcttcacatagtaatcagtcctttgaaaataacgtatttgcaatttggaaaaaggaagtaaataatacgttgacattgcttggtaattttggtgaatacactaatctctctggcatttcttgccttcgaatactgaacaattatggaggtgctgttccttnttttttggctc

SEQ ID NO: 79549 - DNA, 569 bp, Arabidopsis thaliana landsberg
  unsure (1)..(569): unsure at all n locations
aaagaaaagtccaaagtgactaagaagagaacctgttggatttgtggaagtgaagagcacatgaataaggactgtcctaagagattccaagcaggaagtagcaaccaaaagggagaagccggtcttgcacaagccctgnnnnnnnnnnnnnnnnnnntaactgcatctcaagaaggttcaagagaagggtggatgctaaactcaggttgttcttaccacataacaaagaggagagacctaatgtttgatgtggaagaggtgaatggaggaagaatactgatgggaaacgactcctattgtgaaatcactgcaataggaaaaatcaaaattgtaaattctgatggaagtgaagccattttattcaaggtaaggcattcaccaactgctaggaggaatctcatttcgtcgggacagttggaaacacttggatgctggtatcagtcgaagaacttcagacttcgagtgtttaaaggagacaaggaagtcattgcaggagactacaaagacactctgtacatccttgatgggtgagctgaacttgcacaagtaatgtggagcaagctcacctg

SEQ ID NO: 79550 - DNA, 104 bp, Arabidopsis thaliana landsberg
  unsure (1)..(104): unsure at all n locations
aagaaagaaaaagaggaaaaaaaaagggggggggaaaggaaaaagnaggagaagaaaaaaaaaaagacaggagaaaagaaaaaaaaaaacacgaaaagaggaga

SEQ ID NO: 79551 - DNA, 590 bp, Arabidopsis thaliana landsberg
tcaaatataaatcacccaaaatcaataataaactagataattttgcaatggaagtcgaaaacatcatctcatttaaaattccaaaaaatcaaataaaggaatattaatataacatagacaatttagtatgattttggttttagttaaacatatctttgatcttcaaattttttttatttttttttcggtttgattgaaacttacttttatagtttgattttcagattgattaagaatgaatcggtttgataaaactctaatgtaaatggagtaattgttgtaatattcaaaagcctaaaccatgtgctgccatcattaattgcacttgctgacgtaattataagcgagaataatatgatcccaaaaagaaaattgataaaaaggacgaaagagaatcaaagagacgacgaagtcaaggatcaaagccttaacttttcctctaaacaatcgcttttttatttttctaaatatctctctgttcttttttcctctggatttgattctttcctggcattattattaggggttttttcatacgttgttgaaaatggcgtagttggagaaaggagacgaatcgatcatctacctac

SEQ ID NO: 79552 - DNA, 605 bp, Arabidopsis thaliana landsberg
ggggtcgccgatattttttgcggataccctgctgctgcatccgcagaaagtaactgccgacagtgtataccgtttcagccagccgtttacggaaaccgagatcgagcaggacagggatacgaaatatgatatcatccagttcctcacaaaagataccgtcaagaaagggcttgtactgtatttccacggcaaccaaactaacgtaacgcgttatgcggattatgcagagtggtttacgcgcaatggctatgatgtgtggatgccggactacccgggcttcggcaaatccacgggacagtttaccgagcaggctttgtatgatgaagcgctgcaggtgtataaactcgcccgcaatatttaccagccttcgcagatcatcatctacggaaaatcactgggcacaggcattgcggcgcagctggcttctgtacgtgattgcaaacgcctggtactggaaacaccgtattacagtatcccttccctgttcaggccctggcttttcatgtacccgctcgaatcgatccttcgcctgcagatacctacttaccaatacctgcagaaagtgacccgccccgttaccatttttcacgcactttcgactggac

SEQ ID NO: 79553 - DNA, 202 bp, Arabidopsis thaliana landsberg
gccaagagagacgccaaaacagccccggagaaagggaacaacgccaaagaacccggccgacaaccggaccagcgaggatggccgagcagatgcgagccaacaggagaaaggccaagcacgaagcaaaagccgggcaataaaccgaaggaaggccgaaagacaacaactcaaaggacaacggaaaaaggacccgaaaaccgcg

SEQ ID NO: 79554 - DNA, 476 bp, Arabidopsis thaliana landsberg
cgatctacaactgcactcttaagcatgacacatgcaaactagcacccccaaattttgcttcttctttctcctacaatagctggacccaacctacatgaagctcggctttatctggttctcttctccagttatgatgtcaaatttaaaccattcatccctcatcaagaattgtcattttaggagccatcatcataccgtgagagagcaacattttatctataaagatagttatagacctactctcatttcttccgtaagtaacacgtaggttactcggattcttgtaaaaaaaacttatgcttgttcgtgcactaaatagtagttaaatttgcgataaacgaccgagatatgtcatgcatgaaggagttaaaaagtacgcgaaggtttttcaatgatcatgcaagaaggatcgaatgacttgtgatttctatcaagctacattagagatggggtatttgtttttccttaggtgccac

SEQ ID NO: 79555 - DNA, 469 bp, Arabidopsis thaliana landsberg
  unsure (1)..(469): unsure at all n locations
aacccgaaaacacacgggagccnaagcggagagcgttccccggcatacactcaatagccaaannngaagngacggaggaaccggtaaacgagaaagaagggaaccgagcaaaccaagcaagaacgagaccacaaaaaacaaccaaccaaaaccacccgccagacgagcccaaagcgaaacagagcaacacaccaacaaaaacaagcgcaagccccaagaccgagacacggaaagagaggcgaaaaagagggcgacagagccacacgaagacaccgaacacacagaagggaaggcagcaaacccaccgcaagagaagaagcaaggacagaccaccaaacacggacaaacaaacaaaacgaccaccgcccaagcanaaagaacgaagcacagaccagacccagcaaaaaaaaagaaccgcgaaacagcggaaaacgcagccccacaagcagccagaaaagccaaggacccc

SEQ ID NO: 79556 - DNA, 488 bp, Arabidopsis thaliana landsberg
acagtctatctcctttaaccttataaatgatttctattttattggacattcatgatggcccccgggaatagcaaaatatttggagatgagacctttttctgctttgggtgaacatctgaccccctgaatcacacattgctcacgttggacatcgattcacgtcactatgaaaaacatacgtaacatatgtgactagaggggaaccacccaaacaatcgaagcaactttattttaaaggagaacactcgaaatgggatattgttttgggcggcaaacaaataaactatctttaattaccaaaacagctttattatgtaattagaaaacaaaatgttcatacaaatcctttgtgactaaggtggacttggcagcacgattctaagaaatttgctttaatgtaaaacaagcgttacgtaatctatatatttttgacggtaaactaatactatcttacaaccatgacacgttacaaaatataggacatacta

SEQ ID NO: 79557 - DNA, 582 bp, Arabidopsis thaliana landsberg
  unsure (1)..(582): unsure at all n locations
atattaccagaagaaaatctagcattgaatactaaaatgacatgttttgattaaagatagtatcatctttaatatttattgttttagttataattgtatttaaacaaaattataatatcatgatgctatatttatattttttcatttaattattacttaattaatatttagtggattttattttgctaatattttagataaatacattttaatcatataaatcttcttaacataaactacatgtgacataagtcgttttcttaaaattagattattattattttgacagcaaaaactccacctttttttttgaatatttaaaaaaactccacctttattaagcatgttcctaaaattaaaatataaaagtaatgaatacaaaagttaaatatgaaaatcactaataatgtaatcggaggccggatcgatctggtgacccaatcacaaaacttgtgaaccattattcgatcaatcaatgtaccgtgtgagccaaggctctntatttctaacctaagaattttcagatttaggttttgaggcctattaagattaaatgaacggtattttgggtaatgataacta

SEQ ID NO: 79558 - DNA, 577 bp, Arabidopsis thaliana landsberg
  unsure (1)..(577): unsure at all n locations
aagatgacatcattagaatactacagtgtaagaaacattcaggcacggacctgatgatacagaattaagaaatgctcacgcaatgtaacaccatagggaattctcttccttacgaccaacagagtaggagtcatcgacagagccttcaagtcgcgcatccatctttccctctattaccccagactcgacaagaaaagaacggcacagatttgggaaaataatcttgctcttcttgatcaggagttcaagaaagacaagaaaggggagggtcaggaaatcaaactggacaaggagagtatcatgagtttctcgaaagagcacttcaagaaattgaagaaggagggattacctccgtggaacgggcggttagtttccattggaacctccttaatgtctgtcatgagactgatgaaagattgatacttgctagacaaatccggaacgcctttcagacagctgnnnnnnnnnnnnnnnnnnnntcgaagtccacgaatccggctcaaagtgtcaccctcagcgctggacatttcagcaaggacgcaaagagtgctatcgaatttgacatgttcttgagaga

SEQ ID NO: 79559 - DNA, 128 bp, Arabidopsis thaliana landsberg
agggagggggctttttttttcggtaagacacaaacacaacaaggggtcattacatgtgcgcgactaggcgacgacatgagacggggctcccatatccccacggcctccgatgatgcgtgcgacggata

SEQ ID NO: 79560 - DNA, 480 bp, Arabidopsis thaliana landsberg
agtttcataatatggacttcatggccagcaaacattcatttgtcagcatctttcaaggtttttttaatttcaggaatccggtccctatctgcagctgagccgatcacctaagtacatccaccaatatagggtgcaattaataattacaacaaaagtctttgaagcatctccacacaatatggacagagagagagagagaagtaagatccgcctacctttgcaccatacctgtcttttaatttcaaattgccaccagtgtgatcataatggtgatgtgtatttaatatataagttagatttcgactattcttctggagggcatccataacaggtacagcttcaaaagggtcaaccacaccaactgtaccggtattcttatcatttaagatataagcataattgtccgtaagacattggtaccataaaagaagaaattgtcttctccaagactgcttaacaagccttggtgacttgatattt

SEQ ID NO: 79561 - DNA, 382 bp, Arabidopsis thaliana landsberg
agtgtggtggtggtcgacaattgccataatggacatttcacttaaactataatgattatgatctgagcggtccgaatttccctgaacaggggcaccaaataaggtgagagcccaaactatcacctgaccctacgcaccacaaggcgctgtctacaagccgataagcaagcgaaagccacccccaccgttcagttatgtcgagacaaggctatacacgggcgaaagacctatagccaacaaataccgcctggtacatataaaatggaccttgaaacgaaagttaaaaaccgttcgacatagattggacgaaacactcaatcatgctcttattcttgattcaattccgcaatcatgctatcatatgctcccaaccttcttacaa

SEQ ID NO: 79562 - DNA, 595 bp, Arabidopsis thaliana landsberg
gacgctggagtataatttaaatattaaaataaaaagagaaaaagagaacaataatccaaaaatatacagattggatgaaattattctcaaataattatacaacattcccgctttttgccttttcaactgctaaaaatcatttaaagaaaaacaaattttacttatacaataataaaaaagaaagcaaacataatatgtatattaataatatccgtacgacagaaagagttgtataattgcataatgattacaccattagatctctaccactttcattagactccaaatttttcatattaaataaatctgatttctatctattggaagattaacaaataaagttcccacaaaataaatactaaaagaattctccattttatctaatactagattcctcgttacagctcgtgcatgttatttcactaatctttttcaaaaaatatttaaagattgtaatttaactacaaatacctcttgccttttccaatttcaattactctagggtcatcaattatatgttgattcttaaacacaaagaagagagaagaaacaaaaataagcatgagctatgacactagatatatatcttttttct

SEQ ID NO: 79563 - DNA, 387 bp, Arabidopsis thaliana landsberg
tttatctacactgtgcacatcttttatcctgaagggagaggagacgaactgcaatcgaatttcatggtcccgcatcattgacctacgtgttatgcttaataaaaagtcctgaaaaaagcatgaccacataaacataagccaatgtgagttttcttgtgcccaactattcgttacctgttgttaatgattcaccagagaatcatcacttgctgttactgcagcccgatcatgcgggctcgatcgtccattgccattatatggaacccttctctggaagaaatgtttaactggtttagaatgaggttactctgtaagagggatctgatgcactttttcatctctaatggccacaccacatcgatcagtgcacatatattcctcttcatc

SEQ ID NO: 79564 - DNA, 485 bp, Arabidopsis thaliana landsberg
tttccccagaagtcgacgccggatgtcgtaggctttcttcatctggtacacggagcttgaggcggggatgtttagcttttggtggcgttggttcttgtcgttttcgacgcggtgccacgtgaaatcgtcatcgtcgtccggaaggaaggccagggtggtgtggcgttcgttgtcagcgcggaagggttgctgctggggcagcacgccggtgagggcggcttgagggtattgccaggcgggtgcggcctggtcttgttccaggccggccggtggtgttgctgcacggcctcgtcgccctgatgggtttgtcgtgttgggagtcgtggggcgtgggcgcatgctggcctcgatgcgtgcttgttccagatcggacagccgttcgcgtggagcgcatttcgccgcatgacggtgctggatgcggtgcacggcatccaccttgaggtattcgctttcgcgcacagcgtcttcatgtgatggcttgcaag

SEQ ID NO: 79565 - DNA, 409 bp, Arabidopsis thaliana landsberg
  unsure (1)..(409): unsure at all n locations
aaaggacagagaccaagggggggaccagaccggacgcgcgcacagaaaaagttgacggtggtgaaaaaaggaagcgaaaccggggcgcgggcagcaaaacaaccgagcacgcaaggccgacaagaaccgaaccgaccgcgcacagaagcacagcaacgnggcaccgacgaagacnccgcacagaacggagaagacgggagaacgaagccccggggcaaagaagaacgcgcccaagaaagcgaggacnaaaganacgcaaacccccaagcngcgccacccagaggagagagggccccgcgcncgccagggaacgcgaaaagcgagaggcgcccaaaacccgagaaagccccgaaagcagaggcgcgaccggggcacgggcagaacaacagagcacggaaacgggacacaa

SEQ ID NO: 79566 - DNA, 323 bp, Arabidopsis thaliana landsberg
acgggcgcagggccaggcgggaacccagaagaaagggtacccttaccaaaagcgaaacgagcccgacggacaggaaaagacaaaacaggggacccaccccacgggagaggagaagggggaaggagccaccccccgagggaaccggacaggagaaacaaacaacacacggggcgagcaagaaccaaccaaacgaaggggacgcagacaaagaagaaacacgaagagggaaaaaggaagaagccaaaaccaaagcgagggcaaccaaagaaccaagaaaacccaaacccacagggggaagcccaacaaccacgggagccaaaaaa

SEQ ID NO: 79567 - DNA, 610 bp, Arabidopsis thaliana landsberg
gttggtaaaagctaagttcggagaaaatatataatcaaggtatagtagtcaaagttaaaattattattttctaaagcaaacattattaactagaaataatgttgttaatttaaaattacttaaacgaggaaagacactaatttaaagcttctttttctaaagcttctttttctaaaactaacaataacattttaagtagaactatataaatttatttttttctcgtatggaaaagagaggttaatttttatcttcttctataaaaatagaagaaaatggttgaaattgttgttttaagcctgcaacacattaatatgcatgaatatagaagaattgatttctttggattaaaaatttacgtgaaatagatgaattaaaatcccaagaaaaaactttttttttaatatgcagcactttacaaatattcattgcacaaatgtaacatcacatttcctaggctttgaatgttgcgtcagatatttgacagttcaaagtgtgggacaaatgaactgtctttgacttaccaatcgacaaaataaaataaaaaggggactaactacatgcaagggcggatctaggttggagggaggtgggacatttgccctacact

SEQ ID NO: 79568 - DNA, 185 bp, Arabidopsis thaliana landsberg
  unsure (1)..(185): unsure at all n locations
ttacactcttaaaagaaaaagatcgatgtacaaaaaaaaaaaaaaaaacctannnnnnnnnnnnnnnnnnnnnnnnnaatataacttctcagggaatcatccatcaatagactgacaaacaatgagccctatataattaacagatttactctaataaatatttgaaaactgcctactggattgat

SEQ ID NO: 79569 - DNA, 373 bp, Arabidopsis thaliana landsberg
  unsure (1)..(373): unsure at all n locations
gaacaaaaaccaaggacacaaagccaaccgaaacaaaccaaaaaccatgcggatcccaaacaaacaggcaccccagggaaaggggaagcacgacgaccgaacccacaacccgcaaacaccgggaggaacaagaggccgccagggcgaaaaaggaagacacgccgcgcacaggaagcagcgcgagagcaacccggcacgagaccgagcagcggcacaagaaccgcaaaaagagacgacagaagcaagaaaaacaaaacaacacccgacacccgacaaaaaacgggcaaaacccaggacaaagggaccaagacccaacaaaccgcagaggangcccacaaggccagagcagagaggaacccagacagcccccccg

SEQ ID NO: 79570 - DNA, 229 bp, Arabidopsis thaliana landsberg
  unsure (1)..(229): unsure at all n locations
aaaggagngagaatgggggaacccccaaccttttttcagtgngcaaacaaaagaaacgaacaaggagcggggacaattaaagaccgaccaagcgaaccagaggnagggaggganaganaaggcaaaaccggaaanaacggacgcacacaaaagcagagcagacanggcangaacaggggcccaacacacaaaacggggggagagacancacaaagaagcaagggagcaa

SEQ ID NO: 79571 - DNA, 598 bp, Arabidopsis thaliana landsberg
ttatgttaccattgataacgctcatatagaagatctgacgccgggagcggtttatgttcctttttcggtacaggatagctcctccgcacaagagctggttcagtatttaacaggcataggtgtaacggtaatgaacccccaaatgaatggtacctgcccgacaacggcccggggtaagtttaatttttttggtcctaatgatttaggtattgatagcgggattgtgttgactagcggcaatgtaatatcaaatccggctgctggcgtttatggcattaatgggcctgcaagttcgtttgcagcaggcttttttccgtccccaatcggggacccgactttagattctcttttaagcgaaaatggctcaaattctactacagaagatgcttgtgtattggaatttgattttgtacctgccggagatacgattaagtttgattatgttttcggctcggaagaatatccggaatttgcttgctcgcaatttaatgatgtttttggcttttttatcaacggcccacgctttccggcagggattaataatattgctattgttcctggaacaactattcctgtagctattaataccatcaacatg

SEQ ID NO: 79572 - DNA, 442 bp, Arabidopsis thaliana landsberg
  unsure (1)..(442): unsure at all n locations
gggaagaaccggaccaggnaaaaggacaaggcaagaaacagaaaccagcccgggatacacaacaacngcggangaaccangaaagggggnggaagcaaaaccaaaagaggagacaaccaaacacggagaagcagcaacacaaggcagaaagccccaaagaaagagaacaagaagggaaagccaacancaaaacgcaagagaagagcaacgcaaaagcgccagagaaaccaaaccgacccaggccggaaagaaaggaacggggaccccggaacccgaggggagcgaggcaaaaccaaancccagagaaagaagaaacancaacaacaacagaggcaagaanacaccagcgaaccagcgaaaacagcaaggggcccagcaccaagacaaaaaaacacccgggaacaaaaacagggcgcgaagaacaacgcacggggaaacccaa

SEQ ID NO: 79573 - DNA, 395 bp, Arabidopsis thaliana landsberg
  unsure (1)..(395): unsure at all n locations
caacccgagaaggagatccattggaccgcataacaacagtagcacgaggggacgnacngaacgagcggggaacgagagaaaagccccacaagcaaccagggcgagcnacaacaanagaaacagcgagcagcgaaagaacagaacgaaccaagagcaaccagcaggaaacgaacccacccgccacaaaaaaaggaagggcgcaccaaccaaacagccacggaggcaaagagagcgagcgaaccaggaacaggcacaccaacacgagcaacaaaacccnccggcacaggagaaccgagaaaagacggaacaggaagacgcgacaccagaacaaacaagacacgggnngagaaggggaagncagcacagcaagacaagaanggaacgggcacangaac

SEQ ID NO: 79574 - DNA, 242 bp, Arabidopsis thaliana landsberg
  unsure (1)..(242): unsure at all n locations
aaccggggcgaacccgaaaagcccacggagggcccccccggcggaagagacacagacaaagaccccaagggacacgggcaaaaccaacaaagcccagacaagcaagaagaagccnggccagcgggcaggaacggaaaacgagacgaggacangggcacgacggagggaaagaacaaaaaccggcggccaaacccaaaagaccagggggcgccacacggacagaagaaacaaaacagaagacg

SEQ ID NO: 79575 - DNA, 522 bp, Arabidopsis thaliana landsberg
gttgttctgaatatcgtgttgattcactgctaacacaaattttgcttttccatctctatatcacatgtttaagaaaacatgaacatgaaggagaaagttcgtgcagaaataaccaaatcgcttaaactgctggaactcaagagttttaacatggcagcgttgcttcgaggcttagggattcaagttggtggtggaatatctcctctgccaaatgagggtagcccatcatctatcgtttacagttagttatactgtatttgttaacatttttgtatttacgtattggaaccaattgtaaaattaggtacacgcggcatacaaacgagcagtattgaaatttcatccggacagagcatcaagaggtggggacattaaacagcaaagttgaagccaaagaaaaatttaaggctattgctcgcatgaaggacaaaatttaagcttattgctccctaacaatgaccccgattatcaaaatctttttttttttttttgaatttcttagaatatgtaaaaggttttttg

SEQ ID NO: 79576 - DNA, 153 bp, Arabidopsis thaliana landsberg
  unsure (1)..(153): unsure at all n locations
agacancnannacaaggcanaaggaccacanaanaaagncggaaccgancnngaggcacaaggancaannncannnnnngaaagaaacccacnnagagaacccaccagnggaggangacaaaannaanaaannnncnaaggggcnaaagcacc

SEQ ID NO: 79577 - DNA, 230 bp, Arabidopsis thaliana landsberg
  unsure (1)..(230): unsure at all n locations
gggccaattccgaagccagccgcaccgggaccaggacaaacaccagaccagaacaggaaaagcngagagaaacgccaagcacgggaagcaccgacnncngacccgctnccaccagcgcagggacacccaccacaacaaaacgagaggataacggngaaccaanaaccaggcgacngaccaagacgcacacagancacaccaaaccgggacaagcaccacaccaaaacaag

SEQ ID NO: 79578 - DNA, 273 bp, Arabidopsis thaliana landsberg
aaaaggcaacaaagagcgaacgaaagacagagcgacaagacaaaagaagggaaagaaaaagcaagacacaccaccagggaaacacggaggaaacgggaccacaggaagaaggaagagaagaacaccgaaagggggaaagcaacaaaagaacagaagcagaaggcaacccaaagaggcaaaaaggcaaacgcagaagaggaagaaagaaaggcggcggaaaagacgaaaggacagaaagagcaaaacaagacagaggaacaaccaagaaaaaac

SEQ ID NO: 79579 - DNA, 110 bp, Arabidopsis thaliana landsberg
  unsure (1)..(110): unsure at all n locations
aaccaccgacgaanacaagagacgaaaaaggaaaccaaagganncanaagnnaaaaagcaagaancaagaaganncaacaaaaanaggcagggagnagaaaaacaaaaca

SEQ ID NO: 79580 - DNA, 527 bp, Arabidopsis thaliana landsberg
  unsure (1)..(527): unsure at all n locations
gaagttgtgccttntgctgatccaaacgacagagatgtcgttatacttggaactctgtgtagttcaggtttgcaggatccatcctgtatttgggcgtgtggataacttctccaaagacttgaaaaaactagtgaaaggtaacaagtgtttcttccatagtaatattgacaagactattttgggatttggtgcctttttaaaatacgatttagttgcaaggaaaaagtgaaaacggtttcgtaacattgctgcttcttttgctttgtctcgatcagctgctgaggtgcatacctacttagaaccgtccatagattcactgaagaaaatagctgcgtttctgtatcctggatcactttagaaacaaaacaaacatgaggaccatgcttgaatgtggcacgtatgtattagattccttccttgatgagtgattaaaccggctattgtaccaatggtatatgttagtcatataatagtattattctctttatttcatatcatagctataaaaaaaatgttcggctcatgct

SEQ ID NO: 79581 - DNA, 572 bp, Arabidopsis thaliana landsberg
  unsure (1)..(572): unsure at all n locations
cagaagctcacaanacgacactctaatacttcgaaaataccattctaaaacataaataggaatctgatacatctggacccacatgtatctatgagaaaatatctcatcaacgactaaaggtaagggttatagtattatatatgctgtagttgggtagagaatcagccttgctgtagctgggatgagaatcagtagaaactgatacggtcgcatatgatgattgtcagaaattcttgattcgttaaatttaatggatgtgaactttaaaacactctagaaaagataaataagctttttttttaatggagttatcgatctcaatcctttcaattaatatgtgtagtagaatatcatgtaaataataatagtacagaaagaccattgagatgataatatacataaagacttttgaagcagagtaaactaaaatatatcaaccaaccgtagctgtgaataaatattcatttctcacccggacataggtgtatctgtttatgtcaaccagctaagcctagcttgatataaaaatgtcaaaacaatgattctcttacgctaccgaacaatagcatcta

SEQ ID NO: 79582 - DNA, 231 bp, Arabidopsis thaliana landsberg
aaaaaggaagaaggaggacgagaaaaacaaagacaaagaacgaagaaagaggggaggaaaaaaaaaaacaaaaagaggcacaaaaaacaaggggaaaagaagacaaaagaaaagagaaaaaaaaagacgacaggaaggaaaacaaggcagcaaaagaggagaacacgatgaaaacagagagaaacaaagaaagcaaaaaaaacaaaagacggaaaaaaaaaaaaagaaaaa

SEQ ID NO: 79583 - DNA, 554 bp, Arabidopsis thaliana landsberg
  unsure (1)..(554): unsure at all n locations
ggatgatgtcggcgaagtcctgcggggtgtgcaggcggccgtgcgcattcactgagagctgcaggtgcacgctggccgggctcggctgcgcgccgatggtgccggcggccacctggacgttctgttcgcgtatggccttgacgacgtccgatgcggtcaggtcgcgctgcgccaccttgcgcggatcgagccagatgcgcatggcgtagtcgcccgccccccatacctcgacgctgccgacgccgggaatgcgcgagaggcggtccttgatgttgagcactgcgtaattgcgcaggtatgtggtgtcatagcggccatcgggcgagagcaggtgcaccaccagggtgaggttgggcgaactcttggccgtggtcacgcccagccgctgcacttcctgcggcagccgcggcaatgcctgggagacgcggttctgcaccagctgctgcgccttgtcggngtccgtgcccagcttgaagctgatggtcatggtgagattgccgtcgctgttggcctgcgactgcatgtacagcatgttttccacccccgtgatggac

SEQ ID NO: 79584 - DNA, 217 bp, Arabidopsis thaliana landsberg
gcaaaccaagacccacaagcccagcaaggcagaggcagaggacaaggcgaccgtacctttcaaagcgggagaggccgcggcaggggcggagaacagggagacaaacaagaccgcgaaaccccaaaggcggacagaaacagaagcgaccagccaggacaccacgccccccccagacccgaccgcccacaaaagcaacaaaaacacagagctgcaacaa

SEQ ID NO: 79585 - DNA, 577 bp, Arabidopsis thaliana landsberg
  unsure (1)..(577): unsure at all n locations
ttccgcagcatataaggaggcattttctgctaccgttgaaaaatctacgggggcaattattgttttcatattaatttttttatagcatgaaattaatcaggccacaaagcagtttaactgnnnnnnnnnnnnnnnnnnnnnnacttnnnnnnnnnnnnnnnnnnnnnnnnnnnnnnnnattcaatattcgatttttagtgtttaactttgtgagccttgaagaaattaatctcaatattattcttcttagtttacctgtttacaacaacagaattttaccagtttataaagctgccgatgttatttgaacatttgcaggcgcatgaagcaggtaacaaaaatgaaactttgtggagctttattgatgaacattatcttaaacccgttgataaaaatcctgatgcagcagcagatatgcaactgccttttaaagaacaaaatccttcagtagcctacaatatttcactaccgtcctcattcagacacaatctttttttgttataaaaccgggtgaactaattaccacagatttttctcaatacacacaatctttttttcatatacatatggacctaca

SEQ ID NO: 79586 - DNA, 524 bp, Arabidopsis thaliana landsberg
  unsure (1)..(524): unsure at all n locations
agattatctggcgacgaaggggagctgagttgctcctagttttgccgcggcaaagtcagagtatttaggacaaaccttcgngaggagaatttatggcagttaatgtgaacatgcgcgaatttttggaagctggcgttcattatggacaccagacccgccgctggaacccgaagatgaaacagtacatctttggatctcgtaacggcatccacatcatcgatttgcaaaagacagttaagctttttaaacgtgcgtgcgatttcttagagcaaacaaccgctcgcggcggtcacgttctatttatcggcactaaacgtctggcacgcgacctcgtcgcagaagaagcgcgacgcgcgggaatgtactacatcaactatcgttggttaggcggaactttgactaactttccaaccatccgccaaagcattcaccgtttaaagcggtatgagaaaatgcgtctcgacggaaccctgaacaagcttacaaaaaaagaagctcttggtttcgatcgtgaaattaaaagc

SEQ ID NO: 79587 - DNA, 517 bp, Arabidopsis thaliana landsberg
tactccgttgggaagggagtcagatcccgcacttacaagagtagcaggattcactttttacaatcgttgctacattggatggatatcttcatttgattgatggtaaccctggcaagaatggacaacaaccgcataaacgctggtcgctgtcgatgggaggtgatatgcttgcatcatatcaggtatgtcagttcatggagaaaactcaagtcaagcagcatatggttgagcttattttcactgccacagtcgccttcgatggaatcaacatcagtaaatatcatcccaacggttgacggatccattttgtttcgcaccaatgagggtaagcacttttcactttttggtgatcaacaataatatcagcaatgtcaacgacatatctcccaaggaatgagacggatccccatgaaagctaagacaattgtggatcgtacaccatttgtggcagaggatgggacgatgtacactggcaccaaggagacacgagtcgtgggtattgatgcacgtgttggtc

SEQ ID NO: 79588 - DNA, 464 bp, Arabidopsis thaliana landsberg
ctaactattacctctatttgttttgttccctacacctacacctattgtgtttaataacaactctcacccatctctaaaagcgtaaaatggttatttcgcatcccaaaaaatgttagttaccaaagttttttcgcaccatggttatttacttaatttatgtgtcaaatttggctactgcgtaataatacgctttttctatttgtgatgataaaaaacaaatgttattgttttagaatcaaatttagcaatgatttttttgtatatcatcaagatatttgtttttgattatggaaaatataactatagtcaaattaaatgtttagcaaactccaaatacttttatttgattacacaaaccagacatttattatatattacacgaaatatatgatgaactaaggaaatttaacttgttaacagtcaacccatacccaaagaaacatgatgatgaaaaattgatttta

SEQ ID NO: 79589 - DNA, 147 bp, Arabidopsis thaliana landsberg
  unsure (1)..(147): unsure at all n locations
caaccngacgaagagggacacanccaccacaacgnaaagcnccgccaccagcaaagacgacccgaacacccgggcacgacagaaacggcnngaagacngcganacncagaccacccaccagaacagggcgggggggcgaagcagcac

SEQ ID NO: 79590 - DNA, 226 bp, Arabidopsis thaliana landsberg
  unsure (1)..(226): unsure at all n locations
agaaaggaggctaaaaagaaccgttacacccaccattcacccaccgccacagagggcncntcagagggacacacccgacacacaacgcggcagccaaaaagggcaggaaggccaagcacgaagaacggccagcccaacccacgagagaaaccccaacagagacaccgagcacaacgccgcccaaggagaccgagccaccaacaacaacaagaagagcgaagccaag

SEQ ID NO: 79591 - DNA, 484 bp, Arabidopsis thaliana landsberg
tgacacaactgaaacatgaataatagaacttcactactcaaagttgtatctaactttgatatgtctatccacagggcgtgaatatgcacattttccaatctcagttctgtgtgagccagaccatggctgtgcaagtaattgaccttcaagtttgaacaaacaccaaagaacatgttaagaagatcacaacgaaaagtaagaaatatgctggttggtcgaaggaccaaattacatactccgatcaaaatatccatcattagtgtacggattagtcttaactgccttgaaactgcaggccctacagtagtatcatcacccacccttagaaaggattcttcatctaatgcaagagtagcttctaatgttggaatccaatcagattgctgcagccagtgcctaatcgagaaactttcatggcactacaagaagagatgaaaattaatgaatggtagaaaaatatgatgaaacagtctatatgcaccat

SEQ ID NO: 79592 - DNA, 514 bp, Arabidopsis thaliana landsberg
gataagtgagtcggtgcagttgcgtgtttagcacgaaagtattcttctagaaaggaagagccagttaaaatccctgattctgtgatgaactctgctatatctgacgtaagtattccaaattaatgatttcaatcaatcatgttttgtttgagtcttcatttttttcttgttttgatgtagttgatcaagaaacaccaggaccctaaaagccgacctaaaagagagttaggctctgctgataaaccctttgcgggaatgatgatctctctcatgggacgtctcacgagaacacatgtaatatgccctgactttgtaatgatctttattgcgattccttgctttagactctcttaagaatggctttcctctctttgttattgcagcaatattggaagaaaaagatcgagagaaacggtgggaaagtcttcaatactgttcaaggtgtaacatgtttggtggttttcgccgctgaaagacaacgaggtggtacgtcaaagatggtggaggcaatgta

SEQ ID NO: 79593 - DNA, 269 bp, Arabidopsis thaliana landsberg
gatggaagtgtggtctagtgtcaatccagtgcgcgactcacttttgcttttctttcttctcgccattttcttattattgtactttgcttttataaaagtgaaattttttactttagtttctgtttattaatcttaaaaactatttatattctcctttttattatcctataaacctttttcttgtaacaaaatttttatatgataaccattttgtttgtgtctcgatgagcatattatggagaaaattaggaatcatttcagtttctatt

SEQ ID NO: 79594 - DNA, 398 bp, Arabidopsis thaliana landsberg
tgtgatgcatacctcacctggctggtagttgttccaacagctaaaagaccaattgccatctactgaagtttagatagtttccttttcaaaaataacctatcacaacgacagattacaaattagttaatcaacagagagaactcagcacaacagagaaagagaaggcacacaaaacagatacctaaacagtatgccagtggtcacaatcttcaaattacccattatctgataagtggacgtatccacataagtcaatgtagcaaactgcacattgttatgtatcagataaataagagacggaataacaaataatcgcacactcttccaatccgtagtaattcttgaagttgttgaggaagatgttcctgatctctctccagagaaataaaccagatatt

SEQ ID NO: 79595 - DNA, 214 bp, Arabidopsis thaliana landsberg
  unsure (1)..(214): unsure at all n locations
agacaagnggcaacgccgaaaaaggaagcaacaacagaagaaagaggagacgaccaaagacaaccncagaaaaccggaaagaagagagggaggcgcaaacacccagagccaggggaaagaacaggaccaagcacacaccaaggcagcagcaccgcagagaaaacaacgcgcaggacaccaaaggaacacaagaggcagngacnccgacaccaaa

SEQ ID NO: 79596 - DNA, 568 bp, Arabidopsis thaliana landsberg
tttgattcattttatttgattgttctatataattacttatttctaacatattatccctaaagaaattccaatcatgtgactgagtatagactgtatagtaacaagacacgacacgagcgaccacttatagaacggtcagctgcatctgaccttattattattgtggtgcttagaatttaggctactctattaagcagcaacaattatataattaggcaaaaacgaaaagtgatttctccaatcaatgattagttaattatatttttagttccgtggttattaacatacaagatcccactagaaagattcgaatgtgagtaagctaattccaaaattcgttttctgtactaaccaatactcaagaactattccttgatagtatttaaaaactgcttcgctttgtgtaaatattgattcacccctacagaaataactcaaatagtgacttcacatttacactagaatccaagattacttttggaataccactacaaataatacaagattctagaaacctaccgttactataatttattcgcacggaacatttacaaagatactgaatatg

SEQ ID NO: 79597 - DNA, 586 bp, Arabidopsis thaliana landsberg
  unsure (1)..(586): unsure at all n locations
tttgtattttagctacccttaagtcctgactcctgatctttgtcccacaaaaaaaaaaaaaaaaaaggtcgtgagccatgaaagtctaaagatttaaggaatatgaaaagaaaaagaagcattaccaaatctttaatgattttttttttatattatcaaaaaaatgaaaatatttttatatgtaacactaatacagcgggagcgttaagattaacattgttgttgattctttgaatatttatgaaagtaggctttttaaagttgttgattcaatgaacgcagactggaaataaggacgtaaaaactataactggaagatatgaacctaggaagtgggacggatatatgcggaggggcagatctcgttacggcttcgatcacctatttcttcattaaatggtgattggttaaaaattatatagagctgcctagaaccgtctaggaacactgagaaccttttaagatcgttgaactcatcttagtaacaaaacggtttatgtttaacgtctaaaaaaaaatcattaccatccttagcncggctaacgtacaagcgccaacctagatccgttttaaaaaaacattgctg

SEQ ID NO: 79598 - DNA, 513 bp, Arabidopsis thaliana landsberg
  unsure (1)..(513): unsure at all n locations
gaccggcctcgccatattcgagtcgggactctctccactcannnnnnnnnnnnnnnnnnnnnnnnnnnnnnnnnnnnnnnnnnnaagctcattcatgatatcacgaacaccagctaacaagggtattggatatatacttgcattaacatactgatacagtttattatgtaaataattgattagattgtaaaagaaacaaatgctattaattacttatatcagcaggggagggcgtccctgtaaagctcacattgaatcccgtagagttacattatatattcgttagggggcaagtgggtcacgatcatcttacttgagagtattccagntggtctcattacggaccaaccatggcaaaatacaacgacctaaaattttcaaaaaaaaaagatctaatatatgttaagaaatcaagatcgtctgggaatttccaaaaactacctttatatactcgaactcattctagaaattaatcacatttttttattaaaataatatgttcggatatatata

SEQ ID NO: 79599 - DNA, 475 bp, Arabidopsis thaliana landsberg
tgttatttagattagaaatgtcgttttcttaatcacactcctaaactgcggatcagatttaatttccaagattaaataatataaaaatatgatcactacttgccaagacatgaatcatgaggaaagttctatagcgtgtactaacatacaataaatcatatttatgcgtatacatttactagaaccataggatcgatgaatcagatgcaactcatgcagtcatattacaatatatatttagatatgttcatcttgatctttcaacttaaaactcgttcatattcatcatttaaaaatatatatatatatatgaatgtaaaaaaatggttatttaaaattagatgagaatggggaacaaattaatcaccaaaaaaaaaaaatggaatagagtaaggaagagagaaagagtcaatgagtgggggcggctaagaaaacattatacgtttataactcatgagctttatgattaggaaaa

SEQ ID NO: 79600 - DNA, 536 bp, Arabidopsis thaliana landsberg
ttatgtttttctcctgatacaaattttggtttgaacagacaaagaaatctctgatggagtaaccgtaaatctcaagctcgcggtaggcatgtttccggtctctacaaaaagttactccctctgtgatataacagcatgccctgttgcacctggcccgattgtgcttactctccctaacatattcactcctcgtgaaaaaagaacagcagtaacttttctttaccattaagttactgcatttaatttcaaacctaaatttgattttttttttttatgatctaacgatatgttttttcttaacaacctcagattggatatactatcataataagcatcaccgataagcctctgaaagagtcaatgatgtgcatcctttttgttgttaagctcactggtcatgcgtctatgattaatcaagttaccgagtgaagcaaaatatatatgtttcaagtcttgtatgagtcttttctcgttattctggtgtgatattcctactatttgtatcctttctacattatgtgctatgttatcaaaca

SEQ ID NO: 79601 - DNA, 171 bp, Arabidopsis thaliana landsberg
agatgaccttaacaccgactctcaatttatagttgttcgtctattctgatatacctcgattttcttcgattttaggtatgatttacatataggttttagagttttttttttatcctagagcttttgctgtttttctaaccgcttaatccgcttgctggccgcagtgtgcgt

SEQ ID NO: 79602 - DNA, 460 bp, Arabidopsis thaliana landsberg
attgaactttgttgggactccatgtaatattattttatggttgcttttcgggattgccaaattgtatttaaggaaatgtattattttcttggttgcagaataattaacggttttgcaactcttttattcgatgcaaaagcatgtcacttaaaggaaatatagttgaatctctatgtgtaacataatggacaaaagaatactagtaagaataaattaaatatttatcagaatgccttttctcttttgttgaagggtataattgaataaaccttctttgaccgctcatatatttcaaatatttcgaattgattgcagttcgtaaaaagctaacgaatatgaataaaaaaaatatatggtggggactgtagtgataaactttattgggtgcatgagcaccacaatgttggatacaaatgggtttttagatttatatattaaatctctttaaaattcgtatttt

SEQ ID NO: 79603 - DNA, 462 bp, Arabidopsis thaliana landsberg
  unsure (1)..(462): unsure at all n locations
gtcgctggagcgggcgcatcctgcacaactgcaggcgggacctgcttttcgcggtttaccctttcactggaaaaacatgaacaactgttacagaatnnnnnnnnnnnnnnnnnnnnnnnnnnnnnnnnnnnnnnnnnnnnnnnnnnnnnnnnnnngcataaaagcctgaaatagctgtaaaaaagcggttttcaggccctgcaggcaaagtttttcgtaactcgaacaggtaaatcggtgatcctaaattatttttgcagcccaaagcacagccatgtatacgattaagatcaggtttgaacagaagggcctggaggaaaaaatactcaccgatatatcacccgaccagagtttgctggaggtttgtctcgataacgatattgacctgcaccataactgcggggccgtatgcgcctgcagcacctgtcacctgtttgttgacagcgggatggatcacctgga

SEQ ID NO: 79604 - DNA, 516 bp, Arabidopsis thaliana landsberg
tggaacaggacctgaccgggctgggcgtttccggagaccgggcgggcatcgtcggcggcctgctctcgtgggccgtagccgaagcggactccacgcgacggcacaccctcgcgatactggccagcggcctcgactgcgcgtgggcggacttgctcgcccgcggcgcggggcagccgctgtggcagtcgctcggcggccgcccgctcgggcgggtcagcctctacgccaacatcaaccgcggcctctggacgcggactccggatgagttcgcggcccgcgccgccgaagcggtcgccgcggggttcacccgggtcaagtgcgcgcccttcgaccacctgccgcacctggccggggccgacctgcgcgaggcgggactggaacggctcgccgcggtccgggacgcgatcggcccggacacccggctctacgtcgacgcccacgcgaagctgccgctggaggagacgctgcgggcgctgccggttctggagaagctggggaccggctggctggaggacg

SEQ ID NO: 79605 - DNA, 503 bp, Arabidopsis thaliana landsberg
aaagacacatccctttcttgcgtatattaaatgactacgacagaaagatatttgttctatagctctcagaaatatttgtgagggggggaaataatattagagcttcctaattgtatacttttcttcttctttttgcagccacttatttctatttatgtaaagaaaacagctgttaagaaaatattttacgtcgataagaaacaaaacaaaaacacttatttcaagtttaattataggaatatcagatccatcagaattctgaaaaatttgcacgttattagtctatctatattttctgaaactttctatcaaaattagataattgtttttggaaagaaaaagagcaaaactatccgattgggcatgaaagtcggcaagaatctattattagcaatatacataaaccctaaactcatggtcaagacacctatctcagacacggttttatcattagaactaaaactatgattcccatccataattgagatcgtttattgattacg

SEQ ID NO: 79606 - DNA, 547 bp, Arabidopsis thaliana landsberg
  unsure (1)..(547): unsure at all n locations
cccttattcttttgacaataccttaacnnnnnnnnnnnnnnnnnnnnnnnnnnntttcgcgcaaaaacgtctacgcatttgactgtagtaattgtgatgaaatacattttttcgttatcccgaaccttgtattttgttgacatagagtaaaaatacaacggccctaagcgctgtgagactaagatttatagttttttggcacggatttaaaatccgcgccaacatgggacgcgacacacgttagcgcggtcccgaaacatcgggatgtgatccgtgctcttttcacccaaggcattgatttaaaatccgcgccaacctacaggattttgatcaactcctgtccttgctgtgcaaccgcccgatcacctcacgctggtcggccagcttgcgtttttgattcttgatggcccacaccgtccacaccatgaataacatatgtacacccgatgttgtgacaaagacccaccatggtggtttttacctggtcaatttcatcttcgaggcctttattttttgttttcagctgttcgatgcgcgcattcagctt

SEQ ID NO: 79607 - DNA, 293 bp, Arabidopsis thaliana landsberg
aagtttgaaatctcaataattaatctgaggttttgaacccaggcataccaaggaactcgttcctgtgagggttcttgagaccttgccagcagatgtattgagaagaacaggtggactacctagtgaggtaagttcttttttctaggctaaactttttttctggggcaaccctttactttctcgagttactctattcattttttcaagaatgtaaaaactgggattattggaagagttgcatacaagtctctgaccaatgaaaatttgcagaattggggaagcgaccatctcgc

SEQ ID NO: 79608 - DNA, 587 bp, Arabidopsis thaliana landsberg
  unsure (1)..(587): unsure at all n locations
tctgtgaaactttgattggttgattttggggtttgagagggaaaggataaaaggatcttaattaataagatgatgcataagagagttatttatacgaacaaatatgaaatatgaaattgcatgaagtgtaaggatttgttggaatgccttgcaaattaccctttgctaatgtttgctttcttacaaatattaaactatctcgatccacctaccaaaaaggctcatagcctttactagaataaaaaaaaagtgaatatcaatttcgtttgtataatatatttgagaacccattgtcaatatatatactctgagtactttatctcacatgtaaacaaagaaggggataaatgatatatcatttttcatgtttctaactaataaagngattatgctagctatatgtataatgtgcaacataaaattaagagaaaaaaaatagtcatctacttaaagcaattgtatagaatgccatactaatcatttatcaaacaaaatctgtccagctctgattgtttgttgttataatggtttcactatgcaaaaaagatatacagcatataaaaacgtaaggtagaaatgattcgttt

SEQ ID NO: 79609 - DNA, 599 bp, Arabidopsis thaliana landsberg
  unsure (1)..(599): unsure at all n locations
tttaactatttttaacacttcactcacgcgggcttcaatttccactttcggtaatttttggcaactttagttctaaagccacgttttcgtaaacactcatatgtgggaagagggcatagctttgaaaaacagtatgcacatgacgcaaatgcggtggcaaaccatctacatctttgccattaataaaaatttttccggtggtgggttcttcannnnnnnnnnnnnnnnnnnnnnnnnnnnnnnngccacagccagaggggccgagcaaggtgagaaattcgccgttacgtacctcgaggttaatgtcatacaaaatgctatgatcatgtatagacttagaaacgccgcgcagctcaataatattgttactcatccctcagacaatcccctaacggcctatgaaaacgagcagattatggtatgtatacctgtcaatgtctagtatgttttttggggggtgtcagagagctagtttcgcttatgatttccgtgctatcttaacgccattaatgcaaggtatattatgcatatcgctctcttacatccgtgttttctgacgcccatcgcgcagttgaattagctctctcacaggcgggttt

SEQ ID NO: 79610 - DNA, 573 bp, Arabidopsis thaliana landsberg
atcggcgtcaccactcctctttcttcctgtcattggccattgcccatcctctgtagctgcataggtgattgaggagagacattgaccggggtgtgtcattggcatctcgtttcatattttttccgtccttggtgtaacggaggaaactcatcaacgccaggtctaacgtctccatgtcttggttcgccacaggggcggatttctttctagcgtagggtacattggcaatggctctttgaaaatagcgaatggcggtattgaggatgaagttgttctttgatctaccagagttgaagatggtagtgtctctgatcgtgttacacaaggctttgagttcctctcatataatcctgggttttgccccctggccacggaaaaacccgaacatggttcccagctttttttattttaaaaatgcccccccgggccgtcaatggaaatactttaagtcccccaagcccctttttttttaaactaaaacaccataccacccctttttatatttttatataaaaaaaaaaaaaaaaaatttttttctccttttcttctcctagggggggagaaatttttttt

SEQ ID NO: 79611 - DNA, 357 bp, Arabidopsis thaliana landsberg
ataaatattaaatatttttttccataaaatatattttatatttttagatcaggtgccggaaaaaagaattgttgttattcaagtgaaatttccataaactttgacacttctttttactaattactatatatatttttgatcaaaattacacacgtgtagcatttttatcttgtcattaataaatttgagaatttctattataccgttatgattgaaatcataatataacgatacatttattattttctatataacgacatgattattatttttttatatatcacatacgtgcagatttaatttagtcattaattaatttgatattttctatattaccgttatgattggagatcacat

SEQ ID NO: 79612 - DNA, 583 bp, Arabidopsis thaliana landsberg
acttaaacctatctaaatgaaccaattgaagatccaattttaaagaaaccaacaagaagatttttcctattcaaaactattgttgattatatttgaggatttttttttggttaaaagcattatttggtaatgcatcttatcaaatccgacatctcaaatttggaccactctcgaaataaacagttcttattagcatcgtatcatgtcgactttgaaacagatcaatgccaaaagtaaattatataacattttcaaaattcagacacattgtacatagggaataatcttatgaattgtgcatagtcgtcaatggacgacgagaacaataaaagaggatagatagatagtcgtgctcagaatctttaacccttcggaatttaaagatttttgacgattacattcacctaagtaaaattattcaaataatattataaacgacgaaaaaacgatttcttcgtcacatattttttttattcccgatgatttcagacattgttgtcctctctcattcaaccttgaaaagattacggccacacgtgcatggtacaccacacgctcgtttttactaccctctcgcgtcata

SEQ ID NO: 79613 - DNA, 560 bp, Arabidopsis thaliana landsberg
aaatatccctatttgtaccatgaaatgtcaatttatgaatctgccgacggattttatttatggatgtaaatgttgcaagacaacaatcgtatattaaattgaaatttcaaaatgtatgtagacatgtagttacatgcaagtttacgtatacataaaaactaaaaaaattattcatatggagagaagcaaaaaaaagaaaaaaacttaacattatatcactttaggtagaaactttaattaatatacgcgggagaaaaaattgacttttgaattagtatcaacgtttttggaaattataattcgtacatattgtaaattatttattgaaacttttacatttgcgacaaaaaaaaattgaaaaacaaatgcagtttcgtgacatgatactattcatcaaaataaaataatacgactgtcgttattaaatgtgtgagtggataaataaatggggatgtactttatacatatacatattggctttcattcgagtaatcaactctattttgaaattttctagaaatccacgtttgctggtaatggtaactgttgataaccactgt

SEQ ID NO: 79614 - DNA, 554 bp, Arabidopsis thaliana landsberg
  unsure (1)..(554): unsure at all n locations
accttgcatatgtatctatacctaggttctactgcttatttaagggtgtcatggttgaacatacacgggtggctcgtttatttgatgccactgttggttggtaccatttcaacgaaagtgatatctggattatgagtcattccttcggttttgatgtttctgtatgggaactatggggagctcttcgatttggcggcagattggttataccatcgcatcgtgttctccagtcaccagaagacttgtattatttgatctgtaaagaaggtacgtgtactaacgaatgggttgtaatggacttactttttaacaagaatgatttaaactaacattatggcactgttgttaggtgtcactattctnnnnnnnnnnnnnnnnnnnnnnnnnnnnnnnnnnnnnnnnnnnnnnnagactgagcgatgtgatcagctacgttatgtcattttggctggtgaagcacttgagccagcgatgttgaagccttggtatgccaaacgacctgatgattcgccttaaatcgtaattagtattgtcctacggaaactactgtctac

SEQ ID NO: 79615 - DNA, 398 bp, Arabidopsis thaliana landsberg
  unsure (1)..(398): unsure at all n locations
agtacataatatatatttgcacgttctattttactaggatggagttgatcggagtgggggggggccataagacatgaaagagtatacgtactatattgactgggaattgctatttaaccgtactatggggggctgacactgtgtactatcctcctgaacataagcaccccaaaggcagagtatgccgagctcaaacaaaacgtacctcctatgagcactagttcagctatgaaatggaggacattattcactcctacatggctggggcgatcgctacacctgaggactaagatctgtataacaccgtttgagatgtgaatcaccgcagaccgatgtaccttgagagagtgagctgcacaggnnnnnnnnnnnnnnnnnnnnnnnnnnnnnagaacatg

SEQ ID NO: 79616 - DNA, 402 bp, Arabidopsis thaliana landsberg
ctgttacgaatatcgaaatggtttaaacaagaacatttggaagaaaaaaaaacatgagttgtaaaatatattaatcccaagagcaatgacaaagttttgtacttttcatgtctacttcttatctttgtagatagaaaattacgaatatcgaaataaccatcttgaatatacacgtatgagtaacgagcccatatatttatgtttgtatgtctatgggcctaatgagattaagagaatggattggcctacgacgactctcatctcccgaagaatctgtaatcttttgattctcttcgtcaaattaaaccacaaaaacctctccatcgattctgataattcacaacactctgcgatgaaacccctacccgtccagactcacgaacagttgccttatcttctttt

SEQ ID NO: 79617 - DNA, 592 bp, Arabidopsis thaliana landsberg
  unsure (1)..(592): unsure at all n locations
atataagnnnnnnnnnnnnnnnnnnnnnnnnnnnnnnnnnnnnnnnnnnnnnnnnnnnnnnnnnnnnnnnnnnnnnnnnnnnnnnnnnnnnnnnnnnnnnnnnnnnnnnnnnnnnnnnnnnnnnnnnnnnnnnnnnnnnnnnnnnnnnnnnnnnnnnnnnnnnnnnnnnnnnnnnnnnnnnnnnnnnnnnnnnnnnnnnnnnnnnnnnnnnnnnnnnnnnnnnnnnnnnnnnnnnnnnnnnnnnnnnnnnnnnnnnnnnnnnnnnnnnnnnnnnnnnnnnnnnnnnnnnnnnnnnnnnnnnnnnnnnnnnnnnnnnnnnnnnnnnnnnnnnnnnnnnnnnnnnttggctaccttgactctattactatcctcctttcttatttactctttctatctttcttattcttttactttcatcttcttatttaattctctattctttatttttttttttattttcacttcttctcttccttttctctttttttctcttttcttttttaccttactctttttccttcctattcttcatctattcttcttcctttttctttcttccattactctcttatttcattacttttctctactt

SEQ ID NO: 79618 - DNA, 196 bp, Arabidopsis thaliana landsberg
tttgtgtgagaaaaccaaaaactatatgtaatttgaaatattaagaatttggctataagtttctattttagtaaagaaaacaaaaattgaattgaattgaaaatcaaaatttaaaccggaaaaaaacatggctagtgaaaagtgtgagcgaaagctatctaattagccgctcttttgaccaattcgccttccccaa

SEQ ID NO: 79619 - DNA, 114 bp, Arabidopsis thaliana landsberg
aagatggctatcaatgcctgaactagcgcaatccgcatgaaactatgggggaggcccataccgaaactatccttcaaatcaatcgaatgactcggttattcgggtgtaagacta

SEQ ID NO: 79620 - DNA, 473 bp, Arabidopsis thaliana landsberg
  unsure (1)..(473): unsure at all n locations
tctgtcgtgtcgttgagacgcaacaaggttggtcttaagggaattctttatatcccctgtttccttacttggtcactcttccttcaacgtcacactccgtaaggatttggacatgtacgcctccttggtcctttgcaagaacattcctggttaccccactcgacaccaaggcgttgactttgccatcattcgtgagaacaccgagggtgaatactctggccttgagcaccagtcctaccctggagttgtcgagtcactcaaggttattacccgcacaaagtctgagcgcattgcccgtttcgcctttgactttgccctccgtaacaaccgcaagaaggtcacctgcattcacaaggccaacataatgaagttggctgacggtttgttcctcaacacttgtcgcgaggtctccaaggagtatgccannnnnnnnnnnnnnnnnnnnnnnnnnattgtcgacaatacttccatgc

SEQ ID NO: 79621 - DNA, 341 bp, Arabidopsis thaliana landsberg
  unsure (1)..(341): unsure at all n locations
aaaaaaaaaacagagcaaacggtaatactcaacatattatacccanaaggccnnacgagccgaccgggaagcgaaaaccaccataaaccgacaatgcccccatcatagggagagtaatagatatacgcagagaagccaaaacccactggcatcacgagagacgaaccaaaaatacagaataaatgatgaacaaaaaaacaaagccagttataagcagacacgctaacaaaacaatttgtaaacgcgatgaaacattagcccaacgcacgaaaaaatacaacatcagaagcgaccaaacatgcagtcctgtttcaaaaaacaaaaaagaaaccaacttggac

SEQ ID NO: 79622 - DNA, 151 bp, Arabidopsis thaliana landsberg
caaaaacaccctgaggacgtgggtagatttcccacgcaaagagagggcacctaggggaatatcaataaacaaaatttggatagcgagggaaggcctaatataaaagctgaaatgaattaataacgtatttataacacgtgttattgaccgt

SEQ ID NO: 79623 - DNA, 135 bp, Arabidopsis thaliana landsberg
actacatcagatgcacgttctttgagatccttcaagacagcaatcgagtcagcggacttggagcatgttttatgttaagggggactgcacttaacaaaaacaaatcaaatagcccatgcttccactacctaaacc

SEQ ID NO: 79624 - DNA, 534 bp, Arabidopsis thaliana landsberg
  unsure (1)..(534): unsure at all n locations
attcgaggattgaactttcactttgttatatagcatgttggcttattatattagattacaaaccaattataaatacacttgttgataacccattggagaaatccttcatcgctcccacgtccgtgattagaaaacgtatcgagaattagaaagtgtcaagcggttataagttataactnnnnnnnnnnnnnnnnnnnnnnnnnnnactagtcaaatattaaaataatgaaaatcaaatccatcgtacactgcacacgcattcatttctttttattattggttacacttcaatcaagttgtagattcttatatagtttggtctatatctaagcctttaacaaaaaaaaactaactataaatggtactatatattcagtaaaattatccatatttagcttttagtttctagtccagtacatattgaattacatattgaattaatttttttttatctttttaagaactattgcattatgtttctgtttgtgcaacctattgttaatattacatttttaccgtaagatattgaacata

SEQ ID NO: 79625 - DNA, 467 bp, Arabidopsis thaliana landsberg
acggatgtgatacattcatatggataattcaccgtaatctgaaacattttttatatatctttgattcacgtgattaaacaaaataatatatcaatagtaaacatatatcttattagaataaccttatattgtgttccggtcttgtccccgcactcatagcattccacttgaccggctttttcatactctacccttatatgccttattgaagtgccatcatatgtaacgtacacttttcttatgccatcatagccaccaccataatcataacttctccctgtgattagaccaccttgtatttccgaaatggttgcacgaaccttgctgaaacctgcttcaagagaatacacatttttgtcagaaatatcctatgaaaccccaatgatcctctggttccattatgatatccttagggaaaaccttagtaacccttgttgtaccccatcatataagaagcttctcacgtt

SEQ ID NO: 79626 - DNA, 111 bp, Arabidopsis thaliana landsberg
tcgataatgaaaatgctccaggaagttgtaagttacaattcatttttgcaaacaaggctataggcttatttttatatattcgcattggcgcatgaaccatatatggggggt

SEQ ID NO: 79627 - DNA, 269 bp, Arabidopsis thaliana landsberg
ggcctggttttggtgtgttttgcaggcaaagctctgtcgcgatagacataagagtgtaataagggtcgggtgtggagctcgtgacttcggttaaaaccgggaaaagagcttaatgtagatattcgtcctcaataatgaaagacatgatgagattggacactaccatgtttagagtgtggtaggcaggttattttctttacactcatgagaattttcgaatgagggggaatgagaagatgggccctctgtcactgatgtgccagatactg

SEQ ID NO: 79628 - DNA, 482 bp, Arabidopsis thaliana landsberg
  unsure (1)..(482): unsure at all n locations
cggacaaccccatgagtttcggattcacggcccgtacagtccttgagcatcgaactactgcaacccgaaccgagaggcatgggttttgcctccaagctgcctgaaccgttcatcgggccgcatgagccacccaagacgacctactgcctggcagctacgatcgtggactacacaggaacgcgaaaggtctggaacacgcgcggcaggttcggctatcgcggtctgcacgctccgctgcctgtgaagggcatgtgatgaaggacacgcgcacagataatgttcttgcccatcccgattacctgcaactggcgccggaatcaacgctgcgagacttgctttacggcctggcaatcgacgtgcctttcgcagcggattacatagacgcctacctagaagcggaaggatttttcgtgacgaactacattcctgccaatcgcanggggatttagcacgctactggcgagtcagctcacgcggaatcc

SEQ ID NO: 79629 - DNA, 460 bp, Arabidopsis thaliana landsberg
tatggttgcataatcttattttgtgtttcaagtcttgtatttaagtagcgtggacgctttattctcatctctgtatcatactcatttttatatcatttacgtatagtaatttaagattcatattcatataatgaatcagagtactacctcaaatgttatctataatgtttcaacattcgaaatgtttcaacattcttctagatatacacttggggtttaactttttctaagtcttacaaaatccaagcaaaagactatcttttgaccggtatgtgggggccaagtcaattattctatatgtgtttttttgtttgtatttctgctacaaaaatatgctagatcttgtaacaaattcctttaaaaagagaaatatatatttatgaacattatttatatgaaaatttgagaatgtatatggtccactgtggtataacaccaagtatatgcactcactaatttc

SEQ ID NO: 79630 - DNA, 388 bp, Arabidopsis thaliana landsberg
ctcaacagagaaatggatgtgtttatttttctgcttttacatttaaacaaacatctaatgtgttcatcttcttatgcaaaagcattcatatatatttaagaaaacaaaacatgctatgcgcaatcgctctctagcaaacaagatgaaaactaaactgatgtgttgttactttcatgatatatatatatagatatgtctcaagctctttgctcatatgcgtttttatctactcggactcctggaccatacactagcctgcatcgatcactgaatgcccctacaagttttgatgctacctccttgaagaacattgtcgccaccttttaagtaatttctcatatcttaaaactttttttatgcttttacattaacctataattttcttttt

SEQ ID NO: 79631 - DNA, 180 bp, Arabidopsis thaliana landsberg
  unsure (1)..(180): unsure at all n locations
gcagngaggcaggagagggcacagagaacagcgtgatcgccgacaacacccaggagacgcgaggcgactcggaacgaaccaaccgaaccagaccaacaacccacaaagagcagcacaacaagcgggtcagacgcgagaagggagcaaagggaccgcaaacaggagaagacacccgcacca

SEQ ID NO: 79632 - DNA, 518 bp, Arabidopsis thaliana landsberg
atgtggtttttccgacaccctgcccaaaaagtattgaaatccaactttgagaaactgtaatttgcgatgagaggaaagcaggaagataagcaagctcacaggagggccggtgacaagaaggcatttcccggtgcctgccattttctggccgttgttggtaatagtagccaataagggtcacaccatccaaatccaagtaccatccatttgcttacgattacagtcaatttcttctggactgctattcagatccctctgattgtgcctaaaatttggcttcttcttcctccacaagaccattaaagtctgtccaactactctttgcgatatatatgggcctcatttaaactttgggccgctataatgaaaagttggcctcatttaacttttgagccgatataatggtcccttttaaaattttgagctcatttaaatttcgggccgctataatggcctcatttgaactttgggccgatatatttggcccagatgtttattttccgggtccgggatatatt

SEQ ID NO: 79633 - DNA, 484 bp, Arabidopsis thaliana landsberg
aaacattcctgcatcaaatgaagtgtttgattcgatctgattttcgggcgcagcactaccggcttagacgggttaacaattcgctgtccgcgacgtatatgttccacaaactgcggacggaccaaagttccgttattcgcaactgcattgtagaacgcaagagtttgcaacggtgtttgtcgcacttcgtagccgatcgacatccagggcaatgaaattccggaccagtttttcgttcccggagaaggtaatgtaggccttggctcaccctgaatagcaacacccaaagtatctccgattccaaaggtccgcaaacggtcaataaacacctgcggttcttttcgatacgcattgttgattacccgggcgatcacattcgaggacagttcgaacgctcttctgatcgtaatccgaccatagccatacggattggaatctgtcaacttaagatcgtagaactgatattcacccaccgcattcactg

SEQ ID NO: 79634 - DNA, 380 bp, Arabidopsis thaliana landsberg
ggaacggatagaaaaacgcagttggttatgacattgtaaactttgctgaacgactgactagcgagacgaccgaccgatctgcactctaaagcctccgttgctttgaatcaaatctgtctggatgggtcctctcgcgtcctcatccctgtcatcaggctccttgtatcggagacttgtatgggtaggatggtagggtatgcggcgagccatgggtgggaatgggctgcctggtctacagatactcctgaccttggataagtaaccgctgcctcagactattcatctagcactttatggcatcgaggaccttagcaagcatagccggggagagaggcgtatctaacacgtgctatgagcggcttaggagaagcggacattca

SEQ ID NO: 79635 - DNA, 558 bp, Arabidopsis thaliana landsberg
  unsure (1)..(558): unsure at all n locations
acttagttaggctaattaagtaaagtttatagtacgtaaatttcattgggttaactaagtactgtgtgacaggtaccaaatagatatttgttttatcatttattaattaattaataagaaaatatcttgcatgcatcatcccttggattatgataaatggtaattgattaggtatatatacaggcaatattgaagaatcaacatccacgaaaataaaaaaggttaacacaactgaagatgattgattgtgtgcaataatctttgataggaaccacaaaaggaagggcgtgtatcaaaactcaaaagcatataaatatctaactcgagtaatcaaaaaatatatctaaaaaaaacttaaagttaaggagaaaattataaaaataaacatagagaatcttaaaaatgcaggcacaccgttcaggaccggtcctagttgatagatcaaaggtgtgggatagtagtttaagattcactgggctttattttcgtatttaagcaagattattaaaaatgcaaatttacgatattagctaaaaatattaaaatngaaaaaaaaaa

SEQ ID NO: 79636 - DNA, 513 bp, Arabidopsis thaliana landsberg
ttgtctagtgagttttatgactatagctcaagtatgttctcgtcttctttggctaaaacgatggcgggttgctcctccgcttcttcggaatcagaatcagatttttcttcgacggcgatatcttcttattactcttctgtctcctcttgtttatctcctctgcaacatagatacagtgagatcgtcgttaataagaagaaaaagaaacatgtcaagaaacaaagcttcctctctagattatttctgtaattatttacaacatttttgtgttatatattcatttgtgcttctttgttttttttcacacctttttaacacacaggagaaaaactagaccaaaaaaaaaacagagtaaaaataataatcacaagacgatacaagtaatggttatttcaaaaacaaaatatttacatcccaattacatgcgtttggtttctaaaaaaatagaaagattttaaaaaatgttaaagaatgtaattcaactagaaccgattaatattattttcttgaatt

SEQ ID NO: 79637 - DNA, 138 bp, Arabidopsis thaliana landsberg
gaagaagatccagaacaacaaggagaccaccgccgggaaccaaagcgaggaatagaataccgcaacgcaccaagaaagcaacagggaggccgaagagaccgcacacccgccgacccccccaggggagaaacccgaccc

SEQ ID NO: 79638 - DNA, 526 bp, Arabidopsis thaliana landsberg
atctacctatgatttttcattattgatgtttatgatattttctaaatcacgcattggaaaaaatcattatcaaaaaaaatattaatatatattatttatctgtgatttttttatccccgacacctaccaatctatctaatggtttccaggatgcaataaaatcatgagcgataattacggaagtggtaatcatgtaatttggatttaaaacattcttttaagatatttcaacacatactatcattgtttggattgagtctaaagtaatcaaggatgtcaaattaatacacaaccatatagtttgtcaaagagtggcaaataaaatttaaaatatttaagaaattctgtaccaatagatcctgcacaaggaatatagatctcttacttaatttgaatcattcttttcaaaattagtaattgttgtaagaaaaaatataggattattctcgtttccttgtccaggataagtttaggccaataaatccaaaactctttgactaaccaaaataattgtcataatttatcg

SEQ ID NO: 79639 - DNA, 507 bp, Arabidopsis thaliana landsberg
gattccaaattaaaaatctttgaataagaaaaaataaattaaaacgataaaaagaaattgccaaataatttatttaatttttttatttaaatcaatacacagcacacttgttatcaacgggaatgacaactaattaagaagattcaaaagtcattatttttactaatcaaaagtggcagcttcagttcttgacttcttggggaattcacatgcaagcttttggtccttttattgagtatatgacaatgggactcctgacttggcgggaaccatctttctccgtccacgtgagccacgtgttccttgtcataaacgccctgttcttgttccaattccgcttcgatattccggtgacagtcaccgtaaaagtcttggtctctcccaactcgctaaattttagctgtggaggatccacaatgatctcgtcaaagtccttgtcacctcggtagttgatttctccgaggtaagtgaattctccgtcgttaacgtttgtgaccgttctatgga

SEQ ID NO: 79640 - DNA, 474 bp, Arabidopsis thaliana landsberg
ttagcaaaggtggagagctcctcatttttgtttggctggcattggcgcaccttggccttggaggtcagttgagttcatcagcaaaggggtcgtatgagacaaactgaatgtaaggaaaattggcttgagttgcacgtattaatgtccgctgttgcttctttttgattagattgtgcacaatctaaagtagtctgacgtctttcctgggcaatgcctgcaaacaaatatggaacattgaaagaaatttcacttcttttttatacaactttagacaatgaagttgataaaacacataaaggtgtaatgagatgtgcaaacttaaatgcaaagttaagcatatatgttaaaacttgagccccttaaacacctacaaaaaacatttagtataactgaataagtatatacttttttcagtcactgatgcctgatcaacatcaacccattaaatatgaacacctaactgctaacgatttg

SEQ ID NO: 79641 - DNA, 563 bp, Arabidopsis thaliana landsberg
  unsure (1)..(563): unsure at all n locations
aacagtacaaacctgtctttattttcctttaggatgggttctttgttttccattgtaaaatgcgcttgttagtttttaatccttgtgctctactttttccttcattctctctgctgcattatgtttgattgcagcgttccgttgcttcttgcgtgggttaagtatcaaggggaagacaaaaattgaaaaaaactttaaggctatcttcaattttaattcacaatagtttcaacttgtcaacacgtttagccggttcccgaagcttgcgttcattttcaatcaattcacactttgannnnnnnnnnnnnnnnnnnnnnnnnggctttcagaaaaaactgtttcgcatcaaaattttatcgggccattattaacatgtttttcagaccgtgttgatattgcaacaagggtttgaaactgtgtactaaagaaacgtatttgggaccaaacagtttgtggttctggccgaatgaatgaacaaataatgacctgaaaaatttttgttcggttaaaatttaaagggaatcaaaaaatcttattttatagaaacaccttttgaaaaaacc

SEQ ID NO: 79642 - DNA, 406 bp, Arabidopsis thaliana landsberg
tatgtgccgttgaggtagtcaaatggagtacggatatgaatcttgacgatacatttgtagctagtatgaacagaggatggtcattgaagagtcgcggcttcactctctcagcatttattatttcgtaattatggccgagtatcatcaactcataggctgttcgcattcctgctccttttttagagatgcctgtgttgtcttcatggtatatatatatatatatacctgtagcaggaagaattatccttacagaaacagaatttccactctgtaagtataaatctccactccttctatgcaacaattaaggtttataatcaacgaggcactgattctctatttttctcttcttcatgcatgcactttgcctttcaattaatggttcatcttggttccgtttgggagt

SEQ ID NO: 79643 - DNA, 631 bp, Arabidopsis thaliana landsberg
agttactactgttactcaattaagattttaaatattttaataaattttgtaaattcaatcattttgaattgattatttatatatatatatataatcaactgttacacatttgtatattaccaaaaaaaacaaaagatatttgatgtcttttgtactgtatgtatgatgtacatatcacaccacctgctgtatccactactcaagccaaaagctatttcaggtcgccgctcacgtggcttgcaagagacctttttagaccttaccggccctagctagctatagccttcaacaacaaaacaaatggaatttttgtggttgaaaacaatcgtcttccttttttctgtttctttttattgatcatgaacatttgtttttaccccttgatcaatcaatgatgatcgaccttttataatttgtaccagaaaaggttttaaaaagagagacataatgataaatcactatgattacaaaaggtcgacagtaattactttttaaaaattataaaattgacagaaacgtgagatgtcaaatctgtgagattcatttactgaaaagaagtagggtaagtttggattgcatgagattatacacaataataatgcttacagcaatcattttaaagtttggctct

SEQ ID NO: 79644 - DNA, 577 bp, Arabidopsis thaliana landsberg
aaaccaatgataaatcatgattttaataacaaattaatattatagatttctggtgggttaaaaagggaggcgaggaagagtgaacagcgacctcttcttctctcttccctctctcttcctttctctttgggagagatttttttataagtttttggttttgcagaatttgctgaataaaaactctcactaacagagaaatataaaataaaaagagtactcaagaaaaagaaagctagagagagaggtatagaagaaaacgatagctataagctcatcatcaatcatttctttaattctctgcaactccaaggtacttcctctctctctctctctctctctataccatatatgtagatgatgaccgaagctgaaagtgagaaccttaaaagagttacaagaaagagattggagaaaaactgtataatacctagttgactcctctctctctctctctctttctttttcttgatttttttttggatgtgctatataagatcctctgtgtatgactgaatccttacaggatccaagcagcttggacaaaagatataatgaataacaagatatgggtttagct

SEQ ID NO: 79645 - DNA, 549 bp, Arabidopsis thaliana landsberg
ccttctgttccttgatgttctgacaagagagcaggttccttggtcatgtagggtactctggtatcaccatgatggaagaggctaaaaccaggtctaatggggcaaaaaatggagtcaccaaagctagaaggatctacagccatcagggtaggagtgccacagggtaggtgatctgtgattccaaaggacacagctaccaccagggacactgcactgagcccctgaatgtggtggcaaagtgggacaggaatccccagaattcctcctaccccccagcttcccatcagacaacctgcttggatccagtgggcagggagtcagctttctgggaggcacagagctgactagaagagaacagcctggtggtggtaagaagaaacctagcacaggctgggattgcaaggggcacaggtgtgtagccccactactctgccactgaggtgagagggccatgagttcgagactagcctggtctacatagtgaggccctgtctcaaaaaacaaaacttaggtaagcaaactaccatgacccctcttggcagagctgag

SEQ ID NO: 79646 - DNA, 317 bp, Arabidopsis thaliana landsberg
ggagcgcatcttctggctggtgcgcgacctgccgccgttcaccattctttaaggaccggaaaaaggccaaggggtgatcgaccagttgctgcccctgctgatcaggcagatgcccgagtacgaccacagcatgctgcgggtcaaccgcgcccgcggcatccagatgctgcaggacccgaaaagtttcacctgcgacccgaccctgctgtggacgccggaacgcgccgaatatgtgaggttttccgtgccttccctgggcgtgctcagtggcggcctggtgctgcgcaaggaaagcgaggcgcttgtggcgccttacc

SEQ ID NO: 79647 - DNA, 523 bp, Arabidopsis thaliana landsberg
ccggcggctccgccgaggccgggatcctggtccgcgacgatctgacgcagattaccggctactactcggacgggacgacccggacatcgctcgggtccgccaccgtcccgggcgcgacggcccaggacgcgagtcttttcaccgccaccggcggagtcgtcccgtccggcatctgtcgcttctccgcctttaccatcactcgatgagtcggcactcgaatatagatcggatctttaatgggagaattatgcctgctccccttgattgccgtggatacctgtgcaaacatccgatctgtcgacaggttgtgcattcctgaaggagtgatcagtaccgaacattcggatgtgcgattctccggttccggcagcactcagcgatgtcgccatccactcacaaccggcgtcccacccccaaggagcctgaaatgcccagtgccgattccgctcgcaaccctgatccctcgggtaatcctcgccccgcgcgtcatcccgcgctgaacggtgccgtcatcagccgccgg

SEQ ID NO: 79648 - DNA, 312 bp, Arabidopsis thaliana landsberg
  unsure (1)..(312): unsure at all n locations
tgacgtctgtcttagaaattctcgtcatcatgacgatgatcattgcaaaatgttgttaaaaatatgaatagaaatactttttttttttttaaaaaataaaatataatcactatattttattcgtttttttttttaaaaaaataagatacttattttatcttacctcctactggtactacttaccatacaccatagttgtaattgttgcatccacctgcagcatatcgaagagggtagtctccaccacgttggtaggaaggacattgnnnnnnnnnnnnnnnnnnttccaaggcaccaccaggtaacatgcta

SEQ ID NO: 79649 - DNA, 470 bp, Arabidopsis thaliana landsberg
cgccccatctcgccggcagagccgcccgccaggccgaacggcgcgtagcggcgattgttggatagaatggttgccgccatgtcttacaggaagcggatgcggcgtatgccgacgttgccgcctcggtagcggcctgcgccgtccgagacctcgaggatcgtgtacgaatacaaccgcaccggaaagcgcagctccagcacttcgggatcggacaggcgcgaattggtcatgtgcgcctgcacgaccgaggtgccgttgaatccctcttcgcgcggccccgtcgcgtaagatgcgcatgggtcccgctcccgtgccgcaccgaaaacgtgtagtagaactggaagcgctcattgccaaatgcgaaggtgttcatcgtgccctggctggacgccagaacgtccagagggtcgtacagcgcgtacgaccacgcacatagaggtcttgacgttgcccgccaccaccgatgccgg

SEQ ID NO: 79650 - DNA, 552 bp, Arabidopsis thaliana landsberg
  unsure (1)..(552): unsure at all n locations
agcaccttttatgtaacagccattggctaataattaatgttccccttttttaatcgtttgagttttaccttttgattcgggaggtagaggaatataatgattggacgtcttagcacttcaaaatgcaaaaaaataatctgtgtgattagatagatattactatgcgaggttttagagggttaattcgaaatttagaaagatacacaaatttgataaacctgatctagatgttattaaaatgttttgaattatatcaattctgcagtttcaacttagataattttaccccaaaaaacgtagataatgaatgattagtaagagacagtaataaattgttttcgacattagaaaatgcattttgttcatcaaatatatatatatttttttaaagggttcagttgtaaaacaaacacttgtgaatttaagttgatcggctatcctcagaagttttttntaatcaaatgtatatgaaggtaataatatgcatctatctacatatttcaaataatatgttttcttatagaagtaacttatttgcatataacctacaca

SEQ ID NO: 79651 - DNA, 571 bp, Arabidopsis thaliana landsberg
atctgagattacttttcttagtatgagatcatgtaaattttttgttttggtctttttcaggtttacttactgagctgcaaacacttggcatcatgtctaggtcagcttttggatttgtctttacactctttcatggatatatttatacatgtttaactctgatatatatgctgcgccagctgtgtattaatggatactgactataggaaaactagatgtctaaagctttattgaaatgaacaatttttttttttcattttgttttttgaaaaacttatgagtgtcagtgtatgattgtaaaacttgacagggaggattttagtgatacacttcgagtacttgttgcaactgattgccacttgggctacatggagaaggatgaaattaggcggcatgattcatttaaggctttcgaagagatatgttctatagctgaggagaaacaggtctggtattcagtatctatcccttgccagtattatcttgcgtttgaatcatctaacatattatcttaaataagaatcttctcccatattatgagtagtaaacagtgttctacctatttttacaa

SEQ ID NO: 79652 - DNA, 396 bp, Arabidopsis thaliana landsberg
  unsure (1)..(396): unsure at all n locations
actatatatctgactatatcgcttttgtgacaagacaaaggcctacgggtatttaaatgaccccatcaaatcttgataaggaataaactttaagcgcttccttgatccaatgaattttatatttatcaacaaacatgccatcaaatgctattgtcatcttgtgtataaaaatatccactccaaagatgtcgaatccttaaaatcaaaataaccaataaaaataactccatatggtgacaaaaaaattactaccactcgttacaacaagcatatgatttactgaaagctcccatatatttgaacgttccggacttttcnnnnnnnnnnnnnnnnnnnnnnnnnnnnnnnnnnnnnnnnnnnnnnnnnnnnnnnnnnnnnntctattttgtgatttct

SEQ ID NO: 79653 - DNA, 379 bp, Arabidopsis thaliana landsberg
  unsure (1)..(379): unsure at all n locations
agagaaaacggcngacaaaacaccggaaaaagcccaagagacncaccaagataagataaaacgagaggaaagagaaaccagaagaaagaaacagagaaggaaggagcaacaacgccgcccacggacaaganacagccaaaccaggaaccaaacaaaggaacccaaaaagaaaacaaaaaaacgggaaacacggaacagcaaaggaaaaaaaaaaacgacacggagncgaacacacagggacggcaccaaccaggaacccagagccacacacgcaaacgcggagaagcgccggcaagcaccaccaggagcgcgagacaccacaacnacacgccaaaaaacaaacggcagggggacgcaaaccanaaaaccaaacccaaac

SEQ ID NO: 79654 - DNA, 106 bp, Arabidopsis thaliana landsberg
gtgttgtcaggattagttgatccgaatgctaaacaaatgcatttgccaggacctgaagttagacaagatagtgttggttctgttggctcggtgaatagtgtggttg

SEQ ID NO: 79655 - DNA, 426 bp, Arabidopsis thaliana landsberg
  unsure (1)..(426): unsure at all n locations
aatctcgctggggctgttttgtatcccttagactatttactcgatgctggctctcctagctgctgttgtatttgatagaaatccaaactctcatctaggatttgtaaagaatgaccgtcttgcgatcgaatctcgatcattggttctgcctcatattgctgaaccctgttgaggatggcagctcctgtggtggtcgcttccactagagacgctgttgagttacaacttactcgtttgcactcgtataggaaggggacgcatccatctaatctggaggcctgtttcttgactccacttgctttgactttgttcacctgctgacaagaaaattacatggcggcacatgatcaagcaacgaaatgagattcattgctcagcctgatataaatacaggagtttgagtatctggagagngtgactgatgag

SEQ ID NO: 79656 - DNA, 681 bp, Arabidopsis thaliana landsberg
agcacgactacgccttcgtgcacatgaccttgaaagtcggccatggtcgtgacctggccacccgccagaaagtcgcggaaaaactcttcgaggtgatcactgcgcacttcgccgagctccaggcccaacgcctgctggccctgtcgttcgagatgaccgaactgcacgaacagctcaacttcaaggccaacaacgtgcatgccttcctcaaggcccaggccacttaaacccgtctgccccgcactccccaccggcccctctgacaaaaagtacaagatcatgagcacagccaataccgccgacactgccggcaccgtcgcgcacgaccgcacccatgccaccatcacctggcggctgatgccgctgctgctggtctgttacctctttgcccacctggaccgcatcaacatcggcttcgccaagatgcagatgagcgccgacctgcagttcagcgacacggtctacggcttcggcgccggtctgttcttcatcgcctatgcgctgttcggggtgcccagcaacatggccctggaccgggtcggtccgcggcgctggatcgccacgctgatggtggtctggggcgccttgtccaccggcatgttccttatcgacagcgccgccggtttttacgtattgcgctttctgctgggcgtggccgaggccggttttttttcctggcat

SEQ ID NO: 79657 - DNA, 545 bp, Arabidopsis thaliana landsberg
atttatagtttaattcaataccaatattacaactaaatcagtttaatttttctttgatttggtcttcgaattcactttcatggtcagtttcattgtttaagataaacttgaatggattaaaccgaattaggcattcacttttgatcagtctcttctgccataatcttcataagacaaacccaaatttgtaaaaacttttttgaaaaagaaaccgtaagtaaaagtaaaagcgtttaggatccaagtgtggattagcttcgtaatttgaattaggtttagctatacgaattcgttttcttttgtaccatatttagttgtattgatttcaataatagttctaaacattcgaataatccgttcccaactttttatccactattattcgtctcagtttctaggatagatatgtccacacaaaaaagctcttgattttttttttttttttttacaaattccaaatttctttgctcataaccaatcattaggttatgaccaccattgactcactcataagtcataagtcataggctcataaccaatccaac

SEQ ID NO: 79658 - DNA, 516 bp, Arabidopsis thaliana landsberg
cggccgtcctccggcgccgctgccgtggtgaagctgggccgcatgcctatgcttttatcggcggccagcgtgaactgcgggaccagcagcaggccgccgccggtatcgcgcagcgagcggttcatccgcccttcggcatcgctgaacacgcggtagcccagcaggcgctcgcagatgcgctgggcttgcgcctcgccgtcgccgggctcgaccgcgaccagcaccagcagcccggcgtcgattgcgccaatggttgcaccatcaacgacgacgctggcttcggtgacgcgttgcaaaagggcgatcacgtttcaggcgcggcatccggaaaccgtagagcctaccaatattgtcccttgcgccggcgccggccggaatccatcctggtggtgcctgactacaggcaaggcaaatggatcccggcctgcgccggcatgacgccgtgagggatcgatgttcgtcgttaaacttccgcgatgcgttggtacacccaaactgcctacggtttgatgtggc

SEQ ID NO: 79659 - DNA, 537 bp, Arabidopsis thaliana landsberg
  unsure (1)..(537): unsure at all n locations
cggactccgtctcgatcggagtgggcaccggcggcgctccggcgtctattgtccagcccgttgatgggcggcatccgggcggggagcgtctggtgcgcgcccatcatggaggcatagtcggagacgtcggccgccatgcccacggctcgttccccgagctccatcgcgtatgaccgcgcacgctcggcattgagatccacgatccctacgtagcctcccgcgtcaatcacgtgccgcgccacggcggcgcctatgccgctggcaccgccggtgatgacaatgctcggcactgcttgcttgccacgatccataaagtctggcttcctgtcttccacgtttgcagtccgcacgtacggngtttctgtttccggggcgcgtcgttttcatgccggagcaacggcttgcggcgcgaggacgccatcagtgcagcgtagccgggccttcgtgctctctgagcagacgccagattctggtacgcaaatgcacgaaagactcgaggtccatgatttcctcgatcccgttcaggcggtcccagtt

SEQ ID NO: 79660 - DNA, 409 bp, Arabidopsis thaliana landsberg
tttcccttgaggcggtaaccattcaagcattccactacgatagcggggtcatttcctttcagcaaagtattgtgcatgcctggtgcctgcaccatattgcgcggaacgcagatatgcataccacgcaatgcatgcagcatcatacccatcggcgacccgctatgccagataccttccagcctgtggccgcgggtgcgtatgataagcgggtagctctgctggcccttggtacggaaatgaacagtagccacatcatcactcaaaggctgcagtccatataacaggtaatccaggtactggatctctgcaataggcctcagtccgcggaatgccatgcctacggcctgccctacaatggtaagctcgcgtataccagtatctgatatcctgtctgcaccatgtttttcct

SEQ ID NO: 79661 - DNA, 144 bp, Arabidopsis thaliana landsberg
cgaaaccacctccggactggaagaccagagaagaaaagaggacccagggcgaaggagcagaagatggtgtcgagtttcaaagaagaagaaggggaaaccgagcagcaagacgaaggccgacaccgccagcaacaacgcctccaa

SEQ ID NO: 79662 - DNA, 542 bp, Arabidopsis thaliana landsberg
gaaacattaccctccacataatattatgtagttaaatacgacattttggtttaatttcataattacgtcagatctgattttcttttagtcatgctccattttgttcgtattatttttttctcttgtaactttaggattcgtaatattattgacgagagattaagttatagcaagttttaacttttaaagattttactgttttgcaaaatcaatggttgatagaaaacccaaagaagttagccaatgtactagctaataacattgttttacattaatttttgcgggctaccttttgtacgtttcttagtcccctctctctcgcataggtttcgacctatatcccctgcttacaaaaccaatgacaataaacaaaatcaaagataataaaaccaattatctatgcaaccaaggcatttttgggaaagggatgcagactttaaaatatccgaatattttacacttctagatagtctacaaataaacaacggtaaaattatacgaaattgtatatctatactatgtttcatggatcataacatatg

SEQ ID NO: 79663 - DNA, 199 bp, Arabidopsis thaliana landsberg
aaaaaagagagatggaggaatgattggtgccataatcagagggaaagaagcagatcgaaaggggggaaaaggggtaaataaaaagacaaggagaaaatcaaacaaacaaatgagtgcaagagaaagaacatgacggaaaaaataggttaaacagacaaagggaggaaggtgaaataaaaaagaataatagggctgggga

SEQ ID NO: 79664 - DNA, 532 bp, Arabidopsis thaliana landsberg
  unsure (1)..(532): unsure at all n locations
acaagtgagatcattagtgattcccctgatgactaaatttcccccaacagggagagctcttnnnnnnnnnnnnnnnnnnnnnnnnnngagctttggcgggacttggagctgccacacattctgcttccaattaaagacttctctgtctaccgtctctgagttcaatttggagagaatatagcctgtcttcgtggagtagactcctgttttctccggcaaccagaccaaagcatccttcttcttcctagaactggggatcagccgccggatattggcctcaaggtgaggtagatgctgacgaatggctcccacattccaatcatttgtagccggcgagaggagagcactaacctttaaattccggttactctctgacggcggacccactgggatctgcggcatggatgtcgataaccatgggtctctccagaccttgatcgactctccatcccccactgtccaaccgactccttttttgagcacctcttttcctgccaaaatgcttctncaccatgggaaccaagaagctgag

SEQ ID NO: 79665 - DNA, 408 bp, Arabidopsis thaliana landsberg
aacgcaccgaccctagcgaaatgagcgaaggagtcggaaaacattaaaacttatttatctcaaattacatgactcagttgcgtaattgtagttacaatcactcaaagcactgcatcgcaactctgggaggaacgaaaacgacgaaacggttccaaggcttaacagtgccagaccgaaactagaatatgtggtggtgaaacgaacaacatatgacaatgggagaagatccaaaatcaatgtacccagtttgaaggggttaactataaagaattcatggtcggaaacccaacccgcggttgtacgtggatttgaaaaaaaaccaacacttgatctgaactgcaacaagaaagatcactgcaacgacttaatacaggagaggaaccatccgacacgagtcaaggcgaatgt

SEQ ID NO: 79666 - DNA, 152 bp, Arabidopsis thaliana landsberg
aaacacgtgacacaaacgacgttgccataatcttgtgatgctaaccgtacacgtgtcttatagctggctgttgacacaatttggttcaactaatccacgacgtaccattacattgtcgtacgtgatcttctccgtgactctgcttttggaga

SEQ ID NO: 79667 - DNA, 593 bp, Arabidopsis thaliana landsberg
  unsure (1)..(593): unsure at all n locations
atatattattacatatatataannnnnnnnnnnnnnnnnnnnnnnnnnnnnnnnnnnnnnnnnnnnnnnnnnnnnnnnnnnnnnnnnnnnnnnnnnnnnnnnnnnnnnnnnnnnnnnnnnnnnnnnnnnnnnnnnnnnnnnnnnnnnnnnnnnnnnnnnnnnnnnnnnnnnnnnnnnnnnnnnnnnnnnnnnnnnnnnnnnnnnnnnnnnnnnnnnnnnnnnnnnnnnnnnnnnnnnnnnnnnnnnnnnnnnnnnnnnnnnnnnnnnnnnnnnnnnnnnnnnnnnnnnnnnnnnnnnnnnnnnnnnnnnnnnnnnnnnnnnnnnnnnnnnnnnnnnnnnnnnnnnnnnnnnnnnnnnnnnnnnnnnnnnnnnnnnnnnnnnnnnnnnnnnnnnnnnnnnnnnnnnnnnnnnnnnnnnnnnnnnnnnnnnnnnnnnnnnnnnnnnnnnnnnnnnnnnnnnnnnnnnnnnnnnnnnnnnnnnnnnnnnnnnnnnnnnnnnncccatcttgatggaataaaacagagattaatgtttngttcagaaaatccatcaagaataaaatttgatgtacgtctgtgctatataaaaaaaaa

SEQ ID NO: 79668 - DNA, 131 bp, Arabidopsis thaliana landsberg
taggaattagtctccttacgatgcatgccaaattgaatttttaacattccaagtactttctttctgggcggcaggcggtgtcttactcagacattctcactgtctcctagaacctataagttaatttgact

SEQ ID NO: 79669 - DNA, 108 bp, Arabidopsis thaliana landsberg
ttatattctcttcttcttgtttccttctgtttgtcttttcactctcaaactctcttttggggctttagtgcactttagcaagagacaaccttgtgttcttgcaaagat

SEQ ID NO: 79670 - DNA, 279 bp, Arabidopsis thaliana landsberg
atctcgataaagtgttacatgagttggagtaacttatagtttttaatcatgattaggaatggagacatcaggtcacgtcttttttttataaactatcaatattatcaaactaaataatattgattaaatgaactaacatttatgataggcaaacaagaacttatgcctcccctaacatacacccagtataatcatacattcatgccattaacagatcaccatcctataaaaaaactcccaacaaaggagcttgccatactacaatgattttcgacctca

SEQ ID NO: 79671 - DNA, 149 bp, Arabidopsis thaliana landsberg
gaagcagcaaagtttgtagcatcagttgcatcattgttcaaacatttctcacatccggttctagatttcgattcatccggggactactgagaccttgtatcatggtttcgttacgctggttgattgcttctatgaacagatagctacct

SEQ ID NO: 79672 - DNA, 404 bp, Arabidopsis thaliana landsberg
aatgagctggctagctaggatctttcctcgtaggatacattagaaatcttgtcatatagtgtattttgcaatttgggtgtaaaatattttagaaatcttgtcatatagaaatattttagatatttgtttgattctctatcattgacaactaacccggtcattggtaattataatggagacgacttcagtggtatttgtttaaattatttctttgtcttgaaagattctaaagatgttttgatccaacgagtttttgctgaaaaactgaatgatggaaacggatttctcgttggtgcgtaaggaggaggaagaagaagaagataacaggaatgggatgagttatttgtcaatggagatgatgaagaaggtgagctccatggcggctccaatggtggcagtttcgg

SEQ ID NO: 79673 - DNA, 601 bp, Arabidopsis thaliana landsberg
  unsure (1)..(601): unsure at all n locations
acatcgagaaagcagctggtactaagaaaccactagaaacgatgactttatcaaatggagtgatcattgaagatattgaaaaaggaaagttagatggaaaatcagctgttaaagggaaaaaggtgagtatttttgacatcctatccacttcttcgacacgtgctatcttgatgctgtctcaattctcagcaccattaggttggaaatctttgaacgattgatgttttttccaggtcagtatactctatactgggaagttgaaagacaccgggaacttgtttgattcaaacttgggagaagatccactaagattccgcttaggtaaagatttcatagatatcgtagaatcctcattataattgctttttctcccatcctcaaacacattttgctttttgtttactttttatgattaattataatgctacttgcaggtggagaaaatgtcatagaaggtctcagcattggtgttgaaggtatagtggcttaacccatagaggatctcaactgaaaattcatgatttttggtaccttttaaaaataccgctgcattttctaatactcangaatgcgagtnggtgataagagagactcataatac

SEQ ID NO: 79674 - DNA, 499 bp, Arabidopsis thaliana landsberg
  unsure (1)..(499): unsure at all n locations
ggagagcaaatggaangacactacacancctatttttattatcaaaaaacacccgaccactagggggnngggtgtattttaaaacacgacacagccccaaccccaaanggaatccacacagacacaagaacacgcccggcaccaaccaaaaacaaagccatatcaccactgataaaaaaaataaaatagattggcgtctttataggcacagaattacatttggtggatgatacgctaattaaacggattacacggctatcaaatggcgttataccgaatgaaatatgactaacaccttttagcttattttaaatacttcaaactgtatggggcgggggcttaaaaaaaactttcatatatcatttactttaaagtgcttcaattattattcaattgtatataaaaataaaaattttatttaaaaacttttgccttaacattacaatcttaggccgtaggctaccaaaaacaccgatactataaaccgaatcactaaaat

SEQ ID NO: 79675 - DNA, 562 bp, Arabidopsis thaliana landsberg
ttttatgtttgagccatgttcttcctttgcatgtaccatgcagacattttttttttataaccaactttaaaatgaaacacaacatttgttggtaaaaggtctggaaccgatattttacaactggtaattgactagacagcgatatgttttcttaacctaaaaccctactggtcccacgtttttctaaccggttaatcagcaatgtatacagaaaatggtttgtttgtttttctgataaagaagatttgtttgttactatggcatttgcataatttatttgtttcaaatatattcggaaattgatcataagaagaagaaaaaaaaaggataaggaggcaccatacttttcgtgccaatcagaaacagtttgtaaattcaatgtgtgtggggccaaatgtttatcacatgcgtgtttttgtcaaccagacgaatatgatcgtacttattttcttaatatgaatccacattatcttaatatcaatttgtgaaaactagttctaattttgttaagtgctaatcaatcaaaacattatttacgaggaaatcatgcccatacgttctc

SEQ ID NO: 79676 - DNA, 592 bp, Arabidopsis thaliana landsberg
  unsure (1)..(592): unsure at all n locations
tacccatccttcaatttcgtctgcaatttcttccagatccttatcttttttatcgatatctgtatcgcggtaaacagtcaattggatacccggttaattttccggcaagtttaatgttatgaccacctttaccgattgctaaagatacctggtctggtttcaaatatacttctgcgcgttttgattcgtcatccagttttacggaagtaatttttgcaggacttaaggcacgggtaataaacaacgagttattgcttgtgaaattgataacgtcaatgttttcattacgtaactcacgcacaataccgtggatacgcgaacctttcataccaacacatgctcctacaggatcaatcctgtcatcataagactctacagcaactttcgctctctcgcccggttcacgcacaatnnnnnnnnnnnnnnnnnnnnnnnnnnnnnnnnnnnnnnnnnnnnnnnnnnnnnnnngctcaaggaatgccccggagctacgtgataaaataataaccggngtaattgtttttcatctctacacgttgaacaacagcacggatagtattctcccttttttatagaaaatcagacgggaatc

SEQ ID NO: 79677 - DNA, 511 bp, Arabidopsis thaliana landsberg
ggccccgagtcttattaccggaagaccgtccggcttattaaaatattatgccttcattacctggcgtactttgtcggcgggtttccattggtagccggcaaaaggatacatataggtaacgtgatgactgggctcattgccgtgcgcgtacatgcctataaggccggagatatcgctggaagcctccgcgcccatattaccttcggcggtgaagaggctgtcgagcttgcgggtaaaggcttcgtcgccgcccataagccggatcaggccctctacgtcctgcggcaccagccaggtgtattgccagccgttgccttcggtgaagtcgcctttttcgtggatggagttaaacgggtcgtaaggcgttttaaagctgccgtcgctcatacgcgggcgtacaaaacggatgctgctgtcgaaatagtttttatagtagcccgcacgcttcttgtaatattcaaagtcttcttgcttgcctaacttctttgccatggccgcaatacaccagtcg

SEQ ID NO: 79678 - DNA, 519 bp, Arabidopsis thaliana landsberg
  unsure (1)..(519): unsure at all n locations
tggagattggctcagcgaatgtctgtcgcagatccggcacattccggtgaaggatatcgacgtcctgttctatggctggatgaacgatcgccgccgcgaaattctcatttcgttgcatgaggccggcctgaaggtcgtgcatctcttcaacgtctatggtgccgaacgcgatgcggcgatcgcgcgcgccaagatcgtcatcaatatccatcactatgccagcggcgttttcgagatcgtccgcatctcctatctgctcgccaatcgcgtctgcgtgttgaccgagggcgatatcgaggatccggatctcgatccgttcatcggcgggctcgccgtcgagccctatgacgatctcgtcgagcgctgcaaggaattgctcgccgaccaggcggaacgcgaacagatcgccgagaacggctataatgccatgcgggcacgctcccaggcggctatgctgatgagcgtgatgcanggtaccgaatagagactgacgatgcgcatcgagaccacgaaaattga

SEQ ID NO: 79679 - DNA, 557 bp, Arabidopsis thaliana landsberg
ttagatatcacgtaattaaagaaaatctgttatactagaaaatcttaatagtacaacttttagcgtagtttctgttcttacaaaaatatgacaaacttgcttactgttaccgaatttaatagctttttatttttggtgtgtgcgaaaccgaatttaatacctttatacatagcaagtttaacataaaatttagtagtacataacattgtgaggtactagctaggtttcctaaaaaaaggcatacttgttgttactgttagcgaatgtaatagttttatagcaagtttaacatatgtaataaattataaaagctactttagttataaatttgtattttttttagaacggatcgtaatatatttggatgtattatctccgaaatatttattttttcatggcctattacttatttttattaaattttctgacattatggcctattattaattgattaaatacaaaataatggatgtgtcttgattttcaattggaccaaatcattaagccagatcagaaattgcgttaaaatatgcaatcgtctctaccttctttatata

SEQ ID NO: 79680 - DNA, 560 bp, Arabidopsis thaliana landsberg
aaacccatttcgcttccgacgccattctcagtcggtgtgatttcgtgatataaagagagagatttggcttactttagtctccggggggcatctttttccggcggagtttccgatgtatctactctagctaagctcagctcttaactgttacagggctctctctctctctctctctctctcttcccccgagtaaaaaagccacaaaatgtctgaatcatttagctctgatctcactttccgatgctttttacctattttctcgtttcgatttctttgtttgcttttcactgttcttacttcaattagattctgatccctctttttaccctttctctctctctctttctctgcttttgcttttactgtttccttacaattgtgattgtattgagctaattttggtcggattcatttactcttctctttgtcaatttgcttgtttttgttaaagatgtgacatttattactaaaggtttcttctttttgggggaaacacatttgagttcatagatagacttactagaggagtgttgtatcactgatgctggaatctggttaat

SEQ ID NO: 79681 - DNA, 508 bp, Arabidopsis thaliana landsberg
  unsure (1)..(508): unsure at all n locations
tacaaaactctacccattttgcctaaataaaccaccttctggttttgcgccgccggcacttgctttgtcagggtctgggtatgcctccggccnnnnnnnnnnnnnnnnnnnnnnnnnnnnnnnnnnnnnnnnnnnnnnnnnnnnnnnnnnnnnnnnnnnnnnnnnnnnnnnnnnnnnnnncacgtaatgtcaccgtgacctctacgatatccgccaacaggccgggacggtcgcgaccggagacctcgataatggtgacattggcattgctgtcatcgtcaaaaaccacggtgggggcgatggcgaaggcggcggtgcgcgccacgaacggcgatttccaggtcagggcttccggcaggcggccattcgcggcggcttccagggcggtctgggcatgtttctggcgcggcaggtcgtcatgggcgaagggcttgccggtcgaatcctgcacataaaacacatcgagcgcctgactcgtggcggaggttaagacctgtgcgccgccacg

SEQ ID NO: 79682 - DNA, 384 bp, Arabidopsis thaliana landsberg
aatttatagacccacttaatcgtacttcggttatctttgtaaaaagactttgtgtgcctacaattggatatggaccatatgccataaacatacataaaataagtgtattatatatggctttgtcagacatcactacgttcattccaaaagtcgtcattgccaataggttttggcttttaattttagtggttacagatatatcaaccaatatacatatatatatatataatatttttttacaaaatatatataaatatagtactgtacatgttaattaacaagtcactttaacggttacaaaaataatgtatatgtgtgtttggttggaatatttgattgtatattatttagatatatttagactatattttaatatttttttta

SEQ ID NO: 79683 - DNA, 445 bp, Arabidopsis thaliana landsberg
actggatccacaccgcgtagcgcagacgctcactgcgtgggctttgagcttcggctggcggctgcggagcctaccggtgacgcgcgccaccgccatgccgtcacaccaaacggtgtaccaactgaggcaccattgcgggattgcaattcgaaccggtctatcgggaccatcgacctcccgtgatcatcggcctgtgtgcagtgatctccagcgctaaatggcgtttcagtagccgttcctcaaacgggtggcccagcggcaggcgatcctgccgacgcgaaggtctcgacaacgttcggcaagtgagataacttgtacgaacagtggtccaacttcttcaggagggaggccgatccgtggcccgcatccaagcaacacgccgacgcgccgtgcccgagcggcgttgggcaccagtgaggcccgcgcgtccttctcaagctggtcg

SEQ ID NO: 79684 - DNA, 567 bp, Arabidopsis thaliana landsberg
  unsure (1)..(567): unsure at all n locations
gagtattatcttatgtttacatatcattatgatatatatgtcataaattattacttattatttttcgccatatgtcaaaatatattaatatatgtatcaagatttcacattataaataatgtctatataactaattgtgttttaaaaaaataaaaattaaaaaattaattttataatttacataatataacttttaccaaattacagttatcatggtcactatttttgcagttttgttttttaattatttgaaaagtaaaagacactatacaacattgaacaacaaaacatcattcatcttttgtttgtacatttgttttttgtacaactattgttctctctcaatagagctatatgtacaattgctcgaatcacaaaagttcttccacctaacaatagcatgaaaactcgtttgtaatctttcaaacgacattgcattggtaatttataccaaacttaggtaaatattgaacatagaaaatggaaaagactctctattgttgataccgttaattctgtcagactcaccaacgcttttgtttttctctacacttatcanaaattcct

SEQ ID NO: 79685 - DNA, 565 bp, Arabidopsis thaliana landsberg
aatgtctcttttacattttcataaatcataaatttatcaaaatatttttaagcttttatcatatttttctgacaaaatacatcacatcagttcactaacttggattcaatattacatgtatcaatcaaaatcttagtagctattgttaggttgggcctaacaacactttaaaagcttaatgggtagaattcactttcacaagatagcttatgaaacggtggcatggtacccatgatcttataagccatttactttttttgtttctctcattctttttttgtgtggtatatcctagtgatacttagtcaccgctctttcaatgcgggatgatcttataaactgacatcgatgcccatgtccatgttaagcctatctcaactgtctactttatgtttatgggtcatttctagatagtttattttggacgtttactcttggatggtccatgtggctatgctccacctcggctggttctgtggacgtggaccaaccaacaaagttgcgatgttgtatggacttacgattattcgctgcactaactgttagaattaggtctacccatacc

SEQ ID NO: 79686 - DNA, 561 bp, Arabidopsis thaliana landsberg
catgttggccgcattccggcgctgctggctgctggctaccgtggccccatcttgtgcagcgagccgtcagcccagctgctgccattggtgctggaagacgcttacaaactaagcatcagcagcgaacccgcccacgtggcgaggtacctcgattacatccgcgaccttatcgtgcccctgcctttcgagcagtggcataccctggtcgagcgccccggtgtcacttgccgcatccgtctgcagcgcgccggtcatctgctcggttcggcctatgtcgaatgcgacatgcagcatgaacaaaccaacacccgctacgtgttctccggtgacctgggggcttgtggcaaccccttgctgcgccccctgcaacccccggaacgggccgatgtgctggtactggaaagcacctacggcgaccgcctgcacccgcctgcgggcgaccgtgagcagcggctggaagcggccatcgaccgcgccctggctgaccagggcacgctgctgattccggccttcagcctcggccgcacccaggaattgctgtacgaactcgaaagcattctt

SEQ ID NO: 79687 - DNA, 262 bp, Arabidopsis thaliana landsberg
tgaaggatcgcctttgatgagttccttttgccttttctcttcctcttttgccttcttgtccatataaacaagccacccatatcgcttaataccaaactgtttcgcaattgtttccattccttcatcatcactgtcattactgtcaaattcttcctcttcatcctcatcatcctcgtcgtcatcaacatcatcttcgtccgcatccaatgaattatctttgccatttccagcataagaaaatccaacctgcgaatatgtgcct

SEQ ID NO: 79688 - DNA, 238 bp, Arabidopsis thaliana landsberg
aaatcggttctggactggaacaacaaaacccatgttaaacttcattcaaaagaagaaacaaatcaaagataacacataaactaattttacctttaatgaccctgtcattaagcgataaacacatacattgaaaagggaggacatcttatcttttccagatctaacacctctgcaaaacaagtttagcaaaatacatttggtaagctcattgactgaaaaataaatttgagccatacct

SEQ ID NO: 79689 - DNA, 164 bp, Arabidopsis thaliana landsberg
cggaggacaaaccacggagcagggaaaacagacacctggcccaatagcaacggaacagaagccaaaagagcggagcagacagacaagccaatgaaaagaggggcgcaggcaagaacagacaagcccaggaacaaaggcagcgaagaggatgagaaaagagccca

SEQ ID NO: 79690 - DNA, 304 bp, Arabidopsis thaliana landsberg
  unsure (1)..(304): unsure at all n locations
cccggtgtcgcgatcgctccgacgcgcaccgcgttgacggagatctccggcgcgtcggtgctgtttctcggcggcggggcacgtgctggcgggaccctggccgtcgatggcgtcagcctggccgtcgaggccggggagatctggggcctggtgggtgagtccggctcgggcaagagcaccctgggacggntcgccctgggcctcgagcccagctggaccaccggggacgtaagcctgctgggtaccgacctgcangccgcgagccggcggcaggtgaagtagttgcggcagcaggtgggggtga

SEQ ID NO: 79691 - DNA, 612 bp, Arabidopsis thaliana landsberg
  unsure (1)..(612): unsure at all n locations
gttcacggatcttggtgagccaggtttccaggccgccttctgctgcaccgctggtctcattgtacatccagtgtgcggcataaccgcgttcggcaatctcgtccatgcgtctggtcctgatctgtacttccacccatttaccggtggggctcatcaccgtagtgtgcaacgattcataaccgttggccttgggcatcgagatccagtcgcgcaggcgatcgggactgggctgataaaaatcggtgacaatggaataaacacgccagcagtcggccttttcacgctcaggctcactctcaataataaaccggatggcaaaaagatcgtagatctcttcaaaaggaatatttttcttgtggatctttttccagatagaaaacaccgatttggtgcgcgctttcatctcgaatctgatgtgctctttttcgagcatgcgtttgatcgggttggaaaagcttacaataaaacggttccgcacggcctgggtctttttcagcttcgattcgatattggcataatcttcggngaagcggtacttgagcgcaaggtcctcgagctcgtttttaatggcattcaaacccaaacgggtggccaggggagcatacaggtact

SEQ ID NO: 79692 - DNA, 537 bp, Arabidopsis thaliana landsberg
ctccctatgaggtgtgttatcactttgctgtttttgttgatgttgttctccttctgtatgtttttttctgagagatgctgttgttttgtgctttatttggcaggcgtttatgttggtccttgaggcttttgcttggggttctgctttggtcatgactgttgtggaaactaaaacgtatatccatgaactccgttggtatgtcagattcgctgtcatttatgctcttgtgggagacatggtgttgttaaatcttgttctctctgttaaggagtactatggcaggttggtaaatttgcagtctgtatggtttatgcaattttgtttccctggtctggcacgatgaacttatatgcgtcattttttttttgttttttgcagttttaaactgtatctttacataagcgaggtggcagttcaggtttgcacttttagactcctttttgcattctccaaactactctttaccatgtgctgtatctaagtcagactgtagatgatacaactttgttttgataatgacgtcgaggatggtttttg

SEQ ID NO: 79693 - DNA, 626 bp, Arabidopsis thaliana landsberg
  unsure (1)..(626): unsure at all n locations
gttgatatttgtgagcatattccccgaaacagctcgcttttcagactgtccgagagcttccagagtgtaccaagatcggcctgcgcagtgcggagcggtgccgcgaacatgtatttaagcccggccctcgaccagagttggataaacgggtcgtcaggggccttgcttannnnnnnnnnnnnnnnnnnnnnnnnnnnnnnnnnnnnnnnnnnnnnnctggccgtcaggggatcgtgaatcgaatgggcagacatcacaggctcgacgggttgcccgtcttcgaacagggctctgtcgaacatgaagggtttcaacgtgacatgatcgtcggtgatcaggttgatcattatcaatttaacatgcatcatgcggctgagtactttgaaaatcgcatttttcagatcttcttttgttcttacgcgcgcaatctcattgctgaacccgagcaggaaagtcttttcccgttcgcgagcagcgatatcttccgaagccaatacattcgacatcgctattgatatttgcgaggcaatgccttgcagcagggagaaatcggcttgttcaacggccagccagagtatgcccagattcacaccaccattccgtagcgcaatgcccaccatcgtttt

SEQ ID NO: 79694 - DNA, 445 bp, Arabidopsis thaliana landsberg
aggcatccaacatttatggatgcactgcgagacttgcccgactgtctcactatggttcatctttttgcggtgttacctgcatcagacagggaaaatcttgaagttaagcgagtccacaactgtcgaaggtcagaatcttatactttctcttggacccttgtgtcttgacttattgacggcttcttttagcttcatattcttaatctgactctgtgcttcttttgtgaatcagatcgacccatgaatggcaagcttacatttcacgttctcatgcgttacgtaaagcgttcgtgtctgccaagggtatttactatccaggtattgtcttaccttatcctgagagcctataatgggattagtagactacttcctctctaatgaaaccttggtaatatcaccttgataggctgaaatagaggccaaaagatcacttggctgccccctc

SEQ ID NO: 79695 - DNA, 603 bp, Arabidopsis thaliana landsberg
tgtcgaatggataggttcgtggtaccgtcacgtggtccatgggcttggtggggtcaatgtaactgactcatgttacgaacactttaggttgtgattgtgtttttatcatcataaagttgttaatacatttgcataatacacgatttagcatgttttaaaattttcagttaactactaaaatctactaccatttaccaattttaattccaatttgacatcatcaccaacaaaaaagacatcatccatataaatttgatgtcttttttgttagtaaatggattaacaaaaggattaacaaaacaaaaggaacaaataaacaaatcatataagcttatattgataataataataataactaataactaaaatccaatatagctacaaattaagtaaatttatttgtttgtttataaacttgagcacttcgtggtactaatttaaaaatatttagctagttaaaaaaatcaccaatggtagaagacaaacatctgctatcaaacaactcatacaacttatatttcaatgtctactgtttcttttatgaatgttaattgaaacaaacatatcctttccttttcataaaacaaatgatttgttacacat

SEQ ID NO: 79696 - DNA, 179 bp, Arabidopsis thaliana landsberg
atactaatgagatgacattatttagtcacacttgcatattttaaaaatgtcttgcgagctacagtatgttttgttataacataccgacttttatttataaatagaagttatggtgcgaagaccagaaccattctacttcggttgtcagaattatgcgtcgaccgatatgcaattttcga

SEQ ID NO: 79697 - DNA, 416 bp, Arabidopsis thaliana landsberg
  unsure (1)..(416): unsure at all n locations
tctgtgacaggcggactgttgcggagaagtgactgttgcatcttaacgtcctatgctagtagactttactagctatggtgatttctacactatacagggacagtacctagtttattggtgagtagaggaccatcactaaggcttgacgggctggtggcccagtgcggttattgaagagacattcgcggcgtgttgcaggctaacggaggatccaatggactgggccttcactgatttgctggggtacggcggtatggggcggaccatttgggttgaaagaggggcgatatggcagattagggtctctggtggatgacttactctgacagaggagcttctattggaggtgacatgagnnnnnnnnnnnnnnnnntctggatgagtcatggacgtataggaggaagatgtggctgtca

SEQ ID NO: 79698 - DNA, 275 bp, Arabidopsis thaliana landsberg
tggtgtgctttgatgaagtgccggtgaaggaggagatttataattcataggaggacgaaggacgccgaactgagacgaacgtggaacagctctctcagggttcaaccaaatctcccaatgagaaaggtatggattgtgccggtggtcacagacaaccctttcttgctaccagaaaccgggaactgcctcctagatgggatggtcctaacgcgacagagatcctggggaacaaacctaaaggcgagaagcaatttgacttataaacggttcccctc

SEQ ID NO: 79699 - DNA, 560 bp, Arabidopsis thaliana landsberg
aacaaaaaaaaatatgaaagagtttattaaaaattaaaccgtgatttttaaaagtatagttatcaaaaatacttttcaaagtggccaaactatttaacgtcatatataaatctaatttatgtggatcgagtcgcgtaagtgttttcttaagctaatcaaactagcgctatgctttcatcgactaattaaatgggctccttttcgtaaaaccctatgtttaggaccaacaaacttgcattaaattaaattatatatcatgagcatgtaattactgatttttagtcggtagaattgtctaaatcaccaaccaatattgactcatttaataagtagctttcgatagcaaacaaatctattggacctttctgttcatttaccttcttttcggggtcagaaaataattgtatcagcttaattgaactttgaacgataaaaagtagattcatggtgagggtggggtgctacaaagaggcccagcccatttattgctagttgttagaatttgccagcttttggttcaaaatgatatacacacatatgtagttgttgcatattaagta

SEQ ID NO: 79700 - DNA, 524 bp, Arabidopsis thaliana landsberg
cataattatatttatatgtgtgctaaagaagatttttctggttaccacaattttgcggctacagtagcggagcatttggtgaatgcacataaatttcaacaggctttaaaccaacgaaacatcaaaaaataacatgttcagtttcgaaacaaaaattagggttaggtatgccgataccgaccaaatgggttacatgtactacggaaattatgcaacgatgtacgaagttgcccgtacagaaatgttgcgcagtttgggcatgtcatacaaatctatggaagaagatggggtaatgatgcctgttttagagctaaattgcaaatatattaagcctgctttatatgatgacttaattaccgtaaaagtcattatcgatgagaaaccacgggcaggaattattttcaaatacgaactttacaatcaaaataatgtgctcattaatttaggagaaaccacattagtatttgtaaacatcgaaaaaaacaagccttgcatgtcgccaaaaaacttcatgaatgctattg

SEQ ID NO: 79701 - DNA, 132 bp, Arabidopsis thaliana landsberg
ctgtcttttcctagccggacggccgatagatccggaactagtcgtccttcccggaaaagctcgatttggaagagagagacgagcaagagaccgacggggcaggggaaagaaaacccccgcgagcccggcccc

SEQ ID NO: 79702 - DNA, 562 bp, Arabidopsis thaliana landsberg
ctggcttcacttcgacatcggaattgagcaggaacagcaactcggttccggctgcctcgacaccagtttggatggcttccgcgaatccacggttttgcggatgcgcgatgacacgtacctgcgggaactgcgttcccagcacttgcaggctatcgtcactcgaaccatcgtcgacgacaatgacctcgaccggcagaccatccgcctcgatcgtggcgaataccgaaggcaggttgcgcgcaagcaggtgcgcaccattgaagttggggatgacgatggtgagtgccgactgcatcgctagccgctcgttcccctcgctctcagccagaagataccgcccaccaccatcccgatcacgtagaggttatagctcgtgaacactggaatggtgatgctgatgaagagcacgttgaaagtcagggcggcgatcatcaatcccgctgcggcaggttgcggggagcgtctaactagcttccatagctggtcatagaccagcagatagaacaggatgaacccggctaggccaacgataccgctgagatacagtaactcgaataccgaa

SEQ ID NO: 79703 - DNA, 409 bp, Arabidopsis thaliana landsberg
  unsure (1)..(409): unsure at all n locations
ggcaaaattccccgacaaaacgaagggacgcatcaatcagataaaagggcgacgttggccccgcctgctgccccgacgacacaagaggacccgacggagcgcatggccccagagccggcgacacaacanacaaagcncagcccgagcaacgaccgacggaaggagagcggcccaccaaggaggaaacgggagacggagaaccagggcccgaagccggagagggagcccgaaaaacggctaccacagccaaggaaggcagccggcgcgcaaaaaacccaaggcagacacggggagggagcgacaagaaaaaacaagaccggggcccgccgaggcaggccaccggaacgagcacaaacgaaagcccngaacgaggaaccatnggagggcaagcccggggccaacagcccgc

SEQ ID NO: 79704 - DNA, 495 bp, Arabidopsis thaliana landsberg
gattgccactcgagttctaaggacaaaacccctcctcaagtaaggcgagctaagaaaccaaacatcggggaccttttgatattttgaggcgttgtatatgcaaaggtagagaaaccagtcctaaaaaatttagatgacatattgcgtatgttggttcacttaggaacggaaccgggatcaaaggcataccgatttcttaatccacatttaaggaagatagtcgttcgtagggacgttgtatttgatgaaacaaaacggaggcattggcaccatattaatttcggaacaagatcaagatgaaggtttcagctttgcgttcggagaatatggcaaccgtggaatccaagaaacaagagaagaagttgtgaccgagcaaaccaaagaaggataacatgaggatgaggatgttaatgaaattggtaatgactttgagactagcatagctaggagaacactaacacatgtacgggaactcaagaagcgggaacagaaagc

SEQ ID NO: 79705 - DNA, 398 bp, Arabidopsis thaliana landsberg
  unsure (1)..(398): unsure at all n locations
ggggttggccgatgcagtacctgcatacgcgccgactgctgagtttttgcaactgctggccgacacggcgctgcggatcactcaagtggcgctggtcagcggcttccgcagcgagcggcnnnnnnnnnnnnnnnnnnnnnnnnnnnnngggctgagccccagcgcactgcggcgcgaaggcctttcgcggccggccgcctgctaggtgcggctgggctaccggccgccgtacgacgtctacgcgatgctcggcttcttccgcacgcgggcgatcggtggcgaccacacagagggcgagcgctagttgacgcgcacgctggcgctggacgcgtgcggccggcgctggaaaggctggctctcggtggcctttgactaggcgcatttccaggtgctgctgc

SEQ ID NO: 79706 - DNA, 520 bp, Arabidopsis thaliana landsberg
gatctgactcggcttgcgtacaggttacttaaaatctggtttctattaaacaacttctttacccgctgatcatttgcatggcattttcgtgtggcaaacggacggaaaagccggagacgccggtcaggtacggttcggataatggtaagtatctgacaatcagaagcacaaaaatatactatgaggagtacggaaagggtgttccgctgctgttgctgcaccagggtttgggatccattgaaagcctgggcgatattattccggcattgtcaaagcatttccgggttatagcgtacgacgcgcccgggcacggacgttcggagcaagccgatagtctaagcggtgcattgctggccgattatggctccgcgttcatcgaccagctcaagctggacagcgtttacgtcatgggttggagcatgggcggcaatacagcgctcttgcttgctgcggacaggcccgacaaagtgaaaaaagtaataagcggcgcctccaattcgaagtcacagggttgacgcag

SEQ ID NO: 79707 - DNA, 521 bp, Arabidopsis thaliana landsberg
ttagacctaattctgctttcgtttggctcgatctctgaagacgccacttcatctcctcctcctcttcttgatttgacaagcttagaagactctgcaactttctgcttacttcgctttaggctttgctgcgagtgatgactctcacacatctttttcccctctaaagctcgtctcttgcaccgtcattgcttaccatcggagcggttgcaacgaaactcgtcagggacgatttcgttctccgacattctcgaaagactcgaaatttctctgaattttggatgagaaattccggtggaatctctcggagtaagtgatctgaaaccagagaagaagaacggcgttgtagtgatagagagaaagagaagtgtatcgagagagaaaggcacaaaggggaagtcttttatttgcagagagaaggaagtggcaaagctgtaaatatgtggagaacgagagtcttgttttggttacgcatgatcgcaaatatcgagaggatcttgagcttttcagctacctctcctctg

SEQ ID NO: 79708 - DNA, 113 bp, Arabidopsis thaliana landsberg
tcgaatttggatacagttactcttcttatcaatgaattgatcagttttggtatcagcgattttgaattgatctgtttggatactatcagcagtgttgactgtcgagtctaaca

SEQ ID NO: 79709 - DNA, 458 bp, Arabidopsis thaliana landsberg
ggcattgagtttgtataaattgttccttgtcatactttattttcattgtgacgacctatcactgtggatgggagctaatgagagtggaatcttatccatggtagtaaaatgatgtgttgattcacatttacgaaacattgaaccagtggattagattgttcagacttgtgttgtgttggtctatttgcacagtgactaatctaagtttgcattcgatatttgcaggatttgcttcaacactataacatggcctgcaagttttgatagattccaagaaatttgtttcatttcatcgctgtattttgcagtttggcctagaagttggagataccgagaaaaaacacaaacccttgcttttttctaagggctagtttgttctgtttacctaatacaattgtcatattcaattgatgattccgttacctttaacactttgcctggaaataaactactcatta

SEQ ID NO: 79710 - DNA, 508 bp, Arabidopsis thaliana landsberg
gttcctgaccttccttgaagatggtactccagttgttgtgtctcctccttctgtcatgttgaagacgacaggcctgtggaaagatcatttggtagctcaatttcatgggctatgtccttcctctaatcgtatttttaatgacttgaatttgatttggggccggtttggtaatattacagtgggaccaatctctgaaacgacagctctcatctttattccggcgcctcttactcaacaatgggttattgatgtcggcttttggcacgcggggaactgttcttgcacagtttatccttggtctcctgacggtcctcttgagctggaggaacttcatacggcgcctacgtgggcggttttgcgtaatgtccctcctcaactatattccttagatggaattatagtcattgccagtggtattggagagcctctccacactgagaagtccaagcttgatccagtgaacattggctttaccaaagtcaagttataatcaaactagacgccctgc

SEQ ID NO: 79711 - DNA, 258 bp, Arabidopsis thaliana landsberg
atcttgtaaaagatcaaagagagaaaacacaaacccttaaaaaggaatcaaatttctagctttttgttttcttcctttgtcataaattttctcaaataaagaaacacaatacatgagacaaagataaacccagaaatttacatgcccacaacaaacataaaaatcatacctttaaaatgtctctactttttcttgaaaacccaagatttttttttaaaaatctgttcttgcttctttcgacacctttatcgaaaatta

SEQ ID NO: 79712 - DNA, 228 bp, Arabidopsis thaliana landsberg
ccacccacacaaacaaaaaggaccaaccagagaaaccaccaacaaacagaaccgggaggagagagacagaagacagaacacacacccccaaagacaagagcggggcgggcaaaaagcaagacacgccccacagcaagaaaaacaaagagcaggccgagcacccaccggggaagggaaaaagaagaggcagcgagagaggaccgcacgacacaaaaacagcccaggccc

SEQ ID NO: 79713 - DNA, 519 bp, Arabidopsis thaliana landsberg
gagaattcgtcagttaaaccaaaaatacgcgcaacgtcggtaattcaagttttgttttttttcatccactatacttctacaaatctatgaactatatatgaagcggtacaacatgtgtaaaattatacatggtgacagtactatcttacacttttgatctctagatctttttctattgatactctttgttaaaaaaaataacttcccaagttaggttgacggtgcgacagaagaaaacaacaaaaataagttgcgaattacataataattcgatgtaaatgattgtttctttttctaatatatatatatatatatataatattttatgcaaacttatataaataattttacgaggacaagattgaatacagataaattatttattaagtcattataaacccgtgaagagttttaagtgaagacgaaagaggataacgaagttgctcacattgcatgataatttatttatttttgattgattcaacttggttttgtaatggttcgatgaatctaaaaaat

SEQ ID NO: 79714 - DNA, 209 bp, Arabidopsis thaliana landsberg
tgacctgcgcaactctgcttcaacctttgctccggcggttatacactggacgactacgctacaccggggcggtttagttgggcgaggtcattcgcaatagcggccatcgcggtctggaaacggtgtcctcgatgccaacgtccgcgcgtggcgccaagcggaccgagcgcgtgcgcgtggatgcgttgttcgatgccttgagcctgttg

SEQ ID NO: 79715 - DNA, 479 bp, Arabidopsis thaliana landsberg
taaagatttatggattcaaaactgttgaaaaatgaaagcaaaataattaaaactgaaattttgaaatgtttttatttgaactgcaccacactgtacagtctggattaccattataaactatatcattatttttaaagtcgggggttagaactacaagcattatctattacttttgaatgtttatatatttacttttttggtcaaactgtactaactttttgtatggtaatctaatttccaacctgtttctggatatgtgacaaaggtgtgaaataacaacgtggccaaaacgtgtgtcttgagataggaaccaagtatgtggggttgatgccctacgcataataagtagatatgtgaaattggaagatctttggtgtatgaattaattgggccaaatcgtaaccttatagtctaggatcaacatatacggtctttataaattcaatgaaagaaatcagtatttttctatttagaataaa

SEQ ID NO: 79716 - DNA, 176 bp, Arabidopsis thaliana landsberg
agcccgaagagaacacaaaacagccgggaaacagaaggcacgaacgaacaagaaaagcgggcccggtacggatacaaagcatgaacgcatggccgagcaacaccagggaaacagagaacgggacgccacacgaggggcagcacagaccacaaagacaactaccaaggggatgcaca

SEQ ID NO: 79717 - DNA, 543 bp, Arabidopsis thaliana landsberg
cacggccttaatgctgggcgcagcgtggtcgtatgcgcattatcggtgttggcgcgagtgtgacgttagagaaacggttgcgcggtgaaggcaattccgttgacctttcgtggtcggcggccaccatcgccaaattcgcctcttatcgcgtttatcgcgccgagcactcgggtgtgacggagcgagacaagctggtggcgatcaattcgtcggttattgcgacacatttaacggacgataccgtgattccgtcgccgaagccgggtcgtacctatttttatcgggtcttcgccgtcgatactgctggacggagttggggtagcaacgaggaagcaatcactttgatcgcgacgacgacgtctacgaagcattccgctccggttaccgataagccgagtctgtcaaaccagccggttaccgggcaaaatagcgcgatggcagagacccgggatgtcccgatgacgcatatcaagcgaggtgagacgaagacggtcgccctctctggggctctgtcgggaggtggtggaacataccttccgacag

SEQ ID NO: 79718 - DNA, 554 bp, Arabidopsis thaliana landsberg
  unsure (1)..(554): unsure at all n locations
atcgtatatttgtactaaaatttaaaatatcgtcaataatctatgtatctcgattgtttttgcaataaggtctcattgatgccttaattgtttcaaaattttgtttgcaactatttgtacttacgttaatttgcacgagtctaaactttcaattgatttcaagtcaacgtaagaaagcgtcatgcatgttagaaagtagaaacacttgttgaaaggtataattaaaacaagagattcttcattagctctttctcgtccatttagacgccacctagagatcaaaaagaggaaaatatatcaattcaaaagttcgaaatcaatagaataacattttaaaagaagaaagagaggatatatatatttacgcaccataatctcttgttgtcttgcatttgaagcattctgccctgcttgcgtagttatgaaccccacatcccaccctaggacaaacccaatcgccagttttccatccgggaggacaagctgcgccatcattcccgtaagcaaccatttgagctccnnnnnnnnnnnnnnnnnnnnnnnctttgatcatt

SEQ ID NO: 79719 - DNA, 520 bp, Arabidopsis thaliana landsberg
  unsure (1)..(520): unsure at all n locations
taagggctcgaattcgaatgacacattattatgggaattagacttaaacgttctagttctaaatcaaaagctttgttgacccaatcaatacactagatcattgtcctttgattttatattccaaaagcatgtttaacactaagtattgaaatttgaatatcttcgtattcttgggcgctcactgtccacacaaacagattacccagacgagccaatgcagtgggaattgaaacataattgagtaaaatattcacaggctatgcggtttatataaagaatcaaattaaactatggggtgacttactgggcagctcacggattattaaaccacgaacattgtcgaggcccagagaggtcacaccctacactaccacacgcaccgctcggcncaccacacgcaccatgcacacccatttattagctagagccttctgttgcattgattttcatctgtcaataacactttagtagtcaagttggacacttatggactaatcagaacgaagcgaatctccgaaac

SEQ ID NO: 79720 - DNA, 196 bp, Arabidopsis thaliana landsberg
cctttccatttccgcaccggaccggaaccaagaggggccgggtggaaccaaacaacaaagccgccccaacccgaagaacaccgacaagacaacgtccggccaggaaaaacacaaaccacacagaatggcgggcgagggaggaaggggcactacccgagcatacagacaggcgaacaatcgggccaggacgagagga

SEQ ID NO: 79721 - DNA, 568 bp, Arabidopsis thaliana landsberg
acctgagcgtaagctgcgtctgcccgacggcatcaaggcgtatcccgatcaggtcaagctcgacatttgcgtttcggacggcggcatcgtcggcacacgcgatcaggacattgccttgatcgcaactcagcccggccgctaccaattgccggaactgcgtgtgccgtggtgggacagcaaggccggcgtacagcgcgagatcgtattaccggcgatgagcttcgaggtaacggccgccagccgtgccgccgcaacgaccaagccatcgtccgcaacgccggtcgcgagcccgtcactgacgaggccgtccgaccaacccccgagcgccgcgctgcatatcgacggacgccgcgcaatgttctggccatggctcagtgccgcgctggcattgctttggctcgcaaccctgtgtgcgtggtgagtgcacgttcggaccctgcgcaactctgcgcccgccgccaagcgatcagtacctgaacgcaagactgtcaaagtccccgacgcgcgtcacgcttatttacaggcgtgttgacagaacgatgccctcgcgcgcaccgcgaactactga

SEQ ID NO: 79722 - DNA, 569 bp, Arabidopsis thaliana landsberg
tggacccatcaatccatcatcattggtgtacatttcgctttcaaaccattattgcgcatatatacttttaccactaaatgagggaaccaagagaacacattttgttcatagatttcaaaatgtttccttcgtatacataattcaatattcaagtttgtatttcagacgaaatttgtagagtatatattaagtattaacaaccaaataaacagaacagcatacatttttacaaggatcatttttgacgacgtatcttatgattttatcgtcagaaaacattatagagaaaagcaaattatggaacatagaggagtgtattagtgggagagaatgaggaattttgaggaaagtgggattataagaataaactttagacccacccacaaagcatttttaatcaaatagtctttgagaaatttaatagtgtaagatttaaacaggtgaaaaaaaaagaataaagcaatgctgttaaataaaatatttttttaacgaactatttcaatggtccagcatgaacatactacataggaactgaatagcgagcagttccaagattcagttgctgtttt

SEQ ID NO: 79723 - DNA, 512 bp, Arabidopsis thaliana landsberg
  unsure (1)..(512): unsure at all n locations
ccctcgttccccaattgggttccggaagcttttggggccttcgtaaagcgaaaagttcgagnnnnnnnnnnnnnnnnnnnnnnnnnnnctccgttggggagagtttcccgacggcattcttttcggaattctccacgaaagtcctcctgcttcccaagatcgtaaggaaacggagtctcagtaggagtgttctcggaaaattccggagcatctttctccgagtttcggctcatggggggaagcaccggtaggccgtttttgctcgagaaaacgaagaaaaaagttgggacatttttcccggatttcgacgatttccgatggtcccctttcccgcccactctcttcggaaagtagtggccacaaaaggcatccgatttccaaagagaaacctccttttggggagcggatccgaacgtccgtaaggccgttttttatccggaccttttggcccgaaaaatcgtggagaaacacctccccaatggtgtcaccggtagggcctttttgggtttcgg

SEQ ID NO: 79724 - DNA, 620 bp, Arabidopsis thaliana landsberg
  unsure (1)..(620): unsure at all n locations
tacttaagtcgtgatttcaatagactttcaaaatcatataactacatctttcaccatcattggccttcgttctaatggagttcaaattaaattagtatcaaacgattttgttatatctagattttttttattttttttttgggtataccaaactctttcattcaaactagaaagatacaaacagattaggattattcagataaactcaaatagcaagcttgaaaattgaaacactttgatatctagtaatatagatctaatactgtaaaaaaggagtaatttattgtaggtcgtgatacaaatttacaaaaacttcaatatatacgttagtttaggtatacatagaaaattgtttgagttttgatacatttgtgtgcaacagatacatttgtgttattttaaatgacaaacgattgcctaattgttggaccaacaaaagaataaataaggcttaaatgtgtagacagaaaatggcacagatacaacgtgacggccattattggcttgccaagtatttactatttatatcctttttcgttgtatggtttataatgagaaatatgaanagaaaaagtatcangaaattttcttctttactttttttttttttttttgataaa

SEQ ID NO: 79725 - DNA, 573 bp, Arabidopsis thaliana landsberg
tcacacaagttatgaatgagtgaagacccaccactccaaaatttgctttccgcttctaatttttcatggacccgcattaagcaaaccaacatacatacataccccttccttattcttttatttttcttaacaataaaaagcttactaatattattattcattcttttgtcatcttatatttatatttttatcgttagttgttgatatttatttcttgtccaattaaatcataacatttaagtgcctttcatgttctctcactcttatatttcgccattcctagctataaaaatacacatgtttatgtttaatcataagctttgatttatcactccaccaacgctaaattattactctaaacccctttttatctgcaaaagtaacattataaaaaaaatgtaactccattgacatataaactctaactcgtctgcgaatctctatagtttaatatcttaatctcttttaatttcagattgcataaaagaacatttttcagggaaaagtatcttcaattctctgtagttaaaatatggcaatttttacatattaataggccaaagctcgaacttt

SEQ ID NO: 79726 - DNA, 512 bp, Arabidopsis thaliana landsberg
acaatatgcaggagtcctcaaaggatcttgctcttcctaactgcatcatataggctgccatatttgatacaaaatattggtacaactctgaaggatttagttgtgaactttctcccaaggtggctaatttgaagcttaatccttctccaagcccaactcttggattatatggttacttgcttgagggaaaactggattcgccaaatctctggtcagctgaacaagtaagctgctcattttctatcgcctaacatggctttgcttgtcagacatgcatagtctacaacaaaaaccaagtgatgtattactcttgagaagtggaatgagaatccttacaaaatgtatctggatgagattgtctatctggtgcaactcttaacaaatatggattgaaatcatgcttatgtgagcaatccttcatgatccctgacgtccttagaactatcacatttaaacttggttttgttatcagtggagactattttgacttctcaagacacataactgtgtac

SEQ ID NO: 79727 - DNA, 104 bp, Arabidopsis thaliana landsberg
gctagccaatgattggaacggtcgttggacgcattttgattccgaaaagcctcttgagcttgcacggggttgtggtctttgaaatgacttgcgagcccccccat

SEQ ID NO: 79728 - DNA, 286 bp, Arabidopsis thaliana landsberg
gaagaaagggccacagaaacacagcacaaacaaagaaaaggcgcgaaaaaaaacaaagtgggggtaataagcaaacgacaaaaagccaggggaagggaagcaaagaaacgcaaccccccacaacgggcaaaagaggggcaggccgaacaggaaccacaagccaagacaggccacacggaacaaaagaaacagaggcacaacagcgcaaccaagaaaaaaaaaaaaacgaagacggaagcaaaacgaggaccaccccccaaaagcacacgggcaagagcagggccaa

SEQ ID NO: 79729 - DNA, 483 bp, Arabidopsis thaliana landsberg
  unsure (1)..(483): unsure at all n locations
tcaacccattagatatatatgctcacaaaaaaaaattgattcctgattcatcagcatattaaaaaggaagcgacggcttataactcacgngaatcataagctggacaatactactacacatggatggagaaggtagacagtagatatactcttttgatattgaatcaaatctgcctcttgttccctactagaagaatcttgttgacattgttagaagcgtgctgctcaatgttacggatcggattcctgatgtctactcacagtaataaaaaagaaaagaaaagaatgaatgtgatcttagtagataatatttgctaactaatatgtagaagtaagagaaaaaatagatctgttgcaaatgtaattttttgttgcacaaggcctgaaattgaactaattaaaactgtgatctaaaactaagagtaaagataatagtttagtttagaaagatgattcaactgtgacttgatacacaagttaaat

SEQ ID NO: 79730 - DNA, 529 bp, Arabidopsis thaliana landsberg
  unsure (1)..(529): unsure at all n locations
aaagagtaattaacaagggattttgtacttgtgattttttgattagtagtaagcgaagaagatattggtgagagatgaaagttaacaaaaagttacagctgttgtaaaacttaactttttggtatctttttagtctgcagatttcacagaggaactgggtaatccagaaaacaactgtcctagtctgttaactgtcccattaaatatcagaggctctgaggtttttagaccatggggcgcaatcccaatcccggaaaccgctgtttttcgctctctaaacgatgcccaagtgaccatatagagtcctagaatgatgaagaatccacccacaacgctgcgtagaggaaaagaaaccgagttagaaaattttgcaagtgaaaactgtgaaatggaacaagatgttgaaaagtgaaagtgtttaattttgcaagtgaagattgtggatggttgaaaaagattccagaaaatgtatctaaccttccgagataaatggngctaccgagaaagattctcgataggaaagctgatg

SEQ ID NO: 79731 - DNA, 246 bp, Arabidopsis thaliana landsberg
tttatgcaaaacccttgttggggtggtttaaactgaatgactccaccactatcagcacgtgaggtggcggtggtgatgtcagaccgcttcgggaagccccatgcaacacgtacaccaaaggaggcacgacagtggggcattgacactgatcttttgctttccccaaattgtgaccttgaagttcgtgtgccttcatgggctgatttgggctatgttaccgacgccgaatgactagaaaagcattgt

SEQ ID NO: 79732 - DNA, 490 bp, Arabidopsis thaliana landsberg
attccattctacactattgaataaaaatatttgtgcggggtttcccgcgggataatatcgcggatgatctctaggtaaatgttcacttcaaaaagaaatatttatcacaaaatacattacccatgttctattttgttgttgtgattagaaaaaaagttcatttatatcatgtgggagacaagaatattttccttattgtatacgctgcccattatactaataccccacaaaagtagtggaaatctgaagaaagtaactttgcactatcggaagagttaagaaacagatgaataatttacattacttgccgacacatcttttacaaagataaatataagagtaataatggcatgcttacaaaatactagtaataactaaaccagcacccatgtttttaccggctcgcattattggagatgctgcaagaaacaataggaacacatctttctatttagatatgatggttaagaggtggtagtgattaagaaat

SEQ ID NO: 79733 - DNA, 528 bp, Arabidopsis thaliana landsberg
tcgctcatcttccacttgtgcatcattatctttgcgtcttcgtcaagtcaaattgattccattacccttttagatcgtatcatactcctctttgttcccttttgttgttaagtgaaaaaatgggttttggtaatttaattgttgggcatacatttgctattttggtattcttccggtaatgtaatgaaagagttgttagcatataaaacaaagttcagtttcttctttctttggattatgcgatatacagtcataacattttctatcttaaaacatagttccaacgacaaaagtagttccaatgacaaagttaaaagacatattcttttaaggtgggcacgacattgtttcgatctgttcggccagagaaagttatcattgcttaaaaggtgggaaagtggaagttacacattactttgatctcatggatcattaataatggggttatggaatacgtcagagactcactttcattcactaaattccacctactctttttggttcacccttaaaaaaaaaatattgagc

SEQ ID NO: 79734 - DNA, 405 bp, Arabidopsis thaliana landsberg
gggcggggggcgcggcgggcgtgggcgaggccaggctgccgtttaactgggccgcggcgccgtcggctgcggcgcatagcgccagcaggctgaggccggccgcgaaatccttaagcttcagtcccataggcgtcatactcggcatcaacgtcgaaccctctgaggcccggtccggttgttgttgttcctgtacccatcattgcccaatgtggcgagcgttaggcggaccatgaaggtctgggaggcgcgcgtcccaagcacaggattgtcttcccgctggtataccacatcgaaccgcaggcagtcgtccatatagatgacgcccaggccgcggcggcgccagacgtcggtctgcaggtcgcgcacggcgttggcggtcaagccccagatcttggtgatgaagac

SEQ ID NO: 79735 - DNA, 569 bp, Arabidopsis thaliana landsberg
aaataatttcctcatagtttaaattaaatatatttgagttaacgggtttgcagcgagtatattatccaaattttattatattatttcatttaccggcacatagtcaataccacaagcctcggcacataagatatctgtttcagaacctgttatcatcatcagatcccttctctccaaatcatgttcttttaataacaggtttaatgcatccggctcgggcttaggtaatgtttcatcagcaaagtaacaggttaaatacggctcaagtccatgccactcaacttgtcgtattttattaagctgcatttgcggtgtgccattagttacaataaacagcttttttctgtcggtaactatttcctgcataaagctaagcatattcttatacaacaacaatttaagcggaagccttgatgtaagcagcattatttccagcttgctgcgatatttttcatcaatgcccaactcattaaccaatgcatcgtaaacagcatcttcgcctttattgttatacgtggcaatcattacatcggttgtctatgccgcattattaagttgggtatattcta

SEQ ID NO: 79736 - DNA, 597 bp, Arabidopsis thaliana landsberg
  unsure (1)..(597): unsure at all n locations
gagtagccgtctgacatgggtgaatatgtcccaggtgcctgtcataatattatacctttcttctttccgcgcagcaccattgccgtaaaaggagaatgtgcctttttcaagaccggtattcatatacctccatccacctccgctgttctgtgctgcttcgnnnnnnnnnnnnnnnnnnnnnnnnnnnnnnnngccgtatggcctgtcggcaacccatataccttttttacaaccggcgaacagtaaaacaggtatcacaaataagtagggtaacattcttttcatacaattggttttaggtgatcgatgtctttgaccaaccttattcaattctagtaccagattttcttttttacgaacagttgtatgctttttagaaaacattaacgaaacgcgatggaaggatggcaggtgcgcggtaaaacgatgcgggggtgaataaggttacagctgcaggaaaaaatcactcccacctgatcatggaagccagcagcgtgggtcccaaacccagtaaagcgatcagtgtgaacgaacagcgcaggctgaatgcttcggcaataaaaccgatgaccggcgggctgatcaggaaacccatga

SEQ ID NO: 79737 - DNA, 421 bp, Arabidopsis thaliana landsberg
aaattgcatgagatgtaaatttagaggttgtgacagcgaaatagacaatagagaggacgatgcatgaaatgggacaacaagtgtttgacatgcaaatcctatcttctttaatttgtgtccctctcatcccaacgcaattattacgtcatttattagtgcttcctttttgtggattcttgctgtcttcctcccacaattaatgtatttttcctatatattttggattaatatacactagatcatttgcaaagaaatttccaaccatgatgaaccatgcatagtaattagtaaataggcgttatttataggggtagtacaatctcaagttctgaacaaatgttcattgttacgtccatcttaaatatgtaaaataaaagtatgagttcaaacatttcatacgatattacgaatcatatgtgtc

SEQ ID NO: 79738 - DNA, 507 bp, Arabidopsis thaliana landsberg
atcaagaatcaagaaactggagcgtatgcctattttgcaacctccggagagtgaatatgttgtccacttcaagttccccgaagttgagaaactttctccgccaatcattcagatgacaggtgttgccttcgggtacactaaagagaaacctcttcttcgggacgtggacctggacgtgcaacttgactcccgcattggtatagttggtccgaatggtgctggcaagaccactgtgttgaagcttctcattggccagctgcagcctacgagcggcctgatatctcagaatcctcgattgcgagttgggtactttgcgcaacatcatgttgatgctctggatctaaatgatagcgccgtgggatttatgtccaagcaatacccaggcaaaactgacgaagagtatcgtagacatctcggcgcgtgagtggtcccccccctaagctctttttaaataatcaaacgagatcgactaatgagactcaggtttggaattactggtatgactgg

SEQ ID NO: 79739 - DNA, 530 bp, Arabidopsis thaliana landsberg
  unsure (1)..(530): unsure at all n locations
tgtgatggatattaatttctgctacttcctggtttaattttttaggtgctcccaggttgaggacgtggtaatagataggaattgttgtcttttcttatgtaagcctgaaactgactatatatatctttaggagctgtggtagccatgaaggacgccgttgttctcgctaattgtatttacaacttgagagatacagcagacgagagcatcaaagccgcattcgccagttactataggcagcgccaccttgaggcaaatgaaattgtcaagggtagcgctttcctcaccaatgttatgtctgggcatgtatgtaaatctggatgttcaatgggcgtgctgctgtgtcagtgacacagattcccagactaacctccacgatgatcaatgctactagacatggggtgatcgaatgctgcgaaaggtcttntttgctagtcttaatttcttacctgaatggatgtttcagaaggaaatcagcaggctcctcacaaatagaccccaaattaactggttgccactgacagagaatc

SEQ ID NO: 79740 - DNA, 620 bp, Arabidopsis thaliana landsberg
  unsure (1)..(620): unsure at all n locations
agaaatcagtgaagagatgtatttgtgcctgtggagagtagaaaggaaatatgtaaactgtatttgcctcttgctgttgttaattttagttttcgttaaaatatacttttgttgccttagaagttcacgtacaacaattatacaccttgccacctacattggttctcattttcatttgcttttgtgcagctcaaactggtttcaagacatgatccttgggcagatagtaaagattttctgactgaagtcgttgtctcctcttttgagaagcaacagtctcagaaagaagcaataaacgctctgcctttgtacccaaatgagcaaatcatgtgggacgaaagtgttattccaagcattaattattctggggaaggttgccttgctcttccaaagcttaatcttcagtttctaacactccatgattatctccttagaaacttcaacctcttccgtctagaatccacctatgagattcgtgaagatatacaagaagctgtaccacatcttcttgcacatataaataacgagggagacactgcttttcgtggctggtcacgaatggcggtttctattaatgatttcaaatcgctcangtgaacagcctaatattggagaagaga

SEQ ID NO: 79741 - DNA, 573 bp, Arabidopsis thaliana landsberg
agctgagcgtaaaaacgccatctatacgtaataaggagaactatacgtaataaaagactagtctagttatcgtgacatcccaaagatacctgataagtccggtttggtggataacgaacgaatcgtatcacttcgtccagaaccggtacaggcgccatttttttggcctggttggaatccaagatcgccagaggtggttctatttgcattcacatggaaatcattgtgttcttaaatcttcacctctttataatacttctaatcttgctaaaaaagaaaaaagtcaatttttcacgaaaacttggtcaagatggcgtttttacgcttcgggagtgcgcgcaatcgatttctcgcattaaattacccccaatagggtcatttttacaaaaaaaattttctcccaaatgtttttgacaagaaatgaattttgaagaaaatgttgaagtttttgtcaaaagaattaaaattttttcgaatttggtaaataatggaggaccattatgattctagaaaaaaatacaaaattttgggcacaacataatgggggatacaattaggaaaacaatttcattt

SEQ ID NO: 79742 - DNA, 555 bp, Arabidopsis thaliana landsberg
  unsure (1)..(555): unsure at all n locations
aaattcgcaccatgcacggatcaagtccctaatgattcttttaaaggatataggaatcattctaagttagtttgcttagatgatgacgaaaactattgtaagtattataaatttagtgacaaatgtaagtcatataggcctctctcccgggttggcaatagaagaataatgcagtcggtgagagcaatctccaagttgaagtgttttgaagacactagaacaggttagtatcatattactgtgtttctccttggtgcatttctttttagctgccgctctgcccttactttgcttgcggatatatttctagatggtcgtttgaaggctctctaccgcacgagaaaattatgttatggttacaacccatggaagcgtgagaccattcataggaagagaagattgtctgacaaaggtttggtcgtaaattatgatggtgggctcagtagtgaaagtgtttccaattcaccttgaaaggggagatcangtacatattagtctatatctagatggctnattacccttgctgatatgggtttgatttcatgatttttttgc

SEQ ID NO: 79743 - DNA, 583 bp, Arabidopsis thaliana landsberg
ggctcacattctccggccaatctttgcttttgcatggtcatttgttccgttagagagatgttttattttttaattaaaaattaatttaaaaagttgatcatgtgttttttcttcgatcatgttattatatgttttagaggtttgaaatagattttagattaagaatatgttataaaaaccaggtaaccgagttatgggtacttcgaggaatgtttttagcctagtagttgattaacaaagtttttgagattttcaaaatagtttacaaggggatttaacaaaataaatcttggaatatgcgcaataggagtataatttaactaattgaatgacaaagagaagcttgaggctactttgggaagcaagtactttgcttaaatcaaattaaatatttctgcagatattatcattatagacgattggctcattattgtggatgttgatgtcgtataatcgatgtgaaataatggcataagaaagaaaaataattagatagaatacaataactcgcatttacaattattattaaaaatttattggaggttaggaaatgcataaaacacagtccatgaaaaatatagat

SEQ ID NO: 79744 - DNA, 595 bp, Arabidopsis thaliana landsberg
  unsure (1)..(595): unsure at all n locations
acaacaaacaaaagtggggatccagaaggctctgatagatatgagcatgtggtctcagtcaaggccaagacttaatgctgagaccaacccacttctattatagatacatacaatatttgttttatatcttgtcatgtattgatgtatatctaagtagatttatcataattatcgtaccatgctaagtgctaacgaataacgatcgttcatgaatccaaataaaatcacgtcaggtgctgcgacatggcttcttcattcggtttgttactgtttttttttcctctctttttctttctatgatcatcataaatgttgtaaaactatgttaaaaaatcgattcatgtctttttgtgtatgatgaggaagttttaacatttcttttggtatcatatatagtttatctttttgcatactataatatagttaactattttgtgcaaattttataaatcataattttttaaagtttagaatctatattggtattntcgtcttatacgaaaacaagtacaaagaattaattatacactacaaaaaaacgacattaattaattaatatagttgacaactaatactatacttcatcggttccttt

SEQ ID NO: 79745 - DNA, 381 bp, Arabidopsis thaliana landsberg
  unsure (1)..(381): unsure at all n locations
tgttattcacattaaacagataaatgattaaagcatgattaccattctctataagggccagagatattttttgaagaccagaatctgaacatggcgaggctagcctagcaagctgcccgtctcgnnnnnnnnnnnnnnnnnnnnnnnnnnacagttgcaagcgctgccaccacctttgaaggcacctgctgagagaggacaaatgtttttgtggcttacaaaagcttggccgcatttgtacactcaaactgtaggaactgggcgtcggttgcactgaaggaagattggaggaacaactacatgctcgcgtcgtttgttagggatttcagatcttaacatgcatgagcgctatatgatgtatgatctggtgtgctcatatgt

SEQ ID NO: 79746 - DNA, 512 bp, Arabidopsis thaliana landsberg
atcgccaagtcttcactcgcctgtgaggctagagcactcggatcctttccttcctgaacagcttcgttcgttcggaagattacataaccagcagttagcggctacatcctctacagaatggtgttagagcaatccacgaagagagaggatggatcaacggccacataggggaatgacgcgataccaaggatgttttgtagctcgataggagcttctgcataaagcagaggcccgttggggcgcttgaccgcggtcgcgctaatgtgattaagagtgactgtatcagactcagtgacacccacactgttatccatagtgcggacaacatcactgtcgacaagtttctgatggagataatcagacggtcatacagatagggaataattatgtgggattcaaacgcattggggctacctaggcagagactacaggctgcggttgtgagtctatctacattaaacgctgcattgtcaccgggagtacgtacacccatagctgtttgaggagcgcca

SEQ ID NO: 79747 - DNA, 125 bp, Arabidopsis thaliana landsberg
  unsure (1)..(125): unsure at all n locations
ggaagagggggggaccaagcacactcggagagcgcagnacaacggagagaagaacgctgtagacgggaaagaagaaacacaacccgaaaaggagggaaaagcgacacgcaaccaaacggacggac

SEQ ID NO: 79748 - DNA, 538 bp, Arabidopsis thaliana landsberg
agatagccttactagatttttttaatttatgttttgtgtttcactttctcttacatatcatttattcgtacatatatacaaattatttgtaactattatggacatgtacaaaaaaaaaaacaagagccttgatgaagtctgtcgtgaggtatatatgtgtgtatacctactacaatattaaaattgtttcttttctaactagagcttatcttgcaggtgactaccctatttcaagatcatcatgatttgcgtgtagaattttatcattttctccctcattattgatgatattatagagaagcgtgaaaatacggttatgggccgggatgataagttatgtatgcaattaagccgtgttgtaccattagtttgttgttgaactagcaaaactagtaattaatttcaactattttggacaatacatagcttacagagaaattgttaagaatgcccttctcctttttaattgtacacatttttttagtccattttcatttatatactcatttaaattttaattatcattctagccatatta

SEQ ID NO: 79749 - DNA, 135 bp, Arabidopsis thaliana landsberg
aaaagagagcggaacaacgaggagaagccagaagccccaaaaaacaggcccaggaacaaaccgggccgagaaagcgaggcccaaaacacgggacaacgcgcgagagacgcgggaaacaagaaggagagagaaacc

SEQ ID NO: 79750 - DNA, 589 bp, Arabidopsis thaliana landsberg
  unsure (1)..(589): unsure at all n locations
gcgggttcaatgggaggctaggtttattctcggccaatggatcgatatagatccatatatcttagatcttcgccttctccttaagggtattgaaccaggcgacccaattgtcgcttgaagctagcattatatttatattcattgtcatcgcttggggagtctttggcggtcgctcttcgaactggcgttccggttgataatcgataattggcatatgagactcttaattgtcataaagtcaagctcttcttattgattgtatcgatctatgtgtattcctcctttctttctcttgaggcaattgcgtccttccccgccgggccacgacatggccttcctaattaggcttagtctatccgtcgagccggagctctcccggccgatcggagagtgtcatgtgaccaccctcagagggcccaattcaacagtttgggcccgcgtattagcggattcacgtgtcccaggcttttcagcggggtatcataaacgaatcccttgtctttcgccacggctgccattattctgattctagtaagcttcagtgcaatacaaccattttgcctatctagctntctattacctaagagat

SEQ ID NO: 79751 - DNA, 481 bp, Arabidopsis thaliana landsberg
gctgtgatcttttttgtaaagactaaagttcgagagtggcttgtgtactggttttttagttaaatgttgctgtattgactatataaactaactggagttactagtacgggtctaattatgatgaattatcttatcaaatgtattggtatctgctaaaaataataaatcaatattttcattatacagaagatatctgaagctgagtgcatcaattttaccaattcaaagttagcttgattttcaagtcataatttttctacaattgttataaaaactaatattcaatcataaaaatataacttaataaatatttaaatgaaaacttttatctttttgtttaggctactaatcagcaatcatgaagttctgttttaattaatgtatggttgacaaaaataaaagtaaaaacaatttcaccttgtatatgtggtgcatattcactctaccaactatcggcctggttataagatatgattttgct

SEQ ID NO: 79752 - DNA, 581 bp, Arabidopsis thaliana landsberg
tctcgtctccgttttattgaaatcgccaaggaaagtagagattgtagccgttgatgattcttttgtttttttgattagattaatcctcatcgttcatttactaacaacaatacttttagtgagttgagttagtttaaaaacatttcaatataatgatttttttttgtgtttttttttctgtgttacctagaatatatatgttcatatgtctagtataaaatcatataacataaaaaataaaatgaagcaaagttgttcagaaaatgattaagaaaatgaagctgttttctatttatttattttttaacgaaaatgattaagaaaattaattagtgaaacaagagatattattataaatttataacgtgagaaggattaccagccaaaaccaaaatttattatgatgtcaattttatttgccttcccagaactagaagtgtctgtgtcattgtgatgttacaactgaagagtacataacgtatgaatggtccgtagctttgtaaattgtaactaccaccactaaaaagaatcaaacaaaaaagttgtcaagacttagaaaaaagaagatatttagtaccatg

SEQ ID NO: 79753 - DNA, 490 bp, Arabidopsis thaliana landsberg
tgtagacactgatgcgcacctcaccggccgtaacagccgtaaaattaatgccggcattgtttgtgttctgattgggtgatacacggcttttcaaagcattggccttgtgtaattctgaaattcctaaggccccaacctccagcgtataggtgtcaacagtatcatcacgcgtcaggcttccggcataatacgttacatagatcttcaatgggtaggagccttcctgtcccgcagtggctgttccggtaatgaccgcgcaatgggtctctccaccaggaaattcacagttgctgggattgcaggcataggtaaaacctgccggttgaccggtcacattgtttaccttggccttggtaatgggcactgtggtggtataccccggaaacacctcaatggtggtatctgacgggataataatggtgagcgtttgtgaataagtaatggctacggtggccggtgacaggccttcagcagcagttgggtgaatacc

SEQ ID NO: 79754 - DNA, 580 bp, Arabidopsis thaliana landsberg
aacgacgcaacaatcgaaatgaaagctctattacttttgcggtatacttttccaaattacagtttacaccatatggagagggggaaataatagaagacatggtgaagaaacatcaaacaacttcaagccttggaaaacatcgataatcgttcatattttggctttttactaggaaaaatttataaactctatctcgtagcgtatgtttaaaacaactcaaaacagttgcacttgatgtaataccggttttttgaataaatttaacattcattaaaaacataaagggtttttatgtgatatagaggataaattataagttaatgtgttaatcgtatttttgtaattagctttttctaatctctcttgtatattactcatctaataaagcaattcgttctaaaatataattattattttaagattttgttgtagagtgaattgatttattagatgagcaatgtatacacaagatagatgagggcaaaggtaactacaataacatccttaacacattaatttatatactctataactggtataaaaaaattagttggaatcattaaaattataattgaaacga

SEQ ID NO: 79755 - DNA, 515 bp, Arabidopsis thaliana landsberg
catacaaaaaggacaacccgtagcgatcacgttttgtgctttaccaagcgcttcttcggtgcgtggattggggacctcttttttccccggttcggcctctttgaacatttgtgcaccaccggctccacagcaaaaacctttttgcttgcagcgtttcatttccaccagctccgcatctagcttctgcagcacttcgcgtggcgcttcatatacatcattaccgcggcccaaataacagggatcgtggaaagtgatttttttgcctttgaaatcaccaccgtctttgatggtcactttaccttcggccagcaattgattgatgagctgggtatggtgaatgacctcgtactttccgcccaggccgggatattcatttttaagggtattgaagcagtgcggacaggccgttacgatcttttgtacatgataaccattcatgaccatgatgttctgcatggcctgcatctggaacaggaattcgttacctgcacgtttggccggatcgccattgcaac

SEQ ID NO: 79756 - DNA, 532 bp, Arabidopsis thaliana landsberg
acaaaaatgtttatcgatcttgtttcaacgattaattacatttctctgtgaaggctgaactatttcgtcaaggcaaagttcataaattgataaacgtaattttatcttcgtgacgactaagtgatgagacacctctcacacgtattatgcttttgtctaccatagctagccaaatcttttcatcactttttaatcgtttttcattataagttatttctttacagtttaccattttttttttaaaaatagctgtagatattccaagcaatgagcgaaatgttttgggatatcataatattgaatattattatactgttttcgcatacttaacatataagcattttaaaacacgttatcattatacattaagttataaaccaacttatttttcttttgaatataatataacattaaattaaaaagcagattatcatcataagatatttgatcaaaatactaatctatctaaacattaacaatatatactaattaatatctttatgttttgttcaaaatgtacattctacaaaac

SEQ ID NO: 79757 - DNA, 512 bp, Arabidopsis thaliana landsberg
  unsure (1)..(512): unsure at all n locations
ccgcgnnnnnnnnnnnnnnnnnnnnnnnnnnnnncgccggactgccttttcggggatccgacggtgtcacccatttaagtgaaacgtttgacttaggtcaagagcgcgctgttgactggtcgccatgcggacacgcacgcgcagcccgcgctccgcccgggccgacggcacgcgcgaggcactgttggctgcggccgaacggctgatcgcggagcgcggggtggaagccgtgacgcatcgccagatcgtcgacgccgccggtcagggcaacaacgcggcggtnnnnnnnnnnnnnnnnnnnnnnnnnnnnnnnnnnnnnnnnnnnnnnnnnnnncacgccggccacatcgaggagctccgcaccgcgcgggtcgacgccaccggtgactccgtcgagctgcgggactgggtgggttgcctggtgcagcccgtgaccgatcacctggcgtcgctcaccggggccacctggtatgcgcgattcgccagccaagtgatgacccgccccacctatc

SEQ ID NO: 79758 - DNA, 490 bp, Arabidopsis thaliana landsberg
gcggtcaggtacctggtcatctggttcacgtcgctgcccccggacgcgaatggttccttgcaggcggccatctacggcgtgaccgtggcggcgtcctgatcactggcggacctggtcaggtggggatgaagcggtggatggcctgcttggcgttgtcctggaacgaggggtttcgaaggtcggggaagatgtcggactggtcggcgatagcgccgcgccctacggtgattcctgaccgcacgggcgcagcgacctacgggacggatcacgccgtcagcacgccggacaggacgccgtgcaccatggcgcggacactgtccggcgcaggcagatcaccggcacggtcggcgaaatgcaggtgcgccgcgccgatcagcgtccgggccagcaccggaatgtcggcgtccgcggtgacgcggtcgaggtcctgttccgcgcgcaggtagtcgatgatcatcggcgcggccttccgtgtgagcaggatgccctt

SEQ ID NO: 79759 - DNA, 578 bp, Arabidopsis thaliana landsberg
gtattatatttctagatcaacaatatttccgggtctttaatttctatattttacaatattgtaaagctaaaggaaaaaaaatctatcttgcgtgtcaataataaatgtctcttactaagaaaatatcaagattttgtctaattactaattagaaaggaagcactaatttttggggtgaaaaaatatgatttctggacaattagataaaaaacaaaaaaataattggactaaataaaaataaaagataaaagtgaaaatatttaaaaaattggggataataatccaaataaaaagatttggtcactgggacagattccgcactatatatatattcttgtctaaagaaaataaaaaaccctaaaaaaaagaggcagacagagagatctcctctttgtctttttactttatctcctgaagtttcgcctcagtcatctcgtaagttttctctctctttctcattcaattcaatttttaatgtaatttcttgtttgatttttctattttcttcgagaaaacaaaattctcctgtaaaattaatattataaaagtggtttctttttcatttatgtttatataat

SEQ ID NO: 79760 - DNA, 216 bp, Arabidopsis thaliana landsberg
  unsure (1)..(216): unsure at all n locations
gaaagacaaagagacagactagaaacgacacctcttatgccaagtacacgttagggacaccaaaagaacggaacgggganggggaaggaaaagaacgaaacagagccgcaccgagggacccaaaaaaagaaggcacggaacggagccacaacgaagaagngccggggggaacgaaggaaaccccgagcacacacagggcaagggacgagaacggga

SEQ ID NO: 79761 - DNA, 420 bp, Arabidopsis thaliana landsberg
atatctgcatcacatcaagcgtggtgtcgcgaaattcgcgatagatgatttcgagatcatcgacggggaacagtgcctcaatgccatccacgaattttcgcagggtgcctttcctctctttgacccaaaaagggacgaggcagtcgctcgatttccggcgttcattcgcgacgccccttgcccttgggccggaaagcggatctctgaactgtctgaggaactgcaacaccagtttaagtcgacgaagctatctgtcgcacatgttgagacggaccaagtcaacgaagtcagggacctttttgtcaggcttcagagcggcctgacgctaaaccatcaagagacgcgggacgcctggcccggcaacttcaccgatttcatcttctgttggggggcaaaccagaactacctcggtgtccgggc

SEQ ID NO: 79762 - DNA, 471 bp, Arabidopsis thaliana landsberg
gatacgattaaacataatgtttaacggttgaccaaaaacaatttttaactagtttagaccaaaacatgtgactcgattaatctgattaaattgtggagcagatcacttagtatttttgtcgtaaactccatgagctatcccacaaaaattaactttccaacaaactctaagattatgcatatcgagatgatgtctccactgacttttggtttcgaataaaatggtattaaaaattagatattcgaatttggatctttatcaaattaatataaatttaaaatatgttaaattctaaaatgattcttccgactactagaattatttttagttcatctaatgatatctccacgtctactttaacaaaacaaaaaaaaaaatcttcaattgtttaatttttaaatgggagaaaagtgtttatagaagaatcgtacatgatagattgatagagggtacatatagttttgtagctag

SEQ ID NO: 79763 - DNA, 514 bp, Arabidopsis thaliana landsberg
acaccaaaatcattacccaagaccaacttttttctagccaaagtcccaaaaaggagacagggaagcaaagcgtcataagcctaaaagggcaaaaccagcagaaaagacacctaaagatgaagaatcggttgcgaaaaatttagattggcggcaaatcctgaaaaaattgcccgagacggcgatgcctacaaaaatccagcctatgctggctactttagtagacgcaccttttgacgatccggaatggaattttgaaatcaaatgggatggatatcgcgccatagcttatgtggaactcaagggtaaagcccagccaaaaacgtctgtacacataaaaagtcgtaatcaaaaagactttgagcaaaagtactatccaataagaacttcactggaaaagctgaccgagacaatggtcctggatggagagctcgttgtcgtggatgaggcaagtatgcccgaatttggtgctttgcagaattggcgtagtgagtcggatggcactttgctttattat

SEQ ID NO: 79764 - DNA, 604 bp, Arabidopsis thaliana landsberg
atctttatctttcggacattggattatcggacggtctgatttgctatgctaaaaatctcataagattaataattgtttttgtagctacacatggatatatttttttttttgacagcacacatggatatattttaccatatttcttttactataagcaatatctactgatacccaattaatttcccctatatgtgagatttttaaaaagcgtgaactttccccaatcttcatttttttgaatttttcgcattcgtataagttggagaattgatagatttattctttttattataaaagagattgttgcccgcttggactcggaaggaaaccagaggagatttatagtttctcgcgccatcaacatcaatcatcaaaaccctagtttctcggcgccatggttcccgaaaatgatatagtagaaggtctgctatatatatctggaggctgcagtaacttatacgaattggcatatgctacttaaattttctatcttttgggtgttattgaagagatggtagccttatgtaactatatacccacatgatactatacccacatgagggagtattgtactatgtaactatatacccacatgatacatgtg

SEQ ID NO: 79765 - DNA, 567 bp, Arabidopsis thaliana landsberg
gtgcatattggagttgttcggaatcggataatgatgaatttagttagaattaaggactcatcattcatttaacattcatcactatacctttttttcattttttttttcatcactatacctatttgcttgaaatttttaactaattaatcttatgatgataccttaattttttcaaccatgttgatgaatccgtatataaatattttattttacacatcttcttagtttctatagtttttctttttttgggcaactagtttctatagtattttaattcaagaattaatatggacatcgccgtaaaacattattccaactaattaaataacaataacaaaatataagtcaatggaagaaagccacttgaccgaaaagcaggaacatgacaagatagaaaatgacaaaataaataatttaagaaaatagagattgttagaacttagaagtgaaccatacacttcattatctcttcttttcattgactctatcattttctcaaaagtcttcatttggtgcatttctacgaactttcctagctccttcacatttaaacactagcaacaatga

SEQ ID NO: 79766 - DNA, 253 bp, Arabidopsis thaliana landsberg
  unsure (1)..(253): unsure at all n locations
aaaaaaagccgagacagaggcacgggggagcgttaaaagccgaaacacaacacccccaacaggagaganaggagaagaagaacaacacgcgagagagcaaaaaacgagaggggcggaccgaaacacaggagccacccacggaccaaggacagggcacagaccccaacaaaaagagaaaaagggcacgaacaagaccaaagaggacggagccacgcccaagaagcagcaagagcaccaccaggggaaggagacc

SEQ ID NO: 79767 - DNA, 241 bp, Arabidopsis thaliana landsberg
ctgatcctaccactcggatcgggaacagacatgctgacgctcaggaggaggcatggcataccagccaatagtaggaaaaacttagtagagaccatgatgcccggtgcggacaacgctctagcatccagctttggctgagtgacaggtattatcatggtgcgacgcctattccaatttatacagcacggctgagtgaacctactcacattgcacctacagctcaggtggagagccaatactg

SEQ ID NO: 79768 - DNA, 535 bp, Arabidopsis thaliana landsberg
caaggtacccattccgaaaaggcagggaccaaccggttttttaaccttccagtgccataagagaaaatcaacagccttatccatgtggctttttgatgccgaaccggcaaaccgaaaagcatccaaagcttccagagtcggaccggggtttgaatgactggtatcgggccctcttccgaaactgaatttattgcatttccatccaccgtctttctcctgggtacctagtaaatactcgaaggtctttacgagccttttgtctttggaataacccaagtaacacaataccctcaaacaacctatggtgtgacagggataaatagctcccgtttttgagatcctgaatcttccatcgggctcctggtgattaaaaataaccctgctgaggtcttttataattccatcccttttattcaggcccaatgtggttaacaggatcgaaacatctcttgtggaaaaagggctacccttaccaatatgattatcttcacccatccacaaatcgcctacgttaatatgctttttcgaaacaatg

SEQ ID NO: 79769 - DNA, 457 bp, Arabidopsis thaliana landsberg
  unsure (1)..(457): unsure at all n locations
tgtgccctgacatgccagttttatcaatttcgaaatgttgttcacttcatgcaatttggatggttgggaggacaaagaaggaccatacaagagtcttgaaatgtggtaaaaaacaccagatgctgttttagcctgatcatgggacccatacacctaatcttatcatatacttataaatctcatattaataaagagcaataagcnnnnnnnnnnnnnnnnnnnnnntcccagaattattcgggtgcttcggataaccatccaattaaattatcatatagacctatgtggagagagagatatgttataaagtcacattgcctatagtataatttaatgtttgcgagcgcctgctttttaatcgggttcgaccatacataatttgcttatttccttaatatggagagctcagtcgatatatcctcgaatcccaatgctccgtttaaggaattcgagcccg

SEQ ID NO: 79770 - DNA, 546 bp, Arabidopsis thaliana landsberg
cgcagccgggtcggacggaagtccgccggcaacatgatcgtggcgtgcaattgctggaaatacttgaagctgaagggcatgccgtccttctgggcgtcgtcgcccaatgccgaccacgccagctgcaccaccttgttgccgcgcacgccgtccacgcttaccagggcggtgccgctggtgtcgtcgctgtgcttgacgctctgggtcaggctgatggtgaggttccaggcgtgcgagccggacaccggctgcaactgcacctcctgcaccttcaagccgtcgtgggtggcgttgttgccgagcaggcgcgagtagaagcccaggtcggcgcgcaagccgctgatctcttcgtcgcggtccgcgagggtcttgcgcagcgaggccgtggcaatctgggtgacctgttgcgagcgctgcaggttcgccacctgttgcttgaggttgtcgttctgcgaggccaggtcgcgcagctggctcttgtggttgatgatgcgcggcgccgcatggtcaaccagcagcgtggccgacccggccaccaaaatcagg

SEQ ID NO: 79771 - DNA, 145 bp, Arabidopsis thaliana landsberg
cgaaaacagctaaccgcaacaaaaaaaattgataaaggagcctttattttacaacgagggaaaaggaatccgggacaggacatattaggactaacgaactattggcgttactaatgaagactagctatattcagaatgtaaagga

SEQ ID NO: 79772 - DNA, 420 bp, Arabidopsis thaliana landsberg
ggtcgccttcggcccaagaccaccgccaaccgcatcgccgacgtgctgatcgaccacgacatcgccatgcccgcccgggcgcgcgcggccgatcggggcctgatccgcaccgacggcggcaacctgatctatgacgccgcctgccaggccatccgcgacccggcccgcctcgccgacgacctcaaactgatcaccggcgtggtcgagcacggcctgttcctcgacctcgccgacgaggcgatcatcggcacggacgacggggtggaggtgctgacgccataaagctggcgtccacagacgggctctcttgctcagctaaaagttctggggtactcgcaacgtagaggggtacccaatgttgcataagtgtatgattaccttcgccgtcaccgccgcggccttgacggcgaccgcctgcgc

SEQ ID NO: 79773 - DNA, 120 bp, Arabidopsis thaliana landsberg
aaggaaagaaagaaagagaaggaggagaaaaagaggaagaaaaggaaaattagagtctatgagagaaaaggggagaaaaaggaaaaggggggaaaggaggagaaagagggaaaagaaaaa

SEQ ID NO: 79774 - DNA, 590 bp, Arabidopsis thaliana landsberg
  unsure (1)..(590): unsure at all n locations
ggcttgatacatgaaataaatgcgaaaaaacgttctaacgaataattttggtcccgtaatgtagaacggatcacgaaaaggcccaaaaaatacctaaggatcaaaatttgaannnnnnnnnnnnnnnnnnnnnnnnnnnnnnnnnnnnnnnnnnnnnnnnnnnnnnnnnnnnnnnnnnnnnnnnnnnnnnnnnnnnnnnnnnnnnnnnnnnnnnnnnnnnnnnnnnnnnnnnnnnnnnnnnnnnnnnnnnnnnnnnnnnnnnnnnnnnnnnnnnnnnnnnnnnnnnnnnnnnnnnnnnnnnnnnnnnnnnnnnnnnnnnnnnnnnnnnnnnnnnnnnnnnnnnnnnnnnnnnnnnnnnnnnnnnnnnnnnnnnnnnnnnnnnnnnnnnnnnnnnnnnnnnnnnnnnnnnnnnnnnnnnnnnnnnnnnnnnnnnnnnnnnnnnnnnnnnnnnnnnnnnnnnnnnnnnnnnnnnnnnnnnnnnnnnnnnnnnnnnnnnnnnnnnnnnnnnnnnnnnnnnnnnnnnnnnnnnnnnnnnnnnnnnnnnnnnnnnnnnnnnnnnnnnnnnnnnnnnnnnnnnnnnnnnnnnnnnn

SEQ ID NO: 79775 - DNA, 477 bp, Arabidopsis thaliana landsberg
cgcgaagagtcaatggattattcataattctaatgaattcgtgaaaggtctgctcgtttgagaatctaagtacttgggataaaatgccaaaaagccggtttaaacgaaaatcaagcatctttcctaaaccatgttatatataatgtatgtttttttttttgggtaaagaaaactaacatatgttgcacataatgtattacaaacaggaaatttggcacacagttatgcataacctacataattgtttgtgtaggtggcgatgtatatattttattgtttcgaacaattatgcaaatattgtcaccaaaatatgaaaatatcgatgtatatgtattcatcattaaattacccgatccagagatttataagtatttaactatttatccaattgtaaatcgatgttataacgttgtagagtatctttagcaaagaaagagctgtagatcattgatattataggggagcccatttcaattc

SEQ ID NO: 79776 - DNA, 373 bp, Arabidopsis thaliana landsberg
ccctatgcactcgccggcgagaatcgccgactgtttgtgcatacacctgggcaggctccaaggccgggaggccgaacagctcggccaccagtgccgaagcacgtcggcgctcggcgcagtggccaggcaatgccaccttgcccggcagacgctcggcgaccagggtcacttgccaggagcaacgaccgacggcgaggcgggccatccacgcccagccatcgaccaggctctcgaccgccgaggccggctcgccagggacgccctgccagagggagagcaggctgacggcctccggcccgcgcaagcggacggcggccagcggcgcctggcgaccacgcgcctcgaccaggaaacggccttgcagcaactggcc

SEQ ID NO: 79777 - DNA, 559 bp, Arabidopsis thaliana landsberg
gttcaacggaagtgtcgtttctgcatctcctagtaacgctggtgtctaaccaatatggtgaatcgttaaacaaatgtgggatctagttatacaatgaaaatgtaacaagactttacctctggttctccgaatatcttgagaaaatcctctatctcatcataaaaaccctcccaatcccaatcatcattcatgttaacttctttccaaagaatctctatctcgtctcttctatagtttcgtttttagggtaaaacgcaggaagcattacaaaaagatgaaaatagcaagtcttgaatgagcagctagggagagataagaacagagttactgtttacttgagatcgatcggagagggagagacagagatttgagaaaagagctaagaaagagatttagtagaaacaacaaagaatctgcagaaacatacctatgagcgagagaaagactaacaagtgaatcttgatctaaatcttgacgagtgttcaaaaacgatcaacacaatctctgtttctgtttctctttgcaactttaaaagtttaaatggtttatatagggtact

SEQ ID NO: 79778 - DNA, 275 bp, Arabidopsis thaliana landsberg
gaattccaaggaagaaaccgggcagcaggtcaaatcatgtaaatcacaagcctttcatataagcttagaatatacctatcaggagtggtatataggggcatactcatgcatggcatctagattcacatgctagggctggagggctcattaacacacagctccattcctgaacatatttagacaaaggtctcataagagggccacaatggacaaggatgacatgaactcactcacagcatgattggggtgctatgtacctagagttacaggaacat

SEQ ID NO: 79779 - DNA, 521 bp, Arabidopsis thaliana landsberg
cttcttctctcttttcgctttccctttcaccaagcttactgttgcagatgttggtttcgctttcgctttcaccaagctcactactgtagatgttgtttgcgctttccctttcaccaagctcgctgctgcagatgttgttgctatggttttcactgaatttataggtactttgggctttgccttcacaaaagttttgcagaaaatatgttacaagttcgacctagaaaccaaaatatccgaaaaccacgtcatgatgaaaacttcgatctacaacgaatccgagtcttaacaataaaattttccacagaagttttatctaacaatgaaaaatctacaattcgatgcactcctttagagctagatcggctttaatccttaaggaatttataaaaatcagagaacccaaatcagaaacttgcgatcaaaaactttaacacaagagttttcccgattgatacctcggatttcgccgtgacggtagaaacagaggatctgggtttagaatccgacatgatcggtct

SEQ ID NO: 79780 - DNA, 498 bp, Arabidopsis thaliana landsberg
cgctgccgatgcggtggtcgtcgggtcctacgtgttccagggcatcgacgttatcgatcgcctggttacgatcgcactgcagaggctatgcttttacgacatcgacacgcccgtaacgctttccaaactcgatcgtggcgacgaggaatatcttgcgcgccgtcagatcgcagtttttcaggcttatttctcgttttcgggcggcgaagtgctcaaggaactggagacccgatacggcgctcagcgtgccattgcgctttattgttcggttgacccggaccgatacggcaagaccgatgatcccaccatctgggagatgggatatctgggcacctacagcgctgatcgacaaccgacgctcgagcagctgcttctcgaacctgcacgtcagcttcccgacaggcggttcgtcgttgccggcccacaatatccagatgatatcgactggcccgccaatgttgaacgcatcgatcacctgccgccctcagaccatgcacg

SEQ ID NO: 79781 - DNA, 417 bp, Arabidopsis thaliana landsberg
gtaaggtatattgtattgatgatgataccattttattgctactttgctagaataccaaattcaaaatggaaatatatcgtttgaaactgtataagtttttaaaaagtgtacgtagacatattgttgataagatattgatcatcgatgcatatggaagaagaagagactccagagaattacaatatcgatcgatatggatcaaaattcatatcaatcttatactgtagtttcgagaattactaataagatactatgatgcgattaaatcgtttttgccatttttttgcaactgaaaaatcaggggatatatatgtcgaactacacaaactcaccgtgtgcagcatgcaaattcctccggcgttaatgcacgttaaactgcgtattcgcaccctatttttcgacggaggaacctacaaa

SEQ ID NO: 79782 - DNA, 550 bp, Arabidopsis thaliana landsberg
  unsure (1)..(550): unsure at all n locations
ccttctggccaggctgnnnnnnnnnnnnnnnnnnnnnnnnnngggtattnnnnnnnnnnnnnnnnnnnnnnnnnnnnnnnnnnnngtgcggatatggaaaaaagatatttaccaggtaacggaacagtatgatgtggtcatgatgcatcattcgctcgaacacatgttccagccgcagaatgtactggaacaggccatgaagatcaccaaacctggcggcagtgttatgatccgcatacccatcatgggtaattatggatggcagacctatggtgaatactggtgcggcatagatgcaccaagacatatcttcgtcccttctgaaaaacaaatgcgccggctggcggaagatgcaggattcgtgatcgaaaaattctattacgacagcagtgattacctgatctggagcagcgaacaatacaaaatgggtatgccattacatgatccgagaagccatatgttcaacagcaaaaacagtcttttcccaggaatgatatccatcgcttccgtgccatcatgaaaaaagaaaatgagagggggaatggagata

SEQ ID NO: 79783 - DNA, 596 bp, Arabidopsis thaliana landsberg
  unsure (1)..(596): unsure at all n locations
taatggggaactgtagaacacccaatgatctagttttgttacatcttcttcgttaacttggatctatatctattaaggtttctnnnnnnnnnnnnnnnnnnnnnnnnnnnnnntatccttacaaaaatttccgactttggtttaatagatatcaattgccaaaggaatatgctcacacatacattgaacctgaacaaagaacttttgaatacttttaaataaactcatttcgagagatagctttacaaggaactgagagatatatggtcacacgctttttttgttccggcagtcacatgcttttctctcgacaaaagtagatattacgtctcgatgtgagtatatataatggaattgacacagaccgaacgaaataatttcctttctcgtgaaagaatataattttaagaattgagttacaatacattctccctcaaaattcgtaatgaaaagttgtactttcttaaaggaaaaaactattgtttataatactttgatggacgtaccacttaataatgtattacattcactacatcaaaaagtaatacttgtatgatacatccagggacagagcatattgatatcatgaaaactac

SEQ ID NO: 79784 - DNA, 407 bp, Arabidopsis thaliana landsberg
gaaactgacaagatagatactgagccgagtaatgtttcagagaaggagtctgatatcagattcaaaggagaacaacaagaggatcaaaaggagaaagaaggtgaaccagatcggaaagagatgtccatgaagggaatggagaacagggaaaagcatttgcttacagagtacacaaccattctcaggaacttcaaggatatgaagaaaactttggatgaaaccaagacaaagatgaagacagagaatgcgacaaaagatgatgagatcaagctactaagagagaaaatgagcctctagcagaagggtctaggagacagtaatgacttgatggaaaaccaattgtaaaacgacgactactccatcggatccatggctgcagaaaaccaaaacaagtccctggttgagga

SEQ ID NO: 79785 - DNA, 408 bp, Arabidopsis thaliana landsberg
  unsure (1)..(408): unsure at all n locations
aacggggagaggttttctcggtctcattctcagcggactgccccttcttactcgctgttggtggctcagaggggctaaatgtaagtagggattttgatggtacaagaaataacaaattctgtttttgagataaccaacgtatatgtatacgcatgcttgtgcaggtgtgggataccttatcagacactgctgtgtcccgaagatatggtagcagccgaccatgaaccacatgggaagatactttgtttcttgaagctgacgcccacttttttatataattaagaacttgtttatgtcgacttccttcagatcctcgactcccatttgaaatgatccgtgttttttttatatctaaacgttgntgattgttgcatacaataatctcaaacatattttcattcaaaaaat

SEQ ID NO: 79786 - DNA, 373 bp, Arabidopsis thaliana landsberg
agcagaggtgaagcacaagggccaagagagaggaaagaagtatctataaaatgaagaaagaaataggttttaacaaagaagctatataaactgggatgggaaagaaggaaagggacctgccaaaaaaaactaagaacgaataacagtggacaagcatcacacagatgaaggaaggagaaaagaaaaaacccaatagacaaaggaaaagaggaaaaaaatgaaaaggagaggaggaaaatcacgaaaatacggaggattgtataatacaagaaaaacaaaaaatgaataagaaatgccagacaatcagacatacaataagatataaaggtcaaagtaagtgaaagtcaaaaaaatggaacaccaaaacaaaaga

SEQ ID NO: 79787 - DNA, 560 bp, Arabidopsis thaliana landsberg
cagcatcgtccgtgagaattttaggcttttggttcagtaggtcgatacctacttcgagcatagcttccacattagcattagggcaggtgctgatccagcggagcgaccttcgatgaagccgctcgagaaataattgagatagccggcagccatttgggagcggccgtcgtcatggacacacacaaacaggacactcaaatcatttgccatactgttttcgttgattgtctgaacggttgtcgtctagtgggttattgagatataataatgtgtttagtgtcacgtttatccgcgtgacacggagataaaattgtcgacctatggtggcaagaccaaaactaccaggctttttcaaatactccgtacaagaatgagtgaagtttcaggaggagcttctttatatcaccaacgtaggagaacacacaactaagctagtctgatcgttttcttttcatggcactggttcaagagtctaccgcctttaaccacaaccattctcgaatgagtacagctctcaattccacggagcctactatgcatcggccccatgtgcgccagca

SEQ ID NO: 79788 - DNA, 619 bp, Arabidopsis thaliana landsberg
ggcgtcgttgcgaatggataacttggaacgacgtggctttgatctgaaccttcttccagcagcagaggagtgtttttcagagagtgccaaataaagtccaagtggctgctcaagcatgacaaagaagactaggtttgattcgatctaagaagctttttaatagattcatctcttcttatcaatttaagtagtttttgataaacctttttttggggtgataattatatagcataaatagcaggattttgtaacgaatatgcaaccaagtttccaatgttttggttgtctatactataaactgaaaggattctaagaatcgtttttttgaatactatgaaatataaggctaaagagggagatacgtggacagactctttattataaaggcaatgagaagaaaagaagaaactaatgtgcataattcattttgagagaaccacatagattaagtaacaaacaatcaaacacatttcccagattcttcaacttgatacatgtttatatatatatagtggcaatagttggaattgagatttcaataaaagagatagagatgtgacttttgcgttttttcatcttttgggttgtgttgaagaacagaattgtaccttgttttttt

SEQ ID NO: 79789 - DNA, 530 bp, Arabidopsis thaliana landsberg
aattttatataaccgataaattaatgtatgtatacttcgattgattaaaaacattattagttaaataatatcatatgcttctatgttgagccaggtactagtttggaccaccatgaaaataatacaagatcgcgcttaaagctgcaagaaccaaaatagaaagaatattgtgaacttagagcaattaattaagactaattaagagaattttctttcaaaccccacgaatctaggaccaaacccaagagcaatctagaaaagcctcctcttttatagctgtcatcggtgacgaattttgtgttcatagcaaattagcaatgccacgtttacgaaaactatttatggaaatttataaacttaaactaaggagctaatgacaagatctgtttagttgcgaaccatgtgcttaaagctctaatcgtgttatgtgatgtattagaggaacccctagacaggttggaccttcaaagtggtaaagagagacaaaatattggactggttttatatttatggaaagcttatttaatttt

SEQ ID NO: 79790 - DNA, 229 bp, Arabidopsis thaliana landsberg
taaaaacaagacaaaaattccaagctatctattttagccggcgggaatcaagataatagagaaaacacgcatacgaaagggaacaaattagaaatcacacatatataggaaacgaagccgacaaaaaaaatggattaaaggaaacgatcttaactagaaagaaagcagcaaataacaaatggataagaaaccactctatccgcaactaaaacaagaaaacataaacgca

SEQ ID NO: 79791 - DNA, 463 bp, Arabidopsis thaliana landsberg
  unsure (1)..(463): unsure at all n locations
caggagncccaatctcagagagcgcactgtacggcatttttttttgtctagttcctcctgttctcctctccaggctctgtctcccacactcgtacacggtaatatcctctctgtctctgcctcaccgnaccggcggctgggtatgtgtactctagtcagtcagcagttgttcttcgactacactgctgatagtgctgaggtcttgcagcgggcaagtgactagcagcagcagtctcagtttcttggtagagatagccgaccacagcctctctctcgctcagtcatcagaagatagttcgacttagctgctgttaccaaccagcagcaacaggtgtagagaagagcaaactctgctctcttcttgaagcgataggcactacttcttgctccagtacttcttgcaccttttcaggttttgaagtctgaccaacagcaccagagacctttagagagtccccacgct

SEQ ID NO: 79792 - DNA, 277 bp, Arabidopsis thaliana landsberg
  unsure (1)..(277): unsure at all n locations
aagcnagcaaaggaaatcatagaagatagcatcctttcatttctttcgagtttagttttggctgataatattgacgatgatgagttatcacagaaggtattacttgcaaaagaattcttaacttgagttctttacataagccttcttaagagataaaggtcagaagatcatttattctattcttttatcccattgtagcataatcgaactgttctgtaaatcatctcaagtattggcaaaaataaaagtaagaccatcgncattagctttgctagcc

SEQ ID NO: 79793 - DNA, 204 bp, Arabidopsis thaliana landsberg
ttatatagacgaatctgtggtacccatttgacttaaacaaacaatcaagctaattaacacgaggacatattaatggattgctttttttttttaatgcaggatggtgttgtcttgaagcttcctaaaaagtcatcacttgtattgagaatggtcattctcctctatgtaatggtctgtgctgtgtacatttgctccatttgtctt

SEQ ID NO: 79794 - DNA, 381 bp, Arabidopsis thaliana landsberg
aattcggcctggtgaccccttggctgtaccggctatacgcgcatattaaattaattggggttttgccagaccatagtgaaaacgcgccttatgggttttgctaaactactacgagattgggatttttctaccgggcgcgaatggttattaagatcgctttctggcttcgggcatagactaggcattgccgaataagccgacaggcagttagtgaatttaacacatggcctttgggaacctgacataaaaactccggatgggatcgaaagagtacatacctattttaaatgaagactggccttctggatgatcgatgagtgacgcggaattcactccactctaggactacagggagtgagaggatctatgatttgaacatac

SEQ ID NO: 79795 - DNA, 586 bp, Arabidopsis thaliana landsberg
tttcttttatgcttttttgtctcctttttgtttttatagatatcttctaaatggcatataccaaattaccaatcttaaacagtgagacatgctttcagcgtcattaattaattggggatggagtaatgtccttttctaagaaaatcaagagaaagaaaacagatctatttcagatcatctatgccccccagtttctagtgtgcttaggtaagagatcaatctctcgctcctcctccatctaataatgtcagagacaggacataaaaagcatgaactggttatagtggatcaataagaggattttaattggagctactatttgcgacaaaaacccatgtctaatggttgtcctttataggtccagcattgttgggtccttcaatatctctctctctcttctagtaattaagaaagagatagcacttgagctcatattaaagaagatgaacacatttggtcggcccccaccttctttatagcagccctacttagttgttagtacttctttgtcccaggattggatcaaatgtataagactataagaggctcaatgaaaaaaatggctctaatttttgggttaaattgg

SEQ ID NO: 79796 - DNA, 628 bp, Arabidopsis thaliana landsberg
tgatatctgtcgagtctacaagcgatttacatcgatcattgagcaccatcagcagtgactattctcaggttttcttgccccctctttctttttgtgtttacctaacacgacgcggctaacgaggcgctgatcaggcgcttgatcaggcgtcagttggcagaaactgtgcagcagtagcagcagcatcagcagtgcctgccggcgacaagtgcctctcttgactctcaagaagggctgctgtagcactcttctcctcctcgcgctcaactcaaaatctctctccacggtgactgtgtgcgtaagacagactacaaattgtcacatgctattggcagtagcagcgatctaaagtgtcaccactgtgaagtagtctgcttgtgcagaagctttcctgacagccttaacgaccgactcgatgctggtgctgctgctggtggtagtattcattctcaagtctagactgaggtgaactctttgttcctcttgtctctcgctccatccatcgcaagaggttaatctcgatcgatagatctaaatcggaatgctcttcgtctcttgccacatgtgtcgactggtcgtctaatgtttacacagttgcaagttaagatgtatgcgagctattaatggg

SEQ ID NO: 79797 - DNA, 130 bp, Arabidopsis thaliana landsberg
aaaaagggagaaaggaaagaggggagagaaagaagaagggcaagaaggatttagaaaattaggaacacgaagagcggggggggaaaagggggggaaagaaaggcggaagaggaaggagggcaggaggaac

SEQ ID NO: 79798 - DNA, 300 bp, Arabidopsis thaliana landsberg
  unsure (1)..(300): unsure at all n locations
aaaaccaaangacccactacaagaagaagggcaagcacgcatttttaaaattagcacccgcaagaagcggggcggaaaagggggggaaagcccaccggaccaggaacgacagcagctggaacctacagaaccacaagaaacccaagacggaaagggacaccagcacatcaccgagagagaacctgagaagagacgctctcaggagagcacaggacgacgaaagcagaaagctgagcccgggggggagggcaggactaacgccggcccccatggaagaaacagccaggggcccgacaggcg

SEQ ID NO: 79799 - DNA, 605 bp, Arabidopsis thaliana landsberg
cacgcttttctttcgatgacagctgaagtttccacacatgcatgcttttgttgatcaggtcaaataaagagaagatgacacgtacatggtttaaaaacgatacttcacctaagccaaatatttgggcattataggtttaagttgcaacttgcaagtgtgtacgagaatttggatcccttatatatatacacatacttgcgaaaatcaacttgatgttgttttaagtaatttatcatagtaagtacattacaataatacatactggtgaaaaatctttaatctgtaaacttgacgtagccaaatttaagttccgtttacacgaggatttcttgtatagcaagaaatggaatatatccacgcgttaaaatgacagcagattaattaaagcatgttcatacgtgtatctttagacataactcttttgtcgtttccattccaagccgaagtcaagaaattgaagacagtacaagcagaggctgatcgatactgactatctcttgtagagcaaatatcagttgattcttatcttcttcactcttgaatccttccaatttgaccacttctagatacttagtactactcttgcatgtcagcattaacactaa

SEQ ID NO: 79800 - DNA, 537 bp, Arabidopsis thaliana landsberg
aactctcaacttccagaccagataaaaccatctctcaaacatcaaagtctctttctttttttgtatcctctgggttggttatatgcactataagctttgtatgttctaaatatgtattgtagtgtcataacgaaatttttttgaatatttttatttattgtcttatagatgatgacgaatcggaatcatgtaatataattccacttttttttgtgtttatatccacaaatccctcaaagtccatttttgtttgtttcttgagactttttattttacgatacttccaataagaggaagaagacagaaaaaaagtgtgatcatatccattatcaaagaagacaaaatcaatggaggataagttaatgttcttcatgattaaatcatgataattgtataacatggttctgtaaaaattatcacaacacaacaccaatatcatatagtttaatgagaaatctcaataaatcagtttttctaaatatagaaaagtctatcttacaacgacaaaacgattgtgaattttggattatatcacct

SEQ ID NO: 79801 - DNA, 487 bp, Arabidopsis thaliana landsberg
aagaatttctagaagtcgaaatacatgactttttcatacgcataactgcataagcataacccatttcccaaatttttaattcttttaaattattcttcgtacacatcttcttattaatagatgaagaaaaaggttagtcttgaaattcaaaaaaaaaaaaaaaaaggttagttttgtggtaatttttaatattcaaaattgaaatgtttgccatttcttgtcccggcttcggtgcatgttccgaagatattttcgacttttgcataccctaataaatgtgttcaattcaaaaactacatacattccaattccttactttaaaatttagaaagtaacaactatattaatgctaacgaattattaaggtcaaatatattcgcccactaaaagtttattatggttttggaactgcaatgccaatttcatgaaaattgactatatatagtttgagatggaaatttcatagacctgaaccttctaataaaac

SEQ ID NO: 79802 - DNA, 385 bp, Arabidopsis thaliana landsberg
cttgtcaaatcaaataattaaatgcactgccacgtcagaaaagccttgttgattataagacacgtgtcactttcagttggatggtaaccaatgaatgaaaggtgtggtacatgtacagctcagctttgttcattgcttgccacacataaattattcttttgcctatttggcattaccaaactctcttaatttcttttgcaacattggtttgtattttacatattaaagccatggggggttttctttttttttttagttttgggtattttaaatcaaatcaaaaccattgggcttaataggttggttttattaccacaacatggggtggaaatatggtatttttttattccaattcttaccacaaaacccttcccaattttttttc

SEQ ID NO: 79803 - DNA, 628 bp, Arabidopsis thaliana landsberg
gtcgctgcatcagacggaactcaaattccaatgtctattgtgtataacaaaaaacttgcaaagcttgatggatctgatccattactcctttatggatatggttcatatgaggtatttttagttgaagcttttatggttcccagattctcggtccttttacttctttccaacggaactataaaatactctttatctttattacagatttctgtggatccttatttcaaggcatcaaggttgtccctgttagatcgtgggtttacctttgtaattgctcatgttcgtgggggcggtgagatggggagacagtggtatgagaatgggaagctgttgaagaagaaaaacacattcactgattttattgcttgtgctgagcgtttaatagaactaaaatattgctcgaaagaaaaactgtgcatggaagggagaagtgctggtggattgctgatgggtgctgttgttaatatgaggcctgacttgttcaaggtggttatcgctggagttccttttgtagatgtcttgacaacaatgctggacccaacaattccgcttacgacatcagagtgggaggtgtgtttgatgcttgttctgtgccttaaaaccagcgaattaccatatatttaattct

SEQ ID NO: 79804 - DNA, 153 bp, Arabidopsis thaliana landsberg
  unsure (1)..(153): unsure at all n locations
cagggtaagattataaacatggaatggcttaactttaggtcatcacatctttcattcaccgcggttgaagaccctctggatttagagagtcnnnnnnnnnnnnnnnnnnnnnnnnnntttaaacccctttcgacggtacaacagccatcctac

SEQ ID NO: 79805 - DNA, 568 bp, Arabidopsis thaliana landsberg
  unsure (1)..(568): unsure at all n locations
attatcctggaggccggtctttacatcgcgcatagacacctgtttggtcttttcatcgtagacaaaaacgacctnnnnnnnnnnnnnnnnnnnnnnntctgcctcgttcctcattttattcttcacgctgtcgggccagtcgcgggtcgttacggcatttaccggaacagaaaggatattaaatgctttgttggtttgtatctcaacagatgccgacatgccgggcttgaaagggtatttgcccttaggcagcctggccgtaaggtcggcatagctttctggcagtatcaggatgtgtactgtgtaattggttacctggtcggtgctggtttgcagcaggccgcttgacttgctggatacagccactttagacaccacgcccatgaacttcctgttgcggtaggcatcggcctctatcacggtggtatcgcccagattcactttggctatgtctgtctcgctcacgtccacacgcacctctatgcggatcatatcggcaatggtgagcatttcggtaccggccatttgtgcggttcccactacgcgctcgccttctttacattgagct

SEQ ID NO: 79806 - DNA, 573 bp, Arabidopsis thaliana landsberg
aacagtttttttttttttttggttttgggccatagttgaataggctctgcaagttttggatatggttccaagaaaatctatcaatcttaaaaatggtatttttttttttgttatgtttaaactgtgcgttttactctatctagagttgaaaaataatttttaacttttcaatgcatgatgtgaaaaatgcataacagcctatgtgtatacgttaaaatatgtgtttgtatcaagatataatcgtgatcatatacaaacttgagtttatcttttatgttaactacttaagaatcatgcttctgataaattgggattaagaatgtattttagtttatatcggttgatagaaaaaaaaagaatgtattttagtttatatgatgattttaaaggttttatttctaaactattcaacattttgtcattaatcacaaatatcattcaactatatgttaaattaaaccgaatatgttttcagttgataactaaaataagaaatatttgcatgaaaaactgtgtgtgttaaattctgtgtcacaaagtataaggcggagaaactgggaagttggcaggaca

SEQ ID NO: 79807 - DNA, 350 bp, Arabidopsis thaliana landsberg
gctcctggaccggatgggttactcacatgcccttcggacattgtccagggtgatcgaaaattgcctgaccttctgcttcccagaacttgggctgactaggtcagcaaaactaggactgggatatcattttttcttctatgacatctgtaatgggtaacatctttatcacgagcgcgacattgggttgtctacaccgatagtgagcacatacctcgctgctaagtctacggcatgcaccataagcttgtagaagacatccactgatctacccttggacagttgatggcagcttagaccatactcgtgattccatatttactggcccctcgtgctttcagaataaacacacc

SEQ ID NO: 79808 - DNA, 550 bp, Arabidopsis thaliana landsberg
taccgaattcatgtaatctgttttcttacaagaaagttgaagttgatatatatcaaatttaggtttgttaaaactatatattataatttattgtttagtacattttggtttaagctaaaaaatcttttattgtttcttaggaaaaatattctgaatttgcttttaaaaatgtttcccaaattattttgttccaattttgttaaattggatttacttgagaattattttctgtatttacttccaaaaagagagttatgttatttgttgactaatctcatttcattttggatataatctcaacacgttagatgcaatatttttcaaaacccatctaactaagatccatgagtaaagcgatattttctccttctcgtttcttctctttatcgaatccaccattaattgagaggaaaaagggacatatattaatatatatatatatgataggtatatatgttcatttataatacaatcataaagggacatatatttgatttattttctagatgcataattttatttcccacatgctttcttggatttaaggatt

SEQ ID NO: 79809 - DNA, 374 bp, Arabidopsis thaliana landsberg
  unsure (1)..(374): unsure at all n locations
aagaaaagatactatgggaagcctttttactatttatctctcactctaccggtttccgataagaacagcactagccgaatcgatagaaaacccattgttctgtatcgatctgcgtgggtnnnnnnnnnnnnnnnnnnnnnnnnnnnnnnnnnnnnnnnnnnnnnnnnnnnnnnnnnnnnnnnnnnnnnnnnnnnnnnnnnnnnnnnnnnnnnnnnnnnnnnnnnnnnnnnnnnnnnnnnnnnnnnnnnnnnnnnnnnnnnnnnnnnnnnnnnnnnnnnnnnnnnnnnnnnnnnnnnnnnnnnnnnnnnnnnnnnnnnnnnnnnnnnnnnnnnnnnnnnnnnnnnnnnnnnnnnnnnnnnnnnnnnnnnnnnnnn

SEQ ID NO: 79810 - DNA, 448 bp, Arabidopsis thaliana landsberg
  unsure (1)..(448): unsure at all n locations
taccccgtatggctgaggagcaaacggcggaatccgcccgagnnnnnnnnnnnnnnnnnnnnnnnnnnnnnnnnnnnnnnnnnnnnnnnnnnnnnnnnnnnnnnnnnnnnnnnnnnnnnnnnnnnnnnnnnnnnnnnnnnnnnnnnnnnnnnnnnnnnnnnnnnnnnnnnnnnnnnnnnnnnnnnnnnnnnnnnnnnnnnnnnnnnnnnnnnnnnnnnnnnnnnnnnnnnnnnnnnnnnnnnnnnnnnnnnnnnnnnnnnnnnnnnnnnnnnnnnnnnnnnnnnnnnnnnnnnnnnnnnnnnnnnnnnnnnnnnnnnnnnnnnnnnnnnnnnnnnnnnnnnnnnnnnnnnnnnnnnnnnnnnnnnnnnnnnnnnnnnnnnnnnattttaagttcgccgttatatgcccccgatcaacccttgtcaggcggtagaaactaccaagcttg

SEQ ID NO: 79811 - DNA, 632 bp, Arabidopsis thaliana landsberg
  unsure (1)..(632): unsure at all n locations
acggattgcacccttgcgcaaactgccaaaggcaatttattcaaaggaccttttcacctgccgttgcaggagtggtattgctggaaaatactgagtgcctatttgcaggaacaactataagcgcatcattactatgagattcatttttgtattgttgctgatcattccccttgctgcacacactcaattgcaggtggcacctatgttctcatcaggtatggtgttgcagcgtaaccaggttcttcatgtatgnnnnnnnnnnnnnnnnnnnnnnnnnnnnnnnntacatttcacccacaggttgcatgaaacagttgtgaatgatgccggtgagtggatagttcgtatacctgcgcagcaggtaaacacagaaccacagtgtatggagattgtttcaggaaatgaaaggatcgtattgaccaacctgctggttggcgatgtatggatatgctccgggcagtccaatatggaatggcctcttgccaaagaaatgcactggcctgccgaaaaagagcaggccatgcagccgctgatcaggtttgccaaccccgcgcccgcaggcaggtatgtatatggtgtttcttataccgattcactgaccacgagactcaataaagacagttttttactat

SEQ ID NO: 79812 - DNA, 348 bp, Arabidopsis thaliana landsberg
cccaaaacaaaagtttatgttttttgggcgtgcttcaaaatttctacttatttttatgcctcgtctttggagtttaatttcctgtgaatctaaaataaaaaaggatggtcatccttcaagagggcaccctttatgtgagtgcggatgaattttttaaacccattatcgatcaacagatcatggttctcgaggctctcttatccaaaagcacatattaaaattacctacaagtcagaagctgactgttttcgagatttacaatcctacagtacgcagttgatactggtaaccagggcacccaacgatcaagaggaaaattattataaaaaaactttgggtcattcatta

SEQ ID NO: 79813 - DNA, 130 bp, Arabidopsis thaliana landsberg
aataaacaatatagtttgatggtaacaatttaatttaaaacaccgacaagggggaacaagggaaagtgagactaaaagcctttcgcttcttcacaaatgcaagttgcaacaataaaaaatcatcttaacc

SEQ ID NO: 79814 - DNA, 561 bp, Arabidopsis thaliana landsberg
aaaattatccacctctaaaaagatttgatatagaagagtataacaacgaaaatataaaacaaagttttagaggaactagtagcaatatctctcttctatcttttcatttcctactcttttctcactatggccaaagacgggggcgtttcttgtctacgaaggtcggagatgatcggtataggaatcggagaacttgaatctccaccgctagattctgatcaagtccatgttctagccgttgatgacagcctagttgatcgaatcgtcatcgaaagattgcttcgaatcacctcctgcaaaggtttcttaactagtaattcttcctctttcccctttaacattttaaaagccttattctccggtgatgattcaatgcagtcacggcggttgatagcggttggcgtgctcttgaattcttaggattagacgacgacaaagccgccgtcgaattcgatgtaatctctcaaaactctgttttaaaacattttaagattctagattttgatcttgatctttatttttaccagagattgaaggtggatttgatcatcactgattact

SEQ ID NO: 79815 - DNA, 571 bp, Arabidopsis thaliana landsberg
ctttttccttgtcatcacgaacaaaggaaagagatagagcctaaaactatgcatcggcacaagggcaaatcatttgtcatttggaagggaaatgacgtcatatagaatcttaaaagagaacataatgtcacacacccacacgtatcattatcatgttttaagattcggtaattattattattaaagacaaaaaaaaaacaaatcaatcacggggttagcgcgtaatctaacccaaattattgaaataaaatatagtatcaataggtctattctaaaaggcacgaacgaaacctcaaatagtagtaacacgcacgtatcttgctttatcgagttttcatgcattcatattcattaatgtattaagcttcagcaaacttacatttatatattaaatacatgaaaagaacatcagtaatacctcacaagattgccctcctagtcctagactactttagactttagagaccatatctaaatcttcctctattttgtaaactttggatttgattcaagaaaacatgttttcactccgttttaaggggcaatcgatactatacataacctttttttt

SEQ ID NO: 79816 - DNA, 598 bp, Arabidopsis thaliana landsberg
atctatactttatttccgattctcagttatttttagattttagcgagatattgtttgatattatttttaggtccttaagggttttaaggaaaaaggaggcttaaaagataaataaggaagtcaaaaaaaaaaaggaaaaagagagtccaatttcaatccaaaatgttttggttatatataatagacacagtagacacctcaatttcacaattcacaccacacacgcaaacaaatcacagctctctgttttatttctttctgaaagtaaaactaaccatggctgatcacaacaacactcctccctttgacctaacgaaactcgaccattacatcaaataccaaccacgagaagaagctgaagatttttttgttcatgtcgaggtcaaggttctcggaaaaggatcttctccgttagagatctccttctcaacttcggtctatgaattcgtctgggaagacgaagattgttatgagttagttgaactctacgaattctttaccgaggatgctggaatagatgcattcgaggctcagttcttggtcaatgacttgattctgtacgtaataagacgacacgaccgcttgatgaggactttac

SEQ ID NO: 79817 - DNA, 555 bp, Arabidopsis thaliana landsberg
  unsure (1)..(555): unsure at all n locations
ctggttanggccgacgccatgctgggcaagggcttgggacgccagctcatgctgtctcttgatggacgccgcgcgcgagcatggccttaaacatatggaaggggtggtgctcaagcacaacaccaacatgctgcgcctgatgcgcgatcttggtttcaaggtccgcgccagcgccgaagacgcgcagatgaagctggtgtcgatcggactctaggtaaaggccgcaagatgaaaaccgcctatatcacgcacaatgcctgtctcaagcacgacatggggttcggccatcccgagaccccggcgcgcctgcatgcgatcgaagaccggctgatcgcctccggcctcatgccgctgctcgatcatcatgacgcccagccggccacannnnnnnnnnnnnnnnnngcccatacgcaagcctatatcgacagcatcttcgacctgtcgccacagcatggcgccatctatctcgacgacgatacggtgatgagcccgcatagcctgaatgccgcgctctatgccgcangcgccgccgtgcaggcggtcgatctggtgatg

SEQ ID NO: 79818 - DNA, 610 bp, Arabidopsis thaliana landsberg
acgattcctactagagacgtgttgcgaaagtgatacgtctcctaattaaagagaaaacgagatttaatcgttattaagaagaaacttcaaagtctttcatggatttttagactctgaagtagacgcttttgtcttctctgtacgtatataatacgttcttattttgacttttatttggcgtttttttccaatttcgttttaaaaattccaaaggtagctaacttttggcactcaactgcgacaagctgttcaaaaatgatacatctgttacatatgatttattaaactaagacatttttataatatatgtcttcagatattgattataacgtccaaaagaaaaacagagatgctctgatttttataacccaagaaatacgttacctgacgttaataattgcctaacaaacgattaggcccaacaaaaaaacgtcttataagtttaaactttggtttgggtcaatgcttcatatgattggtcctcagttgggctacaaaagggacacgtgtcaagatcagacggcggttctcaaagcaacccggcaatttccatggaaacagaggtatgctcaacatagttagtaccgtagagtaaaacagaaaacgaact

SEQ ID NO: 79819 - DNA, 544 bp, Arabidopsis thaliana landsberg
ttatttgaagtaagaaaatatgagattcttgaccgagttgttaaactatcaaacccaaaagttttggttaacaaataagctagtactatgtacatatgttttatgttgaaaatatattaaactgtatgtaagagggagtgtactttcattttagatatacatttccagctagtacgaggtctctatatataaactttcttaatatcgctaaacaaattttactttcaagtttgtaatgtgataagtgaaagaccgtatatacatacacatgttaatcaactgataacctttgtgcctcgtgtgtctagttactagtcaaccatcaaacgtgcatgatgctgtttttcttaaagtactattgttgtgttatatataactaaacataaacaatttgctattatgatataaacatagaattttcaagcaatgatatgtttagatgttttgcataaatattccataaatagtcgacacccatatatacacaaacatgaattctacctgaggagaaacacatagatgttcaaattaaataataacccta

SEQ ID NO: 79820 - DNA, 436 bp, Arabidopsis thaliana landsberg
gctaatactgttcagggagatcacaggctccaggtactaatctgggcattgactctcttatttatgtgtatagcccaaacctgttctgaacctgattaactgtccacatagaaggtttttaagggagtctgtcagaagccaactttactggctgcttacactgatcagcgagggtttgttgatcacttcctaacggaacagtagtttccactaacttactaacttttggagctgcctcatccatctgatgttgatgtacagatgtagccagtttttagaaacactgggtctgaccttaccaggtttaggttgaaattctccattgtgtgcgtttgcctgacgggacagtgtgatattttggcaagagcctctttatttggtctgatgtccggtcatattgattcacactgaccattttctgaggagcctccatgct

SEQ ID NO: 79821 - DNA, 586 bp, Arabidopsis thaliana landsberg
gctttacccgcctgtcatcctttgccactatgacagcaatgaaatcgatatcagggggacgttgtgaaactcagcaagcgtgaagtgcttgtcaccatagccgcacttatctctactggtggcgcgaaggccgatgctgcaaggtccggccgtccgccggtcagtgaacgcagattcgtcagcccggccatcgagcaggtgatcacccagacgaaaaagaagctgaaggataagtcactcgccaccttgttcgagacctgcttcccgaatacgcttgataccacggtcaccatctcggtcattaacggaaaaccggataccttcatcatcaccggcgatatcgacgccatgtggctgcgtgattcctccgcccaggtttggccctacctgccctatgcctccagggataaggcactcacccagcttttccagggactgatcggccggcaggcgcgctgcatcctgatcgatccttacgccaatgccttcatgcgtgatccggcggcgaagtcgaacctggaatggtcgcaagccgacgacaccgatatgaaaccgggcgttgccgagcgcaaatgggagattgaca

SEQ ID NO: 79822 - DNA, 611 bp, Arabidopsis thaliana landsberg
tcatcaaacgcagacgcgttactaaccgcgattcaaacacgcacttgatcgatctaggacataggttaggaggcgtcgactcacgtgaccatgtctcttccaaagtcaacataaatgtgccgcgtaaggatagagactacttttgttgttgttttactacgtttctaattttatactaaattttacgtgtttaattattaacctaatggctaaatgtctctagttattaaccaattaaaccctacaaatcgagagaccacgaaacgacagagaaaccccttaaacactttgacagagacaacgtccaattattaattacgttgaattattggcctttatgccttaaattgattctcttactacttcttaattttgttgacctaccaatatatatttacaaagttgtatcatcgggcgtttaatgttgaaacccatgctactattattaatctgcactaccacgtaaattttgcagtaagagctaatgaaacaaaaaaaaatactattgactaataagtaataaatgaccatagctcaatttgtttactaaatatctcaacttgtagcattattctatagagtatcatatagtgttaaaagtgtactgatgc

SEQ ID NO: 79823 - DNA, 299 bp, Arabidopsis thaliana landsberg
tcggaggacaccggcggacacttgacgggcctcagacgagaatgcccttatattggaccactaaagactacctactggaaaacgcttggtttgtggtgactgtacatatcaagagaggaaaccatgctgaggctaatccttgactggaacgacttcatctaccacagatactatacaagtatggatctcactgatagcgtactcattcgacggatagacatgacacttgcgaaaggatactttaatgagaccgagttgcatgggatcgtggcggcttaacctgaaccacgacacagatg

SEQ ID NO: 79824 - DNA, 171 bp, Arabidopsis thaliana landsberg
ctgtataagtgtatttttctaaaatttcattgaaccatttttgactagtatatatctttttggaataatttctagaacatctttattatttaagtttttaggtctgtacttttgtgtctcacaattctcttagatatgaaattaaaaaaccaattaaatacaaatcagatc

SEQ ID NO: 79825 - DNA, 109 bp, Arabidopsis thaliana landsberg
aaacgcaggttgacatgagaagagatggatcacacgttcacgcggtttctacgcggatcgttgactttttcatctttccttttccttttcagtaagtctcctcctttga

SEQ ID NO: 79826 - DNA, 604 bp, Arabidopsis thaliana landsberg
  unsure (1)..(604): unsure at all n locations
aaggcgtcgatgtgctgctggccggtcatgtgcatctttgggagcaggtcagcttcgccaattattttccgtcccagttcgtcgccggattttccggcacgcaggaggacatcgtgccgctgcccgcgaaggttcccgccggtctggagccggttccaggcgccgccatcgcgcatttcagttcctggatcgacggcttcggcttcatgacgctggagcgcatccgttctgaccgctggcgcgccgaggtgcatgatggacaggggcgcgtggtcaatgtgtgtcatatcatcggtcggatatcgacatgcgacaaagctgtcgtgaaacggaacagaaagtgaccttagctccgtatatgaattcggtgtttctcagctaaacgattggggcccatcgacttgttttcagatcaacatgcacacccattttaagctccgaaacctcaagcacgttgaacctgaaacatccgaattgagccaagtacggtcccgccatgcgccanatctggctatctgcagggcaattatggtgcggggcagccgactcgaaccggcacgggttaccccgacggatttaagttcgagtcaagctgtgctacata

SEQ ID NO: 79827 - DNA, 337 bp, Arabidopsis thaliana landsberg
atggcaagagaaagatgaccttatggtggtcatcgaataatccaaattcggtaatgattagagaccttgcagggggctaaccaggcgggcagtgtgcctttaataagccatgctgaggtctttgctttcattgtcatagccccgttcatggatcatgatgaccctgttccgctcaagacatctgccctgtgctacgatggagccacgttatctaacctgttccgtgttccttacctactatctcttaactcaatatacatcctgtacacttgtgcgtgaacaccacgggagccatgaacattctaaagagtgactattgtacaaaagaccatctgga

SEQ ID NO: 79828 - DNA, 416 bp, Arabidopsis thaliana landsberg
  unsure (1)..(416): unsure at all n locations
cccaaagggggaacgggggaacacaaacagagatcnggggggggcggttgaaacccccccccacggggggaagaagaggcggcacaaaaaaaccgggagacgaagacccacgcgaccaaagcgggaacaaacaaaaacggggaagcccaagaaacaccagcccaagagacagaaaggagcgcaacgccaaagggcccacgcaggaaaaagcaggacagacgagcacgaggaaccagagcaaaagccagaacgaacaagggaagaagcgaaaaggggccaaactaagccaagacaagagagaagaaaagaggaatacgaaaccaaagaaagcagagcacgcacgacgcccagatggggacgaaagagaagaacccaaccactggcactgaaaaaaagccaaaagaagagcaaaaaag

SEQ ID NO: 79829 - DNA, 158 bp, Arabidopsis thaliana landsberg
gtatgtttcttcttgtcaaataaaaaaagttagagttaagagatgtacaagttcaacgtgtaacagttcattctttcttgccttactattttccggtgaagagaaacaaatggctgctgcatgggatctttacacaccaaaatgactccctctcacat

SEQ ID NO: 79830 - DNA, 499 bp, Arabidopsis thaliana landsberg
  unsure (1)..(499): unsure at all n locations
ttccaacggctaattttcattttcacatgggaccctcataccctttagncattggcataactatctttatctttttagcaagtcaacttattttttactgcttataaaatgacagtttaatattttcttgttctacacacaaaatcaagaactattcccaaaaaaaaaagacagacaattctattaacatcaagagagaaagataaaggataagatttggtcataggtctttcagaaccatatctatttgaaaaatacatgattagaatacgttgaatgcaatctacccaacttaatttaaccacaagtacaagtttgttatgatatatcttacctaaaacaaaatatactttctgttatttaaattaaatttgaaagcaatgaaaaattaattccaaaaaaagacattttagggtgctattagtatttatgatatactcttttagtgagttctataaaaaaattggtttttaacattttgctcctactaaaaagtttg

SEQ ID NO: 79831 - DNA, 630 bp, Arabidopsis thaliana landsberg
  unsure (1)..(630): unsure at all n locations
acgattcgttagatgtcattgtatatatagatgacagaattgttgggtactagttgaaaaatatataaacactaacgttaggtctaatatataactacacgcatgtactgtggtaggttttggttgcctttttttaaataagcttgtaagacccatatccgttactatacatatacatatgagatttaaatatcatttatggatttaaatattaaattgtttattagccaagtttcttaagatcatgtgacttgaagcatactccatagattattgactaatcattattttaatctcttatattcagttgagagaccaatattagttagcccaactttgaaagtgattataatattaaaacccttttcgatgaataagtagtaaagtaatattaataatttaatattgtcaccttttctactttccagacttagaacatcctttccacttaatcccaacacattcttcatcaaaagctgtttcaaggttttcactttatttttagataatgtggattgcttctgtaataactctattcactatatacaacattccactatattacaaacagtctttgaacagttgttttcttttgaggtgtaatggagaaatacanattttagtaatccc

SEQ ID NO: 79832 - DNA, 615 bp, Arabidopsis thaliana landsberg
  unsure (1)..(615): unsure at all n locations
agccgcgaagaggtcgatcgcggtcgaggtgatgttttccgccgctctcgaggcaaaaagtttcgccatcgccgcgtactcgataaagtcctgaccggcgtctttcaagcgagccgcattgaacaccatcagacgagcggcttcgagctcggtgcgcatttccgccagttgaaattggacgccctgaaactgagccagggactttccgaactgctcgcggcttttgatataattcaaagcggcttcgtaggcgccctgcgcgattcccaccatctgcgcgccgatcccgatgcggccttcgttcaaagtctcgatcgcgattttgtagcccttgccgacttctccgaggacgttcgcggccggaacctcgcagttttcaaacagcagttcgcaggtgctggaggcgcggatcccgagcttgtcttcttttttgccgaccttgaatccggggaaggatttctcgacgatgaaggcggtgatgcctttgtagcctttcgcgtggtcgatgttggcgaaaacgataaagacattcgcttcttttccgttggtgatccaaagtttcgagccgntcagaatgtatttgtcacccttttggtccgctttccagttcagcgc

SEQ ID NO: 79833 - DNA, 614 bp, Arabidopsis thaliana landsberg
tttttttaatggtttcaaaatcttcatatttgtcggaagaaaaatatgaacttggtgtgtttctgttaatctttacgcagataagaagatacgtgtatagagacgttttgagggttgaagatggttctaagctaatgaattgctctttaattcaggtataactcggttctggttgtatttaattatcatgataaaactcttaatccgtttattgtatacattaaaagtccaattttcattggttcttgtgccctaaaattttgacagctttaattaatactcgttgtctttttctttttctttgtgtgtgtgtatgtgttgatgatgattaaagccatacacaacgaacagttcaaaagttgtgttcatcaatgaacggcctcagtctcgacaatttcgtggttccggtaacatttgtatcacctgtgaccggagtctccagactccttacctcttctgctgtctctcctgcaaggtctgctttttcttgttctaattacttaaaaggaacatcttttcttcgttaattaagttttcatttaacattctatcacatacccagtccgatttaccacttttcttcatctgggtcgatcttctgtttagaaaattca

SEQ ID NO: 79834 - DNA, 605 bp, Arabidopsis thaliana landsberg
  unsure (1)..(605): unsure at all n locations
ggtgggcgtcgcgcctgcaatactacgccgagaacgatggggccttgaaagcggccgaggcccggatcgtgcgggagtaccggcggcctacatgggagagtgccgcaagaacggttttcgagcgcgctcgcgaggcggcgacggagctccagggcaacccgcgtagggtgctgccgtgaaccgttcaggcaagggtgtcgcgacgtgcctttccacgaatactatacgatagcggggaccacttggcccggaccatcctagtactcagtacctatcccgtgttggaaccgaggcatggcgggcaggtacgactggcgaatctttgccgggcctatgaaggcgacggatggattgtgattccagtctgtatctacccggaggaaggctataacgtcagccacgacgcggctattccctttcccaagaagagcccctttcgactgttcggtgcgcggaaggtaccgttcatcgtcgatctcctgactggtgactntgccgcatcggaggctggtgcgtggcccaagttgctgtcactactgccgacaacgctcgatgccatacacgtagagcaaccttggctgtggcccgtagccgagaagatacgc

SEQ ID NO: 79835 - DNA, 555 bp, Arabidopsis thaliana landsberg
catctgtgatgatgtccgggacaagtcagacgacacatcggttgaggctctcatggaagatggttcttgtcggatggtccgcggcttggtgcccttgtagctccggaggctcaggtggctcgacacagagccaacagaagtcacccgccgcatgggctccgagctcgggtccggggtgcccactgcggaagcagcattccagctctggtggtactcctcagcggcctcgggctgatggtcatgcctgggggtcatatgggtgaactggtaagagtattcctcagaattcccacggcgaaagtgggctccacaatcctggtggtgacctgagaagttctgtggcccttctgctggcgtatcccaagcggagacgtccgttggagctgtaagagaagaaaaaaagatcccggaagagcttggaacaaccgtagcttggccatagctgtagctgctggttaaagggatcagtgtgctgttttctcgagtttcaggacaagacagaaagcgcaagatgaagcatcaacgaaaaagcgttggtcagctagctacaacttt

SEQ ID NO: 79836 - DNA, 488 bp, Arabidopsis thaliana landsberg
  unsure (1)..(488): unsure at all n locations
tgttccgcaactacgacggcgtgctcaagatcgacggcgaagtcttcgacaagaagctctacgacccgcgctcctacggcaaggccgcggagaagggcatggccgatcgcgtcatcgaagcatgccagaacctcggctcggcaggaaccagcctgaagaagtgatccagtgaatggcacgaggcccggnactccattgacccgggcctaggcttattcacagcacttccgtcgggtcagtactcaagcttgcggcacagcctcgccggccttgatgcggccgacccgtttatgccataattccgtgttgcgcacgccgatcttgtaggcctcgaacaccggatccaggccgcggttggtttgacacttgtagtcgcccatgatctttgacgccggttgctgtagaatgaggatgcccatgatgttcaaacaggccttgatgctcccgtctatgtttacagatcgcccatgcactgacggtatgtcgac

SEQ ID NO: 79837 - DNA, 534 bp, Arabidopsis thaliana landsberg
aaattgttctaacaatttgattgctacaactgcatttttataagataaaataatagttttccgataaggtgagattttcaagcatttaattgacgtctaatctaataatccgagattttgaaccatttttacgcaatgttcatgcacaaccgacttgtaatatatgtagacaatgttcattccgattgtctcatttgatccaaccttttcatgtaaaaaattttggtaaaaaaccgatcttctgttagtataagtgatgatttaaatgcattaaaagaatcatagatagaataaaagggaggtttaagagaaaaaatcattctaaagcaatgatccaatatatattcgtattattttattcttaaataataaaaagtcatctaaaatccatcaaatcacggggtatatccttcaaataacccctcacattgtttgtggttctgcaagccccttttaaaagcttttacagcaggcgtgggtttaatcttcaataatgcaatttttttgcaattaatgacaaaacttattggaagt

SEQ ID NO: 79838 - DNA, 510 bp, Arabidopsis thaliana landsberg
ccaatatttcttgattttttgttgtgttccgcgatctcttgttaccatctctatatctatatcacaaggaaaaaatccaaaaaaaaacattcatctattttttatttggctattgagtacttaaatttgtttttgttgaaatataaatattccatttaaatatatttagtttaaaatattttataattgttagacattcgaatctgcgacttaacagctgttaacggtaatactgtatactctcattttcctaaagctttttctctttagtcgtaacatgcatgagagcatagcgatagtcaagggaacttgattaattccaaatgagtttagatgatattaagacagacatttgattgggtacgataggtggaaatagagataaggttttccttttcttgattagttcaatatcaatttgtatgggaccttcttaattacatcgacgttgatgttgctttttttcttggtcgggctaattatttttttaattatttattcaaccttttt

SEQ ID NO: 79839 - DNA, 203 bp, Arabidopsis thaliana landsberg
gtgatgctatcagagaggggtagccgtctgaccgacgtatctagtcataagagattttttctttactttcggtttggggctactgagcgactctctcttttggctgctgtcgtaccaaagtgtgtttacatcgtattgcttgggttcaacacgggatgaatctgttttatccacgggatcggaaatattaccagtgttgtttt

SEQ ID NO: 79840 - DNA, 246 bp, Arabidopsis thaliana landsberg
cgatcggctccggtcttgtttttccgcaagcaggcgcgctaccggcgccagctgctggtcaaggccgtctcccgcgccgtgtactgtctgagtggtgcgggacaccgtgggcgcggtggtcgtggacaactcccaccgaggggtggtgctggcgatcgatgtcgacctgtgctgatggttctgggcgtcttgatgttaaactaactctttattgcccgtcccgcacgtggctacccaaaaggggat

SEQ ID NO: 79841 - DNA, 217 bp, Arabidopsis thaliana landsberg
cctttacgacagatggatttggaccaaaacaatgtatcaacgctgatgttgactaccagacggtttgagcttatctcgcccacgtacacgcagaacgaaccactaaggtttttcatctcccatactgttttgtcggaagggtttaaaaacacacctactcagacctaagggtcaccactgttgatgtcactaacaggaatatgaacaagaccagcaa

SEQ ID NO: 79842 - DNA, 567 bp, Arabidopsis thaliana landsberg
ctcacttacaccgccttcttccggttccactactactaaaccaccgattaattctagtaaaccgggtttcactcgctctttcggtgtttatttcccacgcgcttccgctcaagttcacgccactgctgctgctgcttctcataacggcgtcgtttctgagcttcgtcgtcaagtcgaggagcttcgtgagagagaagctctgttgaaaacagagaatctcgaggttaagcttcttagagaatctgtttctgttattccgttgcttgaatcgcagatcgctgataagaacggcgaaatcgaggagcttaggaaagagacggcgagattagcggaggacaacgagagattacggcgagaatttgaccggagcgaggaaatgaggagagagtgtgagacgagggagaaggaaatggaggcggagattgttgagcttcggaaacttgtttcgtcggagagtgacgaccacgcgctctctgtttctcagaggtttcagggtttaatggatgtgtcggcgaaatctaacctaatcagaagtttaaaacgtggtcggtcgttgaggaatatacc

SEQ ID NO: 79843 - DNA, 623 bp, Arabidopsis thaliana landsberg
  unsure (1)..(623): unsure at all n locations
agcgcgaggtggtactgttcgatgccattgaagacgccgcctttgccacagtgaacgacctgaatggcgttggcagcctcaaagccctgctgtcggaagcggcttttgccggtaaaactcaggcgctgaaaaacaagctgcgcaaattcagggtacgcgtagtgcttaccgctcatcctacacagttctatcccggcacagtgctcggcatcatccacgatatgggcgaagccattgcccgcaacgattttcataccatcaatcaatacatcgaacaactgggcatcacacccttcttcaacaagaaacaacctacgccttatgatgaagcgctgaacctgatgtggtatctcgagaacatcctttaccagtcaattggtaatatctacaacttcatcaacagggaagtannnnnnnnnnnnnnnnnnnnnnnnnnnnnnnnnnnnnnnnnnnnnnnnnggcctggcggcgacagggatgnnnnnnnnnnnnnnnnnnnnnnnnnnnnnnnnnnnnnnnnnnnnnnnnnnnnnnnnnnnnnnnntgtttgctattacagggatgtgcgcaagcttacccgccgcctcacattcacaggagntggaacgatgatgcatacactg

SEQ ID NO: 79844 - DNA, 417 bp, Arabidopsis thaliana landsberg
taatggcgctcgcacgctgaccagtagcaagcccgagaccaccggcttccaccccgtacatcttcacttcggtgaacggaataagcgggcggaaaaggccgattgcattagagcctccaccgacacaggcaatcagtacatctggaagttttacaaaagcctcacgcgattgaataatcacttcacgacccacgacggcgttgaaatcccgaaccagcaatggatacgggtgaggaccggccgccgtaccaatcatgtagaacgtgtcatcaacgttgctgacccagtcgcgcaaagctttgttcatagcgtcttttaacgtccttgtaccactcaagacggtgaccaccttgggcccaagcagtttaatgcgagaaacgttcggcgattgacgctcgatgtattcaacgcccatgt

SEQ ID NO: 79845 - DNA, 144 bp, Arabidopsis thaliana landsberg
tgattctcgaactgagggatgcatgcacagcaaagcttcctattaggagtggatttgttgtttttacgaaaacaacaggcggagcacggtaggcaagaacaaggtcataaggcactctgtttgcggatactaaaattgccgaca

SEQ ID NO: 79846 - DNA, 360 bp, Arabidopsis thaliana landsberg
gagcctggcctcggtgtctctttcgatcacgcctttgccgagccattccgcgccttcgacatgggcggtggcgtactcgctttcctcgcggacgtggatcaggcgcgccctggggttctgcgccatcagctgcagcatttcgctggcgttgatttccttgacgcgtgtcttggcgtctatgatcatcgccaagaatccgggagagcgactggacatgtcgggttcctgtgaatttatggggacgggaatgggccttgatgcattgtaggacgcaatcgcatgttagattagcgcttatcgattcaatttcaattcatacgggattatgacgagaccccgccttttcatcacggttgctgc

SEQ ID NO: 79847 - DNA, 578 bp, Arabidopsis thaliana landsberg
agtacttggtggtgacacctctgttgttaaagaagacaactgcaacacctctccctcatcctcatcattgtctgcaacacacaacatagacagctgaacttcggagtctctcagtttgttcaatttgtcagccttgatagcacgcaccgacgaaggctgaataccatgtatcatcacccgtttcttatcccatttaaactgcattgtcaacaatgtgaaatcccatgtaataggacctagaggtttcaaccaatgtacacccaaaactgcatcaattcctttcaaaggaattaccataaagtcagctacaaaagtcgtgttatgaatctcccacttaaaattctgtattctcgctatcaccttcagattgtaaccatcagccacccgtactcttgcattatcactaggtaggagtgagcaacccaacttctttgccatttgaggatccataaaattgtgagtggaacccgaatcaaccaacataaaaatggatctcttttgacttgtacccttaactcgcatagggttgtaagttgagataccctccatagcatgagctgagatatgagctactttcc

SEQ ID NO: 79848 - DNA, 456 bp, Arabidopsis thaliana landsberg
ccgcgctatgaatgagtactgccgggatcgtcgctaaatttcgtggtaatcatctgagcgtcatgcggttcggtggcgatggtcgtgacgccatgatcatcggtccaggcgaactcgaagacgccgggtccgtgtacgcgcatccggaacgacacaaagggattggctgaaattccggtgccgaactcggcgcggaagacttctctgtcgccgtacttcgcgacgagcagattgatgatgtcgcgcgggatcaatttgccgtgtttgtcgtgacggttccctgtttccatgacgtgcgtgatcagggtcttgacctcgatcacgtcgccgatcttggcgctgtccggcagcctgatgcgtggattcgcagccatgtctttgtccttaatctccgcagccgccgattgtgaccttgaccatcgtcgtcgacattagcagttcgccgctcgaaagctc

SEQ ID NO: 79849 - DNA, 564 bp, Arabidopsis thaliana landsberg
actatcaaatgcaagccaccccaagtgcttctacgtagttttaaatggaaaagtgtgcctaaagtcaaatatccatcatagttgtgctcgatggggaatttttgtttagagacttgcattgattgaggttctgttctcaaatttctggctggtattccatgtggtaaaactttcaaactgggtggtaatttcttttcaacattcataccaactttagaagagaagaatcacaaataacaaaatccgagctctccttacccaaacacaaaggtatatttttagatagttaacaccttctaaacgctcctctcctttttgcttagcagctacgcaactgcatgggagcttggtggaagccatcacccatatgccaggcatctgctctgaatatggaaattgtagaaataaagtaggcagcccctgccttaagacatgtataatactctcatctgggaaggagatacatttatagcttttaggagatggccccagctcatgggtagctgtcagacctcactcagtagcttactcccctgagaaccttactgtcagcagaaggcttgc

SEQ ID NO: 79850 - DNA, 601 bp, Arabidopsis thaliana landsberg
cataattatctaaaactggaaaaagaaagacttgtgactttcacgtatgaatgcatgggtccttaaatcagatacagtaacgagtagtagattcaaacacaaaaattataatttgaaacaatatgggtatatatgtactgatctaatcaaaacttgtaaagtaacggttactccttttataataaatactcctttattggcctgactaatggttagttccactttgattttcaatagtaggtttttttttcaattttaagtaattgcaactatagtagaccggaaacctgcaagaaaaaatgactgatgactatatctaacacttgccttatacattagttaaataaacagacagattaaaaggtgtcacaagttccttagagctaagtaagctaaaaccctataaagaagcaacataacggcaagagccaaaacatcccacatcatattcccgattctcaaattcttaatcccttcgtaatccataacactacaatgcaaccctgacccacattcataaacctcatcccatgtgtattgaaccccacaagaagcttatagcaataatggctaaacgaaacatacttcaaccacgcgatga

SEQ ID NO: 79851 - DNA, 226 bp, Arabidopsis thaliana landsberg
  unsure (1)..(226): unsure at all n locations
gaaaaaaaagcaaaagggaaaagnaaacaaaggaaaaaaggaacacnaaaaaagaaaggggaagaacaaaagaagggaaaaacaaaaagaaggcaggagacgcaggagaagaagcacaaagaggggagaaaccaagaaaaggggggcgaacaccacaaacgggagggaaggcaggaaagaaggagaacgaaccanccgcgggagacgaagcngaaaaaaggagcgg

SEQ ID NO: 79852 - DNA, 381 bp, Arabidopsis thaliana landsberg
  unsure (1)..(381): unsure at all n locations
gaaccccgcgaagggcgcaacagtaggaagccaaaactccgcgggaccaagagaanagtaaaacagccgcgggggaaaaaaacacgcacgaacgagcccacggaaaagaacggagcccaagaagctaagaaacagagagcagacccgatcccgcacactagtggtcgcaaaaggaaaagccaggacgcgaaccgaaggccaaacagggacaccagctaaatggcacggatggagcccaaagagcccactacaaggggaagaaggccaaacaccaagcacgaggaaccccacaaagcagccatggccgaaaggccaaagcgcccaacccataaggggcgagaccgaaagctcaacgcccacagggagcacgccaaacggacc

SEQ ID NO: 79853 - DNA, 227 bp, Arabidopsis thaliana landsberg
gaaatatgggagtgggtaaagatgatattaggggaagaggagtttggaagaagggatgtgaaagttagagattttggaagtggtttgagataaatatttggtgatttaagatgtgaatagatatatgaagagggaatgattggatatttaggtttgttggtagaaaaggttgagaggtagtttgagtacgttttagagagtgaaggttgaaattgagttgatttttg

SEQ ID NO: 79854 - DNA, 518 bp, Arabidopsis thaliana landsberg
gatcttatacaatatttacatgtaatttaactgtcatttggagagcagctagacttttccttatgcaaaaccaacatgacgagacgtccaaagatccttatgttttcggtaaacaaaagacttaacgcatacactatgactctttgttggttacagtagagtgtatagatagtttgaaatattgaacaaagtctacaatataattgagtctgctttatcagaaagctgaagatgcaaaaatatcttaacccgtgaaaataattttgatgtgtttaaaattttaaaagtagagttacgaaaacactcatttgtggaggttggtgttctaacaactaaagctctaaaaattatcgtaaccactaaaagtgatttgatagtttttttcttttttgaggatattataatgtggggacaaaaaataataacatttgctcattccgttatagggcatagttggtcggcaagattcttcggcgattctgatattggataactgacacattggccaataccaaaac

SEQ ID NO: 79855 - DNA, 392 bp, Arabidopsis thaliana landsberg
  unsure (1)..(392): unsure at all n locations
aaagacccggggccagagggaacccaaanaaacgtttgcacccccacaagtaaagaaaaagagagcgccggttacaagcgganggctacaaaagacacacggggcaccgaccccgcnacaccaaagaagcaaccaaacccccggggagagccaaaagagaaccgcaaaccacangcaaaacgcangagagggaggagcaagcgcaaaccagacccgaaagagccaagagaccacgaccgccgacgcgcgagagagaaaccaagggaccaaggaagagaacggaggccggagcacaccacacanaccaagccagaggacacggaccagcccaancgcacagccacgccgcaacagagccaacaaancggccaaggaacaaagacagaccacac

SEQ ID NO: 79856 - DNA, 541 bp, Arabidopsis thaliana landsberg
  unsure (1)..(541): unsure at all n locations
tgcagaacacataaactcanctataggccgcgcattattacccccccggattgccttaagaccaggcnnnaactccacgagagattttactggtaatcgctgcattctctcagcgactatgtcaagtctctctctagctatgtcccgtagcgataccttatcagcaatggaaacatggcggaccacatgttgatcatgagagtcaggccctgtctttccgctatctgtcttccttcccataatagattttgaggttggccaagtttcttgagagctagcactttcagctggtgattcacgcacaatgccagaattagaccgtgacaagtggggatctgaagatacaagcgaaagagatgtttgtagttgctgacgtggaggtagcatttggtgaggaagattggacccagatgatgtgcccatcaaattagtgctgcagacaccaagataatgtcaatgtcagattcaccccaaggaacacataaatccctaaaatactttacgaccaaatcacatactaattcaggaaagcccaaaacat

SEQ ID NO: 79857 - DNA, 578 bp, Arabidopsis thaliana landsberg
tgcttgaccgggatcaatgggcgaaggtcggaaatgtcccaggcttgcgctgcgatcccccgcacgttcggtgcaaggtatcggctacaagggctgcctgatcctggcccatggcgcaggtgcgccgatggacagcgggttcatggacgaaatggcgcaaaggcttgcggcgcttggggtagcggtagtgcgcttcgagttcccgtacatggccgagcgcagggttgccggcggcaagcggccgccgaacccgcagagggtgttgctggaatgctggcgcgaggtgtaccggcaggtgcgacctttggtcgcgggcaaattggcagtgggtggcaaatccatgggcgggcgcatggccagcctgctggccgatgaactggaagcggatgcactggtgtgcctgggctatccgttctatgcggtgggcaaaccggaaaagccacgggtcgagcacctggccgaattgaagacgccgacgttgatcgtgcagggcgagcgggatgcactgggtaaccgcgaggcggtggcagggtatgcgttattgccggcgatcgaggtgagcttgcttggtggcgggg

SEQ ID NO: 79858 - DNA, 519 bp, Arabidopsis thaliana landsberg
tactattattattttgtttgacgggaaaactatagttgcttagataagttgcatattttgttgtcgagtttataatattagggatgtacacagtacactaatgggcagtgtttactgtttaggatattgcaagagtaatcgtaaatcccataaaattaagaaatttcaattgaaaaaaattcttagcaataagattcaaaaagaatacttttaaatattttttaaaaatataactagtatttcttttaatataattagtataggcttttaatttgtctctatgatcattctatgtatatcttctatatattttcacataaactcatgtgaatggaacaaaatattgactagacattttgaaatatcaattaagaatttgcaaggacaatcaaaatcagagatgactctcattaaaaaaacaaattgactattaatttgattacattgtaaattgtaggtttgtacaatcattttcattttcggctttgatgattctgactttccacgtttagttatttg

SEQ ID NO: 79859 - DNA, 530 bp, Arabidopsis thaliana landsberg
  unsure (1)..(530): unsure at all n locations
ctgcgttatcgtgagacacgcgcggtttcgatttgacgccgcgcgcgaacggattggcatcgatttttttctggatgttctcgggcttgaattcgtggagcggaatcgggccgatgatgccgaaatgattgcgcgtcggcatcaggaataccgggatcgcgccgcaaaggatgatggaatgcagcaccgacttgtgacagttgcggtcgacgacgacgatgtcgcccggcgccacggtggagttccagacaatcttgttcgaagtcgaagtgccgttggtgacgaaatacaggtgatcacaattatagatacgtgccgcgttgcgctcggaagccgctaccggaccggtgtgggtcgagcaactgaccgagttcgtccaccgcattgcagacgtcggcgccagcatgttttcgncgaagaactgatggaacatttgccccaccggcgacttgaggaaggcgacgccgcctgagtggcccgggcagtgccacgagtacgatccgtcggcgcataatgcgtgagcgcgcgaa

SEQ ID NO: 79860 - DNA, 501 bp, Arabidopsis thaliana landsberg
ccgtgcgccgaactcgggccacgccgcccagcagatcagtggtacgggcaccgtggctggttcaggcaccggcaccggcaccggcaacggcaacggtacggcgccccccgcctccagaaccgccgccgccacgcgccccggcagcaccgacaccgcctggttcgtccgcggctgcctcaccaacgccttgaatcccaaggtaggcgtcttctacatcaccttcctgccccagttcatccccgccggcgccgacgtactgcgcttcagcctgtggctagccacggaccacgcgatcgtaggcatgctctggttcgtcctgctggtagccgacacccgccccctggtccgctggctttcccggcccgcagtcacccgcggactgtaccgtgtgaccggcgcggagtttatcgcgtttggattcaggatggcgctggaaaagcgctgatgaatggcgggttgtatgaacacccgcgcttggatgggtgtcagacacccgggaag

SEQ ID NO: 79861 - DNA, 332 bp, Arabidopsis thaliana landsberg
agcttttctgccgattacctgttgcttagtgagacctacattatgctatcagaatctgaatttcatattatcactctctgatttctaatggttagaggctgtttactacactaatgaaagatctgctattatgcttcgacagatccatattagtagacgtattagatacattctttggttatacctgtctctgcattaaaggtcatggagcatatcgagtagtagtcttggattaatctctcactccgttctgatattttaatgagctgcacgggctaacgagacatgctgatcatacaggaacggggagccttaggatacgagtgcatgaa

SEQ ID NO: 79862 - DNA, 559 bp, Arabidopsis thaliana landsberg
agggcaaactcaaatagtttccatttacaaataagccttgtcgtctatttcaattttaccccatagatccattagattttgttggctatctatagttaccataagttgtaaagctttttcaatcagtgcttttttagtttttatgttacttgatttcttagctttttgaagtagctgatcatcaatatcaatatttgttctcatacacctgaattttaataaatatacacaaaaaaatatataagtgtaagaactatatatttataaaaatattttgcaattcggtgcaaccatttgctcccttacgtcatcttactataaatgatgttattgaaacctgcttacacaattgatgaactgatagcccgaagcaaggcaggcgaacgccaggcgcaggaactgctttacaagcaatatgcctcgaagatgctcggcgtttgcatgcgttatgctactgacaggatggaggccgaggatatgctgcagaacgggtttatcataatgttccgcaaattgaaagattacaggggagagggcgcttttgagggctgggttaggc

SEQ ID NO: 79863 - DNA, 578 bp, Arabidopsis thaliana landsberg
  unsure (1)..(578): unsure at all n locations
caaggaaaatgatgggaaaaacaagtgtagaagctgccttggccatagctatttttcttctttgttttcttaatatgtagagtagttttagttgataaatctgaaaatttgggaaatatatagaattatgaggttcaaggaatctcgaaaaagaggatctggcatcaattaaattacatcagttataaacgacgtaaaagtaggaaaaagaaaaaaaagtttagcatcatttatgggtactttagataatggtaactgataaaatatctactcatttattgtatgatactattcttagtgacatcaatattcgtcggaattattagcgctaaaaataacagtgcaaattgaaacttacaaattgtcccgatgcattcccgtatatagagaaattttgacatgataataaatttttaaaaagaacacactatcttctgctaatatagtaacatgacatgataaatcttttacactctttgatgtacatatttcttttttgtacaataattatttttcggaaggtcgctcacctaaaaattattccagctcanacaccgtttacttcagagtttttttta

SEQ ID NO: 79864 - DNA, 464 bp, Arabidopsis thaliana landsberg
aacacacacacgaaccgtgccatgagaagagagcacgtccgcctcaataccagacgaacattctaaaagacaaactgcaaaacgtgcacaggcaaacacacgaaaaagcagaggtgaagagagcaaacccaggaagacggccacggtaggagggcacaccaagaaaggaggatacccgacaccaaaaacgcgcaaggactggactccaacagctaccacaaagaaacctcgggtaccaagacatggacaccatgcgcaagaaattagccataggcccgcacaacacaaacgaaagacaaagatgcggtaaagccccgacactaaggaggagtagcccaacaaaaaacagtgcacggatcggcaaactcaaaccacagacactgacgcaacaggaaagcagtgggaaccaagaggcaatgaagaacaaaacctataacaggatacaaacagacggcaggcaaacg

SEQ ID NO: 79865 - DNA, 520 bp, Arabidopsis thaliana landsberg
cagcaaatcgaggagttgccgaatggagagctgcgcatttggtttcaagctcgcaattcacacgtggcggcagatgatcgcgtgcgtgctcggtatccgatcctgtctcaggcgcttctcgccggcgcctcgccgcagttgcgcaacatggcgtcgaccggcggcaacctgctgcagcggacgcggtgcgtttacttctatgacacgacgacgccgtgcaacaaacgcaagcccggcgaaggctgcgccgcgatcggcgggttcaatcgcaaccacgcaatcctgggcgcgagcgagtcgtgtattgccacgcatccgtcggatatggccgtcgcgctgacgttgctcgatgcacgaatcgagaccatcgatgccagcggccgcgggcgcagcattccgatcggcgcgttctatctacttcccgaaacgacgccgcacatcgaaaccgtcctgcttcccggcgagatgatcacggccgtcgtgctcgcagcgccaccttgaggacgacacgtgtacccga

SEQ ID NO: 79866 - DNA, 353 bp, Arabidopsis thaliana landsberg
  unsure (1)..(353): unsure at all n locations
aaaacccaaaaaaaaaaaaaaaancagagacgcgggtgaaaaagaagtgcttgaaaccagacaggagcgaagaagagacaaaagactaaagacagagagaacagaaaggccccgccgacaagaaaagaaaggcaaagaccaaccaaaaaggaaaccacaggcgaacacagaaccgaagcaacgagaaaacggcgagaccacacgacgagcagcgggcaaaaaggagacagcacaagagacggaacgaaaagaaaaaaaaagagagacagaagaaagcgcaagccaagaagaaagaaaacaaaacaaaggcacacgggcaggacaggcccaaagggggacccgacacacaacaa

SEQ ID NO: 79867 - DNA, 531 bp, Arabidopsis thaliana landsberg
  unsure (1)..(531): unsure at all n locations
ggagggagagaacacgcaagggaattaacacacgaacncatttgttaacagcccaaagaacccagaaccaaaagggggccctaaagacaaccagcccccggcgcagccaggcaagacccagaaccnaaacagnggactcccacgagggganaacccctcaaaccaaaaggaaaccaaaaaaaggacgcccgagcagagggaacgcatataagaagaaaccgcgggcaagcgaaaacaaaaccagaaaaccgggnggggaacacaaaccgaaccgggcgaaaagccaggcccggcaggcaagagcacacggccgaggcgactaaacccgcaattggaaacctaaaaaggcgcgacactggactctgcaaagatggcactacatccggctcaaagagcaatggcaccgagccccagccatggcgggggacactaaacgcaaaggaaacggaatatgacatcccaaaaccaaagcggggaccacccaagggggggcaaccccccccagggaacccccgggaaaaaaaaaaaacc

SEQ ID NO: 79868 - DNA, 538 bp, Arabidopsis thaliana landsberg
ccggattgataatatctcctgtgagtgtactcatcttttgtagtttaaaatgtttttaaatcttgtttcgtgaaggtcaatgccggtctgtttgagcagccctgttaatttttgaccagtttctggatgctgatgtccgcggtggtgagcacctggatctggcctcccggctcgatggtcacggtgccgaatacgactgcgacagggccgttcccgctgatcacgagcggatgatccttggtaaccgtcacgtcaggcggtgcctcgtacacggcgacctgaggggtggctgccacgttggcggtcttcaggcccgcgggggctttgtgagcggaaaaagccgccacgtcgctgagctttttcatgacgggcttgaatggagagtccgggcttgccgggttggaaaaaactagttttcccggtttgttgtttgacataagatttggtttttataggtgaacagatataagcattacgaagaagaacatcctttgatggtgcctttgatgccgtcccagatcgtgtcgtcgctcacgat

SEQ ID NO: 79869 - DNA, 522 bp, Arabidopsis thaliana landsberg
  unsure (1)..(522): unsure at all n locations
ttcccaatcaacgccatgagacaagctcaaggtgcatgtatgggtgccaatttcgacgacgcaaattggacggtgtacgtgtttccttcgacgtttttattcatcatctattcatggtacatcgtcataagacaatacaagaaaaaacaccatgaaataatattgttctttcatcaaacgaacgaaaatttttatggaaaagtgacgcacgggcctctgttttaaacttttgtggaggaccccggtatcgtgtgcttnnnnnnnnnnnnnnnnnnntctcttcgctctttgactctaacaaatgcagtccgattaaaagatacaattcggtgttgggtgcaccgaaaagggaagaaatcatggtttttgttgttcggccgatcggcctcgtcatgatgagagtggaagaaccggcacctgccgtgctgacacttgccgctgctccatgttgctattagcttgtgttagtgaacttacatcaaatcgcacgccgaaccaaaacactccgttgatgtttccatc

SEQ ID NO: 79870 - DNA, 545 bp, Arabidopsis thaliana landsberg
tatgcacactcacattcacacacatgcatgcacgtgtatgcacacacacattcacacatttgcatgcattggtatgcacacacacattcacacacatgcatgcacgtgtatgcacacacacattcacacacatgcatgctcgtgtatgcacacacacattcacacacatgcatgcacgtgtattcacacacacattcacacacatgcatgcacgtgtatgcacacacacattcacacacatgcatgcatgtgtatgtacacacacattcacacacaagcatatcctgagggaaacacctgcttcacttgtcaaaataaaattatgcatagtcatagaattgcttgatatatattgataagagacagtttatatctccaaaggatacatacacatttaaagcaccaccaacttccctcactgatctaaaagctacagcatcacttacaaccagtttctctgtgtagctgtggctgtcctggaacttgccatgtaggccagagcctaaactcagagttttgtctgtcttgcctcctgagtgctggga

SEQ ID NO: 79871 - DNA, 630 bp, Arabidopsis thaliana landsberg
  unsure (1)..(630): unsure at all n locations
gtagccaagcaatcggtttaaaatgtatagattggatactttgttgtaaagtgcactccattgtccaaagtagagcttcgagttctgcgtagagggcattgcgataacaattctggctactttgaccaaacagcttggtcgttgagctagtcaacatgaaccccaaactaacattctggttaataccagtccacgaagcgtcaatttggcacatagcttctcctctttgaacgtgcgcatactcacaagcttcaactacttcaggttcttcctccgcatcaatgtcatgttctagttcttgggcaactctccaacttttcgactcagaaattacatgcgctagaatatatggtgttatgtactcccgtaacgtattttcaaaaagtatatatttgacctatttaaacatttattactttaggttatgaataatcctgacgcaattcttgctgattagtcttgacgcaattgtacgttgctattgattttaacgaatacagcacaaaaggaggcaatcgcgtggacgaaagaggagccgatacatacaatngcatacantctatttgatactatatttgctttctattggataattcaccctaactattaagagtacatttagtcacaata

SEQ ID NO: 79872 - DNA, 762 bp, Arabidopsis thaliana landsberg
agtttttacgtctgaaggaatcattgaattatttaagaaattgatgtttttgtgtgaatatcgttttctataagatttgagaagatatgtttggagtgtgtttagaaaattaattacaaacgtaaaagaacttaaaaaataatttagagacattaaaaattagagtttgataaaaagaaaaaggaaaaatgtaaaaaaaaattacttttctataaaatttggaattttttttcctatggtaattagaaaattattttggctatataaaaaagagctcaagacatcttgaaaaacaagaaagttgagacataaagaaattttttcgagagttttttcagattttgtctgaaacatagtttcgcggtttgatgcttgtctgatcaaagcttaattgttcgttggtataacattcatatgtgacagttagtccagaaacttatagaattgaaatctaaatttagagatttagagattttagaaagagtttagcccatgttaggttatctttattaaattaatctaggtttagagaagtttagttaaggtggagatttatctttaagatttcatattaataaaacggaacggtgaattaacaagattatgtttagtttacgcatttgtgaatatgtgggatttattttcttattatagtaaaaatcaaaatctataccatgattgaaatctcttgtctcggttatttttcttcactttatattattttattccgaaattaccggttttttttttttttaaacatac

SEQ ID NO: 79873 - DNA, 573 bp, Arabidopsis thaliana landsberg
  unsure (1)..(573): unsure at all n locations
agtcctagctcatgtctatttccgccctgagcgccattttgtaggtgccgtacggttatgtggtttatctttagcttcgaaacaggacctcttggcggccaagcgacggagctccaaattcgagatgtggttcgagcatgcttgcaccaaggcccaatatgacgccctttgtcaattagaggagactgcggggggcttcaatgaagtcatacgcacttgttggatggaagggtttgatgatagtaaccctgagatatttcatatgtcggaaaagctggatgcgaacaataaggttggcatctactaccctcctgagaaccatggtctcgtgtggcttgcatattcccccaagtcgcctgacttcggtaacctcacattaccatttcccgatattagcccctgggtcccaatccgcctcgcagtgcgaacaccgttgccacctatctacgcgttgaaggacagcgctttgggagagccaaaaggttaccaacaaacaccaacctcaacaatggccatggtgccacatgacccgttaaagacctcagntacacggngccctgatccgncaatgat

SEQ ID NO: 79874 - DNA, 427 bp, Arabidopsis thaliana landsberg
tgatccggtcgacacccaccgtatgcctgttctgccgtccgtggacgtcgtcgatgaagcagccctttaagtgcgcacggaacagatccgacggccgggtgtggaagtcgatcggctggcagtaccggtgccggtcccagacatagtcgctgcgctacaagatgtaaggcacccagtcgatcccacctttggacagtgagaactgtaatttcgggaaatactgtgacttgccggagaacagaaagtctacggtggtacacataacgttggtgctgaacgccgggatcgcgaccgcgaacggggaattattgaccgcgttcgggttggcgctcgtcatcatggagctgaacgaggagcctggtacgtaggatccggagccaaagtgcattgatacagggatctccgtcgatgagcatacccgtcacat

SEQ ID NO: 79875 - DNA, 208 bp, Arabidopsis thaliana landsberg
acattaactgcaaaaaactgtttttactaatgttcctaatttttattatcggcattttcgcggtaggagccatatgactagaaaccgcgtgtaaaccgattatagacaaagagccatattttcccaaagatattacagaaggagccatattccgctgttcctttcttgcgctagctttactcatctccatacctcaaacttcacagat

SEQ ID NO: 79876 - DNA, 625 bp, Arabidopsis thaliana landsberg
  unsure (1)..(625): unsure at all n locations
aattcctgaccacagcaacgttgatctattgttgcagattgatggtgtcacaaaacaacaagggaatacacgcgacatgattttcaagtaggtataccaatcttgaacaatctatttcatgcagagccttgaaatcgaaactgacatttgtatcttgtgaatgcctagtattcctactctgatcgagcatgtctcttccattatgaggttggaggagggtgatgtaatcctgacaggaaccccgaagggtgtagggcctgtcttgccagggcaaaccatcacatgcgagctagctttcggaggcaaaaccctgtcacagctgcgatttcctgtgattgagcgccccaagctctgatgacttttgattacaagatgtattatgaaaataacacaccagtgatgcgcttaaaaaatgttgtattatatgcaaatgctttgtgatatgtatcttctagtgtaaacatgatgattaatccatgtccatgctctctgccgtcgtcgtagcctgttgagcagacgaactggcatcggngttgacccaaagggttgtgccccacttgggatagattctcttgtctaatgttggcagaagcagtcgaacacgacgttagtcaatggtagaaat

SEQ ID NO: 79877 - DNA, 486 bp, Arabidopsis thaliana landsberg
  unsure (1)..(486): unsure at all n locations
ctgntttgtgagaacgccgttaacgttaccatttttggttcttgcactatcgatggaagggggggcagtttgggggttaccaccaaccagaaacccgaccggtataagaaccggccttacctgttatggtttgtgggcgccaggcaggtgcgcgtgagcaatatacacctgcgcaattccgctttctggatgcagcattacctcggatgcgaaaacgtgaccatcaacggactggatatctggaaccattccaataagaacaatgatatgatggatattgatggttgccgttacgtgaacatctccgatatcaggggcnnnnnnnnnnnnnnnnnnnnnnnnnnnnnnnnnnnnnnnnngctgttatcgcaggatatcaccatcaccaattgcgtattgagcagccattgcaatgcactgaagttcggcaccgaatcaacaggcggttttaggaatataacggtcagcaactgtgtgaataaacca

SEQ ID NO: 79878 - DNA, 353 bp, Arabidopsis thaliana landsberg
cgggatcctgtagcggccaactggtgatatcttacttaatgctgacccgcggaccaccacgggttgcgcattcgcacctgtacaggatcagagggactgattggaacataattgagcggttagttagtataatggattcgcattcttcaactatggctaaatatggcattgacgagaggcataatctatgaacgacgcggtctgcatccgaagactctctctatcatctctgatattcgatgaatacacatgattaagaaacactacttaacccatgacgtgacaataagagtaaattgactgctaaaggcagtaaaagctgattacatcgagccggatacaaaaacagagag

SEQ ID NO: 79879 - DNA, 715 bp, Arabidopsis thaliana landsberg
agggttgcttccctgattactaacccaccaaatctctgatttgttgaggctataaagccctggattatttttattggtttccctcttttgttcctacacattttagtattttactattatcagttgcataattttgtttcccttacaaaaccaataagactaaccacttcttttcagatagtttaaatatttcttagcatgtttcactaattctgtctttttcctttgatagtatagattatagaaataagatgaccaaataattagacaagagaaagataaaaaaaagagagtaaaacttacattttccatcctaatcggctcgtgtgctgtatgaagttgagatctctaggcaactcagaaaatgcatagatcagatctgcatttatttaatattataaagtttaaatttaacaaaagaattacatcagcatatccataagtaaaagcacacaccattatcagacaaagaattaatagataaccggttgttatcaccaaaatcatcgatcccaacaagtacattcatgtatcacgaactaatcctaaccattgcattgcgatgatcaaaactgatcataattccaaattatgaatcaaatcattctatagacataacttaaaaaatgataaccggtttttacattgtgaagacaatcattcaatcaaggcataaatcaatcctaaccggttcataaatataccacccaaacct

SEQ ID NO: 79880 - DNA, 526 bp, Arabidopsis thaliana landsberg
gggcggtcggcgtttcgatgcagcgcatgcgcggcggcgaggcgacgaccattcgcgcgcgccgcgaggtgatcgtcatcgcgggctcgctgaattcgccgaagctgctccatctgtcgggcatcggaccggcagaggtaattggccggctcggcctgccgatcaagcacatgcttccaggcgtggggcgtaacctttcggatcacttcggtatccgcaccgtggtggaaatacagaatgccgcgacggccaacgagctgtcgcgatggccccgactgggctgggaagtggccaaatgggtggcgcgtcggcctagcattctcgggctgagctcctcactcgcctatgtattctggaaatcccgtcaggagatcgaggaaccagatctgcagttcgtctttacgcctatcagcttcaaggcgggccagttcggggtcctggacaattttccgggcgtatcgctcggcgtctggccgcaccggccgcatagccggtgctatgtcgaagcgcgatcgaccgacatctt

SEQ ID NO: 79881 - DNA, 628 bp, Arabidopsis thaliana landsberg
cacgtattatataacattacctgtctaaagaaaattctcctaaataaaatttacataaggataaaattttaaaggttgttatacagtaattaatataataaataataacaacaaacaaatatttctatatgttaaattaataaataatatgtaaatttccaaaagaagtgattctcttagtgttttaaaaataatctaaaatatatgtattaatgtaagtaatgtacaagatctctcttgctacaatttttttgtgattaaactcaaatgactatagctcattttgtgtttaaatcaaactatatatatactacaaacactcgtataaaagtttcatttaatttcagtatacattatatatagataattatatataggtcataaattatttttggttaattcttaattatttatataaacattcatcatatatagatttattttttagaataaaaagaagagaaatctggtagtactatttttatgtttgtattttatcattcatactattatttaataaaagacaacttggatttgttaaaaatagttaattatacaaatgtatagttttatatttcttttagagaatagtgacaataaacattactagcattaattaatattaata

SEQ ID NO: 79882 - DNA, 543 bp, Arabidopsis thaliana landsberg
  unsure (1)..(543): unsure at all n locations
cgcgaataaggccggctgccgccgggggagcgttaccgcgaaagagaaatttcacgagcgcgtgttggctttcaccaggggcgccggcgttccgggcgtgtatgatggcgtcggccgcgacacgttcatggattcgctcgactgcctggcgccgttcgggatgatggtgaattacggcagttcatcggggacggtgccgccgttcgacgttggcattctgtcgaagaaaggttcgctctttctgacgcgcccgacactgatgacctataccgcgaagcgcgaggatctggtgaaaagcgcgcgtgaattgttctcggtggtcaaaaagggtgtggtgaaaatttcggtcaatcagacttatccgctgcgcgcggcggcggaagcgcaccgcgatctcgaggcgcgcaaaacgaccggttcgaccgttctactgccgtgacggcgactgtctaaacaannnnnnnnnnnnnnnnnnnnnnnnnnnnnnnnnnnnnnnnnnnnnnnnnnnggaatgggttcgggttgcgtttcggtatgcttgcc

SEQ ID NO: 79883 - DNA, 295 bp, Arabidopsis thaliana landsberg
taggaactaatggatcccccgggctgcggagaagtttgtagcacgcttatctttaccgcagactctggagggggggcccagtaccatctactggtaccttttgtgagggttaaatacgagctgggcgaaacaatggccattgctgaacactgtgtgaaattggactgcgctcacatgtccgcaccacatacgagccgctagcgtaacgtgtaccggctggggtgcctaaggagtgtgactactaaaattagttgcattgggcttactgaacggtgtccaatagggtaacctggcg

SEQ ID NO: 79884 - DNA, 647 bp, Arabidopsis thaliana landsberg
ggatctgctctggtcacccgccggcgcaatccgcaggacctgattgacagcctttatcaaggctatgcgcagtctcggtcgcccatccgcatccacgaccacgtgtcatcgcagtaccatccgccccgccgaaaaccctgggaagacgcccccggcggcgtggacgtgctgctggatgccgcgaccatccgcaagacctttccctcctgcgcgcaggacatcgccacggtcatccacatccgtcgcgccggatccatcagcgcgcagcagatggggcagttcatgctcgagcagatgcgtgcccgaggcgggcatctgattcgcgccaaggtgcagggggtgaatgtgggcgcccggtatggcctggaactcgaacacgcgcaggggcgccggaccctcatggccgatcgggtggtcaatgccgccggccccttcctcaaggacgtcggacagatgctggggtgcgatctgccggtgaaatcggtcttccagcagaaaatcgccttttgagaccgcgaggcggcgatcccgcgcgatctgcctttcaccatcgacctggacgatcaagtcctgtactgggaaaaccaggacagggcgctgcttgcccaagaccccggcacccgcccactgaccggagcccgatgcac

SEQ ID NO: 79885 - DNA, 460 bp, Arabidopsis thaliana landsberg
tattctatacttttctataatataacaaaacattgtattttaaagggaaaattagtcttttactttttggggccaaagtgaaaattagtctaataggctaaactagattaattaatgacgaattagaagtgtggttggaaattttatctatttttatggcattttatttctataccatgcagtttttacaaggtcatttttctggagttttaagatgactaaaacaattccatgttattttgattgaatgaaattaaacatctaaatattaaaatgacattcaattcatttttaaaatgttatatgcacctaaaactaaaggatgaaccttatcgtgaaatccagaaaaataaattagcaatatgttatccaaatacaaaacttcattttctaataatcaaatagctaaaactttatgggggaattttaacgataaaaaagggttttccactggctaaaa

SEQ ID NO: 79886 - DNA, 389 bp, Arabidopsis thaliana landsberg
acattgggccacaattgggcgggccattttacaaatccctacgtggtgatctagcgggactcaatcccaagtgtgatggcgcatgttttcggtgggacatgtttgcatgtaatttttgttttattattctaagaagttctcatcaattagaattaattgtatttatctgattttgattgtatatctaaggacgcattacttacagagcacatctaacttgtttgtctgaataaactttgtatagatgatgtctaattaatcttaaagatgctcgtcgaatagattcatgttcaagactcactcccactgaatgtgagcgagaagaaattgtatatatattgaaaactaaatttgggagatacatgggcatatcttacgattctttaact

SEQ ID NO: 79887 - DNA, 101 bp, Arabidopsis thaliana landsberg
aagcgccaccgggagggggaacccgaacagactgcgggaaaccggaggaagggagagacgccagccaatagcccctagcccgggaacacacgagccacaag

SEQ ID NO: 79888 - DNA, 426 bp, Arabidopsis thaliana landsberg
  unsure (1)..(426): unsure at all n locations
ctaaggagcacatgatgatcggttcgctgtcatcaccttcgagtcatggccctgatcacgagtccttgctaaatttgctttacgtcgacaataacaacagtgtcaacatcagtggtgatcatcatcagaattatgagaagattttgttgtcatcactagacatgacgagtttggatcacgacaagacatgtatgggatcatcatcggatggtggtatggtctctgatcttcacatggaatgtggtggattgagttatgagaccgaaaatatcctcgctttccaatgaacataatacacggcgttcggcagtttgtagattcgagaattatccagacattttagctatggatgcatcacattnnnnnnnnnnnnnnnnnnnnnnnnnnaggttatagcgcttgcgtgattctagggttcttcgacca

SEQ ID NO: 79889 - DNA, 647 bp, Arabidopsis thaliana landsberg
  unsure (1)..(647): unsure at all n locations
ataggagtctctttcaaggacatagactgatagataaaaaaatatgctaattgcaaaattgtatataaaaatattgtaaaattgccgtgatagttttcaaagtagaatttgactttggcttctggtcacttcttaaattacgggttgacttacgttcatggaattattattcttattttgtcaaccggttcatgaatatatttgcatggctgaagttttttttttgatgttaacagctacagaaaaatgttaattaatgaataactttattttgttttacaattaatataacattacaaattaggaacaagtcatataatttttttcatatcctacacttttattatataagaaaatcaaaataaacaatttttaaagatatttaacaagacaatacttaaagattagttcattataatactgtaagtgatattagttcttaagagtttcgtagtctgtttgcgccaaagcccataaacggcgactgtttctccctttggacttttctcatattggttctatttatataattaaaactttggaataatacgctcaaatataagtttcacttaaatactcaattcgatataanttataattaccaaaaaagcatcaaactatttatgaaatgacagctaataaaaaaa

SEQ ID NO: 79890 - DNA, 533 bp, Arabidopsis thaliana landsberg
  unsure (1)..(533): unsure at all n locations
ttactagcatcccttatcaaaaaaaaaaagaactattgaatcggatggtgtgtgattaatatcgtcagagatacaccgaaactgtgtattatctaatgtgaatggtctataccgcaaaaatatattctcaacggaaaataaagtgttcaggttcatctatttcttattcattaaggatagttccttaacatctcctactccaaaccataaaacattcccaaatctctagctattttccaacaaaactacacattccggcaatagatacgtacatctttttctaaatgaattccaagatttcacttaaacaaagggaagggattgccacgtgcgggccataggcacgtgactatgataacaaatttagtttgttggattacaatacgaataggtaatgattgatgaatactattatagcaccgattgctccacttagagttactctcgacttcatcacttatctctgtttattcaatcattctccttcgtcctttntgaccatcccaatttctctaacacatgatctataacac

SEQ ID NO: 79891 - DNA, 454 bp, Arabidopsis thaliana landsberg
ttttgtttattcaaaatgactattaaaaaaatatttaccttggttctttaaaaaaaaaaatttacctttgatatatgatttttagagtatttctaaaacaatatgagatatttctgaaaaacctaaatatgaattaaatttttaatcatttgactaaactagtaattgaatggcctaatatataactctttacaaaataaatgttactctcttattttgcttctcaattaatttatagaagctagcatggaatgtaataagttaccttgtgcagccttttgcttcttgcgcctccgatgaattaagtatagaacacaaaggataacaatagctgcggctatgactcctacagctgctccaattggtttgcccttacttttttttttcttttgggcgtgctagctcttctctttcttgttcttcgaacctgcaaatctattgagtttatttatat

SEQ ID NO: 79892 - DNA, 628 bp, Arabidopsis thaliana landsberg
atttgcattaaaatatcttttaatgatgtttgtatatctattctaaagtattagaccttttatgaaataaatatctacaacatatataatgatggtggatttgagaagaatggccaaccagacatgtgtttaacacttttgccttttttatattaaatatctagttatcatttttgtcatcttaaatttttaaaacctaaaaatagaaccatagaaagttctcggaaagtttgtgctaaagatagaaactacgatagcacaaactattatgtaatgtcccatcgtttcgacactttcaatcgccctttggaaactcttgatgtaagctattgggaactacaaaaaaagttattcgaccatgaaagtagattatgggtgcaaatgattgtgcgtagatgaatgattggaaacaatctgagttgagaaagatgaaagtgttgaacatatggtgacaaatagatgccaattttgtttaacatacttttttcatctaaatgtacaactatttgcaccccatacttgttggtgttattccatgtttgggcaaagattaatctatgatgaaatagacattgagctaaaggcccaaaagtaaaccttgtttcactttatagcttagattactcat

SEQ ID NO: 79893 - DNA, 313 bp, Arabidopsis thaliana landsberg
tgatactgtttaaatttacaatcaaattttactttttggagcggatcctatttaatatacttatggtgaaaaatgtgccatgaaaagttagttctctttttatgacaactaatttgaaagataaggtgtgagcttgtagctcgctatttcatgtgtacttatatttgcttgaagtgatgccaggttacagtctacatctacctatggtcgatagagtgaaagaaaagttcaacgccttacagtaccaggagtctttaccttgccttatttcttttgaaaaaagataatcacttcgaccagaactgcgtttttt

SEQ ID NO: 79894 - DNA, 594 bp, Arabidopsis thaliana landsberg
gcactactcattccaaataattttccacattagtaatgtttttagttatagacttatagtatgtacataccataactatgcttcatattttccaaaatctagaatgatatcaaaaaattatagaatatatgatttcaacaatctaataaaattttatactaagagttcaatatatatattttttatcaactaagagttcaatataaccatgcagatttacgtttatgaaagaaagttgaattacaattttgtcatcttatggaggttggagctctagcactttcgtggaaagagcaaataatgatgtcattgtcactttcttaattcagcgggggatcaggatagcattttaaattaaatgaaaatatgataatttatcaatttttatttgaccaaattatttaatgtgaaaatgagaatattgaaagggaaaatcacttaaaagggataatcagaaagatgaaagaataagaaaaggaaagaaaaaacaagataagaaaaaggtaaaaagcttttatgtatgtactaacaatgtacaagttataatgaatgtatgtatatttggtaaagttttatgcctaggtaccaacataa

SEQ ID NO: 79895 - DNA, 267 bp, Arabidopsis thaliana landsberg
  unsure (1)..(267): unsure at all n locations
aaatccatccaaaaccatacggaaaacagagtatccttttcatactactaaagaaaccatgaaatttaaagcattnnnnnnnnnnnnnnnnnnnnnatgggtcaggcacgtatctaagctaggaacaccgaaaccgttaaccagaatcaactaaatccgaacaaagcggcgggacaagataaagcaacacgtctgcggatagaaacagagcaaggcatcaacaatgactactcgacaaagaggaggcgaaaaaagggcaacaaaaaa

SEQ ID NO: 79896 - DNA, 384 bp, Arabidopsis thaliana landsberg
  unsure (1)..(384): unsure at all n locations
ttgntgtgacaaaatctaaactttattttattttattttctcaaagctttctagtctcgttagatctgcaaaaaatcatccgctccaagaaagagaaaatgatctgaattgaatgctcttaatcctccaaaaaatcctcctcaagaaagagaaaatattgtttgaatctagtgaaatagagaatgtaagtgtttattttctttcgaaagaaatcaaataaccgggaaaattgattcttattggtatttttggtttggtttggtcctagagatcaaaataataaaccattttaagagatattatcaaagattcagagtgattaaagattccaaaaaggccccatttttccttaatggtttgaccggtaatactttactgatccca

SEQ ID NO: 79897 - DNA, 531 bp, Arabidopsis thaliana landsberg
aatggctagttaatatagttcgttgggtaaaactaaaccgaacctttaacaaaaaactttaccgaatcaattacgaaaaagaacttcttttgatggtatttatagactttagcattttggataaaatatttcaaatttgccatttacttatatctcaaaacataaatctacacatgaaaattggaaaaaaactaaagaaatcagcggttaaaaatttgccatttcttacatctcaaatataagcttattagtttaaccgctaatttcttaagggttttttttttggttttattcttgagttttgccttattaattatagttccctttatcgtgaaaattgcataatttctccatgaagaatcacttaacaagtataatggttatggtagcttatatatagactcagactttcgacaatatttaaggaggccctattaggtttgtgtcaccatgaagatatcactttaatgttttgtctatacaattaatgtcatatatatagtttacgctcatgctaattagaaagctcat

SEQ ID NO: 79898 - DNA, 588 bp, Arabidopsis thaliana landsberg
agattcccagatatgtacgaattgttgagcgattgccgcggaccccaaccgaaaaaatcaagaagcacgtgctccgtgaggaggggctgactgttgacacgtgggatcgcgaggcggcaggcattaaaattcgtcgtgaacacgtcggaagataattcttacaagatcttcgcctcgagccgaggtcaggagtagatacgcgttccaacctgacgcagactgcgccgtgccgtgatcgatatcagatgcggccaccatagcctttagttacgatccgatgctttctgccggggtccaacgacgccgcgcgctcgtcgagacaacttcaggccgctgtcctcactccttacgcaacaacgcacggtggcccacgtcggagcgatgcgacgcaatgcaccttatttcatttcgcgtaagaagttcgctctccgcctaattgttcgcgaaacatgcattgtctatggatcgtcgagtcgccagctcttgcgattatcgccgagcgatcgaacattggttacgcaggatcagatgacatgacgcatgttgtcaccgagaattgtatcaagtgcaaatatatggactgcgtga

SEQ ID NO: 79899 - DNA, 575 bp, Arabidopsis thaliana landsberg
tatctcgacactatgcatagagatagacgttgatagtcgccacatacgaattacgagggattccgaaacaaaatgaaagaaagcaagaattttgttttcatacaaacgtaaaacacccggggccattagaaattatctgaataatttagaataaacgagtgttattgcctcctcatgtttttcaaacacttcagtatctttgtctttatgctgatttatcgacgttaacacatttgccttgtataagcattatcttgacaataattaataacgcatgtaagaaaagcgatgcatcgactttagcaaaaaaaaaaaaaggatgcatcgaacaagctttatgttgtttacagaatttgaaaatattattgccttttcaattggctcggaggttttttattagcagacgtcatatatatccaactttgcattttatgttgagataactttttatataaaatatatatgaaggttttatagaacttattttgggattttataaattgagatcatatctgaatgcactaaactaactgtacatgtgtcgaagactggtatagtaaatatatttgtattta

SEQ ID NO: 79900 - DNA, 389 bp, Arabidopsis thaliana landsberg
  unsure (1)..(389): unsure at all n locations
tgatggtttgagttttgagagagaagtcgtgctcgtgctatcactctagtatttcctttctcattggatttaaagatctaggatattaagaaggaattgactgcagtaagagtttagggaaaataaccgtgcaatagataaatagtgattgtgatgttttatttcatcagccttgcccgtatagctgatgaatttagaaaacctggatcttttgagtgattgaaataacttgttttatttatttactggccaggacatcattacagaattggcaaatgacccaaagcttgtctntcactgcggaataactccaacggagctgncggtatgtgattcattttctggcagggggcgtttttctttttttctttttttcatgtgacctagtt

SEQ ID NO: 79901 - DNA, 374 bp, Arabidopsis thaliana landsberg
  unsure (1)..(374): unsure at all n locations
ttaacaatcagctggtggctctaccagcaggtgctgcagaccagtaagcccgtgagcttttatgtaaaactcagcagcgatcctgcaaagaatgaaatgatcttcttcgcagagaacctgggccttactcctcccaactccgctctcatgatcatcaccgacagcgaaaaccgccgcaccgaagtgaatgtggcgagtgacctggagcataatacggtgatttattttattaagcgaagaaaggaatagggnggaattgcccattgcagatcggggatttcattcgggacgagccataatccaatctgccatcggcaaggagcaaataccatacttgctggaggattgccacatggggcatcaagcaaaaaaga

SEQ ID NO: 79902 - DNA, 574 bp, Arabidopsis thaliana landsberg
  unsure (1)..(574): unsure at all n locations
aacaagccattcctgtgactgacattaacattcagacaccaatcaatgacgaaaacaacaacaacannnnnnnnnnnnnnnnnnnnnnnctcaatgagcctactgataataatcaccctacaaaggaacaacaacagcaacaagaacaaaatcagatcgtggaacgtatagcacgtagagcttccctccatcgattctttgctaaacggaaagacaggtatttaaccttatcatactttttgaaacttgttttaatgttccaaatttccaatcactctagttagttcaaaactcaaaagtttaaggatcctccctctgatataagttctcctaaattatcctcaacaagcctcgtaatttacgttattaatttttctgttgcagagctgtggctagggctccgtaccaagttaaccaaaacgcaggtcatcatcgttatcctcccaagccagagattgtaaccggtcaaccactagaggcaggacagtcgtcacaaagaccgccggataacgccattggtcaaaccatggcccatatcaaatcagacggtgataaagatgatattatgaagatt

SEQ ID NO: 79903 - DNA, 518 bp, Arabidopsis thaliana landsberg
agtccttgatcagatttttgggttgcttaatttaaatggatatattagatggcatcaaaacagttgaagcttggtgttttgaagaagagtatgataggtaggagaagtgaaaagttattgagctggattacttctgtgtctcttgtgttcacaaatgttgtttggtttcctcagaattcggagaggaggttcaatggttatgataaataaatgtctaatgtttgaagttctggtgagatatatttgccgacatcatgcttttgtgttcctgcaaacgatttcttgtgattgattctcttaaatgttgatatataggaacttcaccaatatgcatccttttacgagctgttgaaagccgagagttcagagaaagtgtttcctggcactaaaacagtggaagaaggtaagcttttttctttgtctgatccttagccattaacttctgtttcaaagatttaaatttttttaggtatgcaaatgttaggaagttatatgatacggatcaagagaatttaatg

SEQ ID NO: 79904 - DNA, 130 bp, Arabidopsis thaliana landsberg
gggggggatagggaatcaccggcggaggtcgactatccatttagtgaccgaaactcacagaagtcagagggggaggaccgaccaaagaaaacaacatgcctggccacacggagcctggggaacgcgcaaa

SEQ ID NO: 79905 - DNA, 565 bp, Arabidopsis thaliana landsberg
atactacaatttatattaaaagctttataacaaaaaattcaatcactactgttcgtcttgactcagtagatattacaccatggattatgcaagcatttgatttattttattaaaaaaatgaaaaaaactatatccatattgatgttgtttaacgttgcgtttggacagcaaaatttatcatacaacaaggagtattatgaggaaatagaaagcacttacagcgacatagattacacaattcaagccatgtgtaatcgagcctcttggctaatgctttcttatttgaatatgtacgaaaccactggagataaagcttacttggtcaaattcattaactcctccgctaattgtcaattaaaccgtcttgatgtagtacatagtaattttggcagttttagtccttatccgcctaagtggacattaactaccgatccaggcggagaatcgacctatttcaatagccttttactttatccaatgcttaaatttatttacattgtaagaaacaacactgatttatacaatacaaatttaccagctaatgttaccattgttggtgatcttt

SEQ ID NO: 79906 - DNA, 275 bp, Arabidopsis thaliana landsberg
aatgctacttgaagatctgaggaagcctaacgtcatgattttctgtaccaaaaccaatgtagaattcgaccgaagtttttgttttgggcgccaaagatgactgcatagcggttcgaactatgaacgaacccttcttcgtcctttctaaccaataaagttattcagtcttggtacctgcattaaaccaaaatgggttattgggttccaggaccatgaaagactgtaggaaaccggtcggcaatatgacgattaacccgatttttttaaaggggtta

SEQ ID NO: 79907 - DNA, 321 bp, Arabidopsis thaliana landsberg
atggtgcaagtgtcattggccggggcttcatcacttaattttcatggacattgttttttgctcagggcgggggaacgaataaactgttgtgataaagaactattactctgcattgcgctgtcgaagatgacatgcgtttaaaatgagattgaaggagtcctataactggcacttataattggacttaccattgtagggggggagcaccttacataagatcatactaaatggtcttgtgtataacgctgaaaaacgaatatcgcatggagaccacaagacgacagacttcatattatctaggaaagatttactagctattta

SEQ ID NO: 79908 - DNA, 598 bp, Arabidopsis thaliana landsberg
  unsure (1)..(598): unsure at all n locations
atatccagaaccgatacaatatgcgaacgcacttggcgaagtcacgaaagacattttatagcaaaatattcctctattattatttggtgatggaatgtgattttgtccgctgtactatacttatctaagcatgtggttgaagcttccttgtccgacgaagtgtcttttagttcggctgacgtacgtagtaaccagctagcccacgtgaacttttgacttctctttgggtaacttttttgtacttctcaacttcccacaaaaaaaaactgaaccaacgacttcaataaacatataattaaggattatttcaacctttaatttgtactctagcgatttaaactaaactgttttcattttgaagttttaatgcggtttctaactatgcacttatattacgtcgataataatctatatacatgtctatgaacaaaaacaattaaaagaaaaataaacagaaatacgcannnnnnnnnnnnnnnnnnnnnnnnnnnnnnnnnnnnnnctcatggtgagtgactgagtgtcttatccttatgtctctaggattcttgaaatcttgagattggaatgctctttcttttaaacattttttatgctc

SEQ ID NO: 79909 - DNA, 482 bp, Arabidopsis thaliana landsberg
aaaatactatatcaaattgtcaaactttagtgaacaatacccgctaaaatattattaatttattatggcctttgttaataaattttgttaaatgatttgagtaaaaagaaagtaaaaagagaactgtaaatttatttaacgaacggtagctaagtactccaacggtcattttggtcaaccataaatataaaattttgtaaacaaaattctcacagaggttttagataaaacacccattaaaaattaatttaggctttcttgatttgagtaaaaataatttataacagaactgttaatttaataaattaaaacagctcgatcgaactgtaaaagatttaaaacagaattgtaaattcgttggtagatgcgcccaacgaatatgtaggtcaattattgaagcccatattttttaatttatttggtaaaacattataaaaacatggtgatgtagtttagtcatatttatgttggcaatatgtaac

SEQ ID NO: 79910 - DNA, 170 bp, Arabidopsis thaliana landsberg
  unsure (1)..(170): unsure at all n locations
ctgcactgatgggcgggatgcatcaatgccccccggcctccgacgccgtcattccggcgcagnnatccatgcattcattgtttcttgccagcacggacggccgttgacgagaaaagctctggtcgtgcaggactccctctaccctccgttgagagggttggcgtgagggg

SEQ ID NO: 79911 - DNA, 556 bp, Arabidopsis thaliana landsberg
tacctttcaactttgattttgaaaaccatgcactctcagaggagcagatgaaggaactaatctacctttaggctttttgctttcaatccagaatatcagcaatagtttgaagaacagcatttgggagatgaagatgagataagggtttggcgttatttggtttggacaacattcttaaaaggaggaaagatcattgtttgtcttttgtgtatacttgtgagagatgttgaaggggatgggtctcaaactttatatttcagtcttttggataatttgttctctctgtttttttttttcctattcgtatttgtaatttgccctcattttgttgttgcagttatttaagacttaaattgtctcagaaatagttatgttatgatagcccaccttcaattcctctacaaaatacttgccattactgtcagctttcttgttttataaaacagcagggagagaaatattgcagggagatgaggatagtacaaatcatgtcctcggcgtgaaaattgagcatttgatgaacacaatctcaagtcttgcacttgtgtaactctta

SEQ ID NO: 79912 - DNA, 464 bp, Arabidopsis thaliana landsberg
tccgcaagcctggcgtggtgctcaacaacgctacccaggccggcctgtcccaactggccggggcactgcattcctttccgcagttccagggccaggcggcgtcgaccatcctcaacgaggtgatcagccgcaatgcttccttgatcgaaggcccgcaggagatcttcgggcgccgcgccgactacatcctggccaatcccaatggcatcaccctcaacggcggtagcttcatcaacaccacccgagctggactgctggtcggcagccctgaactgcaggaggcacaactcaagcaccttagtacgctcgaagcccatggctgcctgaaggtgaccggcgccggcgggcacaatcccgaaggcgccctggacctgatcgccccacgtatcgacagcactggcctgctccaggccaagagcgacctcaacctcaccttgggccgcaactcgatcgactaccccacc

SEQ ID NO: 79913 - DNA, 557 bp, Arabidopsis thaliana landsberg
gaaacgaattgaaaggtcttgatttgacttagcagtcatttgaatctcctatctgcctcccggcagtttaatatgttagagagaaaagcgacggaaacctagaaggcttattattcgtcgctagtctctttagctggtactgatacttcgtttaggaacgccaggtcaagatcaaaatctttacccttcagaatagcttcgtcgattgatagatctaagttctcaatattgttatcaacgatgaagtccatctcgccatcttctagtttttccccagtaagttgctcaaaagcaaagtcgagagctttagacagctcctcggcttcgagagcaaggctgacttgttcttctgcttctacttcagcgatgtcagcagcacgaagagcttcgaattcttcatcaaaatccggagcattgtgaatgacgccttcaacagagatgtcgacaactttagcttcaaccacgttcataattgaaattgattcagaagccgcctttgtctgacgaagtgattcttcacgattcacgaaatctttaaagatttcgaagctgtttac

SEQ ID NO: 79914 - DNA, 460 bp, Arabidopsis thaliana landsberg
tgaagctttcaattaagctaactgaggagacaaacaaaagaaaacattctgaggttaataaatagctataatcacatctttttatactataattttgtgaaactggaatattccttgacctgtaatttattgtttcttataaaggttggggagatggtggaagaagatgaatcgctaactaaagcgaaacaacagatggctaaaacacataaggtatacaagcaatgataagtattgaataccttctaatggtagccactcttcattgtggagaaattctacttaatgattttaaaatattgtgttatgcaggtgaacatgagtgagtcaacttctcaggtcgaggttgaagcagaaatcactctttcagcgtctgatgtgaaggataagtacagggtaagcacttatagtgtctagtacgttaaagccatgtattcctgtgttaaatattcttcttgga

SEQ ID NO: 79915 - DNA, 335 bp, Arabidopsis thaliana landsberg
acagtacggatcccggcgagtcgccctttcacaggggcgtggattgaaacaaaaaaaccctgaataccagagccgccaccaaccggtcgcccccacacaggggcgtggattgaaacgtcgccagcccgccggctgtggccaatgagaggctgtcgcccccacacaggggcgtggattgaaacgtcccgttgatcgccccgctgggcgtctcaccaagtcgcccccacacaggtgcgtggattggaacatcgtccggctcattgtggtgacaggtgccttgagtcgcccccacacaggggcgtggcattgaacatgagtatctcctatgggcttat

SEQ ID NO: 79916 - DNA, 273 bp, Arabidopsis thaliana landsberg
  unsure (1)..(273): unsure at all n locations
gataaagaagaaaccactccatccactgatggggttagcatttttttaccgagcanggagccggagatcctgttgcctagcagcgacactgccttagcgggaagggctatcatgccgtgcatggcggccaccacggcgccagcataggccgcaccgcagaccgcatatgtaaaaagggctgcaccgaaggccaggttgagggtaggcaggaaaaccaaattcccaaaccacacagacgccagcacaacacctgcggtggacacggaattgaag

SEQ ID NO: 79917 - DNA, 615 bp, Arabidopsis thaliana landsberg
  unsure (1)..(615): unsure at all n locations
gctgctcatttatcgacaagaacaaaaaaaggtttacacaagtttttgtttttatgtttctgttttgtggttaatggcttaggcaaatatcttgtgggtttggtactgctttagttcttatgttcacgaggaatcctttgctttgaaagtctatggccgtgtaaaagagatatgtatttaatgtaatcacaggaagatttacttttgattcaaaacccaagaaagttatgatgattcttggtttaatttgttttgacaagttttgtcttttgtttctccaggtttgttttgtctcacaagtgatggtcgtatgactcacatgcatgtcctctgaactcgtttagcatcaataagctttccctttgaattgatatgtcaggtaaatttcgttgtttgattagattttctcatttgctgagactttgcagtttactgagactttgtttcttttctattgaaggtnnnnnnnnnnnnnnnnnnnnnnnnnnnnnnnnnnnnnnnnnnnnnnnnnnnnnnnnnnnnnaagatgagagacggcgctcaaaaatagggaatttgaagaagaaaagccattatgcttcaaaccagntcactcattctttgaagaaacggggg

SEQ ID NO: 79918 - DNA, 504 bp, Arabidopsis thaliana landsberg
  unsure (1)..(504): unsure at all n locations
gtcagcaatgtgccggcgactggggactgatctatacgtcgcatcattacgatattctcctgttcaatccttttttatttcagcgttttaacctggcagagaaaagaggcgtcaagccggagtggaactggttcaaaaataaagaggggatgatcaccttctggcgggacggcgtatgggaaaataaagacctggattgtatctggccggtaggattgagaggtacggatgattatggttatcccttcccgaaagggatgtcagagaaagatcagaccaaggtattcaatcatgtgatcgaaacgcatgtaaagatagccaaagaccttttgccctgcagcgagccgccggtttacacgtttacactctggagcgaaatgataaaaaaatatgaatcggataaaggggatttcagcctgcctgaagatgttatgattatatggtcggataatatgaatggtnnnnnnnnnnnnnnnnnnnnntccctggggaaatggaaacatg

SEQ ID NO: 79919 - DNA, 423 bp, Arabidopsis thaliana landsberg
ccaccagattggcagtttagaagggatagattgagattatgcttagtattcacaaccctatattgtggatactgaaaatgaagttgaaaacagagctaatgttattgggtactcattaaacctatctacttttggtatatctactacaggaactatgccttattgttacacaatgaatcaagatatctaactagatattttttatttgtcattgtagaaagggaaataatggttcatcaacaaaaggcaagaaaaatctgaacaagcaactcattgacgctattataaagatgctcaaccaagtgaacccatatgtagagaagttcagatctgctagagagaggattgattctactaatgatgaaccatttcatatgagaattgtttctgatcgacaggtactgatgggaggttatataatat

SEQ ID NO: 79920 - DNA, 209 bp, Arabidopsis thaliana landsberg
aagacaagatctcaaataatcaaaaacgacaaaatatataaattgttagatgtgtgtattctagattcacatgtaaaagacccattcggtctcacagaatgagacgtgctctcctgaaaattatccaatatactaacacattttttctgcaaatataaaataaaataattcaacacatatcgtatataggttagttccgttttggtttc

SEQ ID NO: 79921 - DNA, 378 bp, Arabidopsis thaliana landsberg
gagctaatatctattgtcaggctcatcaaactcgaagcattcttatggcctacttttttctatgtatgaaagtgaattcagttccacttacccgataaggtctggcgatccattatctgctcgtaaggaatgttcactaccatcagaaccaatgattacaagttctgccggtagcccaaacggaatggttacctacataggtatcacaagacggatataaatattagttcaaagttcagaacctatctaataactatttcaacatgcaaagctccttcatattcacaccgtcacacgttgtacagacaagcgcgatatattttacgacaaaaaaaagtcagaaacaaataaggcataagtcttacagtagtagaagct

SEQ ID NO: 79922 - DNA, 320 bp, Arabidopsis thaliana landsberg
ataaaatcgtattagctatatcgtgaagaaaccctaaaggcaatgaataagagggttaatgatttaagaagaagaagaatagagtcaaaaagggtagaggcgatcgccaagactaggatcgagccacggagtctttcctaaaaagggattgagctaaacggaacccaggggaagaagacaaaggagatccggcgagctgcggaaagagagagagagaggggacggaattgtcttgtctcgtctgtgtgtgaatcaaatcaacggttgagagttttttagttggacgaattgcattgtggatttaatccaaaggttggttg

SEQ ID NO: 79923 - DNA, 582 bp, Arabidopsis thaliana landsberg
aatatatatattattcgagatgcatgcatacaaaatgctctcagatttgagatctaaaatgctctggtaacttgacaatgtgatctttctaacaatgtaaagaaagtcttatggttcattatggttggacagaaaacggcttcctgtacgtacacaaaaccggacccaaatataaaagaagaaagtagcagacagaatgaagatcttattattgaactcgacgttcgaccgtttacagaatgtattttcacatccgagcctcgtttgagagatagaataaacacaaaactacacaagtcgattgccgagcttatgtctttgagtccgaatggaaacattcttgtacttttcccgtccgatctcaagtgtccttttctgatatttttctgtcagtatttatagtacttcaatgatggtacaagatacgattttctaagcgatgtgggactcctatataagtcgattccttctggaaggtgggcttttactctgctatgggccgcggcttcttctaacgggctgacctttacctccttttactgatttgtggtgaatctttgtcggctctggaatgtatttggg

SEQ ID NO: 79924 - DNA, 550 bp, Arabidopsis thaliana landsberg
  unsure (1)..(550): unsure at all n locations
ggcttctgatgtgtatatatatctacagtttaagcattaattcgcaagtgttgctgatggggatgcacgagttaagtatccaagcttcaagctacctaagtcgactttcggagatactggcaaacatagcgccattggtagaagctaaataaggattatgctcttctaaatcagtgtatcatgatcaaatgaaatattatgctaatgagtaaactgatcttccgttttttgcgatgcagatgttttcccacttcttgtcaaggaggctgcatttcctttaaaagaagaccgtgacatcgatacttcactggtgtgttctttattactttacaagtccttactttatggaagagggatgatatgttaattaatagatcgttgctgcatctaagaactatatagatcttcacaagtagcattgtgggtgttctataatgagtccttcaaactcttccatttgtaataggtccaagacgtgtgtactatctcagtcttacctgatgaggaaatacaatcccacaatgtacctcgcactttactctnctgagct

SEQ ID NO: 79925 - DNA, 514 bp, Arabidopsis thaliana landsberg
  unsure (1)..(514): unsure at all n locations
accagccgacgatgcgggcgatgcgacgcgtgcgcgcatgcctggacgggttacggcgtttactcattgtcatcgtccgggatggccgcggcggccaggatgcgtgctggttgcgcgcgnnnnnnnnnnnnnnnnnnnnnnnnnnnnnnnnnnnnnnnnnnnnnnnnnnnnnnnnnnnnnnnnnnnnnnnnnnnnnnnnnnnnnnnnnnnnnnnnnnnnnnnnnnnnnnnnnnnnngatcgcgcgcaccacgacgttggcctggttgctttccgattcgtccagattgaccacgaacgactggtcgatcttgagcacttcgatcggatactggtgcatgtagctcaacgacgagtatccggtgccgaagtcgtccagcacgatgcggatgccgtgcgagcggaacgtttcgagggcgcgcttcacccgcaccgggctttccagcaacgtgccctcagtgatttcaatgcgcaggcgcgtggccggcacctgctgggcctcaagcagggccagca

SEQ ID NO: 79926 - DNA, 558 bp, Arabidopsis thaliana landsberg
aatagtgtttatttggtctttacgagataacatgtaatagtaacgactaaaaaacgtattcggagttttagctttgttaatacaaaatagtgtataaccgggtttgtcgcagtttgagacggtcgtccattgatgatagcgccttatttgagcaatcctatttattttagcctgagggctagtgtgattccatgcgtccatatttattgcaaacatacatgatacatggtaaatagtaaatctatatcaaaatttaaccctaaaacatacttaatatacctaactttttcatgtgagttataaagccatataaagttcaggttacatctctagtctctactctctacatagttatcatgtaatatatcattgttattgttaggcatgaaaaaattatcattatttaggcttaggcatgctatataatttgcatagcatcatcatacacataataataaagtacaattgtccatgttatacttatatatatacatagaggaaaactttaaaatattgcaaaagcagcctccattatcacccaccaaattagtttttttc

SEQ ID NO: 79927 - DNA, 467 bp, Arabidopsis thaliana landsberg
  unsure (1)..(467): unsure at all n locations
aattatgtttagaacctaagattttacgtgaaattaaagatgtttagaatatatcagttaagggtcgagtctatggacatctcgtgttctattttgcacgactgcatactttttcttactttcgaagacgtcatttggaatactatcttgtattttcctttaattaacgactataagaaaataccaaacacacacatcttattacaacctaagctgtataaatcaggtcaacgtattatttaagttcatttgtttgtttgcaacaatatatatttaatcttgtttccatgaattatgttatagtaatactaattaatgattttaatcgtagaagcagtggcaattcatttaaatacataacgaaagagccatctttttttctttttttggacaattgaaagagctatctaatgtccgttccttgggtttctatnnnnnnnnnnnnnnnnnnnnnnnnnnnnnnnnnn

SEQ ID NO: 79928 - DNA, 478 bp, Arabidopsis thaliana landsberg
acccataaacacaacggccgaaattgaggtcgatggttgcatggttggatttaggttttgctgttcctaattgctagatgaatttaccgccacggggggattcggatgccggctgcttcgaggaggaagaaagggttaccttttttaccgggacgctgcaggcagatttttgttgccatgtttggttaatttgttgggtgctacaccccgttaattaatgatcaataaggtctgtaatgatcacgttaaatgcttaatgataaatgcttaatggaaaataatgtgtaataacctggtaatcagttgtaaattatcggccacacctactttagactaaggactaaagactgacactgtctgtaccaaagcgatctgaaagatctgcttgtgactgctgcccgagactattgtcgcttgatttcctgaccacttcttaaagatcactaaaacttcggacacgatcatgacaaaacctacc

SEQ ID NO: 79929 - DNA, 224 bp, Arabidopsis thaliana landsberg
gagagcttagtggcaagacggaccagaaggagacttggaaccagtgctacgccacggaacgcattcgggaggcgggaagatgcgcgatcagatgcttcagctgagcgaaggatggagctaataaaccaggccgtcgttcggcgcagaggggcgagagctctgccagtgtcacaaccagactaccaattcggattagaaaaactcgcgaagcgtgaagtgaaact

SEQ ID NO: 79930 - DNA, 597 bp, Arabidopsis thaliana landsberg
  unsure (1)..(597): unsure at all n locations
aaagtctttggtttcttaccatattaatcttcttttttattaatagtaataccacaaatgtccccatttagaaactccagtacacagttttattgaaaagttaaatatgttgtctatttggtaaatgttattaatgaaaaaaataacatgttaatttttcaacggactgaatttaaagttccatggaaatttacattctccattttaatttgataaatgaaaaataatttgaggttcaagatcacatctgttaaagtgaagatgaatgtacaatcatgaccttgttaacagttaatcaccttcatgaaatgaagtttaagaaaaaatattatttactagtaagtggcagtaactagaattttaatcaaaacaattaagaataaataaacaaaccctagcgaccaatcgtgtagttcttcttatttttaaattccaatttggttcagctttgtttaactgtttgggcctcaaactttccttcatgggcttcaattattccaatattgtaatgtatgtcttccattaaaaaaaacttgngctgtgtgtatataaaattagcagaaataaacaatctttttccgatcaatcttgacgtaa

SEQ ID NO: 79931 - DNA, 599 bp, Arabidopsis thaliana landsberg
  unsure (1)..(599): unsure at all n locations
aggaaagaggttcatccctaggggtgaatacaagtccttctctacaataatactaaaattttagatttttttatttgtttcataaaaacttatttttatgtttttaattgcaatttttattaattaatgtgcatatatttcattaaatttgaaaatactgattgcggatatttaaatttatgaattactgtttgttcataattatcatttttttggtgtaggaaaatattacactatatattaattgttttcttaatttttgtgaaactccaaaagattaatcttttaagaacataagtagtatagtgcatggaaactttgtctgattgtgtttctttttttattttaaagttgtatgaagaatggaatatttctgtgaagttcatatatatttggtttcgatttgaggactaaattttttggtaataatatctttttacttcattgatatacgataatatctaatcttgtaacaaaaaacttaagaaacctcgattataaatcaaaccaatgcaaataagaaacatcnattacaagtttggattactgatatgatgatcttaccgtttcgtgagaagatttgttcagaattcactaaa

SEQ ID NO: 79932 - DNA, 477 bp, Arabidopsis thaliana landsberg
cgtcctcccactcgtggtccgacaggaggtgcagcgcgtgcagctatcttaggccgacgagcggaagtgggttggggttgggtaggtggtgaaacaggagaatgagaacggcgagcaaacgcagaaggtgctgcagcaggggaaggaggtggcaggggcgagatatcaccggaggcatcccaactgttgtcatcagcatcagcatcggctacggttaaatgggaggacttggtgtgagtggcgatggtagctggagcacgactagaaaaggcagagacggtggaagagcaagtggtggccggtgctgtcaaccgcgtggaggcggcaactggtgttggtttcttgacgggtgcaggtgtctcggcctcatcattcgaccaactgtcgtcatccaccactgaggtcactgttgtgactgcggtcaagcgaggatgctcatcctcctcctcctcgtggtcactgtccaacggcagctcc

SEQ ID NO: 79933 - DNA, 462 bp, Arabidopsis thaliana landsberg
  unsure (1)..(462): unsure at all n locations
gccgcgcgcacgtcaggtcttttcgcgagtgtgctcttttccaaactgttttcggatggctcccacgatgcgctgcttctgcagcttttcgggaatatccggcacctgatacagcgcggtgagcagggcgatatcgacatggctgaggtcgcgcgtcacgtccgcgccatcgcagccnnnnnnnnnnnnnnnnnnnnnggtggccatgggctggcaggcgccatactggctggcctgggccagcgtcatcagcgccagataatcgcctatttcgcccagcgtcatgccggtcaccgccttgctgtccaccagcacggtggcggcggccatttcggcggtctggccggtgtgcaagcggctgagattggcggcgacctggggaagggagttctcgtcgcgccaggggtcggtgatctnccagggaatgtcgagattcttgaagccgtcatagtcggtcttgaa

SEQ ID NO: 79934 - DNA, 251 bp, Arabidopsis thaliana landsberg
ggggggagaaaacagaaggacccgggcggagcccaaagaagccaaaggcacgacacagacaggcaggcagaaagacaaaaacggggagaaaggagaaaaccggacaagggaagagagaaagaggagagaaacaggaggacaaaagaaaacaaaggcggaaccagaacaacagggaaaaaccgagaaagacaggggggaaaagcaaaagcggggcagcagaggaaaacagaaaaaaaaacggaagcaaaaac

SEQ ID NO: 79935 - DNA, 338 bp, Arabidopsis thaliana landsberg
tttcccctcgcgtcctagactagatcagtgatatttaaccgtttacaatctctctcagagactttgaattttgcgatttctttgcttatctcttgacttttctccaccgatccgttatctgttgcttgattggagaatttctgctctaggttgtatatctaagagagatttctggtctcaatttgaatttattcatgactgattgatatttcatgctatggatttagttttttccgttcggatgaatcatctaggtttggaagttcgtctctatttctagggttcctatcacgcatgagtttgagatttcgctttttgaattttcgtcaaatcttccg

SEQ ID NO: 79936 - DNA, 571 bp, Arabidopsis thaliana landsberg
  unsure (1)..(571): unsure at all n locations
tgaaattacgcgaagaaaattgtatgatattctggaaaataattgtgataaccttttttcttaatctgaggtgagatttatttataaccacagtctcaaccggtggaggttaatgtcgtgagccatcctgtccagaggtttgcagtttggtttggaggctctgtgctttcatcaactcctgagtttttcgcggtatgcaaactagtttagagatccgctagtttgaagctaaacctcatggcttgatcgtgttttgaaacaagatgtatttttgttgttgcagagttgcagaacgaaagaggagtatgaggaatatggagcaagcatatgccgcacgaatccggtgttcaagggaatgtattgaagctgcttcataaataatnnnnnnnnnnnnnnnnnnnnnnnnnnnntgctttactccatttctattactgactttagggttcttgagtcacacagtgtaagctaggcttgatgtaaaagtcatattattattcagacaaattaaagaaaaaagtatgtagaagtttgatttttttttcatattattttctggtaactcaagcattaa

SEQ ID NO: 79937 - DNA, 562 bp, Arabidopsis thaliana landsberg
  unsure (1)..(562): unsure at all n locations
gggtgaaatcccacagccgccagagtgcactgacgggcagtgccttcagccggtgttcgaagcttagggcagcgtcgccggcgtacaggaccacacccgcgcaaaacatgtcgccggtttgcgactgcaggtgccgtaggccgcggaagtccgcactcctgacggtggcggatgcctttacctggatcccggctatccggccgccgttcgtctccagcaccgcatcaacctccacaccgtctttggtgcggtagtggtacaaacggacctcttccccagcggctactgccccaccaccccgcgcagcccgtcggcgccgaacgcgggctccagcatcgcggtgaagtccggaccgcgacgcaggcactgcccgccgtcgacgttgatgacctggccggtgatgtagccggccgcgtcggacagcaggaaaagcgccaggtcggcgacgtcgtcgacctcgccgggccgcggcagcggcgtagagacccggtagtcctcactcagctcgggcgagtccaggatcggngcaaccagctcggtgcgggtcagcccgggccggatg

SEQ ID NO: 79938 - DNA, 515 bp, Arabidopsis thaliana landsberg
  unsure (1)..(515): unsure at all n locations
aatatagngtagttacctataaaagtacttttcgagggagcgctacgaatacgcagttcatgtgaaggatgatgaaacgcagagcatttacattgatagaattattggttgccattgccattatctcaatattggcatccatcctgttcccggtgtttgcgagggccagggagaatgcgcgacgagccagttgtttaagtaacatgaaacaaatcggtctgggcatgatgatgtatgtgcaggattatgatgaaacatatccgccgtcatgttacaccggccaagaggcctattggatggatattatccaaccatacgttaagagcactcacgtattctaatgtcccttcagcggatcaacgagttaatatgatcggaactacggagtcaatcaaaatatcttcgcataccgacctgttgcagccaggcctgtgatttctatggcattcgttgctttcccttctaagctctatatggccatggattatggaacttatgaatttgctggcaataca

SEQ ID NO: 79939 - DNA, 488 bp, Arabidopsis thaliana landsberg
caagacctgacgaagacaaacgtcagagacaaaaaaaaatagaggattgtggattactatctttttatataaagaatctgaaaaaagtttgtcactttgtcattgccgttttggggttagggtgatttgggttttggaaatggcttatgtgtcggcttcacgatgaactgtgcgtcattttctctttccattacgtatgcgaagaataggaagacgaaggagggagggttagcgaaaggatacataaatttagaagctttttccacaaattaaatattactatcaggagctgacccagcaatatttagtatttagtgctgattccttaagccactaactatggaaaaaataatataaatattccgggttggttcgtaatcagttaccggtttaaggttaacttacatataagaaactaatttaaaggatgtggacagcactgaattgatgtttgtttattccaacaagtaaaactcttatctataaca

SEQ ID NO: 79940 - DNA, 548 bp, Arabidopsis thaliana landsberg
ggaactataaatcgtatgtttttatattactgaatgaagttttagtccctttccagtctaactaatcgcactacagtgggatatgtttgagtgtgtgttcgattattaatcctatgtaagtagtgaagatacaatacctttctattatattttttagtatatttcttttcgagaaaaggaaagaataaccaatactatagataataataataaaatatatatgtaggaatcggagtcgttgcatacacagatgttgatatgtgcgtataaaatataaatattataaagaaggaccgagtgatttattgtggcaacacgtattgtattagcaatttggcgatttcgaatttttaaagtaaaacgtaagtaaagggagtgtgtggacgtacgtccttagtttgcggctactaaacttcttacgagtggaccatgtcaaacaagttcttatattaatgagatactggctccattaattaatttcattaattcattggtgaatattatcacctcaagacggcacattacatattttttcgtacaatagaaca

SEQ ID NO: 79941 - DNA, 558 bp, Arabidopsis thaliana landsberg
aggtcgagcctttttgcactggtaaccaccttcagcctgacccgcgacattaaccttgttgctgatgatctttaaggatgaggcatccgtgatcggttcttcttcggtactggggccgaacctgaagatgggcggcgaggcagataataccaattcgatcacgatacaggagtttgcccggaggcttgaggcagcgttccctgaactgaagtcggcgtctggaacaccgcagatcggtacaaacgatgacagtgctatcgagatctgggtggccaggttcaatgaatccgccacaggtatccagtttaccgtatccaatgccggtaatccgttctattttgcggtgctgccgctatcgacgcatctgttgtcccgtgatccggttaagatctatccatatgtaacaggtacgccgatctgggagatgaccccggttgaggccgcatttaacagcgtggatattgaacagctggcgcgcacctgtttaatggctatcgatacgttcctgcaggcagacttttcgatcccggcctggaatgtggagaatacgataacaca

SEQ ID NO: 79942 - DNA, 437 bp, Arabidopsis thaliana landsberg
  unsure (1)..(437): unsure at all n locations
ttatttaatttgtttttgataaatatcaaattttaattatatagagaaagaaactaaaatttttaacctttttcattcataggattcgttttctccaatctgaattctgaaaacctttcctattcctcttagaatctggccattgtagtttcgaaacccttttcctattcatcttctaactctcttcttacctttataagaggagttgctcattgctcaatattattcagctacttgaaatttcgtccctagggtcataacaggtttattcggctgtatcataccagacgaacgatgattccagatgacttgtcactatctctnnnnnnnnnnnnnnnnnnnnnntggagtgttgccgctataccgcagataatgactaactacaatcaaaagtccattgaaggtgtctgtatgaccttcttaacaacatggctgct

SEQ ID NO: 79943 - DNA, 550 bp, Arabidopsis thaliana landsberg
tattcagatacctttcgctgttaaccgtggtaacgacagtcagtgttgccatcggctgcaagactgtgttaacaccctatacccggcctgcattgcaggtgcctgacagctttcagacaaggaccccgctctcaaaaaatgatatccccgtaaaacagcgtttattccgcgacagtttgctggtgaagctgatcgataaagcggtaaaacagaacccggatatgctcattgcatggcaacgggtagaggtcatgcgttcacaattcatgatgcgccagggggtcatgctgccgcaggcttatgcagatgctgctgtttcggcacagcgttacggggattatacgatggaaggcgtgggtaatttcgataccaatctttccggcaatatcaagcccaaccagaaaacgcctgtgccggtaacacccaattacttcctgggactgcgcagcagctgggagatagatatatggggcaagctgaagcagcagaaacaggccgcatacctgctagtgctggcaatccgaagagggtcgcaagctggtgatcacca

SEQ ID NO: 79944 - DNA, 587 bp, Arabidopsis thaliana landsberg
  unsure (1)..(587): unsure at all n locations
tatttattagtatttaataacaataataactatatatatttgcttattaacatgtttgcgtacgatcgtacgtacgtgttgtatgattcttcgatcaccggactcgatttttctgaatgtacgtactagtgcatatcaaggtatgtagaatacattaacaatattttgaatgaaaacgatcgatacgtgaattaacgtaactatctcaagtctcaacggaaccgtcgtaagtacgcgcaataaataggtagatgtacagttataaaatatgattatcgatttgtaactgaatgatgtatacacatggagacagtgagactgagacacatatatgtccaaataaaaagcacatagcattgctgacaagtgcatgtcaaggaaaaatcaatgggttcaattttagtaaaccaaacaaaactctaaatgcaatataattaagctagtatcaggttagaaaacgatgttttgaactgttaatactattagattcggatgttttggcggngaagaatcagtgattcactgcttcattctgttctctccactacaatattattgacttactgtacatgacatcacccacattt

SEQ ID NO: 79945 - DNA, 535 bp, Arabidopsis thaliana landsberg
  unsure (1)..(535): unsure at all n locations
gtgtcggcgtcggcccacagcctgttcaggatgttttcgcggttcttgtgcgcgttctgggtgcgggggccggggtcgcggtccggtgcggggaacagattcgcggtcagggcgtggaacgcctgatcggtcatggtctgggcgatcagttgttcggcttcgtcctggaaggcttcgacgtagcggaaggtgagcccgagggcgtcgcgtgcggcggcgacgcgggccttggccgatgcggtgtggcggatgctgatcgacgccgtgtggttggccagggcggcggcttgggtgttcgcgcagaccacgcgcacgggggtgacgagcaggcggaacgcgctggtgccgtcgtgggagttcagcgcgacgatgttgacgtcgacccggtcggctccgccgatgcgcatcgtgtcggngagcttgagggacacgaacacctgccgcccgccacgcaaggagcctgctgtgtcgaagatggcgccggagtcgtcgacgagctggttgaggacctcgcagtgctcctcgttctggatcg

SEQ ID NO: 79946 - DNA, 198 bp, Arabidopsis thaliana landsberg
cgatggaccgaacaaagaaaacgaaagcaatcagcaccaaaaaacgaacaaccggtgcagacgacaatatcgacaccctaacaaacaagacccggctaaaaacgaaccccaacagaagcctcaccaacccaacaggaaaaaggggcaaagaaacccccaccttgaacaaaacacgaaaaaaaccgacaactatgccag

SEQ ID NO: 79947 - DNA, 616 bp, Arabidopsis thaliana landsberg
gtggatggtttgaatgggtcaagttttcactaattggaatcgttgagaagattattgcgaaatgatttagagatagactgattaatgattatgaataaagataatcaaaatgagagttgaaccgagtccaatatcaaaccaaaccgagataaagtccggctaaaaaagatgtattttcctattagtcgaaaaggtaaaatgcaaaaatacacgaatgagtaaagaatctgtattttcctattggctctattttccttcttcttcttttttaactcccacactcatgtttctgacgcgtgtgtttcacgtcccattcctgttaacgaatatatattttatatttttgcaaataaaaataaacatataagtgggtttgagactttgagtgacccttgaaactatgagcagcttataaaaaaatgatgaaccaagcttagagtattcattatttactagtatcttcaattcattcatatttttgttcaaaactctattttgcctttatttactctacccatattactttatctctatatagagatgttatttttcttttaatataagataaaattggggttatattcttcctctttttcttttccaataaatttttttt

SEQ ID NO: 79948 - DNA, 174 bp, Arabidopsis thaliana landsberg
gtggacggactggaaacgggtctatcggactcgttcgtcggacgataaatggttggctgatacctggtactgtctatgggaattacgatgagtcagtgacacaaataatagccttggtggctgtggatgcttacgcaaagtgagttgtggccaaaggtctctatgtcaaagcgg

SEQ ID NO: 79949 - DNA, 448 bp, Arabidopsis thaliana landsberg
cccgcctatcatcatgtaaccaaagtctcgtgatttccctcagaatattatgttaattgctcaacacgatcaactgtacttttgcgatacagacgttcttgagaaaaagcatcccggctacataatgggggctcagaacctattgcataacctgatacgaaacacaagtgtgctactgtgcttagcctcagctaagcgtcgtaatacaaactgccatatggccaaaataattctcgatgtacatattcaacatcattatatgatgctatatacatcgcccttgctagggatttaacgcccagaccgatatgggttgctgctacgtctctatctatttttgtgctgcatgttcttagctgggtaacatggacaacattatatttattatgtgcgcgtacaaagcatactatgaaaactggtggagttccactccccgtgggtaattgct

SEQ ID NO: 79950 - DNA, 502 bp, Arabidopsis thaliana landsberg
  unsure (1)..(502): unsure at all n locations
tttcattttccgggttgctttaaaaagttaaatttctgaattgggctgttttgtgtgttgtttgtttgtttcaggttaaaagtacggttccgtttagcgagcctttcacggtagatcctgagaatcctccaccggagaaagactacaatgagtatttcaagactctgaaagatggaatcaccggtaaagaagctttagaacagagcactgttgcagtttaaaccaggttttatctacttttgtaactgtgtgttgtctcatcttcgttaaaaatctttccaaaagtaaaaacaacaacaaaagagtcgtgtagaaacatgtttgtatactccatatatcgtacattgtagataagatttacaaaagcttattgacgacaacaataaagattgtaccttttgatccgtggaggtttcttcaacaagattctggaatttctctgccatttctctgtctgtgagaatnttgccttgtggtgtaagaaaagcagtccgttgaaacg

SEQ ID NO: 79951 - DNA, 494 bp, Arabidopsis thaliana landsberg
  unsure (1)..(494): unsure at all n locations
tcttagtgatcaccctggagttgttatgcaggcgcctagctatatatcttccggaataacaaaacaatatttgatatccagtacccatattcggacaaattgagttttacggcatcaaaaaattgacgggaggttaaaattcctgtttgggcaatcaaaaaatctttatttttgcagtcccataagcggaagnnnnnnnnnnnnnnnnnnnnnnnnnnnnnnnnnnnnnnnnnnnnnnnnnnnnnnnnnnnnnnngctcatctccccctctgcaaagagggttttttattgctagtcagccgattacatttaatcttgaacttcaaaccttaaactttgaatgtatagaggcccatgtggtggaactggtagacacgcatgactnnnnnnnnnnnnnnnnnnnnnnnnnnnnnnnnnnnnnnnnnnnncccgggtactaaaacaaatacaaatgtccgcggaagcagactatttcatttctgcctgttcgagcc

SEQ ID NO: 79952 - DNA, 629 bp, Arabidopsis thaliana landsberg
  unsure (1)..(629): unsure at all n locations
gcccgtcccgatattccaaggggctcgtcgtggcagctatagctgcgcttcacggaaccatctggttcacgaatgattatactgcggtaaccggaactgcactcccaacccaggaacttattaaagttgaaggcattgaagcgctcagcctggtccataaaatacttttcgccctttttatcggtaaattcgacttgcatgatgggcggaacagcttcgccggaaacatgtttgtcgggcatggggccatacttcggctttggacgctgcgacgactttgcctgtgaggccattctnnnnnnnnnnnnnnnnnnnnnnggcatgccgttctgcagacggtccaacatgtctttgctgtaaccttcaaccaccgccgtggccgacggattactctgtggcttcagcgtgacgttgatcccgcgttcatgaaaataaagtgcgtcttccacaggagttcaaaacgagctggcaccataccatgtngatggtgacctggatgtcgttctcttgcaaaanaaccagcttgtcggcgaaagggttccgncgtcgtaaactcttttgtgataactcgcggtgatgctgacgccgttgagggttttggtccgctcgacgtactttttaaaccaccc

SEQ ID NO: 79953 - DNA, 541 bp, Arabidopsis thaliana landsberg
aggataatattccagtcttaaaacatatggtaggctggctaacaatatgcataatgtagattaaactaaatgatgatatatctatgatactagtataaagcaaatatgtaaaccgagtcataccatattcagccaaacgtttaaaagttaaacaaaccacggaggcaaactaattatggaatgatatccatctttatatgctaagctgaatcaaataagaccgaacacgcagttcaagaaaaagagtcttatccagctaaaccaaactagtagtacatggaaggttaggcttccgtaatatcactcaattataagggcatatcagtcaattacatacctcctacactcctcattcctcaacgtcaacttgcgtgtctttctttcttcgaatgaacttctgaagcgaaaaaaagagagaattaaagtcattcattatttggggaatggagaagaagcttctttcctacagacgccatcattaacaacatcctcttaagcttctgcggattcttttcgtttgtcggaagatttcacgacgatt

SEQ ID NO: 79954 - DNA, 676 bp, Arabidopsis thaliana landsberg
atgtaaaaaccttttggtgggtcgccaataccaaacatcaaccgtatcatattttggggatcttctagattcttaacggtcattgtttataaactttataattgtccaaatatatatattttctttggtatcaaaaaatttgcaaatatgttttctcgtatttcgttttttttataacaaaagtaatgttgtgagtaatttagctttatctcctgagacacccttgttaaaaaggtcgaccataacaagtgaattgataacaaattattcaatacgtaaaccaataagaaaatgttaatgtttatgattgttcgttcgcgacaacaatacctaggacatactaaaattcaaacaacaattaaacttatttttcattttgttttttatcatcaagcgactttaaaaataaagcatgtcaattcttatatttcaccactactaattaacgaaaggtaacacattctgataaactttaatcaacagtcacgatgaaaataaccttattatagttggttagcaacagtattttttatgcattaaccctagtttttatccattgtatccaaataaaagcattgtagaattctttctcataaaaaaaaaagaagaaaattttctcattgtcattggcatataggattcgattacaaaaaacaaaaaaactattatcccccaa

SEQ ID NO: 79955 - DNA, 2814 bp, Arabidopsis thaliana landsberg
  unsure (1)..(2814): unsure at all n locations
aagcttgaaagaccaaaattcgccaaataagcggttaaatttgaagaacgtgtttcctttaaatctctaaatactatttgatctgacatactatattcctcgcttttgttatagtgatgcagaacttcaagaacgtaccgcaatatttttacgggcttaattcagctcaaatggatatgttcatgacagaagatagccctgtccgtaggcaagcggaaaaagttacagaggttagtttttctcttctaagccttcttatctgtgcatttacaggtccagaatctggaaacagctaagaggagaacaaatttgcttctctactatatgattcttatctcgtcttttggcatgcttctttgttcaggaaagcatctcgtctagaaataactatttgaacaatggaggaatatggagtatgtccggtatgaatgcagcagatgctagaagatatagcatgagtgtccagatgtacagaggtggaggtggcggcggaggatctgaaagaccaagaactgctcctccagatttgccttctttgctattggatgctcgcatatgctaccttggcatgccagtaagaccttcatgtgtcgataacttgttactaaacccatttctttgctactgtgtttgctctctgcttagctattggatctagctcattttgcttcatttttacttgcagatcgtacctgcagttactgagttactcgttgctcaatttatgtggttagactatgataacccaacaaagcccatctacctatatataaattcacccgggacccaggtcagtagaagaagtttgattatatattgtttgttggtggtagttttctggatttatttagataacccacttgttacttttaacaagctatctattcttttgtttccttttgcttatgccatgtagaatgagaagatggaaactgttggatcannnnnnnnnnnnnnnnnnatagccgatactatttctgtaagtgattttactgaaactatctacatttttcttctgattgtacaaacacgaagttccttttgctgatgtttgtcactgattattgtttcgatagatggtatgcaaataacctatgtagcagctttgattctcatcgcctcactgttttttatttttatgtggcgtattagtattgcaaatcagatgtatacactatcaattgtggcatggcttttggtcaagcagcaatgcttctttctctcgggaaaaaaggttatcgtgccgtacaaccacattcatcaagtatgtactcttctctaaaatatttgaactctaactttgcattttgatcataataaacaaatgcaatacctcttgcccacttgtgtaagcttctaagttttgatggttaatggtgcagcaaaattatatctgccaaaagtaaacagatcgagtggagctgccatagacatgtggataaaggtggtgctcacattcttatacccttctgtgtaattccctcaagtttctttacctctactgtaatgaataatcctctggcaggccaaggaacttgatgcaaataccgagtactacatcgagctgttagctaagggaacagggaaatccaaagagcagatcaacgaggacatcaagcgacctaaatatctccaagctcaagcagccattgactatggaattgcagacaagatagctgactcgcaggacagttctttcgagaaacgggtaactttcaaaattatacttttatattcacccaaaaccaagtgatctttgtgttgacttcattcatgcttaaatggaaatatatctgggtttaggattacgatgggacccttgcccagagagctatgagacctggaggaggcagtccagcagctccagccggactaagatgatcaattcccaccagaaagaaagaggttgaatcctaatttcctagtcactctggaatatgtagctcttacaatctataagcaaacacatgtggtagtaacatacaaaaaagtgttggcaaaaagggaaatatcatcaaaagttatctaggtggaaagttatttgtattatacatgtatctctctagatgcaggtttctcacactctgaaaaaaccgagttttgggttttcgggattttcagaatgaagggaagaatcggttgaggttgtaaggcaatgcgtaaaattcttctgttcgagtatcagtgtggtagactctgaatttctcccaccaatgtcttccgctgtctctcctcaccgaggcatgtccatagctatgagtacagtccaacaagaacgctgccattatcccaaccgttgcagcggaagagaatatcacttgcattatcacgttgaactgtcgttggcaacaccaaatacgaatcaataaagaggacaagacaaaaagaaaatgattgtttctgtttctcttgaacacttacagcagaagtgcgagtgtggacaggtccacgaccagagatgaatagatattcggtgaagtattgcgccacagagagtccaatgaagatggagaagccgaggataaatttattcctaaagctgtttaagttgcagaactgaagaaggccaagtcccgcagaagctgttcataaggtcatctgcttaatctcaatcatatttatagaagctataaggatctgaaagagtttagtttttaagttatacataccaacataggcgaatagaacacagtacagagctgcaaagattggtaaaggtattgatgcaagaacagccccaaacttacatgtttgtcaccaagttttgcagtcgattacaaaaaaaaagaccaattgtttggaatacatccgggg

SEQ ID NO: 79956 - DNA, 567 bp, Arabidopsis thaliana landsberg
  unsure (1)..(567): unsure at all n locations
aagatacccgtaaagcatcgtggacacannnnnnnnnnnnnnnnnnnnnnnnnnnnnnnnnnnnnnnnncattgtatccaaactggatcaatccctggtgcagaacaaggaactgtcccgcgaggtgaaaaagcaaaaacgcaggaaaaacatttttaaagtcggtgccggtttgctggcgggcctgggcatttttctggcagtaagataaactttcattcagtaagtaatatgagatcaggtggcggcaatacggaaccattgattttttccaaccgtgaatgggaattccccggtgtgctcaagtatgagctaattaatggaaaaatacacaataaaaggtcggtggaaaaactggccgccacctatcatattaccgataaaaacatggtgaaggaattcaccgaaagcgccattgttcagcttgcatcagaaattgcctgggaaaacaggtcttttccacgaaaagtttactcacggctggtggagctttaccagaaccaggtaaacctttctcaccgtaccagcctgagcattttgctccagcaatattccaccccatgcttt

SEQ ID NO: 79957 - DNA, 308 bp, Arabidopsis thaliana landsberg
ggcattgaaaggaatagtgaaggggcgatttttaaaaagaggttttggcttattacaccaagcaaaactcacttaaagatgcatcaaggctttgggtcgagttcaagatcaagcgcgtaatcatcatcaacaacaacgtacaagagtcttatcatcacgcaccatcgtgaaactatcatcatgaagcaagacgtgactcgctgttcgctggatctaacggttcttgggacaccaaaacatatcttgatgacatccgtacacagagatctttggaatgtgactgacaattaattataccacataactat

SEQ ID NO: 79958 - DNA, 474 bp, Arabidopsis thaliana landsberg
acttgttctctttctaccatatcatattctgcattgaaatttagtatggggagcagggagaagatcatgtcgcctatctcatccattttagcccgttgccccaggctgagaatatcatcaatagtgagttggtgaacttggaaatggttacaaatatccctgatctccttactacggatgccgtcgatattgatccagctgacggaatcttcatccttcaaatgataaacatcttttatattttcataaactttctcggtgcaggtttcatttttataatcaaatacggtgatttttctatgttccggatcctttcgttcctcttccccgatggttgggttataagccatgaccgggtatcgcttgggacgaaaaattttcggttgccgcggtagcctcttttttccggggggttagggggtgtattcatagtaaatgaattgtgcttttcggtttgaatttatataaaaggag

SEQ ID NO: 79959 - DNA, 624 bp, Arabidopsis thaliana landsberg
accctggctttagtatgaggtcggtgacatgtttccggtcaatgcctttttggcggggcgacccgtgacagccacctacagtgcgcgcgaggacacgttttgtctgatgttcacccgtgagtctgttcaaacgctggccgagcgaagcccggtcttttctgattacctgacccgccgcaccctgcagtttcttgatctttcccgcagggccgttcaggtggcctattcttcacaaaccatggccgagcaatcgcttgaaaagccacttcgtgatttgcaccggggtatggccttttcgtgtttgcctgaaacgccgatcaagcaggtgctggaggtgatgcaggagcaaagggttggctcaatggtggttgtaacgccagacaagcaggtgctgggcattttgacccggcaagacgtgttggcgaaggtggcattggctcaaaaacccttgaacacacctgtgcaagaggtgatgaaccagccagtgcacacgctggaggagcacaacacggcgcaagacgcagcgctgttgatgtcgagacacggcattcgccatgttccggtgacccgggcgggcgttttacagggcatggtttcagagcgggacatttttgccatgcaacg

SEQ ID NO: 79960 - DNA, 411 bp, Arabidopsis thaliana landsberg
  unsure (1)..(411): unsure at all n locations
aggactgctgtcaaaagcttcgcgttcggtattctaggttaatggcctgctcggctgcgcgcttggagcggccgatacccttttccggggagacaccggccacttccaccgtcaccgtgaagcgtggatcatgatccggcccggtgcgttcttcaacacgatataggggcgtcacgccaaatttcgcgtgggcccattcctgcaattcggtcttcgcgtcacggcgggcgccatcggcacgcaccgcccgcttttcccagaacttcaggatgaagcggcgggcggtctccagaccaccgtcgagatagagcgcggcgatcaggctttcgaccacatcggcgcgcacgttcatcatccnnnnnnnnnnnnnnnnnnnnnnnnnnnnnnagtgcggatgaaaagatgcaggtc

SEQ ID NO: 79961 - DNA, 518 bp, Arabidopsis thaliana landsberg
gacgacaagccgcccgtcgaaggggtgcttctcgacgacggtgacctcggcgctcttcatcgaggcccagcgtgccgaggaaggcgacgagctccgggtccgtcgagcccgacagcgccacctcggcgatgtcgtcgggctcgaggtcgtacagggcgggcgtctcgggcagctcggcggcctcggcctcggggatggggaagccgtgggggcaggtctcgggccggtggagcgcgacgaacagccggtcgagtacctcgtcggggaggccgtgctcgaagctgatggccagcttgtcggcctcgttccactggtagccgagcatgtcggccaggaaccgctcgacgatccggtgccgccggatggcggccaccgccgtgcgccgcccgctcgccgtgaacgacaccccctggtaggggcggtggtcgacgagctggcggtcggccaggcgcttcaccgtcgtggtgacggtcccgggggacagcccgagcacctttgccagcgcgccggtgtgggcc

SEQ ID NO: 79962 - DNA, 435 bp, Arabidopsis thaliana landsberg
taccatcgcggcattctgggatatgtggacggcatgcaacggggattgtttcttttacaccgatcggttgaccgggggaaggtggacgatgggccaacgcttcgacctgctgagcgcctaaccggacgcccggatgggcgcgctgatcacaagcatccaggacgcttgggcaagcgacctcgatccacgggagctggcgggcctgatggtcgaggcggcagcccagtccatcgaccaaatcgttcccgatgcggcgcgggcggcgacacggcatgcattcttgcggatgacgaacgccaggatccataccacgttacccgatgagacatcagtgccatgagacataagtgcctaacaacaacgcccgcaccaagacctgagggacggcaaccggccggatactggaaaccggccagcgttagcggctggttgagc

SEQ ID NO: 79963 - DNA, 378 bp, Arabidopsis thaliana landsberg
tatatgtaaaaatccctagacaacgaaacaaaacccagggccttataagattaacaagtgatgcaataactgccggtacaatgaaagaaaaataatgcatacaggatgtgagaaacattacacagccccatagacgacaaaacccacacctgaaggatagctcaacacatcaaaggacatgaaacaaaggagagaggccggatcattaaaaagaacatcatcagaagtgtggacgtaatgatgggaaaaaggatgaagattagtgctaggtccactgaagttgtcgggaaagaaccagaaacacaccaggatataatgtcgccccaaatgggcgttgggatgcaaagaccaacaagcgcacgacgacaccatgttacg

SEQ ID NO: 79964 - DNA, 609 bp, Arabidopsis thaliana landsberg
acaaaatacaaaaaattcttgcaggactagcttgaaccccttttctccatttatgtcgttcagagagtagattacaaagatgaaatggaatctgataaagggcttttacgtatcactccatgtatcgctttcatctccatctttgctagctacagcctgaaaagaagaaaagagtgagtgatagataatgttgtgttggatttaagacaaaaggtacttagattctgaaataaagattagatttgctttggatatatatagatgcagaagttagaggatgaacctggcgtattgagtttgctttctccaaaatcgcgctgatcttagtgtttatgatagggtcagttgttgcagtagccgatgatgtcgttgtcatgaccacaggcctaaggttgaattgctttgatttgaaagaaaccaagaatgtagcaaaagatgatataacaaatcaagcatcagaatataactttctttcacaaaaaggaactatttgcactcacttgtgttcggatttgttgcaagaagtctccagtttcagtctcctttgcgttggcactttgtttctccttcctgacattattcttcagatgggcctatgagaacatatgc

SEQ ID NO: 79965 - DNA, 235 bp, Arabidopsis thaliana landsberg
agtcctcacactccttctcattatgactgtcatcataacacttttgattatcacttccacaacgagcggtgagatcaggagcatcaacaacattatccctgagaggaacatggacaagagtgacgcgaacttagtctctattataactgcaatactactgatgacgacccggacattatcgatggttatgccgggcttggctagctaccactccagcgagcaccttttggaagga

SEQ ID NO: 79966 - DNA, 527 bp, Arabidopsis thaliana landsberg
  unsure (1)..(527): unsure at all n locations
gaaagaaacgcaatcatcaatatggtaataagaaaactaatgtcttttcttgtcttctgttagtttaatctatattttcatgaaaagacaaacgaaagatttattaattttgtacttaaaagaggaattttatgcatatttaaaaatataccgagagaaattattttatatattaaaatatttaatagaataaccaaacaatatattagcgttttgaaatatatatattaagaggaaatattttttacatattaagtatataatggaataaacaaacaaaatttctgttttaggtgatttttcttgaaattccatgtaaattttgcagaaaatattttatatatttaaattatntaacgaaataaatttacgagatattcatgttttacttaagagaaaacaattgttatatttaaaaaattacgtaaatcaagcggataattattatgtatacattaaaagtatctaacagaataactaaactaaattcaatgtttacttaagaaaacaaatatttaccttttaaa

SEQ ID NO: 79967 - DNA, 565 bp, Arabidopsis thaliana landsberg
  unsure (1)..(565): unsure at all n locations
gaaaaccaatgtcgctgattccgcttattattacctggatctggccaaggcgaatgcggcccgcccggtaattccggccacgaacctcctcgcaattctcgccaaaagtactgattcgggcctgctggattcccttgctgcgggttcggacaagcgcgattacctttcctggcaggccaactggctggcggatcagaatatgagacagcagttccaaaaagaggattttaacaagaatgcggtcccgaaagattcgcttttgagcgtctcatccctggcctatttgctcaactatgccacaaaccaggctggattcgattccttaccagccacactgctaccgaaactggcggtaaaaaatccgatgctatcgcaagatttgtcgctcgcggcattgtacccgcaattttatagtggaaacaaattgaaagcattggaaacactcacaagctggactgtcgaggaaggggaaaagagtgatttgtaccataaaatattgnggcattggctgctgcaactcggctcgtacgataaggcgatcgaggcgctgtcacctgttgaggca

SEQ ID NO: 79968 - DNA, 329 bp, Arabidopsis thaliana landsberg
  unsure (1)..(329): unsure at all n locations
aattttgttgtgggntggaacaatttaaagggattttcggtttttacacacgcaacgaggacacggctcatacgacaactatctaaaatgggaaatcgcacccatctttaggtgtttatgaaatttagaaatcagaccagattcctaaatattcaacaaattgctctaggcatttagatatttatgaaattgtcccaagtgtccttggtatttatacatttaccctaaatcctatgacatttacaaatttttccagttcttttgatatttatgtacttgcccatgcttttgaaatttaagaaaatgcaactgatcctttggaaattacc

SEQ ID NO: 79969 - DNA, 181 bp, Arabidopsis thaliana landsberg
tttgataaggccaatcatttcccttgaaccacaggagccggagggggggcctaatttcttagacccggtgataccgaggatacagctcgtaccccaagaacaggggattgtccgacaacgcgcacctgacaaagacaagagcaattggctccagcggaaggcacggtatgaagatagttat

SEQ ID NO: 79970 - DNA, 289 bp, Arabidopsis thaliana landsberg
cattctcgctggtcttcatttgcaatttcttatctggtttcaagatttgccacttatagctataactacagttatttcagctaatgtgtatgaaaatgtcaaaattgtggtccgtcttggtataaagcatgtaacatcttgtttctcttcatagaagagtgatgatattttattttatgtgttgttggcagagtctttgtgggcatacaagcccggatgattcatgatgcttttcactcagaagaagatttggtacttgctggggcttcttcaggtgtgctaaagctgt

SEQ ID NO: 79971 - DNA, 434 bp, Arabidopsis thaliana landsberg
aaatcccaaacttattgtttttcagcaacattggctatacacaagagatcctgcagacaaggaaaaaatattccttataagagaatgttgatggtaactatgttttaaaattgctatggggataaataatacttgtagatacttgtccagctgaatacagcgacgatgaacaaaagcatcttcggggcttgatgagaaaatacgctggggaggcaactgtaaatggtagttcgggatttctttgagttgacgatgtaatcgctcaaaattactgtatctgaagggaagcaaataaatatttaccgatcaagttgcagctatcttgtgccttttacgacgaaaatatatatcaaaagctagtggcatgaataaagaatttcaatgatgtactgatacgattttcccgttttcagaaatgattagaaaaataacct

SEQ ID NO: 79972 - DNA, 478 bp, Arabidopsis thaliana landsberg
taaaaacaaccgattttgcaaatttaagtgattgttgccttagaataatctatggttctgttgttagagatgaatagtagatttctgatgtagtgactagtattacattattaacgcaatgaccatatctaaggatatagacagctatgacagagaggtgactaagctaacatgttaggatcctcggctgaataaactacaacactagccgcatgaaaaatctaactgaacaaaaaatgatgttgtctatgtgtatatgtactactaatatcatgaacccaaattactcaggaattaaagaagtaatatgcctaacacaagttggctttatcgaaactaaacttacggaattgttttatgcatcgatcataatgaatattttagaacactaaagcatggttaaaaaaaaaagtgatccacatgcgattgttatggatagatcctttaaaataaactaaagttgtcgcagagaggaacc

SEQ ID NO: 79973 - DNA, 575 bp, Arabidopsis thaliana landsberg
  unsure (1)..(575): unsure at all n locations
atacttttactagttggaagccaaagatataaactctcaaatacaaacggaatcagtcaaatcttattttcgaataataaattattatgttttgacacaccaaagcctagctacatgtacacttgagtttatgttggtgaacgtcttgatcacaaaatctcacatacacaacattgatgtccagcgttaatgcgttatacccttctagagatctaattggtgacacaaaatctcacgtagtgtaagtcagcagaatgaatgcgtttcagagctaagatcttacatgttcaagccaatgctttcgaggaacggtttttgtagatccaagaaaggaatagaagcttttatatatatgtccagacaacaatattggattttatatatatgtccagacaaaaatattggattttaattaactatatatatattatgctcaaaatggataactataacttatgcatgacaaaatagattcacaagagtaagatacgtttttctaaactagtacagtatgtatgagtgctacaatattatgcgagccatngcaaggtacaacattacatactagtcttact

SEQ ID NO: 79974 - DNA, 105 bp, Arabidopsis thaliana landsberg
  unsure (1)..(105): unsure at all n locations
atatttatcttcgactccgacgagttttttcttttcaaattntatatatataattttcaaaccaaaaaggactttcaaaggtttaaaaccccacacttttttttt

SEQ ID NO: 79975 - DNA, 464 bp, Arabidopsis thaliana landsberg
  unsure (1)..(464): unsure at all n locations
cgttatacatgggatgaactgaaacggagcagtcatggccacattgaagtataccgactttcatgtatgggtcgcagtcgaaggcgacgttgagacggtcggtatcaccgattatgcgcatggacagttgggaaattgtggcttcgttgaattgcccgaggaaggcaaagcctttgtcatctggcgatcaggcggcggttgtctgaatcggcgaaggcggcggacgttgtttnnnnnnnnnnnnnnnnnnnnnnnnnnnnnnnnnnnnnnnnnnnnnnnnnnnnnnnnnnnnnnnngaacgaagatgcgaccgaagaaggctggttttttaagaatcagatcgacgacaagtctgaactggactcggttatggatgcgaacgaatacaaggagttcgtgaaggggcgtcaatgatgcactacctgccgctcaccgacgaggatcgcctggcgatgctggcgaca

SEQ ID NO: 79976 - DNA, 165 bp, Arabidopsis thaliana landsberg
gtctatacatgaaacataccaataccagtacacttactttttgggatggaatgctgaattcaatgatttgaggtcttgggacatattagaaactggtggcggtttaacggatagtactctttgatatggttaggggagaggattggacatttggtttatactcta

SEQ ID NO: 79977 - DNA, 495 bp, Arabidopsis thaliana landsberg
ttgatttattttgctcggcacactaataacagagctactagaaagaggctcatactacaaacttttgtatcagtggatgaagagcgtgcgcatcctactgtgtaatgtgctgtgcatcaatgtttcgcacacctctctcattccttgctctggcagcataaagaacactgacaaacagtaggcaagcttcagtggtgactgtgggtgtgggatgctacgtgcatcggagtgtgtacatagtcgatgcttctgtatttgatgcacaggggccttatcacgactgcggaaacaataaaaggttgaccaagaagtagtggcttaaagtcataccttttgaaatgttgcaaaacgttgctatgtgtttttaaaagtgcttgtgaacgttggtttgcagaacggagcatgtttggttgtgcttcagacaagtacgtttttgaaaaaggagaccacagtttggcctgtgtcgtttgcagggatcactactactgagagtgc

SEQ ID NO: 79978 - DNA, 313 bp, Arabidopsis thaliana landsberg
caacgcacagagctttctgggggcttcagtcgcgactttttggcacacttgccctcttttctccgatttttctataaatttagggttttgtttgcttgtcgtgacatgaatcagcaaaacccagaagaagaagtttctttgggtaataatagcggtggtggaggaatcatcgaagctccagctatagtggaggagaaagaggaagaaggattacagcagaagcaggatgagacttttgggtctaccgatccgattcttgccgtcgttgaggagaaactggtagagaaatcagttgaccgagagaaagaagacc

SEQ ID NO: 79979 - DNA, 385 bp, Arabidopsis thaliana landsberg
  unsure (1)..(385): unsure at all n locations
gttgccggtgttggctttctccaccaccttggcgatggtctcgacgatnnnnnnnnnnnnnnnnnnnnnnnnnnnnnnnnnnnnnnnnttgatctgctggatcacatggtacatgtagcggaggttgatgctcaccactgggaggacaggtccgaagatctctcgcttgagctcgctcaattctacagttttatcagggtcggccgtgacgaaggtgccgagcttgacctcagcagcatatgctatggctacctggtataccgagcgatcttgttcgcgcatgcactgtatgtgcttctcgatgctcaggcttggcttcagaatcgatcaccgggccaatgtccacggactgacgaacgatattgcccaggcagctttcgggcat

SEQ ID NO: 79980 - DNA, 545 bp, Arabidopsis thaliana landsberg
acaccacatagattcatcgctcatgacaaaacacattttcactccgacaagatctatgcagtgttacagctgactggagcttggatgaatctcgatgttgactatgatgatcaagacaatcattgtttttgttcttgacaaccaccacaattgtttgcatatatagtttcctagataaaaggtttagctaaattatgttacgtgatcaaacttcaaagagttatagaacaattctgatggtttgtgcagttggcaatataacccaacttttagttccaaaaacattacaagtttcagctgtgttcagataatttactactcattatttgggtgctagaaaaagatataatgttgtgtaaagaacattgcttcactcttatttcttgtactggaagataacattaaaaataatccaatgccataagatttgaatctcttttaattatcactcttcaattggaaaaatcatatcaatatagcaaaacaaaccccaaaaagtgtgcagccatcaatggcgtggaattagggtttttttcttttctttt

SEQ ID NO: 79981 - DNA, 386 bp, Arabidopsis thaliana landsberg
tagctgcccatttggctccttcccgctgtggcataaagaccccctgcttgtctgcatgacgatccaggccagtgcaggacattgtttgctgattgcgttcacggcatcagctgtaagaacttgcaaagcaccagcacaggcaagtggctgcatgaaagccggacatgcatcaaagttagcagctgcagcgagctcactatcaacaacgtataagcatagctgtgattgagcctggcgacgcggtcaggtcttttgatgtgatgaaggtatcctatgcaaaagccatagcgcatgaccatgtctccatgcttgtgcgctgactgcatgcttgcccggccttcacacccatacaagcagcggcccctaacgcagcaaaacggatgacc

SEQ ID NO: 79982 - DNA, 472 bp, Arabidopsis thaliana landsberg
gatgttctcatagactttcttgttactttgcatcctgagaaaatgatcctgtgatgcttttctttactggggaactactgggtgttttgagcgagtgtatagcgagtctaatgaccaattacctatatgggcgagctgtcatttattatactgggctatgttagagggccgtactttgctggtgcgtatggatccaattaagcttacttgactgtttattaggtgggagtctttaacctttcaatcatcgcttcgcagatagcaactgaactaagacttgtggttccttcttgagcttgaatttcttactacctaggagattttaaaccttacggtatatgaggacatgttatcacaacaatcaacataccggttgagagatggaattgagcaccatctgacgagagtagaacgggtgttcgaacatggatcgatggagcagaacgaatagtgcacccttgtttatgctatg

SEQ ID NO: 79983 - DNA, 2532 bp, Arabidopsis thaliana landsberg
aacgaaaggaagagagacaagtcgtcacacaattttaatgaacaagagattatgcaggactagattatataataataatagaccacgaggaaatattcaaacaattagtaataaaataggttttggttgttagtgtcactctctttggaacgtggccatcgtagtctaccgacatctcacagtcgcttaatgggcaatttcgtcatatcacccatcactaagcggttatgaccagcttatgtcgtcaccaggaccgctacttccatagtgacacctgccggtcataatctttgcataggcttagctttctccacgtggcactagttttgagtttgacataaacaaagaaatataataaaagaatcacataatttgtagtttaagaatttacccagctgtgaattattattctctgaacgcgttgaatttgtgttagattttttttacttcaaatgaatttctctacaaagctcctccaccaaacacttagctgagacagaaacaaattatctactagtaatattgttgtattaattgtttgaaccgacatttttatccagtcaaacctagatacgtgaccaggtgaacttttatagatcacaattaggttgattgtgacatatggcctgacctgataaggttataataatattgctatccattatcacttatatggttggttggacggttcagtacatttcttaaacaattcttgatatatgaaaacgctattacatgttttgataccaaaacgttttgaaagacttattgggctgtacactgggaaaaaaatatatgctaaatgacttaacgcaaagaccttaaaagctatttggaaaaaatattattgggctttggctcgtaagaccatttataatggtataatataattcaacattttttttccttctttttcacattatttttgttatcttttccatctaataattaaacatatatatatattatttttttctattctacaattattttatttaataaaattcaacactctatcctgatttttattaaattaaatgattaagaattaaatagtttattagcaaattaaattaaacagaaatagataagaatcaaatactttttgtttattttatttgagataatatgcaatctaatacgattttctatgtgtccaaattaaaggaaccaaatctctatttatatagttaaaaaatgatgagttttgatataactgtttttaaaacattttctataaaataattgatctcaaggatataggattagataaaaatctgaaaataataatgaaaataggaaatcagaaaaagacacaaaaacttcacaacaccaaaatttaacaacttcattatacttattcaactattgaataaaaaatttaagatgtccattaattgcaaaaaaaaagagttattgaaaaacaacaatataataaatttttaggttaccctgttgaatcaagaaggttatttaagtcaatttattacagacataattggggaacgaataagaagaacagagactctgtcactctcttacactcatcactttctcatctcttttccgcatttcgaagccatggctaaacaactgcttcttcttctccttctcttcatcgtccacggcgttgaatcagctcctccgccgcactcctgtgacccttcaaatccaaccacgaaactctaccagttctgccgcactgacctcccaattggcaagcgagcgcgtgatctcgtctcgaggctaaccatagacgagaagatctcgcagctggtgaatacagctccagggataccgcgtcttggagttccggcgtacgaatggtggtcagaagctttacacggcgtagcctacgccggtccaggaatccggtttaacggaacggttaaagctgctaccagctttcctcaagtcatcttgaccgctgcttcattcgactcctatgaatggttccgcattgctcaagttcgtttctatctttcactctcactctgttttttctcgtgtttgattaatttatttaataatctgtcttaaactgtcacaagtattgttcaaatttcaatgcttttttttaacaaatgtcatggtagagttattaaaagttgataaaatttatctaatatttgctaaactgttaaacctagtttatggtattttttggattaattgtgttaattttggaactaaacttgttttggtagtaaaataggtaggatatactctttttttatataaggaatattaaataagaatgtttttgcattgagattttcaggttataggaaaggaagcaagaggagtgtacaacgcagggcaagcgaatggaatgacattttgggcaccaaacattaacatatttagagatccacggtggggaagaggccaagaaactcccggcgaggatccgatgatgaccggaacttacgcggtggcttacgttagaggactacaaggtgactcttttgacaatcggaaaacactctccaatcatctccaagcctccgcttgttgtgagcattttgcaga

SEQ ID NO: 79984 - DNA, 338 bp, Arabidopsis thaliana landsberg
  unsure (1)..(338): unsure at all n locations
gaggacacatacacagcacatttgtgcaacacccccaacacaancaccacggggggacangagagaaacacgaagacacacaacggaccggacgagagacaaaggcaaacaccaaagacaaacaaaaaaaacccgagaagaagcagacacccccgangaaaaaacaaaaaacgcagcaaaacagcccaccagagagaaaagaagcagaacggcancaagacgatcacaccgaagctcaaaacacagacaaaggaggcaaacctccagaacaaccaccgaacccaaagaacgcacataacccaggggatggcaacggcaatcaagaaaaaacacgaaca

SEQ ID NO: 79985 - DNA, 507 bp, Arabidopsis thaliana landsberg
agcactttttattctatagaaacacctaaaaagaataggctcatgcatgattcgtgtcgattacgaatatctatattttaggaggattattatcaattcgattggatttagcaaaatgttctgaaattaatggttttaccggttacaatattaagtacaccaaactttaaactctgacaactctagcattgaagattagtagtaactctgacaaacgtatcattacttcacatatgacaacgacgtctaaaccacaacagtttaattaatttgtcagtataaaattagacaaaattgaaactaaccgacgacggattagttcctacatgccgatcatgtcaacgtgcgttacatacattaatcatgggctgtatgaaaaaataagttatactgtagatataactaaacaacccaaattttactaatttctcttaacacgatttttaggtatgtattgaaactcaatttctttcaactagatctacctttgaaccaaagtcaacttag

SEQ ID NO: 79986 - DNA, 396 bp, Arabidopsis thaliana landsberg
gtggaagcgctactcttgcttgtaagatcgagacgtgggcaaagttaatgtactaaagaattgtcatgacggagaaagactatacgactacagaacactaggacatcttcttgtggctaattatacgccggatggtgtggcccatgcacataggagatcgggtggatcggattatgtggaagcatattctatcaagacattatttattggttgtaatacataacctcgaagtttagacttaaatcttatatccaaaatatgcaaaaaaccgggttttcaaaattattacatctttagaaacttaaattgttgtccatacaaaaaaattaataaaacttgtagattggatgacttggataccacccgaaacaatttcaccactcaaaatgaaaactc

SEQ ID NO: 79987 - DNA, 390 bp, Arabidopsis thaliana landsberg
acgtagagagatttgtaggaatatgcttaaacatagtttgtgacattctggcgcctatgacattatatgtgttgttcatattatcgaatgatcgtatagatgagaacgaggatagaaccatccttatcactttggatatctcttcaccacttgatcaccattgaatcaacaactatgatacattgtgggaaacgtggcataaaaccaaatgttagagaagggtttagttattcgaccccattgtatatacaatcatgacttgcccacggtgagaagctcccctcttattaggtcattgctaaaatggaaattacatgtgactaagccctgccatatactgatacgttcttgacgcataaatcagcaagtgaatcgtgccaagcaccagac

SEQ ID NO: 79988 - DNA, 549 bp, Arabidopsis thaliana landsberg
  unsure (1)..(549): unsure at all n locations
aagctagacttcatccgacatgttttatgggcacgaagagatttactntttatttttttgnaannnnggnaagcaaggggcaatcattgatgcggaccaacccctcccacacgcatacgagttactcatgcactcgttcatccgtcccaaaataaaagagagaaaaagagaagggaaagggaaaagggaaagaaaagggggaatcaatggaaaagaaaatgtaagccaaatgtcaccagatcccgggcgccgctaagatttggcatggctcgtgagagcttcggtatgtataaaatgccacaaatgccacggatccagggtgtttgccatacccgagatgagatgagatgagatgagatataacgagagataataatatagatagaagaaaaaaaaggaggtagagataaatttcctcttcagcctcccagaaatccgccaagctcttccaacgtgaatatgtcagcgaatagaatggtgagcgtatcaatgaaataaatagattatagcatatatgcgtgtgtatgccttgtaataggaagaagaaaa

SEQ ID NO: 79989 - DNA, 437 bp, Arabidopsis thaliana landsberg
aaaaaaaaaaagaacacattgacatttcctacggagccctttggtctttttagattaattaactacgtagttggataatttaattgcataaacaataccaaacatggatgtcttgtccagctttctcgtttgttacaattcggtctggaatcttgtgtactaaatataggaatcgaatctattgtgatttggtttcgttttacaatttggcgtcaaagaatgaaagtgtttactttttatcttttaaatcaaatgaaatcaagttttgtcttggcaagatttggttcgtttttgctacactttgttcaaagtaaaaagatgaaaccaacttgatttgtttgcagttagtttcgtttctgaatccaatttttcgatctgtccggactagagatccctcgtattacttggcttctcgagattaaaccagaatttctcat

SEQ ID NO: 79990 - DNA, 462 bp, Arabidopsis thaliana landsberg
  unsure (1)..(462): unsure at all n locations
aatttccttctttatttagaacaancttttattttttttttttgcagagaaactaacaacgctggttttttttaaggattacaaccttgcttgccggaaaaattagaagagattggattggtcattgctattggttgagtgtgacttcactctctgacaatatctcacgggtaacatgttcatagttactgtcaagaaacagacaattatttgaactactttaataacgttcccaatgaaaacactatatatttttttttttttcctcgattatctatccttatcctataaaagtattttagttccttctttcttttgttatgtataatggaaatttactttattcaaaaaaaatttactctttttagtttctttgcttttttggtagcaacatttttcccaatggagaacaaggatctctgtctcaaccatttttttagatcattttactctattttattt

SEQ ID NO: 79991 - DNA, 511 bp, Arabidopsis thaliana landsberg
  unsure (1)..(511): unsure at all n locations
aacatatatagagaaacatatgtgagagttatagagacaaagcacatgttgcttctttaagaaaacgattcgaaaacgtaactatttatgactggttatcatcgtccttgtttaattatgaaaacgattctaaaacgtaattagtactgtagtataaatctgtgattgaacatcaaatcaactgccttttcttggtaaatcgcaaaaaagtggatgatatatcaaacaaatgacgattaatggatggctaattatttaaacaacattatgggacaaagtaaatattttgagaatccgtaagatgttatttttaatgtaagacgtctaatttatcgaattatgtatctttctaacaaaattaaactcttaacattttttatgntttttttaatcatatgcatggactccataacataacgaaatccttaattcgaaattaattataaaccctaatatccatcaaatgtttcagtcttctataagtgaaaaaaaacttcttaacaaaacattt

SEQ ID NO: 79992 - DNA, 513 bp, Arabidopsis thaliana landsberg
  unsure (1)..(513): unsure at all n locations
aggtcttgcacgccgaccgcgtggaataccggatccagcagccaggcgttgaaggcgaatatagaaggcggccaggaaggcggcgccggcctggatgcggaagaagaagatgcacatgaagaccagcagggtctgcagggacagcatgggcgtcattccgagaatgaaacccgcggcgatgccggccgcgatttggttgtgtcccgtctctgaattcagcatcttcaaaaacgcgaacagttgcttgagtatcaaggtcatttcgccagactcctcatggtttgttcgatcacgtaatcttgcaagtcgtcggtcatatcaggatagagcgggagcgagacaacggtttcggccattttgcggctgacctcgatattcagcgttcggccgagctcggtgtaagcnggctggtcgggcatcgtgcgcggataatgaaccgcggtcggcacgccgccgcctgcatggcttttggaactcgtcgcgtttcggaacctgcagagtgtactgggccca

SEQ ID NO: 79993 - DNA, 627 bp, Arabidopsis thaliana landsberg
agtgtattaaacttgccttacactattttcatcaaaagaaaaaaacaatatacgagtttatgcttgattaatcaaatgttttacgagtattgtacattttttttgggtttaacgtgaaagtaatttattctatattaagaagaactatatatgtataagggccgaatggttgtaatatgatggacggtacataaggaaaaattggatcagaatgaaaaagctcaacaagtgtgattgattaatacaaaaggaaagaacaaaaattgaatggtgagtttagtaaatgggtatcatcagcatagtactaccaaattttgactatctttttaattaataccggtggttagaattaatgattattcttttgaataaaattttattattaatacaataatctgtatgaaattatttaattttggtaagttttcctctctaagtcgattaagaaaataagtgtaagattaatataagcactccttattaaatttcgttagtagtatgaaactcttgtaggatctttctttcttaacagagattatatattcgctaccttataatattataagcatataactcatgggaagaaactgagtttcataaggaacacatgcttatttttttattcca

SEQ ID NO: 79994 - DNA, 432 bp, Arabidopsis thaliana landsberg
gtgcgggtgattttcacatggcgttagagttgcttgagatgtcggagagtaaagtgttgtaagacagatttttcagcctaacaggatgggtttcatttatatattctctcactgaaattgtgctatcaagaatttcatggttaatgtttgcatcgctgctcatgaaaccagatctgggagatggatgggtcggaataagtcacatgttagtgagatacgcaccttttggcatctatttagaagttctggcagattagaggtgctctatatcttggctttgctggtgcccgatccacttgctttctgtgaatcgttctttctaagcttgcacaaaccctgactgattatgtaatttgaaggattccgtgggagtggtttaagctatgagcattattgcttggattgtaacctgtgtatctgggggtgcggact

SEQ ID NO: 79995 - DNA, 548 bp, Arabidopsis thaliana landsberg
tgtgatgtgatcgataaaaaaacaactagatgagtgactggcgtctattattctaccaatcctagcttcaactatgaacctataaacgaaaatatcatgttctgattaaaaatatatgtaactacaggttacaaacgattatccggacaacagaaacatatatatactgatcatatatctagaaggagatggaaatataggtttttgcttgaaagtaatagtgaataatcaaatattcgatcttatatatacacaccctataatgaatctacaccgagcataggtcatatataaagcctacacaacatttctatatcacattaccgaaatcattcatgaattaagatcgcttatctacatggataagattttacacgcacattgtatcgcttcttagaacattaattaatcatagcagtctgcatgcgaatgtttctctcatgtgcagagccaatcaatgaaacttcaacattgaaagtaggagatgcacaacgtcatgatgatccctcgataatgaacttcagctgatgtgcatcgatcttgttcta

SEQ ID NO: 79996 - DNA, 122 bp, Arabidopsis thaliana landsberg
  unsure (1)..(122): unsure at all n locations
ccggaaagcacaaaaccccggcaccaaaagggncaaggaacangcaaacgaacggaaggcaaccgccaacccagagacggagagngggcggaagcagcgcagccaaccgaagncgaaaacga

SEQ ID NO: 79997 - DNA, 464 bp, Arabidopsis thaliana landsberg
gcatgtcagcaccgggcgctggattcggccatctggtccgtaccaccattcccggtctcgtcccgcccttcgacgagcgccgggcctggccggaactgggcgaggtgcagcagtgccgtcgtgcgcgcagcgggggcttttcgtggctgccgctctacccggccctgacttccgggcgcgccgccagctgacagtttcgcctggtcggctctttatccgatcgcttcccaggatgcggttccgtcgttgcgcatggctggaacagcggcggctggtcttagcgtcaactcttggcgatgaagtagccgtactcgtcaatgacaagctggaccgtgcccccgctgccgttgtagacgctcatcgtgcctgcgggaagcggtgtcatggccagtccttgcgtcgtctcccctggagtgaagttcacgctggaggcgacgggacgcgtcgtgccgtacgggtagacc

SEQ ID NO: 79998 - DNA, 457 bp, Arabidopsis thaliana landsberg
agtggattttttttaatttaatcccacatgcgttgcataaatataaaccaaaacacatctataattatttatgcatagttatattctcaaaacatatgggatgcgtatcatcatcacattatgtataatttggtattcgatcttcctaataaagttctgcacttgagtacgtatcaatattctctagtgtccattctctcattattttccatgatgtcactagacaattaagtatcacaagtattcttataaaataaaaccaacgataactccaccagaaaacaaatatctgttggaataaaaaaaaaactagaatctattattactcaaattgaaatttggaaatattcattttgatctagaatatggtctattaagagaaaattcttatgcatgaatgtatagcatctacttttcttgtcttctagtatcctaacaaacataatttaaacattta

SEQ ID NO: 79999 - DNA, 551 bp, Arabidopsis thaliana landsberg
gacctgcaaagaattgatgcatcgggaaatgcatttttaaattcctttggtaaacttaacgttaagtatctccaggttttcctgaggaataatgcgaaggctgatatatcagcgaatacggagagcctttacacacttacgacagacaataccaatttaaagctggctggttcaactgaggactatacggtaataaaggacgcggtaacaaaattgacccttcaggatttcatagcagcaaaaacgactgtggattctgtcagcagcgaaatgctggcggtattaaagatcaaaaaaggggggcgaaaggcccggaagtgatatccgggtttttatttgacaacctgattccctatgcaaggcacgatgactgtcatacatgaagatactcaggaacatagcattgcgttatttgcgccgggctttcttgacttcaatattacctgtttttgacagaagatgcgctcctttgcattcaatcatggataataacgctatagggtattattatcagcctgttacaacattctatgagtgtatgctgaaattat

SEQ ID NO: 80000 - DNA, 474 bp, Arabidopsis thaliana landsberg
  unsure (1)..(474): unsure at all n locations
gaatcgttcagtccatgtgggagtcgtgctaccacccgatgaggatgatggaggaggagaaggagttgtcnnnnnnnnnnnnnnnnnnnnnnnnngttgggatgatcccaccctataaaagagaacaaacaatcaacactatcagtcaagaacaaaggagaggactatcttgaccaaacaggaaaatatttactaataaatggaataatgaataataataatcaaatcataggaaccaatacacaatataatgtaaatccaccaaaccctttgatctgacatggaggattagaggattgaattgaagaatcgccataacactgatattataaagcattgacctcaataatccatttattaccccagggggaattgaatccaataatcccattggtacttgtnnnnnnnnnnnnnnnnnnactaccttcaccacgaggagttgacacaacctatttcacaccatatgtgattcat

SEQ ID NO: 80001 - DNA, 123 bp, Arabidopsis thaliana landsberg
  unsure (1)..(123): unsure at all n locations
gcccgaactttcttttctatacaaacagcttgcttatcagaacgacgaaaaagaaancnaagataaatttaataagaagaaacaaccaaggaacganaagaggnaannangccanaaaaagcg

SEQ ID NO: 80002 - DNA, 532 bp, Arabidopsis thaliana landsberg
  unsure (1)..(532): unsure at all n locations
aaatcctgctggccgtaaggttcaatgaacttatctccatccctgtattcgtatacatgaacccccggcttcaatcccacaaaagctatctcaaattcccggcgctggttcataaccgttttttaagggcttgcaaaggtagctcaaaacaaccgaattaccaaaggaaatagggttgttgcagggctcccggatctttttgtgtaccagttaagacaggtaaccgcctgcaaattacagattcccgttaccgggaagggtggggaaatatgaaaattattttaaattaatgataaacaaggcgttgcagtttggagaggtcagctatttttgatctatgattcctaaccccgcatagccgcgctggaaacggctgatacccattgccctgctggcgctggcggttacattgctgggattttttcccgtttttattgagaaagtgtattcgcagggcctgtaccctgccatttccgtatactgcgactcattacccggtggatacctttcagcctgngcgacctgatatatg

SEQ ID NO: 80003 - DNA, 496 bp, Arabidopsis thaliana landsberg
  unsure (1)..(496): unsure at all n locations
aaatgagagagcgagagagatatgatgaggaaaccgctaaaaattcattgcaggttgacgcgtgccttaaccaatggttttacttcggtttttttgttacaaaaaatttgttatttatttccatttttgttaaatttgtacaactgtactatgcagtttttaagattttacactttctgctgtaccaaaatattacctatgtccatctgaccgaaattattaaattaattctaataaaaaaattataataaagctgatcaatttatttattttagacttaaactttacaaaaactaatttattcagcttagtttccccaatatgtaaaaacattaatgactacaagtatggtataacagtagcttcaaaatcttaattcatttataccgaagcanaagtgaatatggtaaaccggtgaaaaaaacataccattccgaaacagaattaagatgtttgttcaattatattttgtaagcaaacagattacatcgaacta

SEQ ID NO: 80004 - DNA, 227 bp, Arabidopsis thaliana landsberg
gggacatagatgctcactctactttgcatctcgctcaattattattttcattataatattattatattgcatttcattgaaaaaaggaaaaaagaaaggactaaatctatcgttaaattaggctttaattagatcttataaaaaatcatgtgcaatgtatttcggagaaaaaaacaagatccctaattagaatttggtgaagcatttaatgaaaaattgacaatgat

SEQ ID NO: 80005 - DNA, 401 bp, Arabidopsis thaliana landsberg
agcatgcctggccggccctaaggggcagctaaggagattttggtttttatgcgaggaggccactgtgggggaggggggcgcgctcaatccgactgtccgcccagtggcacattacttggtaaggtcatggcgtgcggtagaaaccacagtctctcctcaaatgggcggtatcgattgtaaccggaagagcagtcgcatcgcaagcatatgttgcttggtgaaagggcattgcctgtgggcgactccggaaaggctgggctatgcccgtgcgggggaatatgttattgttccagatcgtcccggccgtgcaagctcgatgcgcccgtgcgcggtggttctatctgtcctgaccgtcctgatgcttggtgcctgccaaagcacatacagcattatcccgcccg

SEQ ID NO: 80006 - DNA, 543 bp, Arabidopsis thaliana landsberg
aaacttttaaaaatctatttataatttatgtgtttggtccttatctttaaattaattaatctatcatgttacaaattaaaaattaatatatcatgtatgtatactaatttattttgtgttagattctatcttagaaacaaaattcgattacatgggtttgaattgcggccatcagattttatggtgatgatcacttcacgatttatttactaaaaattggcatatgtgtgaaataaacattagctatactacatgtctataaactatactattttctcaaaacagaattgatgtttaaacttctaaattgctaattaaatattttttaattttttttttgcataattacattttaaatatacactcaatgaaacgtgttatcacatttttacttatatatgcatttatatttgtccaaaaactaataattacaaaatgaatttaatatatttacaatataaaagttatcttcattatctagtaaaacaatattgagaacattgatacaaaaccatccaacaatagataatacctaacacgagc

SEQ ID NO: 80007 - DNA, 569 bp, Arabidopsis thaliana landsberg
  unsure (1)..(569): unsure at all n locations
agtgaaagtaaatctagaactcaaaatcctaaattttcgttcggtcggctgatcagcggagagtcacttttcaataatctgaactagcaacttgtcgacttggtaaattgacctaatttttcttttaaaacaacttggttttctaacctaaatatttttccattcataacattaaaattttagaaagaaggccaaatttaaatagactaaaattgtctagtggccaacccctcagcaccatctcgtatactttagaaaataagaaaattgagataaggaatcttcttccgaagtcacgaagacaataagtgaaagcagacaagaactgtccccttgatttcttttgcaccaaattattatggatttgtataagggaaccttacttaaggccagtttagcacaaaagaaggtttttatgcactatcctttttgaactaataatgttagctttttaaaacaacaacttgaaaacttttttaattcttgaaaatacattgcgaacagcagaatgattttaaagcggngaatctcttttttctttctattgtgggaaagataagatattcatg

SEQ ID NO: 80008 - DNA, 551 bp, Arabidopsis thaliana landsberg
aaagcttctttcacgtctcttccttatttacctcattcctgaatcatatgtttatacgttttgtttagatatgtgtttcgtctccgcgatcctcagatctccacgagaaactagtcttggttcctctttgttattctccttagctcgtgtgattactgacaccattagtgaagatttccagtatttccataagtatttcggctgcttaaatttgggttttattcccgattttactcgtatttgtcccatttttcctgtttacattgtatttctctgtgaatcacttatgttcattgctttagattcaataaaattttgagtgaaaaatcctactgagagcgtttacttatggggaatttatcaagttcaagtttgaattgctgtatattgagtgttattaaagagtctcaatgaatcaattggatggctttttgtttgggttgctcaactacctatgagagtacaagcttcaaattgtttagaatgctggtgattctgtttccgtgttgtataaaagcatttattggtgagagagtttggagtacatgtta

SEQ ID NO: 80009 - DNA, 200 bp, Arabidopsis thaliana landsberg
tgaagctagggtaattgagtgtatatccgaagggccgacaatagtcttaaactagacccaactaacaacgctcctccgatggcccaatacattgtcccttatatttttgatctgccatgcacattgtgtgttatgtttatagatttcatacaaaccaacatcataaacatatacagactgatgggccatataatgacata

SEQ ID NO: 80010 - DNA, 425 bp, Arabidopsis thaliana landsberg
gagagtttacgcccacacgcacctaccctaggggagagaactgacataccaaattttagtgagttttatctatactgtttatctatttctggcaaagactagatgttcttacaaacactataggacgagttactgaagaacatgactcatatttgaagaagttctggtgtaggatctgcatggagtcactgagtcaaggaaaactgtcgactcaagctctggctcttatgaacagagtgatatcaaagcaccatgtaggtgatgtttgtggttatcaagaggggaggagaacagaagacatgtctacagcttgaatacaagatgagaagtttgaaggcacaagtgattacactaggtgggacgagaactgctggctcatatacatatattgctgatgagcactggtctcaaataaacaaatagca

SEQ ID NO: 80011 - DNA, 497 bp, Arabidopsis thaliana landsberg
cctcccagtgctgggatcaaaggcctgtgccaccgctgccctgctaataaatcttccataaaggaaattttatatccatactgatactattacactccaggcttttgtcacaacatgacaccaaaaccgtgttatccaaggtcaccaatgactcccccgttgatagattcgatggcgaatcttcctttcttttctgacccatcagtaggattctgccctttattactctgggcctctctttccatcttttccactttctccagttgctcccaggactctagagtcaacctcctgactcactagctcctccctgactacttgaccagacccactttctccctttggatagccccaaaggtagagtaagccccagggttaattctccatgcctctgccctccccctcttctctacctatcccgttccatacaccgcctgttcccctaagccagagtcctaccaagacccaaaatgaggaaagtcgtccttccttttggc

SEQ ID NO: 80012 - DNA, 520 bp, Arabidopsis thaliana landsberg
  unsure (1)..(520): unsure at all n locations
aaaagcggttaaagtttcgacgcgaccgtcagcggcgtgacctgtttcggcctgttcgtgcttttgttctacacgggcgcggacgggctgatcggcatgcgcgagcttggcgacgattatttcgtgcatgacgaaaaggcgcagatgctgatcggtcgccgcacgcgcgcgacctatcgtctggggcaagccctgacggtgcaattgctggatgccgacgggctgaccgggcgtttgcgtctggccatcgtcggcgcagagcagggcaagtcgcgcggtccttcgcgcaatcgaccttcatcgcgcaaatcttcccgcgatgaaggcacgcgcgaaatatcgtccttcaagaaaaagggcgatttcaaaaacaaggataaggctaaaggcggctaaccgtttaagggcaagaagccgaagaagtgattattgccnnnnnnnnnnnnnnnnnnnngccgccgtctccgcccgcagaatgcgcggtcccagcgagacggggcgcacgaagggcatgcgcagc

SEQ ID NO: 80013 - DNA, 523 bp, Arabidopsis thaliana landsberg
  unsure (1)..(523): unsure at all n locations
aaaggatatttgtagttcgaaggatattcgaatgttttatctatcgatctcgattcatttcttggcaatgtatagcttatttggtcaatttgagccttgtatttctgaaattcatagaataaaaatattagtataaagctataataagaagacaaacatatttctatgttaaaaatatatatattttatatatgaacctgaaggtggctaccgacttgacgatgagttaagtttgggtcattcataatctctaatatggattttggacgaaaatctgcaaggtaaaagagagtaaaaaactagtatactaaacttgaataaataaaaacgaattggtcaatgtgaaatataaatcttaccttcttcacccaaaatggagatagcagcaataaacttcatgtgacgctcactattccacatactctnacgtctttccacacttttcttccattcctttcttttattctcaatctcaatagcataactttgattagtatttcattcaacatttgcaatacttttt

SEQ ID NO: 80014 - DNA, 559 bp, Arabidopsis thaliana landsberg
  unsure (1)..(559): unsure at all n locations
cgacgcagctcaacccgcagtcgcgcaaccataatatgttctggttcaatggttgttcagaggtggatgtttcgggtttaaagctggaaggagaggtgcttggcatgaatatcaagctggaaaacatgccgaaaagcaatataaaggttaccggctcgccaaagttgacgattgaatagtgtcggcgattggcaaaaagcccattttttaattcaaaaacggcatctaattttaccattatttgccaaaaccccagtgnnnnnnnnnnnnnnnnnnnnnnnnnnnnnntctgttaccgcgttcagcccgctgcaagcgcagcctgatcccaaacctaaacctgcaccattgtcgctctggtacgaccagcctgccaaagaatggatgacccaggcattgccgatcggtaatggacacgtaggggccatgttttttggcggaacggacgaggagcgcattcagttttcggaaggcagcttgtgggcaggtggtaagggtgccaatgctgagtataattttggtttaaaaaaaagaggctacaaacatctaccacaggtac

SEQ ID NO: 80015 - DNA, 571 bp, Arabidopsis thaliana landsberg
accgactggtaaattctgatattcaaaaccaatctgctatcagcctttaactcaaaaccagatagttaaaaacggcgaggtgggccaacatcaaaaccagtatcaaaacctatggtaaatccagtatcaaagccaacattaaagtttgtagcataagccagttacaaaaccgccagcataactaatatttaaaccggtagcaaaaccatcatctaaaccaacatctaaaaaggtagcaaaaccactatcaaaactgattgttaagccgatgcgtaaatcatcagcaataccgtcagctaagcgaacatcaaaaccgtgatcaaaccgacagtaaaaccgtcaatgaaaccaaaattgaaaccaacatcaaaaccaacatttaaaccaaaaccgaccgcaaagcccgcagcaaaaccaccggctaaaccaaagaaatgaaaagatacggaggacaatgaaagatgatatggatatttttaatatgcatgtaatcattagaattccaaaataaaactagattataatcactaactacgtgttgaagaaactaaaattcttcaatattatttta

SEQ ID NO: 80016 - DNA, 125 bp, Arabidopsis thaliana landsberg
  unsure (1)..(125): unsure at all n locations
cacacagggccaagnnggagccnggagaaggcgagncgcngaagcgangcaacngcaaaaaggccaagngnnngaaacngnaagcnccaaagnnccacaaaanngancnnnggcactncaaaaaa

SEQ ID NO: 80017 - DNA, 421 bp, Arabidopsis thaliana landsberg
ctacttattttgtctttaattagcctctatccataatccgataaactaacaatatctttgtttcttatatgtaaccaaactaaaccatttttaagataacaaaaaattcaataatccgcaacaggccacttatttacatttacattttcactttactttttatttttatttttctgaataaaatcttaaattaagaaaaaaaaaaaaccttttacatcgaaatgcaaaaatgctgaagattttttgaaagcaattaatagacaagtgatttacatttaaatcctagaggcaaaccaagcttgaaggcctgatttgtatttattgtcacccgtattttgaattgcttatagttgattctggacttgcttaactatctagtttatgagtgttgtcgtgtaggttttgttgtctattttttctt

SEQ ID NO: 80018 - DNA, 547 bp, Arabidopsis thaliana landsberg
ggaataagcacatttaactttcaagactttggatttgttgtacagtaagcaatcaattatgatttaggttaaaccggttaattttaggttggttgggatgattaaaccggctccaaattaatattccttttatctctctgctttttacttttgtacgagagttaaagccacactagtcactcgcgctagtctcttcttcgaacgcttgcaatggatcttctcaagactccttcctccacggttggtctatcagaaacattcgctaggttaaagtcacaaggcaaagtaagtaaattctctcttcaatcaccctaaagtttcaatttttatttcctttctctattcgatttgttcttgattgttgttgaaaacaattttgtaggtggctctgattccatatatcacagctggtgatcctgatctttctacaacagcgaaagctcttaaagtgcttgattcgtgtggctccgacataatcgaactcggtggtccatactctgatccattagctgatggtccagcaatccaggttcgatcctcaaaagct

SEQ ID NO: 80019 - DNA, 269 bp, Arabidopsis thaliana landsberg
atttggcataaaggaaagtaaactgttaaaaactatcagagataacagttaccggtgggttattgaagtcttaagagatgagtctctactctatggttgaggggaaacatgatcccagcgcagtgttcattactgggagtcctagtgcactcaggcgaggagctgatagtgcgggaaggaacatgctgcaaaaagtcactgtccacggcagaaggatataccctgaggagttgcagagaggaacaatatctgcgtcaataccaggaacc

SEQ ID NO: 80020 - DNA, 592 bp, Arabidopsis thaliana landsberg
  unsure (1)..(592): unsure at all n locations
aggaaaaaactaaggatcaggaacgagcgcgaccggcaacgcaaaaacatgatcattgtgatcctgatcatctctgtaagcctgatgggtattatcctttttctgatctacaaacaattcaatgaaaaacgcaagaccaaccagatcctggaaaaacgcaacagcgagatcgaggaacaacgccaactggtacacatcaagaatatagagctgttggaaaaaaacaaagaaattaccgacagtatccggtatgccagccggatccaaannnnnnnnnnnnnnnnnnnnnnnnagatcaaacgtatggtgccgcaggcctttatttttttcaagccaaaagacattgtcagcggtgatttttatttcctggaagatgatgggccttacctgtacattgccgttgccgattgcacgggccacggtgtgccgggtgcattcatgagtattgtgggatataacctgatcaaacacgccatatacgagcacaagaaatcggaccctgcctccattattgagcaggtgaacaaagacctggcgctgaccctttcgcaacacgacatgtaaatgagcatcaaggacggtatggacctgg

SEQ ID NO: 80021 - DNA, 513 bp, Arabidopsis thaliana landsberg
caaatgtcaagtttttgattttcctatattgtagaagacatgtagaaaagcaaaagtcttactctggtgtcaaaagaagcacgcggagtggtcacacccaccacccatccaagagctcttcggctaatttcatcctttaaatacaattcaattgcagtttacctaaaataaaaagaagaaaagcagtgatagaaaaaagtacatatttttaatatgttttttctatctttattggataacatgttaaacttgattggattagagtgtatgcaatctttctcttaacttctatcttctatttagctagatttacactcacaatccttatgcgacaatgacttaaacttaaaacaaaatcttcatcgcacatcttcttagaaccagtgatgagtacatcacatttcctcctctctggtttttgctctaaacctttatagtatgtacatgggagatcctctaacagtagaacagatctcccattggtatggttttggttttctcttttttttatta

SEQ ID NO: 80022 - DNA, 238 bp, Arabidopsis thaliana landsberg
  unsure (1)..(238): unsure at all n locations
gacaccccgcacccccncaacacacggcaaganaaaaccaaccgggcgcacgccaacccgccgaggacacgcacaaaccaaaccaaccccgcccgacgcgctaggctaacaaaaaaaaacccacngcaaggaaagccaacaaatccaaaaccaaaaaagcaaacaagaccccgccaagcaaacccgaagccaagccaaaacctcaccgcgagaacccaaaggagctaccaaccaccaa

SEQ ID NO: 80023 - DNA, 346 bp, Arabidopsis thaliana landsberg
  unsure (1)..(346): unsure at all n locations
acaagcacagccgagcaacacacgagcacgggcgcncaccagttaccacagcaagggaaactaagcggcctaggggaggcgacacgggacgagaccgacagagaaaacacagatgacccgaagggcaaagacacaccagccccacgaagagaccagacggaaacggaaaggcgcaagaaagcaaccgaacctgccagaggagccgcgggaaccccgcccagagcacgacaaaacagaaggtcaccaagggcaccgacaccacccgcacaagtaaaccaaaaacactcaagtgagacacagagaaccgcctaaagtgccgcaagcaaagagcatgctgcaggaccac

SEQ ID NO: 80024 - DNA, 422 bp, Arabidopsis thaliana landsberg
acgttctcgactggcagcttccagttggtgcccagcaccatcttctgcgtctcgccgtgcagagccgatccgcctggcgtggcatccagccagacatcgaggaaaaacttggcatcgcccagatagtcatcgaggctgggcgaattggcatcccagcagccgaacaccaggcccttatactcggccactttcgtcaccgggatcaggccgaacttggtgcggtcgagttcgccgaaataggcctcggtttccagcggcaccccggagagcgcgccggacggggaaaaagaccagacgtgatagctgcaggcgaaagcgcgcgcattgccgcgatcggcgcggcagatccggatgccgcgatgggtacagctgttgaggaacgcctcgatcgacccgtccttctggcggatcacgatcacatc

SEQ ID NO: 80025 - DNA, 428 bp, Arabidopsis thaliana landsberg
  unsure (1)..(428): unsure at all n locations
tctgnccgatgccgcgaacttcggtgccctttacgatctcgttgtaatgaatnnnnnnnnnnnnnnnnnnnnnnnnnnnnnnnnnnnnnnnnnnnnnnnnnnnnnnnnnnnnnnnnnnnnnnnnnnttccgcgcgcgccgacgtcgcgttcgacatccttggcctcgtacaccttcacgggaatatccagcttggtcatcagttcggtgacttttttaagctcgtcgaattcggctttttgagcggccagcgagaagcagccttttttctcgaattgcagcggctcggggtcgttgccgatcacgtgttcttgcagcaagcgcannnnnnnnnnnnnnnnnnnncagatgtccggcgcttcgtccaggccatgtttggtgatcaggcggatgaaatgttcgacggatccgcacgtgatgaagccggcg

SEQ ID NO: 80026 - DNA, 375 bp, Arabidopsis thaliana landsberg
  unsure (1)..(375): unsure at all n locations
ggaaacgcgctccagggttattccgtttcattgagtgcagacggtaatacggtgatcgtaggtgcgaacgttgatattaaccgtcagggcgctgactggatttatataaggagtgggggcatctgcacacagcagggtaacannnnnnnnnnnnnnnnnnnnnnnnnnnnngcacaacagggtaggtcagtgtcgctgagtgcatacggaaattcagcgacagtgggtggtcccagcggagattatgactcacagggtgctgtctggatatatgtgcgtagtggtgtgaattggtcgcagcatggcgcaaaagtgacggcactggcaggtggaggaatctcagctcaagggagtttattatccctgcgcgcagac

SEQ ID NO: 80027 - DNA, 296 bp, Arabidopsis thaliana landsberg
aacgggagacggagaatcagggaccgacgatttagagggagcccgagaaacggcaaccacagggaaggaaggcagaaggcgcgccaaaaacccaaaccggacacggggaggcagcgacaaaaacaaacaaaaccgggcacaaccgagacgggaaaccggaaggaggacaaacaaaaaccccgaacgaggaaccaccggagggcaagcccaggagccagcagacgcgggaagaccagcaccaacagcgcaaaaccaaggagacgcagacaaaaagccccgcagacgaaccccgggaa

SEQ ID NO: 80028 - DNA, 166 bp, Arabidopsis thaliana landsberg
tggccgacaaaaaaaaaaaactaaacccaaaatccaggttggatacgtcatcatttccaatttccctagtcaatgacatggtgggggcattttagaaaactaatagcttgagatgacgtagctcatgtgtgtggtattcaccagagaaatggtcgtcgctgactac

SEQ ID NO: 80029 - DNA, 408 bp, Arabidopsis thaliana landsberg
ggacaccagtttcagggataccggaagacaacctgtaggtatactgggtgtagccggtggaccccctcacatttatttttacaaataagaaaacatcattttcgaatgagatgtcccacgacactacctagcttaccatggtttctgttcaacccagcctgtgcgtatattgaaactgtgagtacgtgaggaaccacccttgcccatatggaaaacgcggatctacctcaagaagctgtttcgttgatctttatgaatataaaacagacgccactggcgttaatatctattcagatctctggctgtttaacgtaagagagaactttatgcttgtgggggacatgagcgtaaagatcctccaggtctgcgcgtgacttagagcacgagtcatattttgcagaactaaat

SEQ ID NO: 80030 - DNA, 536 bp, Arabidopsis thaliana landsberg
  unsure (1)..(536): unsure at all n locations
agccctccagccgtaccccgccccggcgactgataaataggctcccgggtgccaagatatagtggcgctttcgggtgcccaaattatgtcagcacgctttcccatatacccagccgtccaccaccagcgcgttcgagtcgcgcgcgccgccaatgccattccaagtagtacttgttggaacatgaaccacaccgcgttccccgatgatacccttccgcctgaaggtgtatacgtatttcgcgagtctcttttttttccgctatcaactcttgggcgaagccctcgaggctatgcattcacaatgggaaaagctatgaagacaccgaatggtcgagtcagggccatattcgcttgtgatcgaaacaaatcgccgccaagcgtgttagtcaatccagtacatcgcacttggagtcgaaggactggttataagttctcagtcctagccaaacagtcgttagatagaagttcgtgggtcttgagctatacactttcggngcttaaaggcgcaagatctgcgccttggaagccttactaca

SEQ ID NO: 80031 - DNA, 479 bp, Arabidopsis thaliana landsberg
ggctatgttctgtctgacttggaagttttcagctttaaacaacaaaagcacgtttatagagatagaaacaagacagggtataaaaatgtagagaagaagcagcataaatgctggactcatatacaaacaagcagaaaagcgcgaaaatatgtgataaaaagcagctttttagggttcttggtttttctcaacactgggaaaccaaaaaccctttattcactgaccctctgtctctctctctctttgttactactataggttaacatgaatgatccaatgagttatgtaaaaaataaaaaatctttccaatcaaaaaaagttaatttcgtattttactcattcccaatgttcctttgtttcatgaggttggaattaaaataatatttaagtgattaaaccagtttttagactgataacaaagataatgtaacaatttcaaatatctctgccatcatagtcgagttcttaacgtacctttt

SEQ ID NO: 80032 - DNA, 131 bp, Arabidopsis thaliana landsberg
aagggaaaccaagaacaaaaccggccaccaggaccaaaaaacaaacgacaccaggcacagacaaaagaaaaagccccacaaacaaacaccagcctaccagaaacaacgaacacacaagaaaccaaaaacaa

SEQ ID NO: 80033 - DNA, 507 bp, Arabidopsis thaliana landsberg
atatcaagagatcatgagttttgtttctttaaaaaggtaaaaaaaaatcttgaaataatcatttaactttttgatgatctatttttattttgtcaaattttaattatatgatgatgccaaaatatatataagacacacagattagtgtaaatgtgagttatgtttacttaatttttgtatctaaactttttttttttttttttttgctaaagaacctaaactttttaaacgctcatcaaaatggttagagatcaaatttaagtttgatgtaaatgtgagttacgtttacgtaatttttgtacctaaactttttttttttgcttatgaacctaaacttattattcaaacgctcatcaaagtggttagagatcaaatttgagtttaggtattttggatagtcataaaaagcatggttggatagctttttcaaatttcaaattagtaccacatatatggatacaaattaagtaattcatgcatgttagcaatatgtaaagttaaatgacc

SEQ ID NO: 80034 - DNA, 532 bp, Arabidopsis thaliana landsberg
ccggtaccgtccgagggccggcggcgcatgcaggtggccatgaagggcatcgtggatctgtcgcagcatgtcgactcgctgagcgtgcgtgccgaacgagaagctgctgtcggtgctgggccgtgaagtgacgctgctgtccgcgttcaaggcctccaacgaggtgttgcagggcgccgtgcagggcatcgccgacctcatcaccgcgccgggcctgatcaacgtcgactttgccgacgtgcgcacggtcatgagcgagatgggccaggcgatgatgggttcgggctgtgccgacggcgacgaccgcgcgcaggcggcggccgaggcggcggtcaacaacccgctgctggaggacgtcaacctgtccggtgcctgcggcatcctggtcaacgtgacggccggtcccaacctcaccatgcgcgagttcgaggaaatcggccgcgtcgtgcacgatttcgccagcgaagacgccaccgtcgtggtcggcacctcgctggatccggaaatgcatgacgaagtgcgtgtcaccgtc

SEQ ID NO: 80035 - DNA, 406 bp, Arabidopsis thaliana landsberg
tactattaaaggacctacagctaagctctgttgaacgtagttctttctaatatattccattgatgattgaaacgttcatttgtatccacaatgcttgtggctcttttgtttttttagatcctttgacgcaataaatgttggacactacgagtctgctaaagatactgaagtattttggatcagtttattgtaatgatgctagatcagtttatgaaagttagagaacgatatacttggatcatctatataaccagacgtatatgaaacgtagtaaatcaggagacatatgaattgtttctctaccactatagcgattatcgatggcgatatgatattctagcttttgatacaatttgtggagagatataaagtcttgtatcagaacactataccctctcagtctttt

SEQ ID NO: 80036 - DNA, 520 bp, Arabidopsis thaliana landsberg
  unsure (1)..(520): unsure at all n locations
atggttttggtaaaatccccgaaatcgccgctgatatnnnnnnnnnnnnnnnnnnnnttgctatgctgggcactggtattgaaattggtgagcagggatagtaagagactgtaagctgtaagctgtaagccattggctatatactttaagctgtaagctttaagctttaaggtgcaagcaatgtgttgtaagcggtcagggctgctgcgaactggattctttaagtggtacatggagtgcttttcaaagatgatacccggcatcagcgggtgataaatttcctgacagccgactgcccggcagggcccgagggcgcgatcaggagaaaagtggcggcatttggaagatcagtccggccaccggcgggcaacccggcaatagcattgcgagcacccaaccgatggcggataatgcgtttttcggcatcgtacctattttttcacgatccggaaattgtctacgctgccgttgaaggaggcgatggccacgtccggcgtgttaaacagcactttcaggtcgg

SEQ ID NO: 80037 - DNA, 191 bp, Arabidopsis thaliana landsberg
  unsure (1)..(191): unsure at all n locations
ggggaacaaaatgagggaccacgaataataacagcaagcngagagcaggacaagggggggggagcacaaaggcgcaaagggcgagagacacgcnagggacacacaaaccacaaggcggaaacaacaccaaggagaccaacagaacgcagacacggaggggaaccgcacagaagacaaccgacaaaaaaaaa

SEQ ID NO: 80038 - DNA, 347 bp, Arabidopsis thaliana landsberg
acacacatcacagtcgtctagctgcccaaccaacagaatcatgtcacgtggttgaagaggcaaatatgtgttggtggtgtttactggggcggtcccgaccaaagtccgtatatgacatcctttctcagttgtacaaatcacatttcattataattcatttcatcgaattatctatcttttaaattttatcaatatctttttttgttagaggcgtggaccgtatgaatgtatgatagtatagaaatagaaataataacgttggcattgttatttaacaagcaaacaaatgattaggttgattgatgaacaagcaatgactagggtgatgaattttaattgctactgac

SEQ ID NO: 80039 - DNA, 395 bp, Arabidopsis thaliana landsberg
  unsure (1)..(395): unsure at all n locations
gaacccacccaagacgaggcaacaaccagaaaaccgctccctccacgcggcccaagccgaaanancacaaggaccacctcaggccggaccaccgcacggcaaaccanacccgaaanccnngngaacgggcacnaacccggaaccacgcgcacccaaagcacccnnnaccaagaccaacggagcngcacgcaaacccaaagcaacagcaggaggaaccaagaaacccccaggacccacggggaagaacaaagaaccaccacccccaccaagagcacgcaaccagccaggcaaccacaagccgcgacccgcaanaaaagccgggccacccgccgaagacaaaagcacaccaaacccacaggaagcnnccccacgagcagacagcacccaccgggcaa

SEQ ID NO: 80040 - DNA, 444 bp, Arabidopsis thaliana landsberg
  unsure (1)..(444): unsure at all n locations
ccccgtcacagaaaaaacaacgaaaggcnccagcaggagacccaataacccccccccccggttccggaagcagacgaggaccacagacgcgggccacggtgcgagaaaagccggggcaaacgccgaaaaggcccaaggggaaangagggaagcagcccgagccgaggcaccgcccacccaccagaaaaaaggaaggagccaaaagaagcgagcatgcctgtcggggccgaaacgatggtggactgagcactgagcgagggagagacacacgaaacctcaggacgaagggcacagagaggatgaaggacaagaccagaagatcccgtcaataggggggaaaacgacacaagaaccaaactagaaccaggagaaccacaaagaatacctgacgatacgtggagcaccgacgcaagaaccaacgcgtgaagaccaaccacacaggga

SEQ ID NO: 80041 - DNA, 399 bp, Arabidopsis thaliana landsberg
  unsure (1)..(399): unsure at all n locations
ggagcagcaaacgccggaagggagaatggccccccccacangtggctcctcccgagccgggcgatcgagaccggcaagaaaaccgccaaacggggagaaaacccgccgggcgcggggacagctgcaaaaccggcgccacccgggaacacacaaatgccgcgacctacatatagtgagggggccctccaaggaagcatgcacggagagcacggaaggatggcgaaccatgactgagcagagaagagggaaacaaccatctggtgggaaccacacgggagcccagccggcaagatggaagaccccagcgcgacgggcgcgaaagcctcaccgaacaaactagcagctgcttccctccgacgatagacatatgatagcaggaccacggacgcgagatctaaa

SEQ ID NO: 80042 - DNA, 169 bp, Arabidopsis thaliana landsberg
cacagcaatgacaacttcggtgttagcactcgtggtcaatgattcaatccaatgataatgcacgaggtgttaaactttgcattctgcgattgtgtgcgacgcgcgatatgttatcctcttgtccaatcggaactcattccccattgtccgcggaaaaacactattaaaa

SEQ ID NO: 80043 - DNA, 458 bp, Arabidopsis thaliana landsberg
  unsure (1)..(458): unsure at all n locations
agaaaataaatctttttcttttatagcccatacaatacatcaccccatatannnnnnnnnnnnnnnnnnnnnnnnnnnnnnnnnnnnnnnnnnnnnnnnnnnnnnnnnnnnnnnnnnnnnnnnnnnnnnnnnnnnnnnnnnnnnnnnnnnnnnnnnnnnnnnnnnnnnnnnnnnnnnnnnnnnnnnnnnnnnnnnnnnnnnnnnnnnnnnnnnnnnnnnnnnnnnnnnnnnnnnnnnnnnnnnnnnnnnnnnnnnnnnnnnnnnnnnnnnnnnnnnnnnnnnnnnnnnnnnnnnnnnnnnnnnnnnnnnnnnnnnnnnnnnnnnnnnnnnnnnnnnnnnnnnnnnnnnnnnnnnnnnnnnnnnnnnnnnnnnnnnnnnnnnnnnnnnnnnnnnnnnnntcactatatctataaaatgccattcgaaagctagaccccttctttatgtggtataactac

SEQ ID NO: 80044 - DNA, 572 bp, Arabidopsis thaliana landsberg
attcctaaaataattcataccggtggcggtgagattgactttttttaagttagaaacaaaatacatatcatgtgaagaggacagttggactgtctaaagtatgactgatgtgaccaaaaacaacaatatcaggcccatgggctgagaataacctaaccctcgtgtttttttgtgaaaaaattgtgagcatcaaaaacgaaagttttgaaatcaacatggactcatggagaagactgtaagcaaaagaaacaacggttagatcatgtatgtagactggatcatgttataagattcctccttgattatcgagccgagaagaatcacataacatgacccagtctacatacatgtactacctatatcacgttatacattatgactgtttaaacaaatcacgttatcatttcagtaaacttcattgttttatctgttattgacactaattccatatgatattagacatgcaattcggatgcacgtcacaccaaatgtattaatttagttggtttaaacaaatcattttttaaattttaaccaggttaacaatatacagtaagatgtctagctaatat

SEQ ID NO: 80045 - DNA, 570 bp, Arabidopsis thaliana landsberg
agccctgacccccgccctgcgacggcaccagcgtgccggtggcgaccagcgatgcgccttccgtgaggtgcttgatttcgctttcgtaattggccagcgtggccggcgcgaccacctggatgggtgcaaagcaggagccgtcgctcacgttgacaaacgacaacccggccttggaatcgcggcgcgtgcgcacccaacccttgactgtcacctcgccgccggcaccctggccggcaacggcctgcttgacgctgaccaccgccatttgcgcaactccacaagaggcgccgaagtcgacgcccgaaacgaaaagcgggatgatagccgatagcacgagttgccggtttcccggttgacttcatttgttgacggcgccatgtcgggatttgtcatgaccatccagctcacccccagtgcgcaagcgcgcatgcacgaatttcttgaacgtcgcccgaggcggtcgcgtgcgttttggcgcccgacacaccggtgttccggtttagctacgtggtcgagctggccgatgccgtggccggtgacgacaccgaaatcaccgccgatggcgtgaaa

SEQ ID NO: 80046 - DNA, 289 bp, Arabidopsis thaliana landsberg
aaacggggccgctacaagaacaacaccgccaggaccccgggccgcggacgcagacaaaaaaacaacccgcaccaaggcaacggagataacccaaagaggaaggcccgatctacgacagaaacccgagggaaggaggcgcgaagagtaagcaagccgtccgccaccaagataaaggcacccgccagtgccacaaaaaacgaactaacgggatgaaggaccaaaaccctgacgacaaaaaagaaaaggcagggcaatggagcagaatgagacgggaaaacaaaaaaaaaaa

SEQ ID NO: 80047 - DNA, 191 bp, Arabidopsis thaliana landsberg
  unsure (1)..(191): unsure at all n locations
aacgggcaaagacaaaacaaaaaggaaccgacacgaagaggcaacaccgcgaagccaacngaaaggagaaaagaacccaaagaaggagggaaggacaacaaacaaagaggaagacgagggacaacaaacaagggagcagacagacacaagagaggacaagagcccaggagagacccgacacagacaaaaaa

SEQ ID NO: 80048 - DNA, 283 bp, Arabidopsis thaliana landsberg
  unsure (1)..(283): unsure at all n locations
agcgacgcaggactaaaaaggggcccatctgaacacaaacggggggggacaggcgangacgcngacagacccaccaanggccaaagcgaaaaaaggggaacacgggggagggaacancacnggcananagaanaaaccacaaaccggcacaccanncgcaaccacacaaaaaagaggaaaaanaaacccaaccaaanagagagaagaaaagccaaccaaagcaaccgacacacacgaaaagagacgnacggggngngngcaacnaancaaacgcgacgacagg

SEQ ID NO: 80049 - DNA, 235 bp, Arabidopsis thaliana landsberg
  unsure (1)..(235): unsure at all n locations
ctgcagggcaagtagtgttgcaacccagcggtgaattatagcaacgcggggaaacgaacgccggggaaagttcaaagcaccaaccggcnnaaccacggncggaaaagaacaaagccaaaacagaaaggaaaaacagacgaaaaagaaaaaggcgcaaaggacagagggaccggggaccgacaggacaacgaaagaaccgaaaaaagacacaaaagacgaaaaaggccaaagaaac

SEQ ID NO: 80050 - DNA, 299 bp, Arabidopsis thaliana landsberg
  unsure (1)..(299): unsure at all n locations
agaacccaaaccgcaactttaccccccccccccagtgggtgccnccnngggggaagagaccaagagggagactcaaagggacgacggcgaaaccaccaaagcnnngagaagcaggaagaagcccggcgagacngaaagagccgaaaacggcacgcgggcaagggcaaganngaggacaagaacanaaaccgcaagcggaaccgaaaagaccaggaggcgggnccgagaaagaagagacaaagacaaggacgcancggggcgagggccggccccacgggcacaaaagaagaccacaaaag

SEQ ID NO: 80051 - DNA, 207 bp, Arabidopsis thaliana landsberg
  unsure (1)..(207): unsure at all n locations
aggggggacggaagagccggagaccaaaagacccancccccaaaccaccacaacaaggaaacaccacaaacgcgagaaagaacgaggcgcgcngaaggaagcaagacgaaaaaaaggagaagaaaccaagacaaggacggcgccaaaagacgaacaaaccccgaagccgganggcaaaaggaacgggcagagcccaagcccagacga

SEQ ID NO: 80052 - DNA, 99 bp, Arabidopsis thaliana landsberg
aacacaaaagaagccagagagaactattaagatgatagcgggagatcaatcaaccaaacaatcaaaatagcgagacagacaaaaaccatgaccaaaaaa

SEQ ID NO: 80053 - DNA, 315 bp, Arabidopsis thaliana landsberg
cttcagcatagaacagcttttgttgtgagataaaaagtaaaatagaacgtccgtggaaattgatatgaagtaaaaaaaggagaaatagtcgcaggactcatatacactaattcgactgtacacacaggcaaatgtgtacgataagaggtggtaacgatggttaatacaggatagtaacgggaccatatattaatgtatgatttaggaagaaaatgctatcgtattaaaggatcggatcggcatatttgcgacagtggtgccaatcacgggaccagagtatatattcatgtatagaggatattagattacatgatg

SEQ ID NO: 80054 - DNA, 566 bp, Arabidopsis thaliana landsberg
  unsure (1)..(566): unsure at all n locations
ccaaaaatggaaaaagaaaacaaaaaagaaagagattagatttactttgccctttggcatagaaatggagagggcaaagagaggagcccaataggctagtgtccaacacatgccattacctacaaaaccttacctgtcccttataattagctatcttctacctctaaccaactttttaagtactattatccatacatacgtacattagtacatgcacataagtcacgtaacaacactattaatatacataaacgacgtcactatgttattatattatgtcttaatggaattatcaaacatcattagtttagtcacaatattataacacctattggctcaataaactgcgttaatggatacaaatacaatcaatcattcaagatattttacgtaccagttatcgtttactttttttgatattttttttaatcattttttttcttttaaaatagtaaattcatatcgtttaattaatatcngttttaaccgttttaaatagtaatttagtgagaaatgagattataggtttggacagagaaaattatattttatttaaagactacaaa

SEQ ID NO: 80055 - DNA, 498 bp, Arabidopsis thaliana landsberg
ctaacatttaataaataccgtttagacacttaaatttattgttattttactctgtaagacgtacaaactaatgtctctgtttagcctatcaacacgaagcaattatttgatttatcttaattaaatttgattcggctgacgattggtaggtgaagagaatgtttttattcgttactctatataataatttgaaattataagaccacctaataatatatacttctaactcttctcttctttatatatggtttcttgatttgatgatataagcatacgattatttcagaatcttttagtttcatttttaaactgtttgttacggtttgcgtccgcctcgtgcattcgtctttttccatttgattgacttcgacgtttggtgcattgattgatgtatgacaaaaaaaaaatatgacaacaatagtctataggcaacaagtaacactaatattattgaacggataaaaaacatgaaatatgataaattttgatcaaatcata

SEQ ID NO: 80056 - DNA, 412 bp, Arabidopsis thaliana landsberg
ctcggtaccgggcccgaccgcggcccgcgccgcgttcacggacgctgcttcggtctcgtggagcttgacgccggcgaatcccgcggccgccgctcgctcgcactcggcggcgacgaccgccggctcgccgagccagagcaggctggcgtaggctcggaccgagtcacggggccggccgtcctccggttggccgcccagcaactggctgacgggtactcccgcgcgcttgccggcgatgtcccacagcgccaggttcagggcgctctgcgcgtagatcgacgggccggagcggccgaagagaacgagtgtgcgttccagcatcgagctgatgccgtcgatgtccgccgggtcggcacccaggacgaggggcgcgatcacggtgtccagcgccgtccgggtcgcggggatgatg

SEQ ID NO: 80057 - DNA, 387 bp, Arabidopsis thaliana landsberg
  unsure (1)..(387): unsure at all n locations
gggcgacaaggggangctaaaaacatgcacacaacacactgaacacgcaccagaaccggaaccccaaccgganggagaaggcccacggcgcgcaccctggacagaaganacaaagccaacgacccagacgaacaccggaaacaccaccaaaactcagagaagcaacaagaagcgnggcaacagacctggagacaaagaagacatgcagccatgagtatgatggagtgaaagaaccaaaaccggaaccagaaatcaaaagtctcagtcctgtcagcatggagacagagaccaagccagtgcagcatacgagcttcagactcaccataaaaacctagacaagcaggaggaagcatagaacgcgccctagagaaacaccgactagatgtc

SEQ ID NO: 80058 - DNA, 541 bp, Arabidopsis thaliana landsberg
  unsure (1)..(541): unsure at all n locations
aattcangaaaaatctcaaaaaaacgagcataaatgaagagacgaaatttacaccgataataaacagaaagaaanggggacgnttgggcgccctactgccaaagcccccaacnaacccacnnnnnnnnnnnnnnnnnnnnnnnnnnnnnnnnnnnnnnnnnnnnnnnnnnnnnnnnnnnnnnnnnnnnnnnnnnnnnnnnnnnnnnnnnnnnnnnnnnnnnnnnnnnnnnnnnnnnnnnnnnnnnnnnnnnnnnnnnnnnnnnnnnnnnnnnnnnnnnnnnnnnnnnnnnnnnnnnnnnnnnnnnnnnnnnnnnnnnnnnnnnnnnnnnnnnnnnnnnnnnnnnnnnnnnnnnnnnnnnnnnnnnnnnnnnnnnnnnnnnnnnnnnnnnnnnnnnnnnnnnnnnnnnnnnnnnnnnnnnnnnnnnnnnnnnnnnnnnnnnnnnnnnnnnnnnnnnnnnnnnnnnnnnnnnnnnnnnnnnnnnnnnnnnnnnnnnnnnnnnnnnnnnnnnnnnnnnnnnnnnnnnnnnnnnnnnnnnnnnnn

SEQ ID NO: 80059 - DNA, 460 bp, Arabidopsis thaliana landsberg
tttgttgttttctatccaaagactaggctttggagtaaaatactaagctcatatgagttagacctaggattggagataaaactgttgagtttttgtatacaaaatactaaaatttaagggaaatgtaccatatgattgattatttcttgctcttgtttgtctgatagcacaacctatgctaataaattaagatttctagtttcttccgtatttcccatatcaatttagtggatatcttgcatggtgtcaaagtcagataaattaaaaaaaaatagctggtgtgagtgtcattcttctatacaattctaaattgttctgtagaactaatagattatatgtgcgggtcggggaactgtttgttgtttttgaggtgcgaagaagtcggcggtcagaagcaagaaaagaggaggcacgtaagcaagaactagaggtacacagaatactcttgggagataatttg

SEQ ID NO: 80060 - DNA, 561 bp, Arabidopsis thaliana landsberg
  unsure (1)..(561): unsure at all n locations
cgtttttttttggactaaaacataagtagaaatttgtatatttcgatctcacagtttaggaacgatgatcaagatatttaattagatccttcacccccactaaatcctcattatagaaagtaaacaatttctaatattgtccaactacagtagttgatgttttaaaagtagaggagaaagagtataaaattaggagaaagattgtgtacattgtgtaaactacaagacaatcaaaaaggattcagtcttctactaatagttgggctttaaaggtagaggagaagaaactnnnnnnnnnnnnnnnnnacatacccaatccatttgaaaggcccactaaaattttattattgtatcactgggatatttatcgatttgtaaattgaaatataaaataaaacaatatgtaacgtaagttttaaataataataaatactaaaggattacaattttatatttgatggctaaataattacaagatctgagtgagaaatgtttgtttgtgagaaagaaagtgaaaaattaaaggtagatagccgttaagtccactgcatgtcgagacgt

SEQ ID NO: 80061 - DNA, 283 bp, Arabidopsis thaliana landsberg
gacatatggatcatgtttggtttctagtttcagtctttagataaagaaacactcacggctaaaacagaaaaataaaataaagaatgtgttgctctttgttgtatgggacagcatcaattttaccaactgtattgtaaagacaagacaatggagtaacaggaagatgatgttggatggagaacatgcgttaagaaggagtaattacgacttgaagaagatgaccagtccaaaatttgatcaaagactccttgagctgtggaaagtacgaatttcagagcccctg

SEQ ID NO: 80062 - DNA, 573 bp, Arabidopsis thaliana landsberg
  unsure (1)..(573): unsure at all n locations
ataaaattgttaaattgttatttttcttgtatttagcgtaaattattcatatcttcttgtatcacttgagttggagctcacgattatgttgtataaaacacctcttataaaaatatcaagctcaagctcaactgtaagattatctatagattacttactgaatgaaaaaaagattatccattgacaacggaacataaacagagaaatgagattattaatgcaaatgtttgtatatatatataatgcgcactaaaagagagagagaagatgaaatgtttgatcgtcatcactcatcactattatagatagaaggtataagttccacctttaacaatgagtacttgaaggattataagagcatatggaatctaaagacagtactgctagtctactagagagccctatacgagagttttaatcctcatcacttggtcccatcaagaaattcttaggttctatgctacattccttagccaattccatgacataactcggatntcttacatttattcgncgatatanttattcgtattctcttactcatcacatttttttttctttttgtattaaaaa

SEQ ID NO: 80063 - DNA, 530 bp, Arabidopsis thaliana landsberg
  unsure (1)..(530): unsure at all n locations
taatataaaaactaatcagaacgaaaaaaaactaacatgcaaaaccaagaaaaaacaatttttgatacaaaaaaacgattagggttcgtagaattaatgaaatgattaggtgatttatataggaacgtcggtggctctgaccaaaaaaaagaaaaaacctacatcctccaagaataaaattagggtttatcaagtgggctgttctttgggcctattttgacctttttgcccagtaaaaaaataattgaatatggacctgaaccaacaaagtgtttttcaattttctgtagacgtacgagcctacgaggtggtctatagagaatgattcctcatcgtattactgatcagtgatcaatgtgacaaatgtgtataatgtatatgttataaataaaaggtaaaatccaagaatgtataaaattaagtattgcattggattatgttttttctcgttatgtcgaaatgaagaatataacaatgtatgttttgatgactntttcaaacactccttgtataccagtaagggtgggcat

SEQ ID NO: 80064 - DNA, 605 bp, Arabidopsis thaliana landsberg
tggggcattcaacgagacaccaacccaggtaagaaggtgtaagaaagtaataagaatcttacttgtctacatcaggagtggccagaggatcatacaactcttgctctgcacctgctactccacccgccgcagagttcgaaatgtcttgtgtaccctctccctaaaaaattgtctgaccatgaaaaacaagaagtatccataaattgcaaaagcttttataagttttcatgtctttacctgttgcggatactggggatagccatatccaccatatgcgtacacggatggatcttgagttgccccataagcatatgcatcatagccttgcccataaccataatacccattccactgattcggatctgcttgtgtaacccaaccatcctataacaaataccaaaggtcatcaaccacattcagtgaacacagcaagtataataatgtcatacatcacatcagtaagcttttacctgtcctggatttttactccaagagatgcgaactgcttgttgaccaatcacttgtccctgcattctttgaacagcttcttctgcagaaggcctggggtcaacaagggcagatattcaaatgctagtcaacggagc

SEQ ID NO: 80065 - DNA, 497 bp, Arabidopsis thaliana landsberg
tttccggaacttcttaaccaagtggaaactgtttaatatatatgggatgaattacttatactctgaatttctctatttcagggaatataagaaaaagagatggatgagatctttgatacgctaccgggaataatattgaacaaaatgctatcaaccaaataagacatataactacataagcaaatcatacaatttggaaagtgtctttagtttcattttaaatcattgtaaaatagcataattgtagcatgattatcgtgaaaatccaagttgaggccatatttcaagtgcggtcccgccaaaaccctattgaccttaatcatggcatcttctacaccaaactcgtattgtttatctttccccatgtctatttcactcttttcaatgtaacctaagttgattttctaagtatgaaacatcaattacatcctgcacaaggtgggtgaaaactaggacatgcaaacagggtgtagacgagtagttcctagtttttatca

SEQ ID NO: 80066 - DNA, 575 bp, Arabidopsis thaliana landsberg
  unsure (1)..(575): unsure at all n locations
cgtaaattccagttttcttggagtgatttacaggaatcaaatttgnnnnnnnnnnnnnnnnnnnnnnnnnnnnnnnnnnnnnnnnnnnnnnnnnnnnnnnnnnnnnnnncagcaatgcagagtggcgcacgggtgcgtaacgcgtgggaatatgcccttgactacggaacaacgtcgggaaactgacgctaataccgtataatgtcttcggaccaaagatttatcggtcaagnnnnnnnnnnnnnnnnnnnnnnnnnnnnnnnnnnnnnnnnnnnnnnnnnnnnnnnnnnnnnnnnnnnnnnnnnnnnnnnnnnnnnnnnnnnnnnnnnnnnnnnnnnnnnnnnnnnnnnnnnnnnnnnnnnnnnnnnnnnnnnnnnnnnnnnnnnnnnnnnnnnnnnnnnnnnnnnnnnnnnnnnnnnnnnnnnnnnnnnnnnnnnnnnnnnnnnnnnnnnnnnnnnnnnnnnnnnnnnnnnnnnnnnnnnnnnnnnnnnnnnnnnnnnnnnnnnnnnnnnnnnnnnnnnnnnnnnnnnnnnnnnnnnnnnnnnnnnnnnnnnnnnnnnnnnnnnnnnncatgt

SEQ ID NO: 80067 - DNA, 182 bp, Arabidopsis thaliana landsberg
  unsure (1)..(182): unsure at all n locations
aaaaggagggcaagtacacccgggggaacttggaccccnccgacccaaaacggaccanagggccggaccnaaaanncnacgcaaancaagagcgagaaaaggaagnncngcaancagggacccaaacncaaggccgaagcccanncagcagaagagggaggcacccagggcggaacgggcca

SEQ ID NO: 80068 - DNA, 367 bp, Arabidopsis thaliana landsberg
cataaaaaatcgttcgacggaatcactagttcatgggcgaatatgtgtatggatagaggatgggcaccgctactccagctacaacacatgaaatctatcaacagcataggcgagaaacgccatctgaccatcaacaaagtaacatggcatatcgacccgatagtaggaacggtagatgatgaacagagccgataaatgacagaaaacggtcggaacgggtgttaaaacactacaactcaatagataacgaacaataggagctaaacgctttgtggcgctacacaaacaaactatagagacactatcgcagatgcttgctgaaccaaagcaggtatatggatgtatgatgcaccgttgggaaacaaag

SEQ ID NO: 80069 - DNA, 352 bp, Arabidopsis thaliana landsberg
  unsure (1)..(352): unsure at all n locations
gnnnnnnnnnnnnnnnnnnnnnnnnnnnnnnnnnnnnnnnnnnnnnnnnnnnnnnnnnnnnnnnnnnnnnnnnnnnnnnnnnnnnnnnnnnnnnnnnnnnnnnnnnnnnnnnnnnnnnnnnnnnnnnnnnnnnnnnnnnnnnnnnnnnnnnnnnnnnnnnnnnnnnnnnnnnnnnnnnnnnnnnnnnnnnnnnnnnnnnnnnnnnnnnaaaccagcacacgaaagaggcgcggcacaaaagggggagaaagcacacggagcgaggacggctgtgcaggagaacgaaacggacacaaaaccccatctaagaaacgggaaatgaagcaaccgccaagggagagcgggagaaaac

SEQ ID NO: 80070 - DNA, 527 bp, Arabidopsis thaliana landsberg
cctttctattaaactcttacaacaaaatcaattaagttattagatgatagtctttcattttccaaaagtcttattattataattaaacaagatatgatggactattagtaccgtttgaggtgtgtagttatgaatttaggctagaatcgatttttcaaatgcttcagaaaaaatcttgctctccatattttaaccatcggcagattcttttagtggtaatttttttttattgaaatggaagctgaaattagtatggaatttgatattatattccccggttaacaaaaataaaataaaggagtatccaaattttaataatcatcaatcaaacaatcaagtcttaaacaaaaaaaaatattattttattataacaataaatgagtagaaaagaaacactacatagaatattgagagccacatttaatctgaaacaataaaatttactacaaatgcattacttaatataaaccagatagagtatcaaacaacatccggtacgagtgatctattttttcatctctagagac

SEQ ID NO: 80071 - DNA, 456 bp, Arabidopsis thaliana landsberg
tcggagaggctaatctctttatatcggccggtctcgagagaataacatcatcgacagttacacgagagtttttcttattaaccgctctgccctggacagtttcttttaagattgaccaagaaatcgagctgagagagtgagtctccatgctcgagtaagttactcgctgagtcgtgggcacttgtaaagggaaaaagatgtattacgagatccccaagctgttctgacacatgaaaggaggcttaagccatgatgcatattaatgatacaaactagagttcactagcattagattattaagctactaaccaaggtaacgctgtcgagatggctgcattatgtgctacaacgaatcatagaaagcgaatacgaaattgaatgaggcaagcccaggtttctacacctcggaggacgaaacaaagctggtgttaatgcctgtttagcattgtgggatcc

SEQ ID NO: 80072 - DNA, 211 bp, Arabidopsis thaliana landsberg
tatgtatgttaacgccatttaaagaaaaaaaacacttaaatggctaaaaaagtattaaacactaaaacaatttcaagaaaaaaggtttgaatatttaaagctagaaaaattgtcgcgttaaaccttattaatagccacacctaatatacaggtaaccacttgctcaaatattataaatatacatattttgtcgcgtaaaatgtcatgatac

SEQ ID NO: 80073 - DNA, 364 bp, Arabidopsis thaliana landsberg
aaataattactttttaatctttccatatttcatatttttcttaaaaacaaaaacaaaacatatatattcatgcacatatgatagataatatcaagaaatttttaataaataaagtcagatataatatatgtgacaaataatctaaaagaccgatcacatgtagtcaaagttttcaactataaatatgcagagatgacagttataagagtcgcacaaaaaactgcaaatcttcacgtgtcttctcttttgttacatcacatgttctctcctttcttcacctctctctacaaatttaatcctttctcttttcggcatccctaggccctttgggcctttcttaaatacattctttaaaaaacaaaag

SEQ ID NO: 80074 - DNA, 295 bp, Arabidopsis thaliana landsberg
catttcagtcatttgtactatcaaagctgcccggtccattggtagctctcttgctctccctccaattctctccccacacctttgcttccgccaccgccctctctctatctaaatctcggttcctcggagtgcctctcgatgatctcccaacactcgccgggctccctctctgtgattcttgcccttccaaatcgcttaatccccattttctacctgacccgcctcctgtctcgctcccaccttctgatcctgcattgacttccctcaccatatcccttcttctgtaatcaggaga

SEQ ID NO: 80075 - DNA, 450 bp, Arabidopsis thaliana landsberg
aaaatccgatcagtgttgatgttaaagtcactaacaatttttacttttcaagaagagagttttttcgcgttttccagaaaataaatatttataaaagacaaaaccaaataatattgtttgtcgttactttaaaatttaactttcatagaataaaggataacaaacaaatcttttgagttaacggaacctatcaaaatacgtggaaaatggctaaattgatggttttgatctcactaattaaagatatagatatttattaatactatataatctattaaagacataaactaagataattagtgaagcgctggttatttataaaagaattgctactttctcatattcgtgtctaaatatgctatagcattatcttcaactttatcgtgaaattttttaatgataatacatatgtaatactttctaccatttatcggactaatatcagatcta

SEQ ID NO: 80076 - DNA, 459 bp, Arabidopsis thaliana landsberg
gtggcgaggacatggaagttgaccatcatcattcctcgtctcaacttgtgaagtagcacgatgctgaatctggcaggttcttgtcgccgctgtaactcgtccaaaggtaatctaccgctcgttgtatggtctaccgatgaacagttgaaggacatcaaatcccgcgtcaagagtttggcgttgagcgggtcgcggatatcgcaatcaaggttccgttccaagtatttggcgcaactgtccgctagcgaatgcgaacgctctatggagtctctctcctgggcagcgaaagatatccgtgatcgaatcgcaagcgaattgggagacaactcggacgtaatgcttgtgtcaggtagggttaccgatgccgtacgtaagataggtaaaatcaactccgctaggcatccgttgttgctgcacccatctggtgaggagcataaaggttagtcaagattcgataga

SEQ ID NO: 80077 - DNA, 295 bp, Arabidopsis thaliana landsberg
  unsure (1)..(295): unsure at all n locations
ccaaagcagaaacagagccgaccacaggaacaaaacaaccgcacctaaagcagaaagactattaccggtgacacacggccgaacgcagagaaggaaaggacacaaacccgcacagaaccccccggacgcggacggaccacgaccaaaagccgaaacccaaacacgcccaagcgccaaggaaaaggccacaaaccacgacaaccaaaggacagagccaacaagaaccccccacgggagaacaaaccaaacgaagaagaganccaaagaccgacccagcgaacaaaaccaaaacgaa

SEQ ID NO: 80078 - DNA, 555 bp, Arabidopsis thaliana landsberg
cccgccgtgtcgtagggctgctcgatatgcaggtatgtgtcgatttcccggtcgctcaaggggtgaaactttcagcgggtaacgatattgctggtgacgcggcggccgccgtcggtcacgcaaaggccgctgtggaattcgacctgccggccgcttagccggcgcagttgtcggcgggcgttgtcgaagcttcccggcttgccgatgggcgggccgccggccaggcaggcgacctggtccgaacctatgacgacagcccccggatgcctggccgccaccgtgtcggcttttgtcctggacagccggcgcgccaggtcggccggggtttcgtgggcttgcggcgtttcgtcgatatcgggcgattcgacgtcgaagggtatgtgcagtcgcgccagcatggtgcgccggtagcgagagctcgatgcaggaacagttgctgggtggtgtgcctgttggttttggctgcggggagtgcggcgtgctttaatttgacttgaaactgccccgcacgttatatttaacgtttatttttgcataggccattggccattttgt

SEQ ID NO: 80079 - DNA, 482 bp, Arabidopsis thaliana landsberg
aactgaaatttagaaaaaggtgtagaagtggaatataaatgtgctaaaatatcggggtctttttcattttatttggcgatgcaaggcttggtgtagtagtaaagtctcaatcaaagagaggaaaggtacactctttgttcggcatttccaatgacggaacgttacttactctcccaacgtccattacttctttggggtctcacatgttgatgtggccgattctttaaccaacctacttcctaccaacatatgtgttactctttcacatatgtacactttattctaaacataaagattttgtagctatacggctctcttttgcttttagtcaatctagatgtcagaatgagtctgacacatgccaagtctttatcaaaaagaaacagtctagttatgcaaagtcttcgcattataaacgcagatcaattttagatgatctatctttataaatttgttcccgagcacagtctcgaactcgtatg

SEQ ID NO: 80080 - DNA, 599 bp, Arabidopsis thaliana landsberg
  unsure (1)..(599): unsure at all n locations
gacgagacacaccaaatggtccaagatgatattacaagtctaatttcgttgctcattccacttctaatccaactccattctattttggtaggcaattttattttttttttgtcaacagagaaaaaagttttgtcgctttgtgtatctatttataatttcgattattgttttttctttttaatttgggtaggaattatacgaagtgagcaaattaaagtcaccgtgaggaagagaaccgaagaaaaagactgaagggtatagttttggttattgtaacaaagtctaacttgtagcatcactcctctttgataagttttattaatctctcttttttaacgagttacttatctaactaactgttttaccatgcatacaatgatgatttccgtgtatatataagcccatgcatgcacctaatgaatagtcgattcataaatgttttaaaaaatctgaagattgggagcccatttacattactggcccaatttgtgaaacctgagtttttttttttttgtcaaccaaatggttcataaaaatataaaanataaaaattgtgtggaagatgaacatattacacngctcgagaaagtgcaatgtcc

SEQ ID NO: 80081 - DNA, 365 bp, Arabidopsis thaliana landsberg
  unsure (1)..(365): unsure at all n locations
gtaccgctctgcatctgccatggcattacaactggtaccggtagtacagaaacccatcgaggaaaaatatctcctgcagtttgattacacgcaggtgaatgatgtaatgaatatcatcaaacaatacggatgctctgtacaatcgcaggagatgcaattgttctgnnnnnnnnnnnnnnnnnnnnnnnnnnnnnnnnnnnnnnnnnnnnnnnnnnnnnnnngccagatgtatacattggatatcaaaaaggcaggataagtttcccgcacattcgcatacaatacattatgacttgcctgtaagtttataagcgatagttcccaccatctccttcaggaacagcgcccagtcatgcataactccc

SEQ ID NO: 80082 - DNA, 488 bp, Arabidopsis thaliana landsberg
  unsure (1)..(488): unsure at all n locations
tgccggggatcggcagggcgatgacatagccggtgccttcgctgttgagatgaacgtcttccaccgctttggcgcgcatgtggacgccggtggagccgatcgtcgagcaggcggcattgcgcccgctgctgcgcacaccggcgccaagcgccgtcatcaccatgtcgacatagccgaggcaaacgggcgttcctgcaagcagtccgcaggccttggcggcctccgccgtcaggggatggctgacttccgtgccgtcgatgatctcaggcagaagattgcggcgacgatcgaggccaagcgcatcgatgacgacgctgtcgtattggcgcgtnnnnnnnnnnnnnnnnnnnnnnnnnnnnnnnnnnnggtcggtggcgcggatgccggtgagattgagatagagccagtccttgcagtgcagggcggcttcgcttcgatcgagcagttccggcgcgaccttgtccatatgggcgagctgagcgccctgc

SEQ ID NO: 80083 - DNA, 445 bp, Arabidopsis thaliana landsberg
caaaaccgcgattcatcgccaccaacgggcatgctttgaaattaaaggcggttttttgcggtggcggaggttttacccctggttccatgaacgacctggcagatccttttacaggggatttctcttactccatccctttgatggatgtggatggttacccactcactttaagctacaattcgaatgtgaatatgaataccgaggcaacttgggttggtttaggctggaacctggatgtgggatcaatcagcagggaaatgcgcgggattccggacgaattcaacggggatcaaatgcttgcaacgacatataagacacaaaatgacgagacaattgatgggtttaaagcgggaggttacctttctgttggttttcctaaggttttttttaatcctaagatccaggttacggcactttggggaaattattaccaacagcctacctt

SEQ ID NO: 80084 - DNA, 184 bp, Arabidopsis thaliana landsberg
atagagattaccataagaaaacctcgtagttttctttagatgcaatccactaaggttgtgatagtaccgattgagctgaaaaatacactatgtactggaactaagccattttggcataagatgagcagtgaagcaaattcttgaagaacgtataagccacttagattactggctacggttattg

SEQ ID NO: 80085 - DNA, 553 bp, Arabidopsis thaliana landsberg
cgatgaatgcggacatagtgatcctcctatgaaggcacagaaccggcgcgctcagatcgggcgttgaattctcattcgcttcggcgggcgctggccgcatggcttcgcgcgccagcatgaccagcacccatagggcgatcatggcgatctcgataatcagcgcctgcgtgaaccagtcgatcgggcgcacccggtcgatctcacgcggccagagccagtggccgaacgcataggaaaaacccgccgccgggcctgttgcgatcagcacgcccaccgcgaccccgaacaggcgcggcagacggaagcgcagcgcaatctgcgtcacaaaaggcacgatcaggcccaggatcaccgtcccggccagcagattgccggtccagctaaagacgcgcagcgccatgtcgccattcaggaagctgccgaacggccccagcacgcccagacctgcgcccgcgatcagcgcaaagccgaaggcctgcgcccaccagcgcgcgttgtcgaattgtccccggcagtctctgatcttcatgcgcggacgctagcaagatcggac

SEQ ID NO: 80086 - DNA, 611 bp, Arabidopsis thaliana landsberg
  unsure (1)..(611): unsure at all n locations
atctatgatttaatggaacaaactctgaaagtgtatgnnnnnnnnnnnnnnnnnnnnnnnnnnnnnnnnnnnnctgaggcaataatggaagggaggtacgcgtcagaaggatggtttatgaaactaatggagagtagccatagattcttgacaaaagatcccaccaaagctcatttattctacatacctttcagttcaagaattcttcaacagaaactttacgttcatgactctcacagtcgtaataatcttgttaaatatcttggaaactacattgatctcatcgcttccaactacccttcctggaatagaacttgtggctccgatcatttcttcaccgcttgccatgactgggtatgtgctttaaaaacctatatagtttttgtttggttttacaagctagaataaagtgtatctttcaaataaaaccataatttaagtactctaacaaaattcatttgttgatcatatataaatgttagcatcatttgtactctagccttgtttgcatctagtttgcatccattttatacatattttatgaaaaatggaagaaaaaaaaaactaaaagaaaattcttaatgagattttaagaaaaaaataatttcaca

SEQ ID NO: 80087 - DNA, 581 bp, Arabidopsis thaliana landsberg
  unsure (1)..(581): unsure at all n locations
gtgtctttacattacaaaatatgcatttgtaagaaattaatacaatactagaatcttctcatggaaaatacccacgatgaatgatatgtccatgtcatgagctcaatgtttgagcttcctttcaatttcagttttagaattttagcatataaaagtttctaaatttttaatgtaatcactaatttgattgagaaccaacttttatcattgcacaaaagaatacaaaataaaaaatattttaccttgtgttatgtaccttcaaaaaccaagtaagtactatatgatgttttactattttctgaatttcgtatttgaaatcaaatttctgtcaatagtaattatttttttttgaaaaattacagcaattataaagtcttttatatattagatacttattattaccaacatcaatatatatatatatataattaatattctgacaactattattaatcatactctctatgttttttattaatgtatattaaaggattttccacatattatgatatgattatagatgcaatatttttgtgatttataattttggattntttataacctcgaatcatctgtattta

SEQ ID NO: 80088 - DNA, 139 bp, Arabidopsis thaliana landsberg
tctgaccgcagaacaatcggaaaaacgaaggttcttacacaaccgggggggaacacagaagcatgcggggacaaaagaggacacccaaccgaggcacgacagcaacgcagaacttgggaacaacaaggcaagacgctat

SEQ ID NO: 80089 - DNA, 580 bp, Arabidopsis thaliana landsberg
catttctatataaattcgatctgaaatctatggctgccaataataaactcaaccaaccgtatgagttcataaatctgcctaatacttacattcgccgaatcatcgagtcctgtggtgaaattttcgttcaaacttgcaacgtaatttatgtctacgattccacaacgttggaaataaaggatgtcattcagactgaatgccccatcacttacttagagctcaaccagaggaaagtacttattttggggatgataaatggctatttaactatatctagacgacattcgaaagacaggtgttgtacccgctgtcgtccgacattgaaaaatttggcccaaaatctgataaacgctaaccttgtctgtcaacatcactttatacaatttaattaataaattttttataaagtcttattaataaaaattactattacacaaacctaacgtgtatttattttgacaaaatctccacagatatttatgccttaccgcataaaaatacgcaacacttggcaagacatcaagtttacgcccgaagagttggtaaccaaaatcaacggcaaagataagaaaaaacaact

SEQ ID NO: 80090 - DNA, 439 bp, Arabidopsis thaliana landsberg
ctttttgttgcgtatagagtccaaatcttcttcatgagggaaaaaaagagagagtcagatcttcatgggaggtatactataatagacattatatgttggacatatttaagtaacacgtaaattaagggtaagtatactgtatttgataattaactgtatatataacctcgagataacgcacccatgcctgaaaaatgtgtaacttactaacttagtaacttgtgttgtgttgatgctcgagactgtcgtttatagactaacataaatggatctgggcttccaaaataagtccaacttttattgggctttgtatttgaagctaaacggtgacagtgtaataatactaactgctgattcattatacgcgacaaccaaaatcgaaaaactgcctcactttttctctcttacactttgtttttgcttaatccttctaatatag

SEQ ID NO: 80091 - DNA, 415 bp, Arabidopsis thaliana landsberg
cagatccaccatgcggcggacgacttcggcataggtcatgtcctcaaggtcaacagtctcgccagcggcgttgcggccgaaccacaccttctggaagtcatcgttgagcttcttgatgatgtagttgcgctgcttcttgagctcagggacacgcttggccttgtcgagcttgaagatcttctgatccatctcctgccagaataggacaccacgagtagccagcttgtggatgggctcacccatctcggagaggacagtgatgacaccaccggcagcacccttgtaagtcttctcccactcctcgttatcgacaccgggggcatcagcgatggccttcttggcgttcttggaagtgtgagcctccttggcgatcatcatgcggctaccgaacaaacaaccatcgaagggcatggga

SEQ ID NO: 80092 - DNA, 536 bp, Arabidopsis thaliana landsberg
acagagcagcggctttgcaatgctgtcctggtcagaagattcaaggcgaacaagtcgctgctccgcgcactcggtcttgttgtagaccgagcgggaggaacgctcctcgccagagtttcgcgccggccattgagacggtagtcatgccgaaagacccgcatgccaggtggtagcgccgccgcgtacatgttgtcacggtcggccaccttgaatatttttcatgaggcagggagagactatgttaggtcactcccactcagtcatcaacaagaagaaaaagctgttttaagtcaaacacttgaaacagtcacctccgccgataccacgaaaaactccatgacgagccaatcggtctgcttaccagtgactcagtcatcgttcggtttcttttcgtttattgcgtttttcgtttatttcgaataagataactcctgaaattgctacataacccaggaattagccatgaccaccatcgcccagaacaagatgatgctgcccgctgaacggaaagtcaggccgccgtgcaggggcaacgc

SEQ ID NO: 80093 - DNA, 446 bp, Arabidopsis thaliana landsberg
tcatcgcatgcacccatgtcaaagggtgctcattttgagaagctcctaagtttttacacccgactcacgccaggggcatctgctcgatcgttctctgctcattactggtgatcgttgcaaagaaagaagtagtctggttctataacggacttgcagcgatcatatcaggcttgctagttcctgtcgcatcatatgacaagggctactttacgagaccaggagttatatccaaattaacgccataccttggagagagatcttactcactatatctcacacatataatctgcatcctcatagttcgcgagacccttgtacgcttctatggcgctctaccaaaatacggcgaaactccctatcttgtgggcatcgctgcaataatgctgatgcttctcctcagcgaggccttgtacaaaatttgagaaaccccccctcaaagaaaaagg

SEQ ID NO: 80094 - DNA, 378 bp, Arabidopsis thaliana landsberg
caaaccttgcttccagaaggtgcactcttcttaggtcggaaagtcttctgatttctattaagaaagtttaaaaaaggaagagcagatgttattaaacgtgatcgggtcaaaacggctataagttcaacataaaaatttcagtctttatcaatatgtaaaccctatgtatcgaaatcattgcatatgacagggatgaatcactaaaaactcgtgttttgattccatttttattgcctacaatcatgagttctgagaaacaaaacaaatcttatcgatcaccattgaatatgcctggtaaaacatgttccacatctggggaacataaatatgaagttaagaaccatcataacaatcattaactgggctccaactaaagta

SEQ ID NO: 80095 - DNA, 368 bp, Arabidopsis thaliana landsberg
caagaaaagacgaggcctccaaggagcggaagggacacgcacacgcacggacgacaggcaacaaccgaggggcgcccagaggcgagaacccacccacccgaacaccaagaaccggcagaacgggcaacaaaacaagaaccacacgagggatagcccagaccaaggcggcacaaggaaaacggtacaaacaaaggccaagacccgcaaaccaacaaaccaaacttccgagaccaaatacaaccaacttacaatctgcgagaatgcatccggacgaagcaagcgaaccaccacagaccctgcggccaggacacaaggcaacgcgaccaagcaagaccgaccacaacaaaaaccgatgaagcccgaggcca

SEQ ID NO: 80096 - DNA, 560 bp, Arabidopsis thaliana landsberg
  unsure (1)..(560): unsure at all n locations
gccgtttttccataatgatggtgctctcagccccatgaaatacgtcgcgacttctctgataacccaatgcgagggataattttaaagctgtaatggtttatggcacgcgtacaacgccagtgccggcgcggatagcggttgcatgaatgacatccatcaactgccgaccgacaccgcttttttggtgagccggatcaacgaaaacacttctgactacatcaccgtcgagaccggcagtgcctataagtttttcgcctagcaaagctacgaagactctccgcttagcaagttgtgaatcgcccctggtttcgtagacacctccaagcctcataatgaggcccaaataggaggtgccatgagtcgtcagcgttaccccgaagaattcatgatcgaagcggtcaagcaagtgaccgagaaaggcaaacctgtcgccgatgtcgcccagcgcctgggcatgtccgtgcacagtctttacgcctggatcaaggtctacagcaagccccaagagcagcgtcagcaagacgacgatcatcangcccaactgcgcaagctacgcgctg

SEQ ID NO: 80097 - DNA, 632 bp, Arabidopsis thaliana landsberg
  unsure (1)..(632): unsure at all n locations
tctgtctgtgtgctcggtcctagttgcttttgctccacggcttggattgtttccaggcgtatggggaatttgagactggcttgaagtttgctacataagctcgcattccacggcggcgacatccaacaatgactcgatggaaatggggccgcctctttgtctcggccatttattgttcacaactgcgcttcgagcgtgttcggggcatcacccatctactctcatcaaagcaagtatacagggggaatgagtagctgagaggtggtggcactgttgacacagtgtatatgttttggttcccccccttcgtttactctgtctcaaaattccacaactttcgcccacactttgactaacactgaagcgccatcaatcggtctgcattatattcgcaccacctcccttctttatctgcaaacatcaccacctcatatcccaaaagacattactcaaaccccataagctccctcctccgtacattttcaccccccaacctccaatgcgctcgcccccgaactttatagaatgatattacaccagacagacgggcagctcaaaagacctgccattatgcgggagaccccaccaacccttcngnataatatgtaagtagcgggtaggttagctagtct

SEQ ID NO: 80098 - DNA, 529 bp, Arabidopsis thaliana landsberg
  unsure (1)..(529): unsure at all n locations
tcgacacagatatgtgttatatacatcgaagacaaggagatatagaattcaannnnngaatagtcttcagtcgaatacctgcaacgtaagtgctcggcatggatttttccatctccatcttcgtcgcgagaaaacaattgggacaatttcttctactcagaccggtaactttccaaatgtcgtgtaaaccggtcagaccggtatttggtttagaactttaaatcatgttcagctcatcaaggccatggcccatgggctaaaaaactcataaaaaactttgaaagtcatcaacagtttttcaataacaagataaaaagagtttttttttttgccaaaaaaactttcaaattaactttttttttgttttgttttttgttttcatgtaattagtaaactaataaaacaaatagaaaacaaatttctcattagtttatcatggaggagtacttaaaaggtggagaaaattaaacccgggaatctggtaaaatgtttggattttggaacataagtaccatgggatgatgtgact

SEQ ID NO: 80099 - DNA, 574 bp, Arabidopsis thaliana landsberg
  unsure (1)..(574): unsure at all n locations
tcggtacaatggtaaacaactattataacccgaataccattgacgatgccttcctgtttacctggatcaacgatgctacaggatcgagaaaacaggttacccatacttactatgattatgaatatccggcctttgcttcactcctgccgggaactttcgtacagcagaatttgcgcaaacgtatnnnnnnnnnnnnnnnnnnnnnnncgctggattcagacaccacgcgatacgaccatgccacacattacagttacgatattcatggaaatgttaatgttatcatacaggaaaaccagttactggccaccaacgcgcctgatggtattaacctgccgggagaacgtttcaaacgcattgattacaactatgacctgatcagcggaaatgtaaacgaagtaagctaccaggccggtaatcccgatcagtggtaccacaagtatgaatatgatgccgacaacaggattctttccgtccagaccagtaccgatcacgtgatctgggacaaagacgctgaatacacttattatgcacacggtgcgctggccaggacggaactgggccgcgacaagat

SEQ ID NO: 80100 - DNA, 528 bp, Arabidopsis thaliana landsberg
ctttgcctttctgacgtattaaatactgctgcccgcctgatcaattgggtggggggagtcggtactttttttacgacctgggtattcacctttctagaaactttctcttccaccactttcgattcttccttcaccacgggcttggcctcggccagtgtggctactgctggagcggcggcgacagcccccttgcggaaaatttcaaccgggtagccgcggcgttcgcggatgatctggcggatcaggggccagctgagatcacgggcatattccccggccgatgcgacgatcaagcccatatcctcttcagggaaaacataaccgggcaggccgccatcgatttccatcttgtcgacctgttccgtcgtcgggtgcgcctcgagataaagtttattgccgatccagcccaccttgaccgcctgattgacaaccgtcaccgtcgagccgaccggaaccatgccaaagacttctgtgatgttttcagggcacatgcggatgcaacccgagctggagcggcgccgaaactat

SEQ ID NO: 80101 - DNA, 537 bp, Arabidopsis thaliana landsberg
caatccatagaataatattaagatcgggttttgtgggttgacgagaaaattagcatacgcctaactagttttatatttatccatatgactctagaaattttatgttatccaaacacttttatttatatcgttttcaaatggcaaaaaaaaaaaaaagaagaagaggaaagtggacaaataataataaaaaaaaaggatttgacgtccacattaaaatttggatccgcgggacccagggaaatctaaaagagggacccataaatattttgttgggaacaatttgtattaatgaaagggggaattggactttacctctcttcttcttttttttctttaatcttccaaacataatttgctgtttcactcttttagacaccacaccgtatcaaatcttggagatcgcttttgctttctctttcccacccatttattatattttttatataaaatatcattattatttctttttggtgaaagggaaaatgttttgatttctattttatttttaaaattttatgaaaatgttatgacaatata

SEQ ID NO: 80102 - DNA, 619 bp, Arabidopsis thaliana landsberg
tattatctctgtggtaagtagaatctgattgctttgatattaaaatattgttcaactgctcgtattaaatacaataggataagaaattatagaaatgatagaatatagctaattctgccaaatacatcatatattgtctgtctggagataataaaagatagctgattctatcaaatacctcacatagaaaaacaaacataaagagtcaataattattggatcttttagagataagattatgattgcatttgctaattttttttttttttggcagcagattgcaattgctaattaaataatagtacatgtacttgattcctttatctttaatggggggagtatgggaccagtctcttctttggctcatggctattatgtatttccatttgtagttgtactgtctcgtttaaagcattgatagaaattccttttagtaaaaaattaagaaaatataatgaaagtaactttacttaaactaaattaattttggattatttatctaacaggcggatgaagaagaacaagaggtgttgcggttaaaaatagaaacaggaataggagcttataatgaaactcaaagccctactttgagcatcgactctctttactaataatactt

SEQ ID NO: 80103 - DNA, 259 bp, Arabidopsis thaliana landsberg
ccatgataaggctaaggctaaaggcgggggacgacgttgtgacccaaaagaagagggaggtttgtgttagttgcgcatagaccataaacaaagtgtaaagtgtcagtcaaagctgtatggacgcgaccaatactacgagcgtagatcgaaaatcatatgcataggaaagggacaacactagtcaacaggagtgtaaaggacagggcacttcaatatttacaacaccatcaaaaaaaaagaaaaaagagcagctggaaaa

SEQ ID NO: 80104 - DNA, 528 bp, Arabidopsis thaliana landsberg
  unsure (1)..(528): unsure at all n locations
aaacgattgactaaacaccatgtgcatttacaganctgnctcggcgtagtgttcaacatgttcgtcaaggtaataggtcattcttcatgatttgtggtgcaatataaatgaattattttgacgacaaacaaaattttggacacacaagttataagaagctgtacaaatttttataacacgaatttcttaaatactagaatattgttggaactcactacgagtttctttttttggtttggctagtatatagacaagatacgaaaatgcgagatttctacggaaaagataaagaacgagggatttaccatcattgaagcaaaaggcaacgtagaagaacgagtgaagtagaagaagcactatcactcccatctctttcatttctttcgaatttttctaccccaaattgatatgttgtataaaattttaaactttcaaaaaataaaataaggattggagaagagtgagcgagagaaggaatgtttagtgggagtggaatagaacgaggaggagagagagctcttatatgca

SEQ ID NO: 80105 - DNA, 507 bp, Arabidopsis thaliana landsberg
tccatactattttgtatttatgagcatataataattcattaagcactccattaaaacaatccaggtttattaaataagtttctggaggttgactcattatctcaatacttgggcttttgcatgttctaaatataaaatatctgaagcactaatttgttgggtaaacgagaggctttgatctcacatggtacacttgacattttctcttaaaaaatatgtgttcccacaagaaatgtcatcatctaattgttgtcacatgtaactagtacatctaagttaaagtctggcgagttacttgtctaacgcttgatagtgcttttgtatattctaaagtctaaacatttgagttattaacttttgggtaaaagaaagtatttattttaccccattggactatttggcatctgtttcttcttaaaatattttttttctttgaaatatcagctaattattgtcacattcaatcagtacatctaaatttacaattaagaaatcaatttctagaat

SEQ ID NO: 80106 - DNA, 483 bp, Arabidopsis thaliana landsberg
cggcaggggaaagcactattgctgtccatgccggcgcctaatgagacattttttaggcaaataccgctgggccttttgtgcggaaagccgcatcatcgccggcgtgagagacgggcaggaccggccgggaaacggaatttccgcgatctggcacgcatcctgcttcgacttggcatgctacgtgcattgaactgtgcagcgggcgtaaacctcgcgcaaacgggagaagcggagagacatcttctcatgaaaaagatcgaagcgatcatcaagcctttcaaactcgatgaggtgaaggaggctcttcaggaagtcggcctgcagggcatcaccgtcaccgaagcgaagggtttcggccgccagaagggccatacggaactttaccgcggcgccgaatacgtcgtcgacttcctgcccaaggtgaaggtcgaggtcgtgctggcggacgagaacgcggaggccgtcatcgaggcgatccgcaat

SEQ ID NO: 80107 - DNA, 523 bp, Arabidopsis thaliana landsberg
  unsure (1)..(523): unsure at all n locations
aagcatagctaggaagatgatttaaaagtttagttataggtttttactcatagaatgccaccaggtgtgtatgcgcatgtcttaatacagttggcggataaacttagcatcattataccattgtatactcgtaagggaggtgcgtttctgattagccttagcgtcgtagtgccacgaaagtttttcttagtgccatgagtatgatcctaagtaaacgggagaggatcaactgactcgttgatcttttgaggtactatctctttttgcttagattaaccagtgccacagagaagtgtctcctagcggaggcccagatcctttgcctccagtgcaacaattnnnnnnnnnnnnnnnnnnnnnnnnnnnnnnnnnnnnnnnnnnnnnnnnnnnnnnnnagcacgaatcgcacgcccacgagaattggaaccccagagatagtgtccaaatggatgaaccttcttggcctcgtcgatatccagctcgttcacgttaggcgagtcgatgaatttctggagatgagcct

SEQ ID NO: 80108 - DNA, 515 bp, Arabidopsis thaliana landsberg
  unsure (1)..(515): unsure at all n locations
agcggttcattgaatactactttttctgaagaaaagctttctcgctgcatgtcacttgtgaagataacgtgtttaatttcaaaatgaagccaaaaacaatttaatgttttaatcagaagtcatttgcaacttgtagacacaaacgttaaattttagtcggtgagtacttttgtttgtgattcatgtcaaacgtaaaacataaaagagaaccatctaaatttatcttttgaaacctattatactctgacggaaaaaaaggcctattatacaattaagcatgagtaaaaaagaagcaaatgttctaagcaacggagaaataatttttcttatcggtccttttacaaacgacagccatatatcatttgtgcgtatctcaaagcaaaagtctcttctctctttgaaaagacaaaatcaagcaactaagcaagtaatgctaacttcacagttacaagacaaaagaagacattcacataacggtgaaacaagaaagattgngtttgatatgttttctttaa

SEQ ID NO: 80109 - DNA, 104 bp, Arabidopsis thaliana landsberg
caccttgacttgatggaatacattcatgtccagcctttttatccctaagctttatgattttgaggatcactattcagactggctccctcgctgtgatctgaatt

SEQ ID NO: 80110 - DNA, 509 bp, Arabidopsis thaliana landsberg
  unsure (1)..(509): unsure at all n locations
atagagactcccagatccttgacttataatgtgtatactaataaagatataagtttacttgagaatcttcaaacgaaacacaacgaaataaaatgatgatgagtaacgtaactacctttagaaaaaagaaaaaaaaaaaaacatgtcatcgtctcccataatcatcatatttttgagggatattcaccaaacagaatcatggccctttaaggtggcagagacgttggttttgattgccaatggaagaatactccctcatggtccaaccactcgttttgctctcatcaccttcaacgtagaacctgnnnnnnnnnnnnnnnnnnnnnnnnnnnnnnnnnnnnnnnnnnnnnacatcttttaactctccaatggctttccaacctttaactttgcgatttgtccttttcacgaaataaaaccactcgttaggttcaaagatatcactctctgtgcgattaagccgccacggctctctggcgtagatgttgtccctgtcttctaacaaaaat

SEQ ID NO: 80111 - DNA, 602 bp, Arabidopsis thaliana landsberg
  unsure (1)..(602): unsure at all n locations
tttggtattattatcctattttccccatttttttgatggttaattaatgtgaatgaattttctcntatatagggtaacaacacaactaatacaaatatatattacaaaaataatataattatactaaaagatttttagggaagaaaaacctaagaaagaaagagaatatataatgttagagtgtgaattgtttccattcgaaagagaaggaagagagcaggatagcgatcagtcgcgacgactaattcctggagattgttgatcgatgnnnnnnnnnnnnnnnnnnnnnnnnnnnnnnnnnnnnnnnnnnnnnnnnnnnnnnnnnnnnnnnnnnnnnttgttggtcgctggcgactaccaaacgatcatgaccataaaattataaaatgaacacacgcttctccgatacataccaaatcgttctaatctgagtttcatttgtttacctatcaaatacaaaaattaatctgacccataatttatcctataacaagattatagagagataaacccgtagaggaaccatatatcaaggtaacatgttagaaatacctaacatcaaagaaatgagacgttgagtgatatatgaatgatatggtcta

SEQ ID NO: 80112 - DNA, 494 bp, Arabidopsis thaliana landsberg
ggctgtatcgccgccctgcaggacgcggcgtacatgacggccatacgccggctgttttacctccgcgcgctacgtcacctcggtctgcaccggttcgctgatcctgggtgccgccgggctgctcgccggcaagcgcgctgcctgccactgggcctggcgcgacctgctcaccccgctgggcgcgatacccgacccggcccgcgtcgtgcgcgacgggaacatcctgaccggcggcggcgtcaccgccgggatcgacttcgcgctcacgctcgcggcggaaatcgccggcgaagaggctgcgcaggcgctgcaactgggctttgaatacgcgcccgcgccgccgttcaattcaggcagccccgacacggcgccccgcgccgttctcgaacgggtccaggccctcaacgccgcgcaacaggccgcgcggcgcgccgccatcgaccaggccgcccgcgcgctgggagcagcctcgaccaaaacataaacacgagacg

SEQ ID NO: 80113 - DNA, 283 bp, Arabidopsis thaliana landsberg
  unsure (1)..(283): unsure at all n locations
aaatctttccatattgtcttgtaaacacgcgtggactaccgnnnnnnnnnnnnnnnnnnnnnngcaatttgttcctttttcgacaggaggaccgctagttgcttacggctaataccgcggccgcggagcgattattggccttgcaacatgacaaagatgctgggcctatcctacacattcttgaacacacagaacactgtgatttaactgggtgtgaagttgagaataggataatgacttattcagcccttattcttcaatctctatattatataacaagctt

SEQ ID NO: 80114 - DNA, 340 bp, Arabidopsis thaliana landsberg
gcattacttcagaagacgatcggggcgttaactatcgagctttgaatgactggtttcactttttctaagcagacaaaactcagtgacgcatgaagctggtgtccaaatggctgagatttacaatgagcgaatttgtgacctactttctcaggatggttctagcaagagaaatccctctctaatctaattaagtatttgacacttctattgatatcatttcttttatgccacatatatcaaatttccttaaattgcatacacttgggatttggaatacttcttttccaaacggcctcgcagctttctgaggaaagcctgcattctgtaagagcaacaggac

SEQ ID NO: 80115 - DNA, 618 bp, Arabidopsis thaliana landsberg
gagtaatcattgtgtctttaacaaagctcttatttgatccttctgtagatttaacagatttttttctttaagaaaattaacaaatgtcaaagtagattcacctaattcatccttcttactagattattttgtgttcatttcagacaatagcaaagggctttttttttcttctttcatttttgacattgtatgaaaatccatgaaagcaacaacttgaggaatagtgcataaagacactaatagcatgtgctaactgttgcattatttatctgcaaatggaaattttagaatatatctaagattctcttaaaaccttggtatagtagtaggtaattgttattatatgtatatttgtaataaccttttagaacattggttctcagcctttgggtcatgactcctttgggattaaaacaatcccttcacgggggtggcctaagaaaatcggaaaacatggatatttgcattaatactcagaatagcaaaattacagttatgaagtaacaacaaaagtaattttatggtgagagtcaccacaacatgaggacctatagtaaagggttgggagcatacaggagggtaaataccactgtcatagggccttactgtgatgttgag

SEQ ID NO: 80116 - DNA, 251 bp, Arabidopsis thaliana landsberg
cagcaaaaccccaagagagcgaaaaccgcaccataaagatacacacccccaaaaaacaaccaaaatcatggaacccctacacacgacaaagataaacacaggcaacggacgtgtggcataccacatccatctgtagccagccatcagccctcatcaaagaaaacaggacccagaccctgcaagtgagcaccacactgcccaaaccaagccagacacaaacactcagaccaagcccccccagctgcatgaga

SEQ ID NO: 80117 - DNA, 257 bp, Arabidopsis thaliana landsberg
atgggacataaaggcgacaccaatgcttttttttactaaacaatggacaacatactagcatgctagtcggagcaaacaaaccgcagctacagaagaaggttactaatatcattgattctgtgcctgaaagacctgatcggcctagactcttgactctcgcagcactagagttctgaggtctgatcttgtgtcttctcattgacagtgatcaactattgtaatatgcaaaaaaaaaggagcgacaaggtaccaaaaac

SEQ ID NO: 80118 - DNA, 541 bp, Arabidopsis thaliana landsberg
  unsure (1)..(541): unsure at all n locations
cgtgcctcagctgcagagccatggctcatcattagaactctctgcaagtcaactccactagggttgttctgaaaccgttaagcgcagttctttctnnnnnnnnnnnnnnnnnnnnnnnnnnnnnnnnnnnnnnnnnnnnnnnagctaacggctaaggcctctcctgttttaacccgcaactgttctacatttaaacagtctaacctactcacaacgggattaaactgaaacgggatatcgagtttctctgcttcctcaatgagtctatnnnnnnnnnnnnnnnnnnnttccttctggtgatgaacaccagtgattctcaaatgaggtggaccttcaggcctagagttaaaagcttgaagcaaagcaagccattgagctggctcagaagcatcgagatcaatcacatgaaccatcttctctccttccatagcctcgagtatagctcgattagtgagcaagtaagagactttgagtatcggaacatctcaagaagagtcttctaacatgaatctctagagacattgtaggttttgtctgagtt

SEQ ID NO: 80119 - DNA, 585 bp, Arabidopsis thaliana landsberg
  unsure (1)..(585): unsure at all n locations
acccagaccacttagcagaagttattgaggacatgattttcagttctggactgatcgaatcaaccacacccgtccttattgacatgggcgatgttaccaaattttctattcaggaagtcatggagctccttgagactgcgtatggccagatgaagactttgggattccaggacataatcatgagcgggagctccatccctgactctattgagaaagccgtaaaggaccgcgactcgactggcttggtgcaacgaaaagaaatgattgcttggaaaggctttctttctgcgaaccccactgcanaactttacttcggcgattacggcgtaagaaacccaagggcttcagacaacatcgccccaaacatgaacgtcaagataagatacacggtaaacaatgcttacttcgttgctcgcggccactccgtaaaaggtgaggatggctatgcccaaagccagaaactctcaaagataattgttaactcaattcactaccgtcaacccgaattcagctggggcgacaacaagatcatgcantgcagccttggggaaantngtcggcagttctacaaactggatagcctac

SEQ ID NO: 80120 - DNA, 595 bp, Arabidopsis thaliana landsberg
atacaaacaaacagagttcattattattgtaaagaacttatggttcaagtttcagcaacaaatagattatgagaataggaagcggtcaactctggaagatagaataagatggatttatctgtacagatgtggtcttcttaatcttgcataataacggcttattgttacacataacataacacataatgaatgggctagtccgtcctcagaccaacatgggggcccatggttcgtttgttgcgtgaattatgtgagtttattagagacagtatcggtaacaatattcatgtcgttaccacgtttccactgtttagtttttataaaacaaaataaaaaagttaagtagcattggttgaaatgacatgataggtcgccaaattaataagagtgatactttagtaaaccactaaccacattaaaacatataatgactatttatataatgaagacacagaggtttggaacatggaaggtttctttgtcgaggaaacatggaagtttcaactgcacaaaagaacaaaacagattaaatctcctaattctatagggacacgtaacaacatagtaatcaaacctttcaatgaaaatagtaatt

SEQ ID NO: 80121 - DNA, 119 bp, Arabidopsis thaliana landsberg
tcagaactttgcttttccttatgtttaaggcgaaagtttataacgtgaaggatgggggacatactataacttcacaataaggctgccttgattgtgttgcacggtaaccagccggttaa

SEQ ID NO: 80122 - DNA, 280 bp, Arabidopsis thaliana landsberg
agtgtaattaaaatgtaagccaatagatgaagttaaattttaattatttttaaattacagtatcgtgtaggatttgttgactcgttataacacttcaattttggctgttatgtaaaagaaaacactttatttaatctaaaggacgtggcaggtcaaattgttaatttcatgaaaattgaaaaaggggaagaagaaagatctgtaacagcgaacacaacagagagactttctgtcgggatcttgccttcctttttgggaaccaaaaaaaaatggtataggg

SEQ ID NO: 80123 - DNA, 515 bp, Arabidopsis thaliana landsberg
  unsure (1)..(515): unsure at all n locations
ccgacgcctaccccggcgcctgtcggagcttcgcgggaataccggttttaccgcgattcatgtatgcgacatcctgaactgggggcgcggtgaggtcggccgtttcgaggcgaatcagtggaaacgaccggagatgagcgatatccgcgatctcgtgcgcatctatgaggtcgagggcaaggagcgcgaggaggtcgaggctctggccgtccgctgccgggtacgtccctggtggcgagattacggggagatcttcgacaacgagttccccggatatgagaacgacgcgacgtccattcggtgctatatgcccctggttcttccaggcctgctccagacgcccgtctatgccaacgcactgttcaagacgggaccgcggtcgccgaaatggcggcagcgggcggtggaggcccggctgcggcgccagcagatcctggaccggaccgacgggaccgcgccgtacttctnnnnnnnnnnnnnnnnnnnnnnnnnnnnnnnnnnnnnnnnnnnnacga

SEQ ID NO: 80124 - DNA, 534 bp, Arabidopsis thaliana landsberg
tgggctggatgtgctcgcagccgtgagagtagtgcagcacgtcgagggcctcggcggggtcgaggagcgctcgcgtgtcgcggaagtagtcgcgggcgctcgcctcctggtggggagagctgtggatcatgtggccctggagcgcgcccgtgcggacgctctcgagctggccgcggaggtggccgaagtcgttgagccgccaggtctcgtagagctggcccgcggcgtcgcggaaggcgtggcgatcgagcggcgggggctggcggcccgcgaacacgctacccgggccggaggcgaagcgccaggtgccgtccaggtcgcggtactggacctcgccgtcggcctcgcggagcgcggcgccgtacggcacgtaggaccacggccacgagtaggagacgtgggggctgacgcgcacgacggtgtaagtgccctcagggctcgggccgtagatgacgatggggttggtgggaacgtccgcgtagcggtccttgccgtccaccatgccgtacccgttgagcacgcgcccgctcttga

SEQ ID NO: 80125 - DNA, 409 bp, Arabidopsis thaliana landsberg
aggtgccagtccgggcatcagcgcgctcacattgcgtgcccgtgatgggtggcgccggcttcctcctgcggatccttgggcgggcgatacatgcggcgcagcacggccacctcgaaactgttgatcaccagcatcgcctcgttccactccaggccgcgcagcagggtggcgaaagcgtcatggttgggtgccggcatgtttgccgcgtcatcggccggcagcggatcatgcccaacatcccgttcatccgcgtgcgacgccgcggcgggtgcaagatcgccggcgcggctcgccaagtgcatggattgttcggcctcgtccagccattgatgcaaacgcgcgcggacgtcgccatcgcgttgtgtgagcacacgaaagttcagctcgcggtaagcccgatcgtaaagcc

SEQ ID NO: 80126 - DNA, 346 bp, Arabidopsis thaliana landsberg
agcggtggcagggttggatttcatttttcagaacttttccttttcttatttttaaggggaaagtttataaggtaaacgatggcagacagacttcaactccacaataaggctggcttgatggtgtgggacggtaaccagtgggttaacgtatcagccgacgccgatggcaacctcaatgtgaatgtttccggtgtgcagattgacaacaccgacggagctatcacagatggagttgacccgctcatcaagggcaccgtgaaagattacacaaattcaaaccctctcgctgtcgtcctcgttgatacttctggagatgcttacaccgctttttgtggcacaagtgggg

SEQ ID NO: 80127 - DNA, 491 bp, Arabidopsis thaliana landsberg
  unsure (1)..(491): unsure at all n locations
gatgcgcatgccgaggcggtcgacgatcgtatagcctttgaggttgttgccgaacgcgatcgacagcgagttggcggcgcgtgcggtcatatcttcagccagcacgaccggaaagcctagcagggatgagggctgacccgcggccatgcccggagcccacatatagttgcccgtcgtgtacttgatcttgcggacatcatcacgcgaccgaacgcggcatcaggnnnnnnnnnnnnnnnnnnnnnnnnnnnnnnnnnnnnnnnnnnnnnnnnnnnnnnnnnnnnnnnnnnnnnnnnnnnnnnnnnnnnnnnnnnncgcctgtggcgacgtgtactaacgtgccccatgcgcggatgctgtaagaggtggctgcggtcggatacgtggtgaaaccgcgcggctggacgactccggtgcccgcgacgaaagcgtcgctttcgcggcaggcgatacggctggcgaccctgttgttgatgaactgctagacattc

SEQ ID NO: 80128 - DNA, 498 bp, Arabidopsis thaliana landsberg
ggccaacccgctcctacatggaccggttcaactctcgattactctatcgttcctttcgtcataatacctatgaacacgggcattgggacgacacaagctacattcagacaacaatctgcaccttaataacgaacaccccactccctaaaatggcctacaggcatatgctatactcaggctccgcccgctgcgcagcctctatggcaaggtcacttcatgaacaagaaaaaccgccaccccgtcgatggtaaaaaacccgtcaccatcttgggcccggatttgcccttagccttcgacgactggctggaacaccccgcaggcctgggcagtatcccggccgagcgccatggtgaggaagtggaaatcgtggacgccggaatcgccgacctgttggcggcctacgagctgatgaagctagtcctcaagccggaggtgtacgaagcatacaagctgggtggtcggttgcgctcgcaaaccttcaacggcactgacgggatc

SEQ ID NO: 80129 - DNA, 545 bp, Arabidopsis thaliana landsberg
acaaacaaactaaactgagaaacacaataaagttggaaaatgtgcggtgtcaaaaaaaacgactttccacccaaagatcttaagcagaccgtcgaacgaaacgccgtcgtttaaatcaccaccggctaatcgaatcatagatttgatttcatcgtcggttacagctaaaccagccgaatccatataactcttcagatctccgtaactcagtctcccatctccgtctttatccatcaccttaaacacatctttcatcaatccatcgtctcctccgttaccagatctagaaaacggcgtcgtttctagaactttctcgaattcatcgaactcaacgaatccgtctttgttcgcgtccgctactgatatcatcgttccgatcatcgtctcgtcgttgttttcaccggaagggattccggcgtagaatgctcggagatcgtcgctgctgattttaccgtcgtgatctgtgtcgatgatttcgaaagctggtcggaaatctgaattcgcggtggtggttatcggaatcgcgattctaccagaaggacaca

SEQ ID NO: 80130 - DNA, 563 bp, Arabidopsis thaliana landsberg
  unsure (1)..(563): unsure at all n locations
atgtacagatatctccgatcctttttatggagaagatttttcggtaactaagtttaatgtgggagcatttatttattattacaacgataaattctttgtgggagtatcaagtccacgtttattggaaccaaaaatgaaggttggggatgtagtaaattcacttgctacccgacacttttatattacgggaggttatgtatttaccctaaatagcgtagtgaaatttaaacccactaccttaattaagtttacgcctcatgcgccccttactgttgatcttaatcttaatttcttattgtatgagcatttttgggtaggtgctttttatcgtttccaagaagcggcaggactaaactttgtttacaatatcaatgatttcttccatattggctatggttatgaatttcctgtaaaccgcctgatgaattaccaaagtggatctcacgaggtaatgcttcaatttaacattcgttcaaaaagaaatcaatnttcagcaccaagatatttttaagctatgagaaanaaccttntaattgcattaaccttacttttttcccttcaac

SEQ ID NO: 80131 - DNA, 373 bp, Arabidopsis thaliana landsberg
ccactatcggcccgaaaaccgaacaccgggctatcttctcaccgtctcttccaccaccgtccaccacatagcaccttacacatgtaagaacccagtgaatagctgagtccatagtaaacaagcctaattctctcgcgtgaccagttaaatctattaaaagggcaaaaacgtaaatcttaatattattaggcttaaggcgttagcttttaccactatatattaataagttcgtatcctttgcatttcgcgagctcacctatgtgcactttcatggccccagctcgatattaacttacattaacccgcgcgtaacaagaaaggtcactagcgacacagtatgaggaaccgggcggacacatctgtagtgaacaac

SEQ ID NO: 80132 - DNA, 569 bp, Arabidopsis thaliana landsberg
  unsure (1)..(569): unsure at all n locations
agaacgaatttttaaaaaaaagttgcaggaaactggggatatgtttactcttttgaaactggttcgtccgcatacccgggggatatgagttcggcgccaatgtgctcttttgagtgttaatcgcagcagtttgtattacaagcctgttgccgaaaagcctgagaatgttaagatgatggagatcatggacaaacatcttaccgaacaccccacggaaggggttcgctcacttgtactgatgtttgctgctctgggccaccatgtaggccctaagnnnnnnnnnnnnnnnnnnnnnnnnnngggccgtcaaacgctgtacaggcgaaagaatttgacgcgggcgggcctcaaagagttcatcagaccctatttgctcaaagggctcgtgatcagccgtcccaaccaggtgtggtgtaccgatatcacttatatcccgatgaaacagggctttatgtatatgacggcctatattgatgtgttcagtcgaaggatcatgggatggggtattggcaactcactgggaacgcaatggtgcctgggatgtattgaggatgcaatcaatcagaatg

SEQ ID NO: 80133 - DNA, 265 bp, Arabidopsis thaliana landsberg
tggggcttgatgattttcttgcaaatgcactcttagacatgtatgtacggtgcgggagaatgaacactgcttggagtcagttcaactcacagaaaagagatgtcacatcatggaacattcttgttactggatattcagagcggggtcaagggtcgatggtggtagagttattcgattgaagggtaaactccaaattaaggccggatgagattacatccatctcattgttatgtggttgttgcatatcccaaatggggagacaagg

SEQ ID NO: 80134 - DNA, 588 bp, Arabidopsis thaliana landsberg
  unsure (1)..(588): unsure at all n locations
aaggaacaacggcataggcattaacggtgttgcggatcatgtacgcatcatgatgcttcgcgtggtgtttgatggctatgaatacgataaagacattgcgcttgccatacgctatgcagtggacaatggcgccagcgtgatcaatatgagcttcggtaaatatttttctccggagaagagatgggtagacagcgccgtaaaatatgcagagcaacatgatgtgctgatcgtgcatgcctcgggcaatgaaagcaatgaccttgacaataaggaaggctaccctaacccctggctgcgccagtggaatacaaaggctacgaattttattaccgtgggcgcgagcagcgatcccaaaatatcaggcagccttaccgcggggttcagcaattacggaaggaacaatgtagatgtatttgccccgggcgtgcgtatgtattccaccatacccggcacacataattacggaaacctgcagggcaccagtatggcggcgccggtggtaacgggactggcggcagtcatcagatcatactattccaaccttaccgcgcagcangtaaaaaaagtgatcgaggaatctgtgcttga

SEQ ID NO: 80135 - DNA, 618 bp, Arabidopsis thaliana landsberg
  unsure (1)..(618): unsure at all n locations
ataatgtttagtttttattttactttgcatgatgtaagtagattttttttagtttttaccaaccaatctttttagttgctagttttttaccaaccatatataccctctatcctttttgtatttatatcttttaggataaaaggctaataatagtttgatttactttgttaacatatctatcatatacatcaagtgttgcttcaaaacataaaaccaagacatggaattttataatttatactagtattctcgttgtatcataacttatatttaaatttgtgtttgttgtaaacaatcgaaaagcatatagaattcgtatatattttataataataaagaaaaggaaaaaacaaaatcgagacaaatgaataataatcatgaaaaaatgtttttcatatgttcttaatatattttcaatttgataaataccgaataaatgtttcaaaagaatttgactttttacgtcaaataaaatctctaaattataacagtgaatcacaatagaccaaatcaatcatagcaaattgatatgatttattgaaaaatgaaaaccttaagttttaatgttatccgatataattagatatnttaaaatttttgcataatatacatatacta

SEQ ID NO: 80136 - DNA, 578 bp, Arabidopsis thaliana landsberg
  unsure (1)..(578): unsure at all n locations
cattttaaacgctattttttaccattcaaaatatttatcaattttttttcaatttcacattttgttaaagtaattcggctgcatactactaccatgtcaatataactagaaaaaaaacatgattaatctactaaaactatattctcatcctttaaattttattcagttcaattcattccactaataatgattcagttattccgtcatttcactatttataagttatagataagttattctgaacatccataatgttttgtcatccaatttgttttcttcaaaataaacaacaagttaaaattaaatttctcgtcttcaattctaaataattgagtccactgatgaaagcccataacccatatggaaaaacgtgcatttcagcatttgtgtagatagcgatattttgttcgactacacagaaagttttttttctttttgactacaaagcattcatagtatcttcgagttaggtaccaaaacatgtaaaacagtctcgtcttaaaccgtccaatacgacttcatgaccgacaaaattaaatcacacngccagttttgacgcgtgagacaacaacctacta

SEQ ID NO: 80137 - DNA, 579 bp, Arabidopsis thaliana landsberg
  unsure (1)..(579): unsure at all n locations
caaggtatcaaaaatgaacatgctgaagatcgtgtttttgtatgttacgagaaatctgtaggtgtttttgggtttatttgtaataggttaatgacgagaaaattatttgatcttatttgtttttttatttgaacgaaaaaacaacaaagaaaaatatttgaaattgtgtctaatttgacattgtcaatttctatactctttccttttctcaccatcattttaaagtaaataataaattactataatatctaattcaatctaatagaacacatttaaataaaatatatgacaagtgtcaattgtctgatgccacttgttagatttttgtaaagtgagtttgaagaaattccttctattagtacataaagatatttatttactactttttttacacttgcttacattttacttatgttntgcttagtttttgtcaatatattttctcgcatgtcatttcagtttttattataggaataatgtactaatcgagttctagacctgtgataaataacaatttattcttaaacgtataagaaactcaatctaaatattttctatcacatagcatattccaaattt

SEQ ID NO: 80138 - DNA, 543 bp, Arabidopsis thaliana landsberg
atccgactaagtccagttagtactgtaccaatgccaattttaatttataatattcagattttccaaaataaggtaaacaacaataaatgggaaaattaatctagaaaagatgcaaattagcttaaattactagaaaattagagggtagttgatgcatttatagagacctaaattttttgggaccatcaaaattcactttcacattaaaggaaatgagaaggtaaagagccatgtgtagaggcatagacagaatctataaacccttgttgatgatgaagttttcttttgtttcctttactcttttgctaaagctgcaacaacaacagcgggagcagcaaaagaaagcttaagttaacccttaaagatgaagagatcaatgtttctcttctcttttaccatgtgataaaaaccacattctaaagtacatcttttaatgctaggagagtgatctgattactaaaaccagcttaatctcactgtatgacaaagtggatttattcagtgataaagattgtgctgaaaccacattgacagaactatctg

SEQ ID NO: 80139 - DNA, 498 bp, Arabidopsis thaliana landsberg
caagttgtctatcgcagtaagattggcttcatgttcactgttttcaaccgatttccgaactagttactctcgcccacgcggcaaggcaaagataaaggctccaaatggcaccaacgatagccaaggcacacgttcaggcaaggaaagtagcttctcccctttgatgaaattccacaccatcaccacagccagtggaacgcagaccaacaacaatttctcggcccaaaaggttcttcgaacgttcttctctttcgtagaccaatgttgatgatagacatgtcccaactcatgatacacacagaacctgaagtgagcacgagtccacccactagggtctgagaattcaagctgtgcatgcttagggtcgtcgtgagcggttctggctcctgaccctttgcggtcaaatgagatcttccagttactcgaatcaaatcccatgaagctggcagcatcctggatctcctgcaatgcctcttccttcgtcaggggtctctcttg

SEQ ID NO: 80140 - DNA, 613 bp, Arabidopsis thaliana landsberg
tttttttttaaaataaaccattttcaacgtacgtcgaacacaatacttttatctgaaaaatttaccactagctaacaccacgttgattacaatcgggtgttattgttgtatacaaactattttacgtaaattatgtgttttttgattaatgttatggttgaacaaaaatgaatttgttcttcgttcaatacttatttagataacaccatggtgaaagaaattgtaaagttttttttgctattttggtggggttttggcttcttttatttggactttattttttattttcttttggacttaatttccagaatttcttcattctctgatggactcttgtacttttatttgaaaatttaaattaaattaaggtgagaaaataaaagattactcaattttaaaatagcacttaaaatgcttttctcttgtctaaatatttaaagtttcgcaagaaacaatttgtaccgagaaaacttaccgctataaaaagtatattatattcaaaaaaaaaaatttgagtgaaccgaacgtgaaagctgtaaaagtgttaaggcgacaactacacccaaagaggctaataatcgatgatatgttctttgaaaatagaccaacgttt

SEQ ID NO: 80141 - DNA, 469 bp, Arabidopsis thaliana landsberg
cgatactggctatcaaaatcatagctaggaagtgtaaagtcttaacaggaaaaacgattactcggccataatgcgaagattatggatcattccctacaacgctatcgccgaattcaaagagactatcaagacacaacaactgtatctgcttgccaataaaaagaaacagcaaacagatcgatcaagaagctcccacaacaatggaacgaagcagatcaggcagctagaacatcatcagcggttgaagcaggagtagtctatgacaggtttgggatatatgtccaacaacgattgtgaactccgcttatcttctatggagcttccgcagctcgcaaacctgcatttgagaccatgtatgtacgttactctcatgaaagctgcataaaccttaacaccaatgcattggtgattatctacgttcagatgtggctactcctaataattccaccctatactacatagacatgac

SEQ ID NO: 80142 - DNA, 426 bp, Arabidopsis thaliana landsberg
gattcttcttctctacttatgttcgttttatgagacaatcaataatttcgttattatcaccatcaatctgtaaccagaaaataaaattaaaaataaaacctccaaaaactagtttggtttttcaatttttaaggactctacgttgacaaaaaaaaattgattgaacaaatatgagtttaaaaaaaaaaaaaaccacaaattagttttacaaactcagaataatcatgacctaaactatgttagtcttttctcaatgaagagaaagaaaagattacaaataaaactaaaataaaaaaaaactactataatttcaaattaatgatatagtatatcatatttcaatcatctatctttttggtaatcaaatatttacattatcgtataaaagaaaaaaaaaaatcaaatacttatggttttttaattatc

SEQ ID NO: 80143 - DNA, 426 bp, Arabidopsis thaliana landsberg
ttttaaacaactgagaattgcataatactcagacttgtgttttctaatcaactaaaatacatacctccggtgatcctagacttgacggcggcgagaggtaaaacgttatcgggaaaatcagttaataaaggaggaagattaagatctgtctccatcggaagcatttggtacctcggagcagcgacgacgctgtaacaaataaaaaaaagcttcaagcaaattgcaagatatgaagaagaggaagaagaagaccacacaatactgcggatgaagtaactaacgtttactgagacgggaggagagcggaagtactggaagcccgtgactagttatcggctagaacaggactggagccgtaatgaaacccgactgcttttggtgctacgctcaccatagtatgcattcattactctataacttatctat

SEQ ID NO: 80144 - DNA, 547 bp, Arabidopsis thaliana landsberg
  unsure (1)..(547): unsure at all n locations
aaagtacacgaaaaactggaaggagacgatcatgaaacattcgtattaaaagtgcattctttctgggggactagtatggatattttaattcttgatatcgccctttctttagattctgtgatcaccgcaatcggtatggccgatcatatagaagtaatgattgctgccgtaattattgccgttggtattatgcttgtttctgcaggtggaatcagcagttttgttaacaagcatccaacagtaaaaatgcttgctttgtcttttttacttcttattggcgtttctttaattgcagaaggatttgaacagcatattcctaaaggctatatctattttgctatggcattttccgtgctggtagaaatgcttaatttaaaaatgaaagccaattcagggaagcctgtccatttacgcaatttccctgttgagaacgaagacaaatagttaccaaactctgcaaagcaagcccttaagatattcaccttcggngaatgacgcccttaccggatgatcctcgggttggcaaaactggtaaatgaactgaatt

SEQ ID NO: 80145 - DNA, 538 bp, Arabidopsis thaliana landsberg
taaatcccatctatggacggcacttcccattcgaggtatccctcgcacatgttcacttattatgtcataacccgcatgctgcaggggtttgatttgcctgtaagtggtgagtttgttcacgaaaacatgctccacctgcgcccccggcagcagtgcggaaagatttctgggaggatcgtaatactggtaatcaaccgcggtggtcgaataatcgggttggagtacgcagactttcatggtatcttttttcttcttgcctttaccatggataatggcaccacgggggtttcgctgtcgtgtttttctattgccaccgcgggtttctgttttctcctgtaagcatcattgatgatctcggccaccagcgaagtaaaggtggcattacttacacgcaggatggcgccgatagaggtaaaatcttcatcctcgctcagcccgcactgggcatttacttccagtatgtagaagcggccggtcttttcatccatgcgtatatccgcacgggtatagccggtgccttttacggccaggtaagcat

SEQ ID NO: 80146 - DNA, 263 bp, Arabidopsis thaliana landsberg
  unsure (1)..(263): unsure at all n locations
gaaccgcaagccccgggctcgaaaccggagcctccaagctccccccgganggaccggncccgggagccacaaaggaaaaagaaccggcggcccgcccccgcaaaagacgaaaagaagaaaaagcaccaacccggcgcgaccaaagcggacaacaaagcaacaggagaccaaccagggagcagagaaaagaggagagcaaggaagccagaaacaacaggagacgacacaaaggggacaggcnaaaacccaaaaccgacgaacga

SEQ ID NO: 80147 - DNA, 484 bp, Arabidopsis thaliana landsberg
tcttcacgttcaatccctctccattgatcccagaaaatctatccatgtattcaactgtttaattcttcttgagctcgtcatacagaccagtgccaccttctttagtatcatcatcatcttcatcattgctgctatgactaacatcttcttcaccttcttcatgatggagtggatacactttcttagtcccttgatgaagaggagactcgattgcagagtcttcttcatcttcttctacataacgagtaccagaagagcctccataacatccatgccattcatcatcatcactatcaatgtccaatataaaagctctgctctggatggctctccttctgaggacaaatacgtttaagtagaagctaacaatctctttctgagttcgggaacaaaatgcagcttcccagtgcctccaaaaattctgcccccacgtttcaggattggaattaacaacctcatgaaaaagatgtgcatcttcatcgct

SEQ ID NO: 80148 - DNA, 366 bp, Arabidopsis thaliana landsberg
gattacttattgtcttgaggtatacatctgtatgtaatatttgttgacttttttgtcaagttaatatctgttgtcgtatacagaaaatgggtctaaataatgttatttcaataaggctatgtcattgttgctgcaattttctgtaaagaggttagtgttgttatgtggccgggtctttctttgacttggtcactgtacaactctaacaagaaatgtgttctttttcttctcttaatactagttatccgaatacacacacggtttcgatgagatcgaactagctttgtgtggctaccaattagtgaggtatttatgacgatttatgacaaaaaaaatatcgaaaccacttttatattgtatttaggg

SEQ ID NO: 80149 - DNA, 387 bp, Arabidopsis thaliana landsberg
atataatgaagaaaaagtttataaaaaataaacagaaaaacttatggaattttttttagagaacattaggggtgctggattttggctaactcgcagagaaacggctcgacctttaaggcagacataactacaaatatcaatggttgaaatatggtgtctggacatgcgaataaagaccatgtcagtgaaggaatgtttgtgagacctcccacaagcttggatgataaccttagctttaaccattataggtctgcgataatgcatgttacgggaggctgaaggagctaaaacgataacatagttaagacaatttttgagagataggaaaaactcattctaattttttttggaacgcgtaagttagagaaaatatcttaataacgggac

SEQ ID NO: 80150 - DNA, 501 bp, Arabidopsis thaliana landsberg
tgttcgacgggatcgagtgcgctctgtcttgcacgccaggcgatcgaggggggactcgccgaatgcgtgctggcgatcggtttcgagaagatggagcgcggtgcgcttggcgagaaatatgccgatcgcgaagcgcctctggggcggcacatggcgaccatgcatgcgacgcaagcgccgtcaaccgcgccgatggtcgcgcagatgttcggcggtgccggccgcgaataccgcgagcgttatggcgccagccgcgagacgttcgccaagatcaccgacaagggcgcgtcgccacgcgcgtcacaacccgaacgcgctgttccgcacaccgatcgatgttgaagcggtcatggcgttcgagacgatctacgatccggtgacgcgcctgcagtgctgtccgccgacctgcggcgctgctggggacgtactctgttccgacgattttttgggaagactgcgcgacgcgcgcccggtgacgatcgccccacagcgatgacgacc

SEQ ID NO: 80151 - DNA, 317 bp, Arabidopsis thaliana landsberg
tatatatacgtcattctgaattgaactaatttaaataatcataccctgaattcaacacagggaatttccctgaatctgatcttaaatcctcctcagaaacccagaaacgcgaagatgggagacaatggagaatcaataaaatggccaaagatcaaactcaagtcgaatctcaatcgtctcttatcttaagaatcatgatctctttaccgtaagttcctcccaaaaatcatcaacccatctcattatttttcccaattttatccctaacctaattgaaatttagggtttccacctcccagaaattgtctgaaaaaatt

SEQ ID NO: 80152 - DNA, 475 bp, Arabidopsis thaliana landsberg
  unsure (1)..(475): unsure at all n locations
nnnnnnnnnnnnnnnnnnnnnnnnnnnnnnnnnnnnnnnnnnnnnnnnnnnnnnnnnnnnnnnnnnnnnnnnnnnnnnnnnnnnnnnnnnnnnnnnnnnnnnnnnnnnnnnnnnnnnnnnnnnnnnnnnnnnnnnnnnnnnnnnnnnnnnnnnnnnnnnnnnnnnnnnnnnnnnnnnnnnnnnnnnnnnnnnnnnnnnnnnnnnnnnnnnnnnnnnnnnnnnnnnnnnnnnnnnnnnnnnnnnnnnnnnnnnnnnnnnnnnnnnnnnntccgaactttgagcattaagtacttcattgcgcatattcgtgctttgtgccagaccacagacccctatttactgcttcgagcacggatatcgaagatgcctcatgcctcaaagctacttgagagtgtatggggtcatcctacatgggagctgggacccacggtgaacggtgccttaagactcaaactttatcgcgccttgggtggag

SEQ ID NO: 80153 - DNA, 187 bp, Arabidopsis thaliana landsberg
tgccaagtcacacgtaactgcgtactttatatattactttagactggacagactgtttaggggcctcttgagccacgtccagtgccataaaccaaacctacggtgtactcataactacagttaatacacgggtcttctctggtcattgtgggtcgaaacccaatatatattaaacaggaccaagaag

SEQ ID NO: 80154 - DNA, 560 bp, Arabidopsis thaliana landsberg
ggggcctggcggccgccacgctgtccggcgtagtcgccgcagtgtgctggccgcgtcagcgcgaccgtttacatgttcgcgctcatgacgctctgcggcgacctgtacgagcgactcccggagggcgatcgtccggcccgtctccggcaagcccgctagccaggtggtcggcgtgcgcgatcagcgccgcggccatctcgtcgcccagctcgtcgcgcatcttctggcgcgtctcgtctgacagccgcggggggcgcggctgcggctcggtgagactgatgccgaggacttccttgagcctgcccagcttccgtgccgggtagtgagttcctgattcccatttctgcacgctgttgacgtgcacgccgacgcggtcggccagttccttctgctcccacccgagaacctgtcggcggtgccggatggccctgccgatgttcgcgccgggagcagggcgcacgctcatgagtcaagagtcgcccatcaactgtgtctaaagtaagcccactgtgaccagtgtggaacggcgtgcaactgtgtatggggggactttagcccct

SEQ ID NO: 80155 - DNA, 609 bp, Arabidopsis thaliana landsberg
  unsure (1)..(609): unsure at all n locations
gatcgaacagttcaccttgatgggcacgcgcacgatcgtcgcgcagaaatacctgccggcgatcagcgacggcgacaagcgcatcctcgtcgtcgacggcgaagcggtgccgtattgcctcgcgcgcattccgcaggccggcgagacgcgcggcaacctcgccgccggcggccgcggcgaagcgcgaccgctgagcgcgcgcgaccgcgagatcgccgaaaccgtcggcccggaactgaaacgccgtggcctgctgttcgtcggcctcgacgtgatcggcgagcacctgaccgagatcaacgtcaccagcccgacctgcgcgcgcgaaatcgacgcggcgttcggcaccgacatcggcggccagctgatcgccgcgatcgaacgtcgtctgtgaagtgccaccgttcgcgggcggcgcgcttgtcgatcggcgcgccgctgccgatactggcgtcatgagccccgatgactacctgaagcatcagttcctggtggcgatgccgagcctggaagacgagaacttcacgcatcccgtgtcgctgctctgcgagcacaacgacgacggcgcgatcggcctggtcatcaatcgcccngccgatctcaagctca

SEQ ID NO: 80156 - DNA, 508 bp, Arabidopsis thaliana landsberg
ctggcagtgatgcaagggcttcatgtcgggggtgccaccagtcagtgagcgccgtcggacgacggcggggcatatagcttgcccggattgagaatgccatgcgggtcgaacacctgccgcacgccgcgcatcaaggcgatttccgccacgctgcgggtgctctccaggtaagcccgctagaccaggccaataccgtgctcggccgagatgctgccgccgaactgctgcagtgtggcggcgaggtgcttggtcacgtgttctgcactgggcgatgaaggccgattcgtccatgcccggcggggtcagaacgttgatgtgcaggttgccgtcgccgatgtggccgaaccacaccaccttgaactgcgggtcctcgcggggtgagcagcgcctgcatggcgtgcagaaaatcctgcaccgcgctgatccgcacggaaacgtcgtttttgtagggccgtcgaggcgccacgctctcggtgatgccctcacgcaggcgcaacaacgcggcagc

SEQ ID NO: 80157 - DNA, 533 bp, Arabidopsis thaliana landsberg
acatcctaagcttggtcatggtacatactcgacgatttggctggctcgagacgagagatcccacatatacgtctcggtcaaaatctgtacagcagattcgaaaccgcccgagattaatgtcctatccaaactctcgaatcctcacatactgtcggacaaaggcagagctttgattccctcaatcttggatagattcagcatccgaggcccaaatggtgtccacgagtgtttggttactagaccggcaaggatgagcctttctgatgcaaaaaacggatcctggaccagcctttttcagcttgaagttgctcgagtcttagcggctcagcttgtgcttgctgttcattatatccattcacaaggcatcgttcatggagatcttcaccgcggaaatatcctccttcacctaccccgaaaatttgatcaattatccacagaaaagttatatgagcagtatggagagccggtgttcgagccagttaatcgattagatggccgaaagctcccaccaggcgtcccacaatatggtatat

SEQ ID NO: 80158 - DNA, 137 bp, Arabidopsis thaliana landsberg
ggattggaaatagcctgtctggatggtttagggccacccccgtcttctagaaataaaagaaggggcgtgaacttctttgtacgccgcatgccttactttttttgaaaccttttccggcagctttggctgacggagac

SEQ ID NO: 80159 - DNA, 268 bp, Arabidopsis thaliana landsberg
  unsure (1)..(268): unsure at all n locations
gaaannaaggcaagnaactaagngaagagaagcaaagattaatcagcaaaggaggaanccgagacccaaaaaggggcctccaggcgagaggcaaaaagccgcgaagagcaaaacnagccacgaaccgaagggaggcagcgggagacgaccaaacaaagcagacgcaccaagaagaaaggcaccaaaaaacaaaaacagccaggacaaaagcgagagcnacaaggaaagaaggcgcaaccagaaaccccacacaagaagccgcagaggg

SEQ ID NO: 80160 - DNA, 494 bp, Arabidopsis thaliana landsberg
ctaccctttaatactctgagatccgtgattattattatttgtccatctctttccacaaaccatacataaaaaattgatatgtgacgtcagaaaaagataatacaagtctacatatctcttcgtccatttatttaatttaattggtaaagaattgagtgcgcaaaattaataatttccaatttatcaaaaaaaaacacattaataattttattttttattttgttcaacttaaaaaaagaaaagaacacacattaataatttccaaaaacccctcttttctcatagattgaagcgtatactctaatttgaccaatctaatctagggtttctagtcacttgaagcttctcttaaaaaacctgtctcactcctcgtcaacctcttcctctcccgctgtcgccaagattgaatcttttttcaggtttgaatctatctttagagtaatgagtttctctgatttcccgacaaaacatgtcttaaacgctggctttcttct

SEQ ID NO: 80161 - DNA, 344 bp, Arabidopsis thaliana landsberg
aaataacactgtatgaatatccactctttcattcgtaagttttgtatttgattgacataattactaatgattttaaattttttaagaaagacacaacatctatagaatattctaataccactgctatcgttactacttcgatcatttcgtttgacgatgtatgatgtcttctaatttactatctataagttccgtttaataggaaggatcaggcattggtattggaatactgattagagcttggacctaagttagagagatcagataagtctagatgaaaaggtaatctattacctggtcaatttgtataaacattggggtccgttctatttatatagatgtca

SEQ ID NO: 80162 - DNA, 283 bp, Arabidopsis thaliana landsberg
caaaaggctggaatatataaatataaaaaatagaattatagaaattgaagctttttcccataaaactaaatcatccttaataatcgcggaagcaaaatttgtagatgtcattaaccagaaaataagagaactgaaattaagatccgacttgggttagagcttgagcctaaacaaaagatacgggtctaaagtaggcctattgatatgcacaggacgattggttgcgctataaagttacctattgatatacatagcctgaatggttgagctatcagagatttat

SEQ ID NO: 80163 - DNA, 459 bp, Arabidopsis thaliana landsberg
  unsure (1)..(459): unsure at all n locations
atttcctttagcattgcattaatcagttagtgccttaggaaatgaaaaatgttgttcatcaatgatggacaatttgaattttttgttatttgataatgaatctaattatagtaaatcaataactgatgcattttccatttgacattcagttattgaaaaagtgaatttaaaacttatataccacatcgtatcagagccttaatcaaaaattttatgggtctcctatgggttaacattatttttatgaaagtaaattataattcttccctaaaaacttatgtattttttagtttcatcaaacttatcatggtttcggatcacgtctctcttttgttttttggcggaaaataaaaaaatgttaacccattagaatttggatcaagactttgataccatgatacatttgatgagaagtaataacacanaatatttatattgaagattatcatagactcttat

SEQ ID NO: 80164 - DNA, 559 bp, Arabidopsis thaliana landsberg
gcagcttggccaccagatatcgctgcagagagagactcgcagggaatgcgttatacattttgtctttttctccaaaagcgtacaccgggacgaggttgatgacttcatctgggttttctgctgccgattgcaaggctaatcgaatgaatcccttgtgtttggcggataaaagcacttcgttatggtcgtcgctgatgagtaacatttcatgttgtcctccggggaccagcaaaacgtttttgaatttcatcaacgcgtttgcaaaactactttgactgacttcaacacctccgttatactgagtcacttctcttagaaacggaaccagatgagtcaccgtcgctgtaagtgtataaggcacaatgtttgggaagagttccatccacatcgaggtgttgtggagataagaggcgcccatcgggaacataccatgtggtgcgtacccaaaaatgtgcttctctcgagggttcaactctcgctcgcgaatgatattcatataccaatatgcggaaagctcatcatgcacccatgaaccacgaagattccaccatcttcgtct

SEQ ID NO: 80165 - DNA, 528 bp, Arabidopsis thaliana landsberg
  unsure (1)..(528): unsure at all n locations
atacggacttcttgccttccatgacaatactctccatgagaagcgagcttttgcaatcgacacttttatatggcctcatcacccataatttcatctccttcatttatcttctttatatttcttaagagtaacggagattgtagagatacaacattggaagagatgacaaaaaccgggatatcaatctaccggatatatatgtcacaaaaagattttagtatatttttagtaatttgatttctactatattctttagttttcattagatctctttatgttatgttatctatataagtttggctttggattttgcatatattaacctttccgttcaataaaatatagttttaccgcttcttatggtatcaaagccttcatccaaaacttactcaaatgagattgactctcatgttaaaacagagaaaaacagagaaaaaacaaaagatcattaaagtcactatataaacatcatgattcatctncatctncacccttaatttctntactagtccgttcgttctcgccact

SEQ ID NO: 80166 - DNA, 556 bp, Arabidopsis thaliana landsberg
  unsure (1)..(556): unsure at all n locations
ggataagctcgntagggttcattatgtgcgtagagcgatagagttgtttgaggaaagtgtatgttttggggtgaaatgtagtactgagtctttcaatgcattgttacggtgtctatgtgagcgttcacatgtgagtgctgcaaagtcagtatttaatgctaagaaaggtaatataccttttgatagttgtagttataacattatgattagtgggtggtcaaagctcggtgaggttgaagagatggaaaaggttttgaaggagatggtggagagtggatttggtcctgactgtttgtcttatagccatcttattgaagggttgggaagaactggtcgtatcaatgattctgttgagatctttgataatataaaacacaagggtaatgttcctgatgcaaatgtttacaatgctatgatctgtaatttcatatctgctcgagattttgatgagtctatgaggtactaccgaaggatgctggatgaggaatgtgaacctaacttggaaacctattccaagcttgttctgggctcattaaaggccgtaaggtttctgatg

SEQ ID NO: 80167 - DNA, 550 bp, Arabidopsis thaliana landsberg
  unsure (1)..(550): unsure at all n locations
tacaaatgttttttttttcaattttattaaaatatgaaaatctcagaaacaagtgttgtgaattgtggtttaaagtcggtaaagatcatatttcaggaatttatgttaattagaaatatatggttatgtaattatgtagaaggaaacaagtatattcaaaataatgtattaattcgttttgtttaaaatttatcattcccaagaattgtaaaattaacctgaacaagcaaaaaaacactcacatcaccaaaaaatcatcgaaaaactagtgattagaatttagaacttttggtagtatacttttttcaaagcagtaaagacatgtgacaagatttatgaaaagttaatgtctaaggtgactacgttttttaattgataaatttaggaagagctatactaaataagtggtttaatcactcttttcagttaaacaacttaaagaccatagcattttaataatatagtgatagagaaatagaaagaacaaaaaaacaaaagacaccacctanaactgactttcttttttctgtacaaccttcagttttgatga

SEQ ID NO: 80168 - DNA, 259 bp, Arabidopsis thaliana landsberg
aaaaacaaattaagaccaacagcgcactaaccaaaaacccacaaagggagtaggtcgaacaagacagatttacagttaacacggaaaacgaaataccggcgggagcgtaaaacaacgaaccacgaagaaccaaccaaggcaagaaaagggaaggcgcctaagcgagcgaacaaaacccggccgaaaacggaagagaaaaaccggaaaaaggaaaaaaaaccgaccgccggaaaaaaagccagaaaagaagcccggcaaa

SEQ ID NO: 80169 - DNA, 516 bp, Arabidopsis thaliana landsberg
ttgtctctgagtttggatcaagcagtacgcggaatcgctctagcttctcacggtcaagcagtgcgttgtatctatctcaaaccacatcatcaagcagtgtggcgtattcttcttactccacaacaccaaacagttctaggaattcctctcactcacgatcaagaagttcggagaatctgtctcaattccaatcaaacagtacggggaattcctatacatcctctcaatcaaacacagcgagtggatccaagcaaggccaaagttctaaaaaaccaggaaagtaagcatgctcggttgcaaagaaagggaggaatgtcaaaactaagctctgaaatttttgacaaagaaaaagagacttgtcaagaataaaggtccagcatatttttttctagtctagtctattagatttcttctaaaagagccaatctgaggtggtgaacgggttgaccttcatggactagaaaaaaaggtattgtgggggtttattacatattaattgggcatgtattggttttg

SEQ ID NO: 80170 - DNA, 390 bp, Arabidopsis thaliana landsberg
cagattatctcattgtgccgggtaaaagcattgggaaaacacagctgtatgaatattcagaggcgctttcagccaccttaggcaaacctgatttctccgatgcctgcatggggaaagcgtggccgctctggttcgggcagaaaagagatgaacataatttccgcacagagctggatggtgatatcacttctaaagagagacacatgtcattcaaagcgatcaaagtgatacgcactagatccttcggctttactgaaaacgactggatacatgtgtatccttgcctggctgccattgaaaaatattgttgccggacaaaggatgtagtattgtaccgacacgatctcctgcagatactgatatcttactacctacagctgggcatcgctt

SEQ ID NO: 80171 - DNA, 320 bp, Arabidopsis thaliana landsberg
  unsure (1)..(320): unsure at all n locations
aaaacacaaaaaaaggnnnnnnnnnnnnnnnnnnnnnnnnnncgattanaaatagttgcagcaaacaaccaaacgggagccatggaaatatgaagggaagaccagacacgcccaaanacnngcganncaagggaaaaaaaaagacccaaccgacagaggaagcaccgcaaagagcaaagggaaagggcacggaccgacacaacaagagccggananngagaccacaagaagagacaaagaccaggaaccaacgcacgcaacagagcaanccccgaaggaacagagcagcggcggagcaacagaaccnaaagacagcaagg

SEQ ID NO: 80172 - DNA, 488 bp, Arabidopsis thaliana landsberg
  unsure (1)..(488): unsure at all n locations
tgtaatttaaaacctannnnnnnnnnnnnnnnnnnnnnnnnnnnnnnnnnnnnnnnnnnnnnnnnnnnnnnnnnnnnnnnnnnnnnnnnnnnnnnnnnnnnnnnnnnnnnnnnnnnnnnnnnnnnnnnnnnnnnnnnnnnnnnnnnnnnnnnnnnnnnnnnnnnnnnnnnnnnnnnnnnnnnnnnnnnnnnnnnnnnnnnnnnnnnnnnnnnnnnnnnnnnnnnnnnnnnnnnnnnnnnnnnnnnnnnnnnnnnnnnnnnnnnnnnnnnnnnnnnnnnnnnnnnnnnnnnnnnnnnnnnnnnnnnnnnnnnnnnnnnnnnnnnnnnnncctgcctattgaaagagagggtttgtgcaacgcaataactaaatgggcgtccgaatacttgttttgattgaccaacataacaagaggccacagtctctttgacctagagatgaaatcgtcttccgaatccacgaatttggcgtcctggacaggggttccc

SEQ ID NO: 80173 - DNA, 572 bp, Arabidopsis thaliana landsberg
  unsure (1)..(572): unsure at all n locations
tactnctctgttgnctggatcttgaatgttttattaaactaggattcaaagttagatagcagggaagcgannaggacttttatcgaacttttgttagaaacatattgttgcttccagagtttttacttggaagttgattgtgttatatgtgaacgtagctttcaatatttgaaaagtggtttatttagactttcactggaaaaaatttacttatgtagagactggtaacaaaacaaaatatagagtagaaagtggaattactgccgaagcaaattatgaactaactccgaagtgtatgtcatgcatgctatagtggcaatctctccggcaacacgttttaaagaacccggcaagacaatgaactggagacagtctgattctgcgattcaacaattggtttaagatatcacattaatcaccaatataatttagtttactatctccaatgatcaatatgtcacaagagtcgaatgccataagaaatcagaagcaaattgaagaaagaagaagacacattcttagaccattcaacanatcccaaagctactcttaaccgtgtcgctcaaacgaaa

SEQ ID NO: 80174 - DNA, 251 bp, Arabidopsis thaliana landsberg
  unsure (1)..(251): unsure at all n locations
aaaacacgagattggttttgtcctgcaaatcctgctaagtaatggaaatttaaatggcttcgcgacgacaaagcaagggggagccggtcccataaagagaccgcaacgcccagagcnanacgcnnnanncannnnnnagcgaanaccagnnnaccacaanacaacaccgaaaaagaagggaacacccacgccaagcccagaacagaaaacaaacgccgaccaanaangacgaagaagcggcagagaagaaa

SEQ ID NO: 80175 - DNA, 444 bp, Arabidopsis thaliana landsberg
tatggtcgaccaatccgcatttatataaactattcagacaatataaagattaagcttggtgatatgtagaccaaacatgacttcactttatttgtttcccaaaaattttttgaacatgagaatttcgattacagtgattaaaataaatgtgcttgttaagttgggaaaatatgattttttttggtttcactctaataccatatcagtcgagaaggtccgatcgatagcccactttttattttgtgtgggtaagggtaactggagaaaaccgcaaaaatagacacttaactacttgactaaaaacatttttcaaaatatatatgattttatgcaattaaaattccacaatatatagatcattgtcattggaaatgaattttgaagatgcaaatgatttggccgggtggattattgtctaccataaattgaaatttttttgcacta

SEQ ID NO: 80176 - DNA, 520 bp, Arabidopsis thaliana landsberg
  unsure (1)..(520): unsure at all n locations
tttacttaaaaattgtaacctattacctgcacaatttttataaatatttggttcggttctatttagatagacgtcagatttgaatctgctttcgtaaaacaaaaaagtaaaagattatttaattttaataaaaaaatggattgctaaattgaaaaagcactaagacattcataatcgaacgaggcgcgagcgtaatttgatttccacaccaatatcattatcatcacttgttaaactcacttacgtattcgcttacgtgctctaaacatatagtaataattactaatttatatatttactttgtattaaaaattggttagactatttcatatatataaacatatacacatattttatcatataagnntgttcttatagaaattggttagaatctcgtcatttaatttaaactaataagttgaaaaatagttactttttcaaacataattcaaaaagtagtcattttactaaaacgtggaattattaaagcaggataaaaaataattcccaaacttatatc

SEQ ID NO: 80177 - DNA, 268 bp, Arabidopsis thaliana landsberg
  unsure (1)..(268): unsure at all n locations
gaaaagcacgggacaccgnnnaccatgccaaagggccttcaagaagaccaattcggaatgcggaaaggcaggccacaaggggggcacggaaggaaaaccacccnccccgccacagagagnggcannaaacngacagaggcnccgagaacgcacaggcaanngcngaaagccaaccccccaanggaacagggnagagnaaaagaaccaggaccngccaancgnncgcgaacaanccncnnancagcagcacgagaaggangagcancac

SEQ ID NO: 80178 - DNA, 439 bp, Arabidopsis thaliana landsberg
tcgtccgatttttatgacatcgctcgcgtttattgcaggtctggttccactgtgtgttgccaatggtgcaggttcgattggaaaccggtcaattggaatggccgctgccggcggtatgttcgtgggaacttttgccggaatctttctcgtacctggtctttacgtgattatggaaagttttcaaacatggctgacgaggaaaaaatcttcaacgagtcattcaaccgtgaacgcaacatgaacagaaccttgatacgtattgcattgatggtggctgtctcttcttttacatattcatgtaaactttcaaaagagaacgttgcatcaaagatctcattaccgaaaacatttgtaataacaggaaatgacagctcgtccgtcggatttctcccagaagaagtttttatcgtgacagcttgctaccacgtgtattaataca

SEQ ID NO: 80179 - DNA, 488 bp, Arabidopsis thaliana landsberg
tgatcgatgccgtgcatcgcgatgcaacgggaggattattggccttgccggtcgtcgataccttgaagcgcgaaggtgcggatggccgtgccgatgaaaccgtatcgcgcgaacgcttgtgggcggcgcagacgccgcaaatgttccgctatgctttgctgcggcgcgcattggaacaggctggcagcgtaacggacgaggcgagtgcagtggaagcgctcggattgaagcccttgctggtcgaggggaacgcgtgcaatttcaaggtcacgctgccgcacgatgtcgcattggcggagctttatttgaagggattggcatgagttacgtaccgagcaatttccagccgtttcgcatcgggcagggatacgactgccacgcgctggtcgaaggccgtcaactaatcgtcggcggcgtgacgattccgcatgaaactggtttgttgtggcattccgatgcggacgtgcttgtgcacgcgatcaccgatg

SEQ ID NO: 80180 - DNA, 652 bp, Arabidopsis thaliana landsberg
  unsure (1)..(652): unsure at all n locations
aaggcagaaatacgaaatagccaaagtcaacgtttcaggttttgagtatttccgaaataccaaataancgaattcgggataaaagagattcatacaataacaaaatatatagaattataaaagaaaaacaatcatatcacacaaaatttataagattatctgtgcatacacacacaaaaaaaaagatgtcaaacacttacttttatttatcaaaaataaataaataacgataatcagttctaaaaggaaaaaaatggtgaatgtatgaaaaataaagtaaatagcaatgcaccgtccaaaattactgggtaatgccggtagatacaaaatctggaaaagactgtaatccgatacttccggttcccggtgagagatggcccatcccttgtatttaatggtgaaaccgtgacttggggaagcggtaattagagaaacgtggaaacggcacgcagatttttttgtatcaacatgtcattctctaatcgctttcgcaaaacagccaatggtgattgctgtggtctgcacgtccttccacacattatcctgtttcaatatctgcaattttctttttataatttcttttattattacactgattaattaaaataaattctatagagatctttntatatttgagtaataaaattttaaa

SEQ ID NO: 80181 - DNA, 589 bp, Arabidopsis thaliana landsberg
ctgaaaatctaaagatcaaaagttgttaaatactggattcattccacatttgtagccttttgtcatatcttagctgccatctgccatcagtttgaatctcattatatatgtagctaaatattagggttgagacatgttgaatcaattaaaaacataaaacgtagaatcgacgaacattattcagttatatatatagtattggctttggaactgcaaatgttttgactaattaaggacatgatcaaaccccatatccgtttcttccggatgtattgaaatttctcttgtgggagtttttgtgttttgaaagttatatgttcttctctagactctagtctccagactctacccattatattggacatgatgggatcccatcttcaaatctttttgcttatgctttttatgtacttgttatatataaataactttagttttgttgataaataaagttcacattccaacaaataaccaaaaaactattcctgattccaattttttatttatttttgcatatatgttatatcatgtacacgtctttagtaaagtgctctaattttataaattctaatcattcacgagaattagc

SEQ ID NO: 80182 - DNA, 170 bp, Arabidopsis thaliana landsberg
  unsure (1)..(170): unsure at all n locations
cagaaacaannccnaaagggacagaagccgagccccccggcgaaggagaccagaccaccaagcacgcaggcgaagaaaggaacacgccagggaccccagancaagagaacacaaacaggcangaggaggccgccgccccccggcagggaaaacacaggcccagccacaac

SEQ ID NO: 80183 - DNA, 201 bp, Arabidopsis thaliana landsberg
gatgcagttaagtagcaaaagcgaaattgttggtagtgggtgcaaaacaacttatagaaaatgagcactcaggatgccgcgcattggtaagagacgacaaggtaatccgacttggggtgggatccctttaagacttaaagagtgactctttctaaaaatttcacatcttatgaactgagccattttgggatatacctactc

SEQ ID NO: 80184 - DNA, 324 bp, Arabidopsis thaliana landsberg
ttcaccagatagcggattggatcttaaataatttcaactaattagtatcaaaactactatctgcattaatttctgtcggaaaccatcggagaaattaagggcatacaagaccatatttttccttctttgagactatcatgaacgtgttgttgtgacaagtatatgtcttcttctttatttactttaaaaattcctaagaaggtgaatttgcatcaatcacttaaattcagaattttattaccattattttctgaaataatttaacctttctatcatttgaacaattgatgctaggaattattttggatcttttttcaatgatgc

SEQ ID NO: 80185 - DNA, 539 bp, Arabidopsis thaliana landsberg
aaggtaattcattcattaaatttgaataatgcgatctcaatttattgccttttgcctgtgactctctctacgcacgagaaaacgatgctatgggtacttgtcatgctgaactgaaggcgcctaccatctatactgcattgtgaataattgagccgcgtaatccaactttgtacagtctctacgtttaccagagataaattgtcatcacaaactatagaagttcaccatatttacgcttcatgttcgagaacttgaaatagatcagattcaaaaccctaatcatatgtgcatgaagataattgatcgtacgcattaattaaccagttaagaagaaaacaaaaggatttgatgagaaaattaattcgagggacaagtgcatatgttgttgcatctaatgaaaggtgtttatgcagagaagaatttgtggttgggaagatggacaacgaataagatgatgagtatgaaagatgctgcgagataggaaaaggtattttcattttatgaatatgtattatattggtttaggaaacgttattgaa

SEQ ID NO: 80186 - DNA, 646 bp, Arabidopsis thaliana landsberg
  unsure (1)..(646): unsure at all n locations
aggtcgacgccgggcctctgcccccgttgctctgatgtattcatttttaanctcgacgcgatccgcactggccctctggggctgggtgagcgcattcatatcaacactttctgccccttcatcacactttcggnatggtaggatcagtggccctatccannnnnnnnnnnnnnnnnnnnnnnnnnnnnnnnnnnnnnnnnnnnnnnnnnnnnnnnnnnnnnnnnnnnnnnnnnnnnnnnnnnnnnnnnnnnnnnnnnnnnnnnnnnnnnnnnnnnnnnnnnnnnnnnnnnnnnnnnnnnnnnnnnnnnnnnnnnnnnnnnnnnnnnnnnnnnnnnnnnnnnnnnnnnnnnnnnnnnnnnnnnnnnnnnnnnnnnnnnnnnnnnnnnnnnnnnnnnnnnnnnnnnnnnnnnnnnnnnnnnnnnnnnnnnnnnnnnnnnnnnnnnnnnnnnnnnnnnnnnnnnnnnnnnnnnnnnnnnnnnnnnnnnnnnnnnnnnnnnnnnnnnnnnnnnnnnnnnnnnnnnnnnnnnnnnnnnnnnnnnnnnnnnnnnnnnnnnnnnnnnnnnnnnnnnnnnnnnnnnnnnnnnnnnnnnnnnnnnnnnnnnnnnnnnnnnnnnnnnnnnnnnnnnnnnnnnnnnnnnnnnnnnnn

SEQ ID NO: 80187 - DNA, 635 bp, Arabidopsis thaliana landsberg
  unsure (1)..(635): unsure at all n locations
aaaagaaaagtattaagtacgtctgtacgtgtgacgtttagggangaaaagatggtntcttttttctnccannnggacgatgattcaattttgtaggatgatattttctgtctttttgcttaacagaaaattagagcttttttgaaactagaaacttttttttataaccaaagtccatttccgttggaaattttggaatgaagtagatggtgctattttcaataatgatagcattctatgcgatttatccatttgaaaaaatgttacatatataaaggtgttttcccgtgaccttcttttgatagggttgagaaagaaaagctagtggaccatcatgcatttttgttttctttttggtgtgtgaaaaaggattctttttatttcaaaggcatgagaaaaaagagaattaggttgtggaacaatttttttttttttgaagtctaattttctcaatcatacttaaattctctaatagtcctaaaagtactttttacttttttcatagctaacttttttttttatttggtcttgactttttgtatgctaattcttcttaaccccaattatgttttcttaaacataaataattataaaataaattcaccgcataaaagtgggagagagttaattgatag

SEQ ID NO: 80188 - DNA, 352 bp, Arabidopsis thaliana landsberg
gtatttggcaagccttccatccgcgtgtggctgtcggttaattggggcatgaactgattgggctttgcggtggagcgggcggcggtcgtgcacgcgcgtttgcaagccatggaagccgtggccgacgacatcatgctgatgacgcattttgccgcgtgcgacgaattcgacagtccgcaaacacgcgatcaaatggccgcgtttgaacgcgccaccgccggcttgtccggcccgcgctgtctgagcaactcggtcgtcgtgctggcgtggccggacgtgcgcgggcagtgggtgcgcaccggcggtctgctgtactgcttgccggtggtggaaggccgttcgggggctgatt

SEQ ID NO: 80189 - DNA, 566 bp, Arabidopsis thaliana landsberg
cgtatgttaccccgccaatagtagccagccagttaaatgtttttaccgctgaatgattcgcaataattaacgtagtaatcatgaatactcctccaaggaatggattcataccagttacaaacatatgatgcccccaaacaataaatgaaagcacggtaatacctatcagcgaataaaccatcgcatgatatccaaagattggcttacgtgaattggtagccattacttcagaagcaattcccattgcaggcataattacgatatatacctcagggtgacctaagaaccaaaataagtgttcccacagaatagggctaccaccttggttaggaagaacctggccttgaataacaatatcagacaagtagaaacttgtaccaaaactacggtcaaaaattaataatacaacagctgctaccagaaccgggaaagaaagaacacctactattgcttgtaaaaagaatgcccaaatggtaagcggcattttccacatatccatccttttagtacgcatattcaataccgtactaatgtaagttaatgcttccattacaagagatgcacaa

SEQ ID NO: 80190 - DNA, 501 bp, Arabidopsis thaliana landsberg
gagtctcctgactggaaattatacattcagttcttatatcagatggatgcgtaacaataatcgggaattcgtgttccacaagaccattacggtcgttaatcccttccgtccgctggaaaatatcgtaagctctcaaacatccgcataccaggtcaatttttttccggaaggcggaaagctgataacagggatcagaactaaaattgcattttcagtaaaggataataacggaaaaggcatcgattgtaagatcgccattgttaacgaaagcaacgatacgcttgccagtagccgcacgacaaaatttggtttaggttacttcttttacacagcttcggcgaaatcaccccgggttgtagttatcgatcagaacaaaagggcttcaatacatcagctccccgaggcgttaccggaaggcgttagcatccgggtctatgatgatgaaaagcaaatccggttggttgccaggaacatctccttagcgaataataccccttgggt

SEQ ID NO: 80191 - DNA, 580 bp, Arabidopsis thaliana landsberg
  unsure (1)..(580): unsure at all n locations
atgaggaagaggttgttataaggaacagaagttaaaaattgtgaaaacgaancaagaacttaattccataaacgatgatccggnttcttgaggtagaagcgtcctcaagagaggtaaacacttgttaaagtgcttgaaggtcaagagtttgtagtcgcccgagcacaatggcgactaacctcacattaactttggtgtttatggctagtcctggtattagcagaccacttgaatttagtacctagctaacggacctattgcaaaactctgcagatttaccatttttcagggaagagtctgagcatcgcttctcaacttgcacaactcctcttcatttggtcgtttactagtttgtatcaacaatttacctattatgtatcaaagttcaaaaggttaaaataataatgcgaaaactattaattgcttggtaggtcatagctaaataacatcccaaccacaagaactattgaaattaacttttggacgacaacatgcataaatatatgttaaaatgtaatacacgataatacgaaagtgtcacatcacgaataaaaatcatatacccagtaatactttttac

SEQ ID NO: 80192 - DNA, 574 bp, Arabidopsis thaliana landsberg
  unsure (1)..(574): unsure at all n locations
gctagctcgatatagccaactcacacatactaacgcaacgatactgaaaaccgctatggtagctgcggctctatttagatagggggtaatagcacacagggaagttaaaaatgtgattcgcaacaacatcttctttctggcgcgcaaaggggcatggcctttccttaccaatttgtcggacaaaacggaaacgcctaccgcacctaaatcggcaattaaaaatggaatccagccgaacatccctatctgagcaagggataggccagactcttcctgcaaatatccgggcagccaaaacaagcaaaaataccatacagggtcgctaacaaaccgtattgcaataatagcccataagctttttctcttccataattggttccacgtaaagcctgttgtttcatccgctactgtagtttgcaatgcttctttttggatgntaagccgtggatctctgtataccagtttccaggcgatggcaataaggagacccacaatccccatcacaataaaagcggcatgccagccataactgatagctaaccaggcaacaagaaagggtgcgataattgccccg

SEQ ID NO: 80193 - DNA, 572 bp, Arabidopsis thaliana landsberg
tcatggaacacaacatcacatcccggctcattgcatcggtgttcttcataaatgtaactgcaaccgggatgtggggaaatgaagcttgtattatcttcatcggtcgagtagcatcctttacacttggtgaactcgaagcgtgtaaaaggtatcaacggatgctcatgaaatggtaacaatttttcaaggcgggatgcttcttcgtccatgccttcattaaacaaagctagaaagttttccatggtgatgttttcttacttccaccaaaacacaaagctcttctcttctgcactagtttcagacttggtttcttgtttttctctctttcttttctttcaggattttttttcaagtggtttatcattttcagactttgcaaatagttaatatgaattcgcaccacagaaatgattcttttcattactgagattgagaccacatgtgttggcttcatccttgcattatttaattaactcagaccacatatgttgactctgcaactattgtgtccggccaaaacataaataattgaatgaatacaaaaaagggtttttcttgcattaaatggaata

SEQ ID NO: 80194 - DNA, 531 bp, Arabidopsis thaliana landsberg
  unsure (1)..(531): unsure at all n locations
catcgagggcctgtttcttggtcactggctttctgggtacgttcttagggttctttcgccgcaggctgctctggaggccaaattcagacgcggcttcttcaatatagccatgtaactcatcccgtaggaaatgggagcactgaactcctccatgtccgtcaaagactccaaaatagaatacctgaggatctccaagagcgctatctgcagcagtaggctctcctggcttctgcttcacgcttgttggcgccctctttgcaaaggctggcatgtcaacgatccccgcctggtctgcatcctcgttgaaggacggtttcctcgggcggttgctgtgccaaagtgatgcttggcccgccgcaatggaatccgaacgactgtcaggttttgactaggcatgtttggtatcgagacagcnggggaagacccaggactnggggtatgtgggtgtcgaggcatcgcggngaagcttgtggccaggcccatgcagccgaccagagtctggatgtaaggagggagacggcagatgagtga

SEQ ID NO: 80195 - DNA, 600 bp, Arabidopsis thaliana landsberg
gacatagtcacgttctggcaataataggggctgggacttcaatgtattaggttttcatttttgaggaaggagtgtgggggcaatccagtatttcccacagaaagttcagggcacacgacttttgaaaacactcttgacctatccatcaccagaaaaagcaaactggaaatattttgcctcttttgttttgatattgatttaattctgtgtgcatgcatatgtgcaggaatggtatagtattcatgtggaggtcaaaaggcaagtcctgggggagctactttccattgtctgagttccaaagtctgaactcaggttgtcaggctttggtgtcaactgtctctacccactgattcatcttgtcagtccatacactgtaactctgactggctgagtttcctcctcaatctgactgttcccatatattagaaagctaaatgacacaaggtagagacttctatctttctttgactgcccattcttttatttccttgagcaaatatgaccagtctcttggatccctcacagaagccaactctccaaacacaatcaccatttcccaacatcttcgcagcttgaagctatgtgtagtcatgtgaataa

SEQ ID NO: 80196 - DNA, 358 bp, Arabidopsis thaliana landsberg
agtgcgaaatactgaaatgtatgtggaggatatgtggaatttattaatcgtcagattttagttaactggttggtgtgctgtcttattttctgacgtatggaaaacacatttatatacaaatcttgataaaataataaaatcaaaagtccagtattataaaagtttccccaaattagtgtattactataaacctttatttaggggattgagacaaatattacacgtaactataggatctagtctatttcaaaaagagactgagaattaattgttaatatatactataagagtttattcattgttgtaattaaaagtaagtgtcaaatttagattttaaaattcttagttaattaaaatt

SEQ ID NO: 80197 - DNA, 281 bp, Arabidopsis thaliana landsberg
  unsure (1)..(281): unsure at all n locations
cggccgacaagacgaagaaaccagccgccaagaaacagacccccccgcagaaccccaaaaccaaccgccaggggcccgcacgccacaagacccaagcgcccaacnggagcaaggaggacccgcgcgaaggcaaccaggcgccagccgngccgaagaacgggacccaaaagccggacaaggccgacgcgccggagaagcgcggccccaaagaaaacgaaggcgggngaccccccggccggaacaccgaggngaaccacaaccggcgccccaaggaagaaaac

SEQ ID NO: 80198 - DNA, 504 bp, Arabidopsis thaliana landsberg
ttagattccaagtttctttctttgaaaactttagccttttatagattataacttttgcactggagtccagaacacgactcattagcttttatccatgctctgctttgttctctgtttttcaggtttattcattctgttctttcttgttcgtcaagttaacaaccttttgtcagactaaagcaccgcactattgcttatggatagattctaggatttaaattagacagattcagattcttagggatttgagacttaatctgtgcttttgaatatgctgaagatggtaaaccaaagctactctctggttcacaagaaggctacacaggacatgtcgatgggaaactcacagaagcgagaatgaatcgtcctcgaggattagccatggacgacagggggaacatctacgtcgccgatactatcaatatggccatacgcaagatcagcgatgacggtaaactacaattcgtttgcatgcgtttccgctttgaaaaacggaatttaatt

SEQ ID NO: 80199 - DNA, 644 bp, Arabidopsis thaliana landsberg
  unsure (1)..(644): unsure at all n locations
aaccatcgtcaacgaaaattataataaacaaataaaacttcggctgagacctttctatgctgcagcaaacgctctttgaacaaccatcgcatcattttgccgatctgtatctgaacttttcactgaatcaatttcagcatccgtcagaagggcagagtcatccctgaaggtttagtcattttaataagtaaataaaaataaactttaataattctcacaaacatggttaagaaacaatcccaacctcttgtaatgaacactccatcctccttcaccgtctaatgacagaacaacatcatggaatgcaacaagcgctggacgatgggagattgttatgcaagaagttcccatagctcgaaccttagcggcaaagcgttcttccatatcagttgtgacagcacttgtgcattcatctagaattgcaaatttgggtttgtggtagaatagtctggccatacccaatctctgttgctctccaagagataattcatcaccccaattaacctctttttcaggttggtagcgatccaataaatattctagatcaacctacaagcaaaagtccacaaaaataagcgtaacatacaaaacactaacttaaaccatcctagtatagaatagagaaacanggatactgacatttt

SEQ ID NO: 80200 - DNA, 397 bp, Arabidopsis thaliana landsberg
  unsure (1)..(397): unsure at all n locations
tcttaaaaccagcattcaaaagatttggatcacaaaaacttgccatttttctatccgttcctgattctcacgtagctggaggctataaaaccacacgannnnnnnnnnnnnnnnnnnnnnnnnnnnnnnnnnnnnnnnnnnnnnnnnnnnnnnnnnnnnnnnnnnnnnnnnnnnnnnnnnnnnnnnnnnnnnnnnnnnnnnnnnnnnnnnnnnnnnnnnnnnnnnnnnnnnnnnnnnnnnnnnnnnnnnnnnnnnnnnnnnnnnnnnnnnnnnnnnnnnnnnnnnnnnnnnnnnnnnnnnnnnnnnnnnnnnnnnnnnnnnnnnnnnnnnnnnnnnnnnnnnnnnnnnnnnnnnnnnnnnnnnnnnnnnnnnnnnnnnnnnnnnnnnnnnnnnnnnn

SEQ ID NO: 80201 - DNA, 457 bp, Arabidopsis thaliana landsberg
ttatcatattctatagttgattgcgcaaaaggctcatattatatgtagtttctcttccaagttccaataagagatttctgggatttaaaaaatgctcaaaaaagttcaacatggaaaataattctaatggatacatatataatgacatggaaacccccaatacttgactgtaaataatgaaaactaatgtttaatttttattagagatttagaggtgcggtgaatctcatatcaagtctctcgcttacaaataaaataaagaaatactaaagtattagttaaataattataagagtctctaaaaaagatttagaacccctttctgtttcaaacgttgagtgcctatcctcctgtctttattttcataattaataaaatttttgcaaattcaatatagatttacaaatcaacaaaccaataacaaccccttaatttatgatctaattgctgcaaaaaa

SEQ ID NO: 80202 - DNA, 436 bp, Arabidopsis thaliana landsberg
ttatattttattaatatgttgaatggtctttattagtatattaatttatgatgctggtttttatagttagttaatttcacagattagagtaaatcaacaaagatattgaatgatcatctgagttatgatgttcagaaagggaccattctatgtcatacaacattaaggctaatttccagatactatacaccaatcatcgttgaaattataatgacgaaaagtcaatcgatttacttgacctgtactctttgattgcagtgggacaaacttcaaataattaatgctcttttattttattttagtttattttttaatgtcagtatattatttggatgattcaaataaaccaaaccgattaaacactatacatatataaaatagattgtggttgtacttttatacgaatatggtcttcgagaaattaaagatttctttc

SEQ ID NO: 80203 - DNA, 353 bp, Arabidopsis thaliana landsberg
cacttagctgtcttgaccatctctcgggtttataattattgaatttttcgaatatttattgtctgctagagaatgaatagaaaacatgtttgttagagaacgaatacacacctctctaatcatcatatcatcttgtaaatcgaaggatcgcattcactgcctttacaagagtcgtcattattgggcctttaggagataaagtacattccaccactaaatgggctgtaaagagagcacgtagtaaactgattattaatgggctctcaagcccaatcttaatgagaacatactctggcacacaaagctggatctgaaaatatgaatcagattgcatcgctgattcaaacccatgc

SEQ ID NO: 80204 - DNA, 286 bp, Arabidopsis thaliana landsberg
  unsure (1)..(286): unsure at all n locations
ggaccgngaaaacagggggncgatgagacggccacccgaactgcccccgcgcaaagatgatttaggcgaaccgaccagacccgaacgccgcggacagacgaaggagacgaacgccgatcccagcagccgagaagacgactaaggagaccggcgcaagccaggaacaaaccgccaggcaagatcgggaagcagcgagcacatcgcaacggatgcgacgaacggaaccacacggagaacggggggcccgagcccgagaaggggatcgacaggaggaagaacaaccaag

SEQ ID NO: 80205 - DNA, 452 bp, Arabidopsis thaliana landsberg
tcctttcgaagtatcctaaatatacatcaattttctttctcttttcattatctatcatttttattctaatatctggtgtcacctaatcaagataatgtgtgtaacattaacgaaagaacttcccatgatcttcttttttccttatggaccaatctccaagtattaatagcactatactttttcggagtattcaagtgacaaaaacctgatgatagtcattgaaattgaaacatgcgtgaaatagcaggggacatgcctttcgcacaagggcgacacttcacctccatctcattatattaattcacctctgcctttagtgcatgtccaacttgtgcatgtctttttcaatctagctattcatcttaaatcggaaatagttattcagaccatcttacattgtaagttcgagtattccagtgctatgcgaataccaaaaaataactaaaatgaag

SEQ ID NO: 80206 - DNA, 141 bp, Arabidopsis thaliana landsberg
gaacttttaacccggacgatcgaatgggcgatgaaagatctatgcgggttacgagggaataggtctttccaggtgttttgaatatcgtgcgacacagagtccgagcacgttcatcagagccggggtcccgagggattcagt

SEQ ID NO: 80207 - DNA, 112 bp, Arabidopsis thaliana landsberg
aggtactctactccttctgtgttacactttgttcgagagaaaaagtatagtgtcgagagagagcgagagagcgagagcgagagggctccatagagagagagcgctggctcca

SEQ ID NO: 80208 - DNA, 122 bp, Arabidopsis thaliana landsberg
tatcgaactaaataataacaatttgaacattttaactctctttaatatcacaaaaaaaaaaaactatatctcaggggggaaatataaaaatatcaagggtgcccattaccgaggaaactgaa

SEQ ID NO: 80209 - DNA, 351 bp, Arabidopsis thaliana landsberg
cgttctcagagtggggcaagcaactcagcgcagcctttgccgattccgatgtggccgccctggtttcttcgggaccagtcgattgttttacctcgatgcgttgacgtttgatgtctacttcccggaaaaaaataccagacacgcggcgcttaacattgacaccattaatggccatcgaatccaatctgcaccggcctataacgatgtcgctcccggccccctggccggacaagccattgcctctggtggaaaacttatcctcaagaaagagcctctgattctcgaacctggcctcgtgccgtatggagacgcagcacgaccttcggcttcgatcattgtgggtgccgattc

SEQ ID NO: 80210 - DNA, 561 bp, Arabidopsis thaliana landsberg
  unsure (1)..(561): unsure at all n locations
aaaaaccacaggacgaagtttccgttctctctaaatttatagaggcgacataatataccgncacacagctggatatcaaggatctttttgccgataaacaccaggatcacctccgatactgcgaccgccgagcgtaataagaactggctgcgcctgctgaaaaaggatattattttatccgaaactgttaatatcatcaaagatatgcagcacaaatagggctgaattgcctgctgcatttgcctcataatcaacagtggcccaaatgttaaaagtacatttggggcattggtatttcaggtgtagtgggttatcttcgcgaacgatttttttagaattaacaagggttaattttcttttcacttaaaaacagcaatgcgtataatgacgaagaaaactttattcaacaccttgctcatcacttttttagcagttgcaggtacaagttgtaattcggcccacgagctgatggagccggttcctatagcctatacgaagaccaggcttagcccgaatgattctcttaccattgcccagcgcaatggtgtgacgatcaccacg

SEQ ID NO: 80211 - DNA, 566 bp, Arabidopsis thaliana landsberg
  unsure (1)..(566): unsure at all n locations
gagctccagagcgttgtctgttggcctgtgcattggcctgattttcactcgcgattgtaaccgtagtgtcggggagagccttgctagacatttgttgggtggcgacgagagagtattatcctttataagtaaccttgcatggtgtcggggtgtttctcgccttgtctatcagtggaaatgaggagtaggttacttcgacagccagcatgatagacggaggttgcctcttagctgaatgctagatagcaccattttaggcggcattgcgcctagctggtgacgtcagaattttcagttcaatacatccttgatgactgaatttccctgagccagatttgcgtacagttccagcaattcatttctttcttcttttcaccaagtcgtcagacgatccggacgtactgacgccgcgatcccgggcccatactatggccgcaccgcgcctgtgcacaccgatcttttcgtaaatcctggacacatgattgcggatggtgttttccgaaacgaacagcgctgaagcgatttccgcgtcagtcagtccctcgcacatcangctcagcaccctg

SEQ ID NO: 80212 - DNA, 394 bp, Arabidopsis thaliana landsberg
  unsure (1)..(394): unsure at all n locations
gatttaaaatgtgctagtgagtaattaacagctcttcatttttaatggtgaaaaagaaattacaacaaactgatcttattgtaaactattgaacatgactacatgagtggttgaatcaggactttgtggcattcttagcctcttctgctttaccctctacgaactcagccgccttgtttccggcttcttttcctttctcagtcacataatccaaagctttcttagcttcctcagtcgcagtttcattggcttcaatggttttctcaacaatgtagtcttttgttttctcgccatccgccaaggcctccttcgtcttatccgtcacgaaatcagaagctntctttctatatatatantgtaagattcattattgacaaaacgatttaaaaacata

SEQ ID NO: 80213 - DNA, 324 bp, Arabidopsis thaliana landsberg
  unsure (1)..(324): unsure at all n locations
atcactttttttttcctcgctatgcatccattgtgcgggtaggaacccttataacannnnnnnnnnnnnnnnnnnnnnnnnnnnnnnnnnnnnnnnnnnnnnnnnnnnnnnnnnnnnnnnnnnnnnnaaaagtcatttagatatataaatgtatttagtgtgcatgatatgcaaaaaacataagaatgaaataacgcgtacttctatttagtttggccttggtaggtattgcttctgtgtgtcagggttaggcatgaaacaggttcaatatggccaagccctaatgtttaaaagtatataatggccaacgctcatggctatatc

SEQ ID NO: 80214 - DNA, 416 bp, Arabidopsis thaliana landsberg
gaaaccccacctccatttttttaagtgtctgactgttttcacatttttacattttaagttcctattgaatatacgatggagtaccagtaaataattgatcataacttcagttcaaagtttataattacaagatgagaagtcgaattgaaatgatgcattgttaatcagaaaactattgtttttgaaattgagcaagtgttaatttttaaactcatataatatagtattagttaatggtgagttaatattgtgtttcgttctcaattaagaaaacatcaaaatgaattgctctttatccagactcgtatgtatccaatcaaagacgaatgatcaaagaccctaattggttaaaatattaacaaatctgcctggcaataagtgaatagtcgtcatctaactaaaatgataatgaaagc

SEQ ID NO: 80215 - DNA, 227 bp, Arabidopsis thaliana landsberg
aaaccccgccaaaccaagaacacgcaaaaaaaacacaaacgccacgcacaaggcaggacaaacaccgagacaccccagcccgcaaacacatggaccgcgaaaaaccaccaaacccacaaaagcaaaaacccacaaaaaaacccatacccaactacgacgcacgacaaccagaagaaaaggagacacagaagcatcgacaaaccaagctgcaaacaaggggagaagaa

SEQ ID NO: 80216 - DNA, 226 bp, Arabidopsis thaliana landsberg
gggaccaccaacggagatttctaaaaaaccggctttgccccgagaggaaaaccaaaaggagggagcgggtaggcgcaaaaccccgcggaccccgacgaagggagacgaagaaacagcggccgcaggacgcagaccgaagcaaaccaccaaaaacagccacggaagcccacacaccagagacaacggacacgaccggacccaaggcccaaaaaagagcacacgcaca

SEQ ID NO: 80217 - DNA, 483 bp, Arabidopsis thaliana landsberg
tgacgcctactttccgctgcttcatcgcgctcctccgtgcgccaatcggggtcctgtttcaggacgcgccgaccactcgtggcggccggcgtctggcctcagcgggagatgatgtccggcttcgacaggctggtggtcagcttgccgtcggccatcgacagcgtgctggccggcacggtgcgcatgcggccgtccatgatcagctgcacggagccgtcgtcttcgacgcggtagaccgatgccaggcgaccgccgttggcggcatacagcatcttgcccttggttggcttgaccggcgtgtcggcagcactggcggtgacactgacaacagcgagcacgacggcggcgagcagggacttcttcacgtgaatctccagggaatttgaggggagcgggcagagccttgcggcaaaaccctgagctacgttagtaatttcccccggagatgtcaaggtcacgtcggctttttgctgtctccctgtg

SEQ ID NO: 80218 - DNA, 550 bp, Arabidopsis thaliana landsberg
gccaacactctacatattgtgagaaattacatagtgcgggtgaacaatagaatacattattttatactacatgtacatgggcaagaacattactacattagattgaatatgaatagaaattgtcataataaggaaacctctttttgtgtatcgaaaagtggtcgtacttatattcgttctaccacctaatcacattaaaattatagttcctgaatctttggaacttttaagaattgtaacttactattttcagttttcttcacccttttctcattatagtaaacatttcatttttagacttcgacatcaacaagaatttatctctctttcaatcatttctaatggatattctttataaaactctttgatacatgtacattagtggaagttttattctaagattagtttttagttattaaagaaatcattttcaccatgggatttatttcatagttgattttagtagaattgttaaatgcaagcatctaaccgatagatttcttaaagcctaagtgggctggaatctcttgatcggtctaaacttttaaat

SEQ ID NO: 80219 - DNA, 216 bp, Arabidopsis thaliana landsberg
ggaagagccggaaaacgtagcgccgggcgaaagctatcagagtagcaagctcgaactatgctctctcctggcgtggttcgtgaggagcagtattgccctcaactagctgttagaacttacgataggccacggagctatctatgatcaagggctgacctagctggtgctgtgcaagctagacgaaccataagcacaggcgctctattgctagagagc

SEQ ID NO: 80220 - DNA, 534 bp, Arabidopsis thaliana landsberg
  unsure (1)..(534): unsure at all n locations
aatgcatatacattatatagtttgttaaatatgtattgcatgacattgaatttgctttgttttgtgtttgttcacagacgtacggtggccgagattgtaactctactttcattgcacttgcacatacaaaccttatcattacagaagtcctgaaacagttacaattaaacttgcactatcaagataaatttaagcattgaaatctcattatctagctaaaaaataattagagcgatagataaaagcatacaattcaaacactttaaccgtttataacttctttttttttaccgtttataactttattaatgaaattcttaatatatttgttttggaaataaaatctaattcacaaccgatatatctaattatttaataaaatatatttttgtacagcaaacaagatcaacatggatgactctagctaattataacatgctggaatatccaaaattntacatctatcttgtataagagaaaaaaataatactcaactggagtatcatcagatttccacatttaaatgtctatttc

SEQ ID NO: 80221 - DNA, 587 bp, Arabidopsis thaliana landsberg
  unsure (1)..(587): unsure at all n locations
aaggcaggaaatgccaaaatcatttccgagaaaaaagtaattaaattagattatatccgcacttatcccgggggagaaaaatccatcgaaggacaaatcatcgatgatgagcgggttggtgaatggaagtactatgataaatacgggaacctgacaacgcttgaaaaatacaaagacgggaaattaaccgacactttgaaagagttcttttccaacggacaattggagagcttcagtttagtgaacgaaggaagaagagacggtttgttccaggtattcaacatcttcggcgccttggtttccgaaggatattattcannnnnnnnnnnnnnnnnnnnnnggatcgggtattactccgacggcagtttcaaatacaagaacttcttcgttcagggaagaaaacaaggatatcagctctcttacgatgtgagcggcaaactggaagaactcgatgagtttgacgacgggttgttgattgcacatacacaatttgacacaacggaaaacattatcagtcaaatgggagaatacaacggtgaaatccaattgaaagacctacaaacagctacgttacttatatcggaaac

SEQ ID NO: 80222 - DNA, 498 bp, Arabidopsis thaliana landsberg
  unsure (1)..(498): unsure at all n locations
cctgcttcgtatcgcggcctagcgcagctacagttacctgggggctatgctgccgcagcaggttttgttatatattcgcctaccagcggctcatcttccactataatggctttgatcatgtcaggatatatttttgaaactgaaaatcaccctggttcctgtcacttttccgttttcattcactacatcctcaataataaaagaaccgggcgccgatcttccgttgttgaacagcgataatctttcctccgcaagtttatgcccgaaagggatatgttcttccacttttcttttcctgatctcggccgccctggtaagtcnnnnnnnnnnnnnnnnnnnnnnnnnnnnnnnnnnnnnnnnnttcgccacaaaatcaatcagttacatgcccggcccgtctttgtgcagtaacccatgccagatcgcattttcgcaaaagggttgcaggataaaagaaggtaccatgatctcggatggacggatagtactgtcataact

SEQ ID NO: 80223 - DNA, 338 bp, Arabidopsis thaliana landsberg
ttaacgaacagatcgcaaattatatcgtagattatggcgtgctttcttggattgtaaaacagtatggcgaaaaaagcgctgagctcgaaaaatgggaagccgatcgtgtggatcgcagacgatttgggattgtactgcgcgcgtgtgcagacgaattaaagacttactatcaatctacagcaacaagggatctaagagcggcgcatgagtagggaagcaagcatatgtttgatgccttagcaaagcggattgaatctgagcaatggtgaggcatgggcatgaggcgcgctgcgaagagcatgacaaacaacgcggcactcgtggcttttttaacttac

SEQ ID NO: 80224 - DNA, 531 bp, Arabidopsis thaliana landsberg
ccgccgcgggcggccagggcgagggccgtggccttgccgatcccgttcttcgacccggtgacaagcgcggtccgggccttgagatcagtcattggctgccttgccctctcccgtaaaaatgggttgcgaaactcactctggcagagccggactgggctgtcaaactcagaagttgctagcatgggaggcatggacaacgacaccagcgcccggcggaggctcactcccaagggcgagcgcacccgggcgcggatagtggaggaggcggccgccctgatccatgagcgcggggtggcgggcaccttcttggaggacgtcaaggcggcggcgggggtcagcggctcgcagatgtaccactacttccccgacaaggacgatctcgtgcaggcggtcatcgactaccaggccgacgccatcgtcaatcgcaatcggcgcgcactcagcagcgcaaacggcgtcgagacgtggcggaacatggtgctcaccgcggcgaagcgcaccaaggccaaggggggctgcgcacttggctcg

SEQ ID NO: 80225 - DNA, 583 bp, Arabidopsis thaliana landsberg
tttcatgctttccgggcagctggccgatttccggaaacctgtggccggcaaagacaagctggatttagatacacagggcgaaaggctgcataccatcgattattttgcttcgcagggcattaagatagacctggataagataccgcaggacaagctgaccacgcacctgcgcaagtttaccgactggctcaaacagatgaaaaacccgcagcaggatacccattcgaagatagacctgggtaccacggccgaaatggaaaatgccgtggccgagatcgcccgaacctccaacgtatccagggaagtattaaccgaagccatggtcgaggtgctggtaaagcagggccagctggaaaaagccatccagctgctgatcaaattaagtttcataaatcctgaaaaatccagttattttgcggctcgaatcgaacaattaaaaggaatcatatgaccatcctgtttctgatactgatcattgtagcttctgtagcgctgggttttatcgtactggtacagaaccccaagggcggcggcctgtctggcagcgtatgaggcttcagcaaccagctcatgggtgtaaaac

SEQ ID NO: 80226 - DNA, 649 bp, Arabidopsis thaliana landsberg
  unsure (1)..(649): unsure at all n locations
ttggtcatatactaaagatccaaatttgtaggaaattcactttataaaaacatcattttttaatgtataaatgtgatcaataattctcaaacaaacatacctgagaaacttaattagtcttccttcaccaaaaaaccaagacttcgtaagaaaattaattaggtgatgaaacttaagagacagacaattctgatagtacaagaagtttgaaaatatggtacatgaagatgtcttagtactttatttaattatatattattcatcaaacgatatgatttttgctttgctataaattgtttttttttggtaaagtgattgattaattttttataagtctttttcttcataatatatatcaactactatcaattatatgcttttgccaaatatgagtgtatattgttcacatacgtacataacaatattactaatttgatatataaaagattaaaagttaacaacatttataattgttccgcaatgatatattacaaacgataaagaaaacttacacctacttgcaactaaaattggctttaccgtgactgaagctcacatntttcaatataaaagaaaaaacccatttaatattgctttaagatgctgtttgattcagaaaaatgtgcgaaaaaacattcaataggcaatg

SEQ ID NO: 80227 - DNA, 635 bp, Arabidopsis thaliana landsberg
ccatgtcgaattcatcatgacttatatgtagttgtttgattgatgcttttattttttcaaattgttattagtattctgggggaagggttggattaaaactctcggtttcttgatttcaatcaggcaacaacagagtgatgagaccccaatggtgtgggagatacttctatacatgtacatcctttactcaccagattggcattaccgaagtacaatgcccacttttctcttcctctacggtgctgcctttgccatagtccatgcttacctcaggtttggaattggtttcaaggtccactacgtgatactttgccttctatgcatccctcggatgtacaagtactacattcacacagaggacacagcagccaaaaggattgcgaaatggtatgttgctaccatcttagtgggaagcatatgctggttctgtgaccgtgtcttctgcaagacgatatctcagtggcctgtgaatcctcatggacatgctctgtggcatgtgttcatgagtttcaactcttactgcgcaaacacattcttgatgttctgcagagctcagcaacgtggatggaacccaaggtaaataccttctgggagttctccctatgcaagatcgagaagccaaacacaatgagaag

SEQ ID NO: 80228 - DNA, 176 bp, Arabidopsis thaliana landsberg
  unsure (1)..(176): unsure at all n locations
aagctgtccatagttatgacttgggtcggatgatagatatatgcaccgccgctaaaattnnnnnnnnnnnnnnnnnnnnnnnnnnnnnnnnnnnnnnnnatgaacgcgaacccatctaaacccgaatactaaagggtcaaaacaaataaaaaccgcacggcccatccacccttaag

SEQ ID NO: 80229 - DNA, 182 bp, Arabidopsis thaliana landsberg
  unsure (1)..(182): unsure at all n locations
acaacaccaaccccaacagcacancaaacccaaagcgcacatataaaaacagaacaggccaaccaaacaaacacggccgaaaagcaaaccaacgcgcgaagcaccgcaagccggccgggcccaacaacccgacacgcaccccccgggaccccggcaaancaacggggacccaagccgaccac

SEQ ID NO: 80230 - DNA, 574 bp, Arabidopsis thaliana landsberg
  unsure (1)..(574): unsure at all n locations
tgggcaaacccaagcgggctggggtgaggtgggccgaggagcgaaggcgttttggttgcgggcggcgggatgccgctcgggcgggcggtgggcgcgtctgaacagtttgtggcggagcgttccgtccgcgtactcccgctgcatcaggccccgctgctggagcacgggggcgacgtgatccgcgaactcctcatacgaccccgggatctcggcgttgaccaggttgatcccgtccacgccggcctcccgccagcgcgccagcccgtcggcgatctgctcgggggtgccgacgatccggctgttggtggcggtgtagtgggcgacatcgcgcagcgtggcgggccggtccggaaccaggtccctgatccagccgaggacgctctgcacgccctcggtcctgagttccccgacgggcgtgtcgaggtcctcgtggccgaagtcgatgccgatcgagccggacatgtgcgacagttgcgcgtcgtagtcgatccactcgtcgagttcggccgccttgcgccgggccttctcctcggtcgagccccggannnnnnnnnnnnnnnnnnnnnnnnnnnnn

SEQ ID NO: 80231 - DNA, 529 bp, Arabidopsis thaliana landsberg
agcccttcaagagccagtacgccccgatcgtcgtggtgtccgattgcgctttccccgccgacggcacagggatgacggtgcaggggggcgagaaggacgccttcggccacgtccggctgggcggcatcggtgaccggctcgccgcggagatcgagcagcgcaccggcaaggagtcgcgcgcggtcgtgctcgggcacgtgcagcgcggcggtacgccgagcgcgttcgaccgctggctcgccacccggttcggcctgcacgcggtcggcgccgtccacgacggcgacttcggcacgatggtcgcgctgcggggcaccgacatcgttcgggtcccgctcgccgaggccaccggcgagctcaaggtggtcagccccgagcagtacgccgaggccgaggtcttcttcggctgagcgatatatactctgtcggtagtggcgtatataccgaggggatgacgacgacgatgacgaagacgctgatcgacatccccgacgacctgctggccgaggccatggaggcgctcggcgcg

SEQ ID NO: 80232 - DNA, 203 bp, Arabidopsis thaliana landsberg
tgaattgacaacaaatcatattaaaagaaagagtagatgacaattgaatagggctgtagaaatgattgtaagtttatacccgaataaagtgggaaaggaaagcgaggcataaataaaagaaggagaagaataggggacgtgaaattttagacccttagaaataagatgagacaggagtgataaaagatgggggaagggaggta

SEQ ID NO: 80233 - DNA, 608 bp, Arabidopsis thaliana landsberg
  unsure (1)..(608): unsure at all n locations
tatggccgtagggcgcaatagctatctaaatgtagcgttttccctcatactgatctccgacattttacgagannnnnnnnnnnnnnnnnnnnnnnnnnnngagttatcgaattgttaaaaatcaaaaaactggtttagattcattatcgattgcaatagccgtgaaggcagcctttgacgcgggtttgttacagcggttattattgttcaaccaactcttgctgtatatgaaaaacatctcccggccactactcctggccatgcggagggtcacacatggattgttgtgtctcctcctgtttacccaatttgctgttgcgcagtcaacaggttttccagccaccattacaggtaaagtaaatgacgcaaagaatgctcccatggagggtgttagtgtcatgatcaaaggaaccaaacgcggtgttaccaccaacagcgcgggcagctttaccattaccaatgttccggccaatgccagactggtattcagctacacaggttatgccgaccaggaagtatctgtaaagaacacttcccccctcagcatttcactggctgaaagaccattgggactgatgatgtggtgtgatcggtatggtactactact

SEQ ID NO: 80234 - DNA, 396 bp, Arabidopsis thaliana landsberg
gaaagatccaaatgtagaactagcccatcacgttattttttttcttctatacggaagggcggcatactgggttggtttatcattctaagtaatggtagaaaacatggtggaaactaccaaatgatcagcatctgaccggacacagcaatcactactaccgatggctactggaccagaaatattacttaagcactcttgtcaagacattagtcagacattacacgtgaaatcgtgcttaagatagctggattttacttgtaactctgcatcaatctattttgtgaatctaatatatatgtacatctatgttgaattacgaaaatctgactgtctatcttttgttctctctcttaatgagatgagcgtttctcgtgttaacattctatccaaagaaaa

SEQ ID NO: 80235 - DNA, 537 bp, Arabidopsis thaliana landsberg
tagatactccgaaacccggctgacaaaaaattgctcgaaacggccgccaagctgggtttcatatattaccgaatgaactggtaccgctacgatgagcgaaaagcaatccccgaacaacttggtgaattcagtaccaaaatggctggattgagtcagctaaatgataaactgggcatttatggctgctaccagaaccattcggggcgaatggtcggtgcgtcgatgttcgagatctggcagattttgcaaaaagcgaatccaaaaacaatgggtgcccaatacgacattcgccatgccactgtcgagggtggcctctcgtggcaaaccggtttcaacctgatccgcccgcatattaaaaccatcgtgatcaaggatttttattgggagaaaaacagcagcggcaaatgggccgtaaaaagcgtgccgctgggcgagggaatggtgggatttcaaaacctattttaaactattgaaaagacctaaagtggatgtaccgatttgtcttcacctggaatacccgctaggcggcgccgatca

SEQ ID NO: 80236 - DNA, 497 bp, Arabidopsis thaliana landsberg
tctctattgggtcattatggtcattttaaagcggccgtgtccgacgtcgtcgttttagtatttttgttcgtttatgattttgagtggtaccaagtggatggtttgttgaataaagaagagattgatttgagtgattacattatatgtagctggtgttgatttttgtaaggtatgtataagcatttgaaataagcagaggaatatgattagttttgggttatatattgtagtttaaggataagtttgtgtgaagttttgttaggttatcaacctcaaagacgcgttgtttaatgtttttatggttacatgggaccattttctcaacattgaatttgtgtgtgtggggactttcttttacttctgtttcttgtgactcaactttattattcctcatttgattgaatgttcttgttgatatcgacaattcttttcaggattaacttgaattgcttaacttttgattgtgtttctaataagcagaaccattttatcactta

SEQ ID NO: 80237 - DNA, 512 bp, Arabidopsis thaliana landsberg
taatccaatgttaatgggatcagaatgtggaactagtgtcatgtccatcatggctttaggttccatttctcaccaagaagcagccacaaaatatcataagtggttctagtctcaattgaatgaacaaacacatacactgagaccaaggtaaacaagttccatactttatcacaaattatcagattgatgaatcttcatattcagttttcaatttacctttgtaggttttgaatgcattatttacattccactccattgattccaagcgtcttattagtctctgtgaaacgatccgtagagtaaaatccgttgcgagagagagagggaagttatttttttggagggaaagcagaaacagcagctagagagaaagaggatcggcgctggatctatgagccacagatctgagccgatttaagggatatgaccttaggaggatcggcgagtcgggagattcgtcgatctgagagatgggttacgacggcggatccgttgatttggccggaggattg

SEQ ID NO: 80238 - DNA, 125 bp, Arabidopsis thaliana landsberg
  unsure (1)..(125): unsure at all n locations
ggacggtggttanggaanccncgcttcgcttgagttgaaacactcgtgtcgaattggggatcgtttattatggagagatttaggggaggaacgcacgaccaatacccagggctgtgtctcagagt

SEQ ID NO: 80239 - DNA, 484 bp, Arabidopsis thaliana landsberg
aatctaaaaaacctctaaattcaactaaaaacctccaaatgtaaatatgttcaaattataaactcatatttttccgttcccatataaaacctccaactaattaactatggctaaataaacattcaagttgtcaaatatgagcttgaatagtagtggactaatggtcaagactattccgatcggaatagtaaactactattgatgacatatatatcttggattatttaatttggaaggggtacatcaaccattaaaaatagaaaatgtactataaagctggtattgaacaattttatctttactattggaacctaacatgcgataattttgaaaactaagtagacggaaaacatgtcgttgaagaccgttggaggttagattagaaattaaaataaatctgggattatttagaattcaaatattatagaaagctatttattttttgcaccaggctattaggcgggccttatctaattgataaata

SEQ ID NO: 80240 - DNA, 462 bp, Arabidopsis thaliana landsberg
  unsure (1)..(462): unsure at all n locations
aacgttaataaaaagtagggtcnnnnnnnnnnnnnnnnnnnnnnnnnnnnnnnnnnnnnnnnnnnnnnnnnnnnnnnnnnnnnnnnnnnnnnnnnnnnnnnnnnnnnnnnnnnnnnnnnnnnnnnnnnnnnnnnnnnnnnnnnnnnnnnnnnnnnnnnnnnnnnnnnnnnnnnnnnnnnnnnnnnnnnnnnnnnnnnnnnnnnnnnnnnnnnnnnnnnnnnnnnnnnnnnnnnnnnnnnnnnnnnnnnnnnnnnnnnnnnnnnnnnnnnnnnnnnnnnnnnnnnnnnnnnnnnnnnnnnnnnnnnnnngcccgcaaattttataaaaaacctcttttttattagaatttgccttacttaaaaacccatttggttaaaaccctttaaaaaaaattggaacaataaaaaggaaaaaaggcctttttttgttaaaatttttaaaaaattaagggttcgatttttt

SEQ ID NO: 80241 - DNA, 571 bp, Arabidopsis thaliana landsberg
  unsure (1)..(571): unsure at all n locations
gagtnnnnnnnnnnnnnnnnnnnnnnnnnnnnnnnnnnnnnnnnnnnnnnnnnnnnnnnnntgacacacttaaatttctttggaacaagatcggtccaaatgtgtcgatatcagcaaatgttcgtgttggacctggtgtaaggcttattagctgcataatcttagacgatgttgaaatcaaggtaatttggaatcagtgttttagaatgttcttcttgttatgaatccaaaagattcgttgtttaatgttctctactcttgttaaatgcaggagaatgctgttgttataaactcaattatcggatggaaatcttctataggtagatggtcaagagttcaagctagtggagattacaatgacaggcttgggattaccattcttggtaacttgattgttttcttttttgttcaacaaatttttcgttgtttttttctgattaatttgtttctgcaggtgaggctgtaactgtggaagatgaagttgcagtcataggaagcattgttctccagaataagactcttaatgttagtgttcaagatgatatcatcttgtgatttatcacaatgatta

SEQ ID NO: 80242 - DNA, 513 bp, Arabidopsis thaliana landsberg
  unsure (1)..(513): unsure at all n locations
ttccagaaagtgtggttcggacgcaacactgctggttaggccgtttatctcgaagatatgaaatatagcgaggtcgtgcggaggatggttgatctcctctatgtcaagcatgagtctcgctggatagatccttcgttcgtcaagctgaccggagaccttatccatcgtgtcgaagaacggtttactaccgcgtcgaaccaaccttcccttctccaaagttactcacaccttgacgagccgtactcaacggtggaacgtatcttggcgagctaccccgaggcggagaatcaatatcatcaacgcgcaggatgtccagcacttcttgctccnnnnnnnnnnnnnnnnnnnnnnnnnnnnnnnnnnnnnnncagctctggatgagaactttgagttcttcttcnnnnnnnnnnnnnnnnnnnnnnnnnnnnnnnnnnnnnnnnntatcggccaagacgtgggcaggacctgtcttcttcacggtcccatggcggtcaagtactcaacagttgtcga

SEQ ID NO: 80243 - DNA, 153 bp, Arabidopsis thaliana landsberg
ctcgctctcgctacggatccggtgggttaccttaaccaagccactgcctatgataagtcgcctcatacatcaacaggcacgcggtgagagcccacggctcctcccactgcttgggagctaacagatccaggttcccaattagtggcatcacgg

SEQ ID NO: 80244 - DNA, 598 bp, Arabidopsis thaliana landsberg
gggatgaaactccgcgatcttttctataaggatactggcggaaatctatacgagatgactcggattgcggaagatgacaaagcgtgcttccggcgtagtatgggtacttaccagacgattgcgaagtactatctagaaggaaattacatcgttctttctccagattcggtcaatgaaccgactggaagtttagtttttgtatattttcttcgtccaaacgttctagtgaagaacgatcgtgcagcgattatcaacgctttttgtaaaactttgactcttaataacgcctctctagctgatggagacacgattaaaatcaaagatacgacgtttactgctcgaacgggatctcctgcgactaccactgaattccaaattggtactctttctgcggacactgcaactaaccttgctttcgcgattgttgcttctggaattgtcttggcagccacggcgaccagtgcgatcgtaactgtaaattactctgacgttacgaatactccgtttgtttcttcgaattcatctggaatcactgtccagacctctcaaggaatccgttttgattcatttctgaaaaattctaagcacacctacgtga

SEQ ID NO: 80245 - DNA, 204 bp, Arabidopsis thaliana landsberg
agaagctgggtgcataaatcatgggatcatgcttttcgatgaatagcgaacctttggacttgttcctattgaagaacttaggaacttgatattatatagcgtagctgaaactgaaagctacaagatttgaataagcaaggtaagctttctacatatacactaacacagtcatacatacatgtgtgtgtgcgccaatgtgtgatc

SEQ ID NO: 80246 - DNA, 542 bp, Arabidopsis thaliana landsberg
gctatctactatggtcatctgactctcaattagcgaacagaaatcttacattctcctcttattcaaattttcagaagtgctcttgaaatcttagaaatagaaacaagaggatcaactggtccagaatcacaaggtcctactccagatgattcagtggttagtagtatttgtatatttttctttgatacgaatctaatatcaaggtcaaggatggttatagtcttatagaccttggtcttattgtcctcaatattgcaggtgaggatggatcatatggctgctgcattatctaagacttttaaatctcctgtagttgagacaattcagtctcttcctcaacaccaacaagtaagttgcatccacatcgagtcatgttaaaattacatttatgttctaaaacttccatagttaagcaagagtgattttacagaatctaaccggagtcatcacatacttctcttgacacaattcacagatcataatatgtgctgctgcaaggctttcagagggagcaaaaaggatgcaaaccgtggagaggtaaa

SEQ ID NO: 80247 - DNA, 489 bp, Arabidopsis thaliana landsberg
tatatttgaagcattgccgatcggttgatagctgcaaactcgaattgatcgatcggttaggttaattgggtttgggttaaagtattttgcatcagaaaatagatagggttctcaatgaaaacaaatttgttattataaaataaaatacaagaagaaaaactgagaaagacaaaataaaataaacaggagaatgacatggcttggactgaaaggaaaaaaaaaacattacatggcatgtgtgactcaacgttattgtcgaagtttgtgtgtcgtaaaaaaagccggacggtccgacagagacaacacgtggccgaatcagggggaaatacgtgagacagtggtggtgacccaagaagggagaagaagaacaggtcttcagggtggggtttactggttatagccggatattcgctcttcttcttttttcagacacgtcctctgcgttactactctcgtataagaccaggggtttaagccctagtctccttc

SEQ ID NO: 80248 - DNA, 299 bp, Arabidopsis thaliana landsberg
atcgcacgggcacaaacagagacgacacagctttttgaaaaatttttgagaggtagattatgtgagaagtagagcgtgggggcacctcaccataggagataaacagagacacaagtgttagaagggctatgatgctcatgtcaggatgctcacagtgaaaaaaaggaaggggagacgcatgaaaggctgggacgggcgtaagggagcttactaggtgagatgctggcacgcatccgttgtcggacataataccaacaagtatgctcatgcattggaaaagatccatgtgccaacgagta

SEQ ID NO: 80249 - DNA, 546 bp, Arabidopsis thaliana landsberg
  unsure (1)..(546): unsure at all n locations
atcagaggtcctggtcctctgcgcggcacggcgcgaagccgacaccgcaattgcttttcaccaccgtcgtcacgccatggttcgacgaaggctccatccggtcggaccagatcgcctgcccgtcataatgggtgtgaatgtccacgaagccgggggtgacgatgcaccccttcgcgtcgatctcctcgcgcgccggccccagatttttgccgactgcggcgatcagaccatcgcagatcgcgacgtccgcctcataaggctcgctcccggtcccatcgacgaccaggccgccgcggatgacgatatccgccatattgtccgccatcttagtctccatcgcgtatcacgttacacaggcccgattgcacaggccgtttcacaggccgagtttgtagagctcgttgcaattatcgtagaggatccactgcttttcctgctcggtaagatgcttggtgtgctcggccagcatctcctggctccacggccaggtcgcatccgaatgcgggaaatcgttcgcccacatcangccgcggggattgcacatgt

SEQ ID NO: 80250 - DNA, 562 bp, Arabidopsis thaliana landsberg
gcactttagtagatgtgttttaagtgtggatgagataatgttttgtagacttctttagtttttgtttggtcgttaaatgctgcgggagaacttaaagatctcccaaactttcttaatatatttttatgtcagtatgtgttatgtgttttgcatctttgtttgaccgtttggtatattctgtgactatgtgaaaatctaaaaagtcttcttacgatcggaaaatatgaatacaaactataaaagcatttagaagaaaaaagtttttttttaaaaaaaagaagaaaaaaaaaagaaaaaaggtttctttggttcattaatttcacctcatatttcaaaatgaaatctgtatagacaatgacatgtaaatttttttaaatttagatacgttcaaagaaaacataaaattttgattgtatcttctgatacaaatattagtaaccactaaccagaagcttaaggtctaccagaaaaaaaaagaaaagaaaggcatgaaagaattataatattttcatatacaaaaagaatacttatttatacgatacgaattgagcatagatgattc

SEQ ID NO: 80251 - DNA, 566 bp, Arabidopsis thaliana landsberg
taaataaacattttatggacatcgcgttttccgtaaagaataaatgtacctttaatgcttttaagagtagcagagtagagtctcgtgaaagaaaacctgctgttttgatcgacgatgcagaagggctagcttctgttgattctatgtatgagtttatttttctcgtccctgcataacaatttcatacaagttatcatggtgttagttgaagagtagtgagaacaagttttggctcattcactaattactatagatagtgagacttactatatgaagcagttccattagtcttctttataaggagagttttctatatcaggtaatccacaccatgtcctgccttacataatcattagaccacgaggatcatatatttcacatctctaaaatctgctttagtaagaacatagtaagctgtaactttttctcatgccaagggatcaacaaattgccttttaatctcaaaatatattatacttgactccagaattgtaatttcccacaaccctcttttatattaccttgcgggccttggtttctctggcggaacattccttttccggctc

SEQ ID NO: 80252 - DNA, 555 bp, Arabidopsis thaliana landsberg
accaatctcaaaaccggaatataaatagagacgatcacatcatttacaaaacaaatatgtttttagttgggacgaggtcggcttctaatattatcataatgggcctgcgtgatatatttaggcccatatttgtttttttgaataaattattttattagtcatttatcgaacgttttgattcgaagaacgttacatttaatttccgaaataagagaaatcattaatttggtttgattacttataggaaaacaacgaggaccaagaacaactgcaaaaggcattgtacattttttgtcgtacaaagaatttaaacagcgacagctaaaaaattaactagataagtaaaaaccaaaaaaaataaatgaagggtctgaaacactggcacagtatggacatcgaagggcaggaaccggaaatagaaatggcatgcgtgagacctgtgccgtttccggtaagagattaacacgtgtcgataatatattggaagacttcttaagccgtcgctttcgtacgacaaagacactgttcccttcggcggctactgcgcgtccttgt

SEQ ID NO: 80253 - DNA, 421 bp, Arabidopsis thaliana landsberg
ggataggaattattctaaagagctgcgacttgtgatattgaaagctgagaccagacacacttttctccttatttctcacaacaaaagaatggaggatataataagcttattttttctttctttttaagaacgacgatatgctaaaaccatctccggtgatattatgtagatcaaaccttcaaaatagcactcacacttttagtcagaatccatatctatggtaagatcgatcataaaatatggtgactaaggcttgccaagagactatgacgtgtggcattctgattgactcgtaatcatgattgtttcttcctaattattaacgaaggaagaaatacgtgtaatctcaaatctctttctgacgtcatctacgtcgaaactaactattagagccttcatcctctctttatttcaaatttca

SEQ ID NO: 80254 - DNA, 465 bp, Arabidopsis thaliana landsberg
ttgcgcgcatgcaccggatgcgcgccgatgcggttgaccagctcggtcggtcgctcgatgttgcagatcgccagatcgcagtgcttgccgggggcgagggtgccgatcgacgccgcgcgaccgattgcgcgcgccgtcgcgcgcgtgacgccggccaggcactcgtcgaccgtcagccggaacagcgtcgcctggagattcatcgtcagcagcggctaggccagcggcgaggtgcccgggttgcagtcggcggcgatggcgatcggcacgccgtgctcgcgcagcagggcgagcggcggcggcaccgtctcgcgcatgaagtagtaggcgccgggcagtagaacggcgaccgtccagggcgccgccatcgcctgcacggcggcggcattaaagagttcgaggtgatcggcggacagcgcgccgtgccgcaccgcgagcacagcgccgacgatgttctacagctgc

SEQ ID NO: 80255 - DNA, 497 bp, Arabidopsis thaliana landsberg
  unsure (1)..(497): unsure at all n locations
aatgggtcctgcctcctactactatttccatccctggggctggagttcacaggcggcccattgggcctttatgttcagccattaccagacgcaatacggggcgaccgaggccgatttgggggctgtggcagtccaggtgcgcaaacacgccatgaccaacccgaatgcggtcatgcaaacaccactcacgatcgacgattatctgaagtctcgctatgtggtgcggcctttgcatttattcgatttgtgcctggtcaacgacggcggcatttgcctgatcgttcaacgcgccgacaaggcgcgcgacctgccccataaacctgtgttggtatccggttggggcggggtggggatcaagaaaaacaagatgcacgacatggtgcgcgaacggttgcgcccgcaactccaggaagccggcaaacaggcattggacatggccggccttaagctgtccgatgtccagcatttcgaaagctatgacgcgtncaccatccatc

SEQ ID NO: 80256 - DNA, 579 bp, Arabidopsis thaliana landsberg
  unsure (1)..(579): unsure at all n locations
aatatatccgncaccgcattttcagtcctttgcgttcttttcttaaggacagccgtgctatctttatggngctcatcgntgggaccatcatttcattaatcctttccaatacggcggttttccagcaggattatacaggcttttggttgaagcagnnnnnnnnnnnnnnnnnnnnnnnnnnnnnnnnnnnnnnnnnnnngcattgggtcaatgacgggttgatggtacttttctttttcctggtnnnnnnnnnnnnnnnnnnnnnnnnnnnnnnnggggaattggctacctttcgaaaatccatgttgcctgtaatggctgcattgggagggatgttgtttcctgcattgatctttttcctgttcaatggaaacacgccttttcatcatggatggggaattcccatggcgaccgatatagctttttcattaggcatcatctcactgctgggcaaccgtgttcccatacaactcaagatattcctgacggctctggctattattgacgacctgngtgctattgtcgttattgccattttttatgccacggatatgcatcttatgtacctgtttgcgggtt

SEQ ID NO: 80257 - DNA, 291 bp, Arabidopsis thaliana landsberg
gaacgcgtgaatgctaacaggttgttttgagaaagaccgtggtaatatgatctgacggatgaggaggatgtgattgaacgagaactgggagatgtgcgactagctgctgaggatgaaaagacaaaggataggaatgttcagagcgagccaaagggggagaactatgatctcatgggcacagaacgatggagagattttagatgttaagggagaagcaaaaaatacatactaaggtgaaatggtgaacaacaatgggtgctcagagatgcataggagaaagagaaaaagggg

SEQ ID NO: 80258 - DNA, 306 bp, Arabidopsis thaliana landsberg
  unsure (1)..(306): unsure at all n locations
gacagcgggcagggagcattatcgcgagtaagacacccgcaaacgcactngacacagaaaacgtgaccacagagcgaaacaacagcatcctcaggtgcaacctataaacgaagaagggacacaacaagaaacccatggcgaacacaagagagccggacacccaaatgcgagagataacaacccaaagaaccaaagcagagccccggagaacgaaggaccacccaccgagagagagtcctacaccgcagataccacaaaatgccagtgaagcacccaagcgacgcagaagaaaggttagcaccccac

SEQ ID NO: 80259 - DNA, 486 bp, Arabidopsis thaliana landsberg
aaaagcgataccatactgataatgtttatcaccacttttacccaatgcggcgaggataatggcctgattgggcgtgcctagtgatagcgccaggcaacctgcaatgccgccggccaccagcgcccaatgcggtgtttggaagcgcgcattgacatttcccaggaatgaaggcagataaccttcacgggcgagcgcaaaaatttgccgggaataaccaattacagttccatgaaaggacgcgataagtccaaagaggcccaggctcgcaaagagctgggtgagcccgctgtcgcggccgagtacaatgcccaatgctgcgggcaggggatagtcgatgtcgctcaattgctgccacggcgcaatgccgccggtaaaaatcatcaccgtcaatgccagtaccaccaatgtgaggatgccgtaaatatagccgcgcgagatcgttcttttggggtctttcacttcttcggccaccatggccacaccctc

SEQ ID NO: 80260 - DNA, 504 bp, Arabidopsis thaliana landsberg
  unsure (1)..(504): unsure at all n locations
gcgtgctcgatctgctggttcttctgctccacctcggccttctgctcggcgagcagcgcggccttgagcgcgatgtcctcgttggtctgctgcagctccttctgctgcgactgcagctcgccggccagctgctgcgactgcgcgagcaggtgctcggtgcgcatcgtcgcctcgatcgtgctgagcacgatgccgatcgagcccgacagctgctccaggaacgtgcgctgcgcgtccgagaactcagccagagacaccagctcgagcaccgacttgacctgctgctggaacaggacgggcagcacgaccacctngcgcgtgagcgngttcagcacgccggattcgatctgcaccgtgcctggcggcacgtacgacaacgaggatcagccgcgcctgcgcggcgcactggccgaccaggccttcgccgaagcggagcatgcgcgcggcgggcgaatggtcggcggccgcgtagccggcgagctggcgcacgcgccggccgtcatc

SEQ ID NO: 80261 - DNA, 159 bp, Arabidopsis thaliana landsberg
tatgacaatcttcgtgatgaatgggatgatgatgatcaacttatacaagaagcgtaccgtttttttgctaaattcataccgaacaaagtttggtttacataaaccaatctttccaaagaataatgcactttcgaagaatccaagagtttgataatttcc

SEQ ID NO: 80262 - DNA, 485 bp, Arabidopsis thaliana landsberg
  unsure (1)..(485): unsure at all n locations
gaaggttcaggnggaatacgctaaccgaatttgattaaagacttgttgagagattaggaccactttttttattaacgatgatacgtgtaattgaggactatatctaaaggcttcaattcttttcccatctgacaaattagcacccacagacataggtgatatataactaatcatctgaactacactttttctcaacaaaacctatacatctcattctagatgtgaaaactgtctaagaatggttcaatttcaccctactctgctgtatgcacatgcgtcaggatggatacaaaatattgggaataaaaaagcattacggaaaataattatgcaaacgcaagcaatcaccgagtgtattgatacatcacgttgctttcaatgacaaaccatgcatgtataatcatcttacaattgatgactattcactgatagcatcccatatttcaattcataatcgcatatctagactgtcctattgcgtcatt

SEQ ID NO: 80263 - DNA, 515 bp, Arabidopsis thaliana landsberg
  unsure (1)..(515): unsure at all n locations
acgcaccgaccgagtgagagtgatggagttacccactccattgtttgctttttcaatttttgcggcatctgaaggactttttcggggccaccttcaagatcgatccggaccccgagacgcagacagtgctgctgacgtgcatgggtgtgggctnnnnnnnnnnnnnnnnnnnnnnnnnnnacgtgtaaataaataaactctcgaatttcatacagtcgcacattcatttatttacattttcagtcactgtttacattgtctttctccgcgtgagtgcgcgagtgcctctcgtcactgtttgagcctttacaggcttctccttcttcgtgggctttactttgcgctcagtctcttccactttcactgttgtggtggagcggctgtacgtctctgcggtagacagttgagcgtcgacaagaagctcgtaaggcgggaaccgcaccttcaattttgaagatctttttgcgctggcgaacctcgagaagagccgttgtttgactccgctattcaagtgt

SEQ ID NO: 80264 - DNA, 307 bp, Arabidopsis thaliana landsberg
  unsure (1)..(307): unsure at all n locations
ccaaaaacataccacacacacatttttttacacacagcgaagagaaccaaacgcagagaggggcagaaaagaacaccgccaagaaacccacaaaaaaacaccgacaagaccaaacacagaagcacacagggccaggagcacaaaaccacaccagggccggaccaccggagagccggagcccgcccaacggagactcagancggagaacancccggccgccggagacggagagaccgaacgagccccgcgacaccaaagagcagaagccgaagcaacacacggagaagccccccaggagaagccaaca

SEQ ID NO: 80265 - DNA, 330 bp, Arabidopsis thaliana landsberg
agcccaagccgaaccacaagccggcgggacacccaagcggaggaggttgcagcggttgaggaaaaggccgccccccagcgagccggagagagcaagccggaaacccacccaacaccccgacgcgcacgcgggcaacagcggcacgaaacacccgggaagagcaaccaagaagccgcgagccacacccgccccggaaacaaaggaaaaagacggagagagagacagcacacaccacgaaaacccaaagaaacaacccccgaagaaagaagagaaacccgggcggagggaaaccacacaaccgaaccggaagaaaaccccagaccaccggac

SEQ ID NO: 80266 - DNA, 113 bp, Arabidopsis thaliana landsberg
acttcacgggcgagggctctggttgaaaaccaggatggtccatatgcgccaaggaaaagaatataagaaggatctgactccttcaggcacgctacacttggctcgggggatat

SEQ ID NO: 80267 - DNA, 508 bp, Arabidopsis thaliana landsberg
  unsure (1)..(508): unsure at all n locations
ggcgacaccgaaattgccctggtttgttttgcgaagcggcatanccattgtgcaacaacgaacngacgggccggnatatttacaataccggaccgacagcgcganggcacggcggaggngcagcggacggaccctggaacgaggcccgagcgaagccccggggccgtaccaggcatccggcaggttgtcgtccgtgtagacctcttcgagcaggcccttgaacgcatccatcgtgagcgccttgatctcgaacgacagcggctggaagagctgccgcgcggaggaattccggcgccacattgcgatgtgcgtgcgggagggcgcttcttcttccagcgcgaagatcttcacgttgtccgagtccgtgagttccgcgcggatgtacagctcgggcagtnnnnnnnnnnnnnnnnnnnncagtattttcaggcgcatctacgannnnnnnnnnnnnnnnnnnnnnnnnnnnnnnnnnnnnnnnnnnnnnnnnnnnnnnnnnatgttctgt

SEQ ID NO: 80268 - DNA, 384 bp, Arabidopsis thaliana landsberg
caaacaaaaaaaaactcactaacttcaaaaaccctttcatttcatattatctgaaaagctactcctaaggccaaccttgacaatattgccaactcgttgacaatctcggtcaagcgaatgaccaacagcatcataattcaaataaatcctaataggttgtttcacatccttcttctcatcaaaaacactaagcaaaacccttccattatgatgaaaagctttttcaacactccttggctcatgataaacctgaggagtaaccgaatacactttccgacccggtctcttgctctgatctataatctgatcatgaatacacgagtgtgaagctactccactttccacaccttccactgctattggttgatgatgatgatgatgatg

SEQ ID NO: 80269 - DNA, 556 bp, Arabidopsis thaliana landsberg
  unsure (1)..(556): unsure at all n locations
aatttaacagaaacccacatgtaaacatgnatcaatatatatacttagcttaattaattcaaaaacgaatgagataatcctatatgcaacaatcaacgaagagatattccaaaagagtagctactgaccctttgattaactcgagagcttggtgattgacatatccagcttccacaagtccaggggtgtcaataatgttgatagtgaaccctcccattgttcttgaaaccatcactggtctcaatccttcagcctacaaaatcaacaaaacagagccatcaaatatcttgaaatgactactctttcttaatccaaattaaaaaaatcaagcttagggaaactgaattacgtacttggaaaggactgacacggacgacttgttcgccgataagagaattgacagtggatgattttccgacaccgcctttacccagaacaagaactgtcattgagttcatatcctgcaattacaaaaacctcccatcattatctcctaatcacaacggagaatccgagataccgacttatgcaccaaagaaacaggaacaacaacatc

SEQ ID NO: 80270 - DNA, 538 bp, Arabidopsis thaliana landsberg
  unsure (1)..(538): unsure at all n locations
ctaatgctctctacgtttatttcttacattattacagcttatcaaataanctctttccggaagttcaattaaaaaaatataaacccttaatttatttattttgttgctaaagtgtttttaaataaaacattaattacagaaactttatgcatacacaaaagagtgtgtgggagagcatctcatctgaattagctgtcttctttacttctttttttccttataaagaggactattagttgtctctaatcattgttattttcttaatagtatagtaacagattaaataatcataaagcaattagaaaagaagaataagaagctggacttgaagaaaaacaaatgtatttgtaatgcggacattcctctgtacatttgcacaggaatcctcttagggatcagttaacaaatagtttatctatctagatatcatgtgacttagggttaaaacacgagattaaacaacttattatgatacattgaaattaatttgaagtttctaaccaaggagaatgctacgagacctttggatctaatagga

SEQ ID NO: 80271 - DNA, 572 bp, Arabidopsis thaliana landsberg
  unsure (1)..(572): unsure at all n locations
acccctagacccgtcgagtgcagaaaccatataggttgtacccaacaggatgtacattccaaactatctgctatttactatgttggcctgggatactcgcctttaccctttaccatcctcggcaaccggagaggcaggtggtctccgcaacatgctcaatacccaccgggagacctccacatgacctcatcttgagggaatcaccgcannnnnnnnnnnnnnnnnnnnnnnnnnnnnnnnnnntctgctccactccccctgataagcatcatccttcaagacacgtcaacaaacccatgacatcttcgaggaacaccacgacaggatcgaggtaaatccccttttttgtcttccgatcgggtattggccacggtttcccgagatgcagtcgcaggtcttcttgccgacgatgccaagtggagcgttcattgctaagtgcaacttgaacaatgaacgcaacggctgtgcagcactcggagcggtgcgctctacagactgtacctaaataggtagacaagcctcttagttaagaacggtaggggccacgtacacccctttagaccctgtgaaga

SEQ ID NO: 80272 - DNA, 531 bp, Arabidopsis thaliana landsberg
gagtagagacactgattcttctaaacacgtggtcatctttgtctcttcccatataggaaacagatgaatctgcaaaatctccatttttggtaattctgtaatcaaactcttagcattattataatcaaaaactgtttctaaaatgcattattaaaaattcttgagatgctaataaaggaaacttctttttgtttactttgaggtttttgattttttgataggaagagaggaagaagaaaggtgggtctgtgaaatctccattaaattttctccagcccatccgaccatggcacacccgtgacaatgacactgaaaaagattgttttttgctcagaagtttttaaagtctttgattgaaattaagaatatctctgaaactgtgaaagtgtaagcaattaaactctactacttgtagacctttgagagtttattttttatagtccttaggcacagctttcttatctctagcttttactctgctaggtctcagcttggtcttgttgtcactttttctttgggacctaacttact

SEQ ID NO: 80273 - DNA, 515 bp, Arabidopsis thaliana landsberg
gcctgttcaggttgttctccatcatggtgcccaattttttatttttcatcatggagcccagtctttccgaggggtaccatttgagtttctgctcaaattgccattgcaccactgtaagtctttcgccggatgagccgatcaggtgcattgttgccgtttgcactgcgcccttgcggggcaaccatgttgatacaacggtggtatctgtgacagagataaccgttacttccgtattacccagggctgctttcaaaggagaatgaatatgtacagattcatcgtccatgccttccatccataatttccagtcccggatattattcacatactgcatgatggaatctttgggtgctgcaatattcaccgctcgcgacaccaataccctcgatggcaataaaacaccgataagggtagccactatgaataatgccgcaaaactgatgatgatcaatctcaggaaacgcatgtttattcccatttaaatgtcttgaatgccacggcatatacgaccagcg

SEQ ID NO: 80274 - DNA, 285 bp, Arabidopsis thaliana landsberg
ttcaaattcatcaacctttaatacttttaagacatctcttctttcccttatcttagttgctgtgaaaattctaaccccatcaaacccccctcattcccttaatcaaaatgtacaacattcccacaaaataagacataacattactaatacatctttcatatatgatactaaatattcccaccccatataatactagtacatctctacatccatcataaaaaacaccaataaacatatcccaatcaacgacctcttccatctcatcatccattttttataccaaaa

SEQ ID NO: 80275 - DNA, 525 bp, Arabidopsis thaliana landsberg
  unsure (1)..(525): unsure at all n locations
gagatacttagagttaatgttataatttattaatcattaatacacaaaaaacttataatataaattattcataatgtattaaacaacgatgataaaaagaacattaaaacttaaaaagtatttaatccaattatatgactgattcctcaactttcatttggttaaatgatgtgaccaaaattaaaagtttcaaatagatccataccgtttacttatattagaaaatgtctcctagaggtctgtcgaagtgttctgacaatttttgttatggaaaaataatcagtattttaaattcttataccctcatgaagctagctagtgacgtaaattaccgtacttagacgacgacagagtgttccagattctaatgtacttggcttgactggattgttttcttagctttcttatacttgagaaacaaaagtatgagggagaaannnnnnnnnnnnnnnnncaagatagtaagatattttcaaatatctacatttgatggtttatttcgctacncatgtgggtggcgagctg

SEQ ID NO: 80276 - DNA, 542 bp, Arabidopsis thaliana landsberg
tggcgatttttctcataacagaagaacaagaagaacaatgaaatcaaagaaagctgaagaagggaagttatcggattcaaattctaattcagacaataacttctcatgcaagaagcacacgaaacatagacagtctcctggaatctgttctctctgtctcaccgagaggctctctaagctatctctggagtactacgattacactaagaaggcagttgaaacggcgacgtattgcggctcaacatcaacatcttcttcctcgtcggtctcgtcttgttactcttcttcttctgtctcttcttgttcgtatactttgcaatatcggtatagagaaaagaagaaggatgggaagaaacagagcttcttgttcagagtattgctcggatccatcgtagactagttcttttctttccgtagtttgtaatgcattatactactttttatgaattcattattcttcgatatcttttcaattcgaaaatgcagagaatcagccaaataattgcaagaagattttataccaacaaatttgtattttaatc

SEQ ID NO: 80277 - DNA, 603 bp, Arabidopsis thaliana landsberg
agaggaagttcgctaattacgtaaaactctactatgagagttaatacgagcctattaccattaaaagtcaaattaatgaagagtaaatctaattggtcggtaaattgagagtcttcaggattcagttacagttgtctataaataatttctatagagttatttgattttgaggtttgctccagtaattacgattttgctagtgggcattcaataaaagagacatgtgtattaaactaagtaataaataatcatgctccatattaccccataagttatggactttgaggggtcgaccacaattcaatggatgtattcacgaaaatggaggtgacaataaattagggctgcgtggtgtaagttgctaaaatttggaaatcgatgaatttcttatacttgtatcagaataattatttttatacagtatattagtatatggactctcatgtgctggttacaaagatcttgtcgatgcagtttcgtggttaaagatgatagtcaatgcaacattcaagagcacagtaaaaattagaaagtgataaatatatcacgcaccccacaatttaaatttaaatatttcttgtgtatatttagttagatggaatc

SEQ ID NO: 80278 - DNA, 534 bp, Arabidopsis thaliana landsberg
  unsure (1)..(534): unsure at all n locations
atccggcgttgcttaccgccattgctagtgcagatcggnnnnnnnnnnnnnnnnnnnnnnnnnnnnnnnnnnnnnnnnnnnnnnnnacgcaactttacaattttacaaaattatcaaaattctaaacttttgttaaattgtcacgaagcacgtgaatcttttatttgtcatccaaggttttgttggggtattttaatggaaaaaatgtaataaaaaaaacgtgaacttttaaatttggaatgaaaaatcaagatgtaaacctcaacgattagaaagaatttatcatcgcatcttttgatcaagctttctcttggaaataacttttgaaattggttagggaaagattgattatgttctgcaaactgtgctgaaaagggtttcttggtctagagatattcttctacttaattgagttcgtgttgtgtaggatgcggcaagttgacgaccgcaagatacttcgcctattcggtgactgtgacataggggaatcaaacctaatctttattaaattcgggcattctgttataacctata

SEQ ID NO: 80279 - DNA, 510 bp, Arabidopsis thaliana landsberg
  unsure (1)..(510): unsure at all n locations
ggaagggatataacgtaacgcgctacaacatccatgactggtgatgtagtcataatagttgataataaaactaagggaaaaatgggttatagtgataatataatataacatattcggaacaaatataatatctaaagcatcaagtttcaccctaaccacatttatattgttgatnnnnnnnnnnnnnnnnnnnnnnnnnnnnnacgagtcaaatccacaatccttttcgcaagcgtttgacccagacttttgatactcgtttaattataaacacacaaatatcaaaataacatatcaccttatcttgaaaattgtggcattatattcttttgtgtggacaagaataatatgcttaattaaataaactcataatgaaagacttccatgccaccacatgcttgaagcttatgtaattgaaatgacgtgaaatgatgtataaataattaaatatgaaatcgtcacaattattgctcaaaaaaagaagacatcgtgacaattatatatcccaca

SEQ ID NO: 80280 - DNA, 331 bp, Arabidopsis thaliana landsberg
aaattttcaaaacagggaaattttttttaaaaaaaaacacctgtgtcttttttttgttgggacttcttggaagaacttttcttttatagagaccagaaccacgattaacctgacgccgcccaatggagataagagaaacctcctcgccggaatcatcgattggatccgatttcacgtgtctgcgaaaattgctaattttttacaccactttttatgatgtgaggactcttttaactaaacaacaaaagttaaggtactaaactgtgatacttcaaatattcagagtgcgtttcgtaaattttttaaacccacaccataaataataagatat

SEQ ID NO: 80281 - DNA, 540 bp, Arabidopsis thaliana landsberg
  unsure (1)..(540): unsure at all n locations
ctacaatgcacaatatgttcttctaagcgaaccatttcctctttttaacagccacttccgcaagtaactccaaaaccgacatgaattaccaaaaaaaaatcccaattttagacaagatttagagggaaaataaattcactgagctatgttttaaagttacaaaccgatggaggtagaaacggaggaagacggggaagtgctccaagaggtctactaaatgccctttccattgctcggtgaatgttttcttcaagtctcagcttcttcctcaacttttcaaccttaaaacaaaataccatccagtcttataaatttcttcaagctgtatattgagcaaacctaaagacatgaactcgaaaaagccgttacatcttcttgcagagtaattatcttctctcgatttaacgcctttcgatttacaacaccattttcaccacctttcagtttcttcccctgcatcattcagctcatagtcagatcaatatcacagcatacttaatggatcttaaacactctntaatataacgttacataagttta

SEQ ID NO: 80282 - DNA, 268 bp, Arabidopsis thaliana landsberg
tccgaacgtccagcacagggcggagggaaggagccagcgtgaatttcagtcgagaagttgagcgagcggtgtgggagcgttcgtaagatgggcattattcgcattgataaagctgccttcggtggtgactgtcagtttcagagtctccagggtcgctatggtctgaaaatcgccggccgtcgcagcagggtgaagcaggtttttaaccggcgtatgcctctatggcatccccgacgccggccgtggcgaggagcagggcataggcaag

SEQ ID NO: 80283 - DNA, 661 bp, Arabidopsis thaliana landsberg
gactatataaaatactaggcatgaatgaatttaagcatacgtattacagacttgtttgtcaaaacaaaacaggcattaatcttttttatctttcgaagatataatccatggcaatatctcacgcccaacctgttctgcttctcctatcatcactctatttcttatctgcttttggcgccggcgcatacaattttgaaaactgcaaaagtaagtatcgtttttgttaagtcttatattgttatatagaacatcaattcttgttacttgataagtcaattcaatgaaaagaatatgcctgaatttcatagattgtggtttgctcctatctctgttttttgttttaccaaataaatcttgaaccggaactcacattagtcgtcaattccataaaacagaaatagagtattttgctactgtgaaaacgtttatatagaaagaacagatcaatgaaactatgaaagtactcccatctataaaataacccaataattgtgaagtattcaccgaagacttttttcttttttttttccttcagtgtggttttcgagagccgtggtgtataagtcaagaactgagtattataactaaaatattgcaggtccagagttcctccaaaattcaaagatagatcaaacaatttaaaatctgatcgaaatttaaa

SEQ ID NO: 80284 - DNA, 524 bp, Arabidopsis thaliana landsberg
tctcttccttcttctctcttcagatctccatttcacggtatccttctctcttccccttgtctctattgacttttatttgctttgatttttatcgatcgtctctgatcttttgctaatttaacttgtttccgtttgttttgaatttactctctcctgatctttggcatgtattttgaatctgctgttcttagttttttatttgatcttgttctcgtctgtcttaatattgaataattgactagttttatttacagatctttgcattatagatcccttcaagtgcgattttaatcgtagattagttttggatccgttatattggactgatgtttttgatgtattttttggtattaggatcaatcctgtgtttgaaacaatgggtgttgaagttgtaaactctggtggatttgaggttgctccggctcctttcgaggggaaacctgagaagaacgggaagctggaccaaggaaaaggagatgatgcccccatcaattttggttcagtcggtgagctaccaaagaatg

SEQ ID NO: 80285 - DNA, 180 bp, Arabidopsis thaliana landsberg
taatcttaccaacgctccctactctctcttctcatcctggtaaaatcaaaatctctttcaagacatttttcatatacatagtaaagttttcatctttaaactagaaacagaggaaattttttaataaacaggggaagtagcattgcctggaggaaaaagagaccaacaagatacagatga

SEQ ID NO: 80286 - DNA, 488 bp, Arabidopsis thaliana landsberg
  unsure (1)..(488): unsure at all n locations
acgtactcaatttgatatgtggctaattaatattttgtgcacaactgtttttcttgcgttccactgacttatcatattgccaattcagcttgctggtggtaatgctgctcttgctcttgctgtgacagtggcatctaacttattaggaattttaactgtaagccgaacgacttgcatattattgttcctcctttgaaactagttgatcatgcagaatcaggggtatttttagtaagattgtttcctggtctatatttccgaattgcttagcaatttgttctcaaaacaactcatgatcttgtatctatgactatgagtaggattcaaacttcaaagtcttctattaagaatgagtattgcgtcttctgacactgaagttaacgtggtttgacctctaatcagattccattttgggtatcaagatacatagctnggggagtaggggtcgntttctactgacaactattaaaagtcttatagntactctg

SEQ ID NO: 80287 - DNA, 595 bp, Arabidopsis thaliana landsberg
atctccccgtcatccacattccgttgtcgccggctttgatcttctctgcagatcgctcgtaagtttctttacccttcgtatccctaaatccctctctcttccaactctcttttaacatgtataatttcttcccctaatttcgtctctttatctcctctctgctccggcgaacatttgaatttcctttctccggcgatcttctcatcgtcatctctttaatttcaatctcaatttttcgcttcccccttaaatttatacgtgttttagagatcaattattcgtttaattcgagaattgctgattgatttttgaaattttttgcgattgattctgcagaattttttttagcaagtagtggtttctgggaacgatgagtcaaggtttcgaaagatatgagagacaatactgtgagatttctgcaaatctctcaaagaaatgtacttcagctattgctcttgatggaggtattttcaatttccttgaatgtttgaagattcaaataacctaagaagttatatgtagcttgtgaatgcgagtttctgtttctttcatgcattgtaaagaaacaatatggtgcttgctttagttttatagt

SEQ ID NO: 80288 - DNA, 527 bp, Arabidopsis thaliana landsberg
aataatgtgatcactcttttacattctttcttttgatacttccataagtgctggtataatcaacatctaccacagagctaatggggatctgttttatctggccaccacttcccatatcgcgaaacacgatcttcatattcagcaaatcagtaaggcttttcctttgtacttcaagattgcgaagctgaattttatattcgtcttccccatccttgatcttagatacctcgcgtccgaataatgcagtccttatctgttggccaatttgtgcagtagatattccttcgatcattgcacgttctcgatttacagtcagtgttatttcaggattggtgaggtccacatccattttcaattcttctaccccgggtatttgtaggctatccaggtaatgtttcaggccggtagctgttgaggtaagctcattaaaatcatcactggatacttctatattaatgggaggatcggttggtggcccactactttcctgtgctacagaaatttgcgcaccaggtattcctcttact

SEQ ID NO: 80289 - DNA, 409 bp, Arabidopsis thaliana landsberg
acaaaaaataaagtttattatatttaggattattttaaactctaatttgagtctaactgttatcccaatgagaatagggtgttttagactactatttgacgtatcaaaagttgggagtcttttcatcacgtatcagacgattcaaaactaaaccaaaattcggattgaacactcttaaatttgtatgcatattctaggtaagctcattacaaaaatgaaatggagtatttgcatgtgacgcatacattactagtttgataatgcgtaaaagggaagatacaaaacatataaataatttccccgtaattaaattgtggcaattagaagctgatatccaaattacttcaggtttatttaattttcagatggaagggtattttcggcaatactcttcgtatgttactgaaca

SEQ ID NO: 80290 - DNA, 481 bp, Arabidopsis thaliana landsberg
tatgaggtgatctcgaactaagtagagtcttagagaacatgttctctttatcttttaatacacacaaaggtgattagagccgtttgatgtatatttgttactctttagttgtggttccgggatacagttgcttacgatgagctccaaccggcggttctaaatattgggtataaccaaaccaaccaaacctgaaaaagagttatgaatatcaaataggtcttttggtttggattggttaaccgtaaaaagaataaaacatcaattgtcactaatcataaaaaataggggaacgacttacgagtagagagccaagcatcttggatgatgattccgggacgtttctagaagttctgttttaataataagggatagtactacatgtgatcatatttgcatcataggtaataaaatgtctaagcagatgctattacaaccacacacacaaatttattatacaaagtgtacatcgttcttgcctaag

SEQ ID NO: 80291 - DNA, 311 bp, Arabidopsis thaliana landsberg
catagaattatagaaaatgacaatcgtctttccattataagggctcgcggctatagacaaggacccttgttcttcatcttaatggaattctcatcttcctctccaacctcactttccttacttcactattcctgttaaagtcacttccttttctttttgttctttctaatccaatctctctctgcttttatgagcatatttgaatctataaacccttaacattcctaattatctcttggtaattgtattatgttgtttgcatatgcatgatataacggtctgctacttgattgaataattttatacaacca

SEQ ID NO: 80292 - DNA, 172 bp, Arabidopsis thaliana landsberg
atacgttagataacaattctaaaacctaccttatttttcatcaacacaaccttcaaacattaccttatcatctcacctataataacaacattcaaatagcttctatatctaaaataagttcctatataaaataccactctaccaagacaattcttacatcatgacatcctac

SEQ ID NO: 80293 - DNA, 609 bp, Arabidopsis thaliana landsberg
tgcctcagggttgtgaccgacgaggacgatgcagcgcgctcctaacttgtgcccgggaaggtccgttctttttttgtcctcgcttccatcatatggtgtaacgaagaagtagtctgttcgtcgcccgatttcctcatccggaacgatttcgctctcgccgaagaggaacatttccgggcatcccaccacgaactctgtgttacggtggtgttggtattcggcggtacgcagatgggctgacttgatgtacttgatccagttttccccatgaggtcccggagggataccgtgaatatcaaccgtatccagaagggagattccaacctcagtgacttgtccgaagctcctctcgatccactccacatcaacgctgtagaagatggggttatcctgtgtgtcccaagggacaggtttcagcacttggaccagagggaagtttttgtcgtcgggcaggtaggtcttttgatcgagcgctggtcgaagcccaaagtaggacttgagctggtacaggccacgatccaggttgagctgattcgcgtgtcgctgcattatctgcgcgaagggcctggtggtattcccatgggcgagacttgactttgacttcctttc

SEQ ID NO: 80294 - DNA, 535 bp, Arabidopsis thaliana landsberg
gataacattatacaaaattatcctttgcttctatatttaacatacattttgttttctcacaatgtgtaaaattctctatagaagaaacaccacacaaaaacaccaaataaggtttagctaggatataattgacatgattgaacaagtgggcttgggatatatatcactacaagaatagaaagataaacaaaaatatcttctgcaattcgtggtttgtgaacacaagagaaaaaaaaaaaacatgtcgaccaataaaaaaaagatacaagagaacgaagcataaaaatatcaaaacaaaaagacaaaaacaggaaaatagaaaaaagaaagaaaaattaaaaaaagctaaaatcaacggtgagaagattctgtatataataagaaaatatcacccaaataaaaaaaaaagggtggagtccacagataccgtccatcaacgtatcactgggctctctttctccgtgccgttcctcctacgtgctcgaataacgatgtgccacgtggtggcatcgaaggataaagtgtcgttttttac

SEQ ID NO: 80295 - DNA, 356 bp, Arabidopsis thaliana landsberg
attttatattagcatatatttaaatttcagacgatctccagagagaaaacttatttattgctcacacactgttttgtcctttgttggatctcagatacttttaagtcacattttcatccgtacttttctcttaattttattataaatgtaacatattaaaatctactttagtgtcttctcgtgcatatgagtaggcaccaccctccaattaaattttaacgacaatataaaaaaccattaccctgacttattagtttaatgatccgccactagttttcttgccatagtatacatttatgtaactgaatttgtttaataatagtcataatcaaaggctcctactgatatgggttaat

SEQ ID NO: 80296 - DNA, 131 bp, Arabidopsis thaliana landsberg
ccagcatgcaacagagtacgaacgcgcaacctggctccctaggctatcgattctaaaggacgagggttaagttttctggtaaccggtattgggctcaggttcgtggagcaaagacatttcacgcctgaggg

SEQ ID NO: 80297 - DNA, 402 bp, Arabidopsis thaliana landsberg
tatttgatttaaaaggtgtctgtgtgtggctgacacctgtgccttatctcataaccttggctaccatggttgattttacttgaaaggagacaaaaaagaaacatctctctgcatataaagagcggtttgcttactcttgacacacacaaaattgatagcgcttcattaatagatctagtggaaggtactgctcaagcgactcgatttgatgttctaactagcgtgacacagtttaagcgataaacagaagcatcaggttaggatcatcatacatctcttacaaaagtcctttaacggacggaggctggagaaccaggactactgaacctggccacatgccactctgagactacttatagactaacgaatcataatggagcgggcttcgtacacagaccaatt

SEQ ID NO: 80298 - DNA, 397 bp, Arabidopsis thaliana landsberg
  unsure (1)..(397): unsure at all n locations
tgtactgcggcttgaagaagatcagcaaggtacaaaagctcaggcccagcaggatgtacagctggggcataaacgggtatccaaatgctttgtagggacggtgtgcatccggccgttnnnnnnnnnnnnnnnnnnnnnnggctatggtcagcacatagaacagcaccacgacaaaggagatcatatccagcagatcgccatagcgcccgctcaggcacagcagcgccgcaacgatgaattgcgcccaaagcgcccattgcggcacatcgtttttgttcagagtgccggcctttttgaaaaataagccgtcctgcgccatcgtgtggtacacgcgggcgccggagaggataaggccattgttgcagccgaaggtggagatcatgatcagggccgccac

SEQ ID NO: 80299 - DNA, 556 bp, Arabidopsis thaliana landsberg
gccgacatcactgaaaaacccattgagccaatcaaagtgtactcagagaaggagttaatacgagaatttgagaaaattgctgcaacactcgtcccagagaaagactggtcaatgcgtatttcagctatgcggagggttgaaggacttgttgcaggaggtactacgtcaatactttttgtctttatcttcgaaatgaagttttattttcttgtatctcatctcatggaatcttttttctgttgaaggtgcgactgattactcctgctttcgaggtctcctgaagcaacttgttggtcctttaagtactcaattagctgaccggagatctaccattgttaagcaggttagctaaattttcgattgatattctcattagtaggatttagaatgtattgtgattcttctgatccttgtatcggagacaaattgatgagttggcaactccgtgagatattccattatcattgagtaactaatttataggaagttcatatttttctatgccaacacccttcatcttagtaaaacttatattcatttagccagaaacacattt

SEQ ID NO: 80300 - DNA, 578 bp, Arabidopsis thaliana landsberg
gctacatatatgttctagagcttcttacatatatatatatttgtagatattaaatacaatttgtggcatgcatatgatgaaatttgtttgtttgctggtaaacacatacagtcatgaattttaattaaaataatatttacaaaaaagtgatctacgaattggtcacatgattaagcatttataggactttctattagatgtttaataaagtttacgatgtcattatcatataatacagacaaattagccgtaggttctgatcagtctccactaattattcttaagctgtgcatgtgtttctaaaagtacactaaaatcttcacctaatatgccctcccttctccaacttagcaagcactatttaatttattatatcttatcctacatcatgattaatatagttatcaattcccaagtctagatcaccacctaattgttataatatgcttgttagatgaacctcttatttttttaatttgtttgtcacagataaaccttttactttgaaattataatggatatatacagattggaattgcgtcttcctaatttattttatttagtagtctcaactttat

SEQ ID NO: 80301 - DNA, 129 bp, Arabidopsis thaliana landsberg
cgcgaaaaccagacaaagaaagataacgagagagagagaaaccaaccagagccagagccaccagcggcggacaccgacgccggaaccgccgaccacgaaacaaaccaaaacccaagaaccgaaacagac

SEQ ID NO: 80302 - DNA, 413 bp, Arabidopsis thaliana landsberg
acggatttgtgctcaccggtccaacccccgcttgctgatgtactgcaccacgccgtccggcacgaggttcctttccgggcgtccgtggcgcacccggtcccggcagttggtggacgagatcgccatggccggcacctcgaccagggttaccgagccctcgggcaggtggttcgcgttcagcacgaacccctggccgggtcaccccgactaagtgcgccagggcgaacatttcctcggccttgtgccaggacaggatctgttccagggcgttcgcgccggtgatgaagaacaggtcggcgttcgggtgcttcttccgcaggttacgcatggtgtccacggtgtaagtgacgccgacccggtcgatgtccacccggtccaccgtgaatctcgggttcaatgcggtggtgaccacg

SEQ ID NO: 80303 - DNA, 544 bp, Arabidopsis thaliana landsberg
aggaaatgaccacatttgcagatttttttgtagtacaacccgcacttgccaatgcaacccaggatgggtatcttaacaaaccatatcattatgggaatacctaagcttgagtatctaataaaaatgcagtacacgaaattcattaccacagacaaacaacaatataaagtgtcagacaagatccactcttcacttttatactttaacagaaccatgaaccatcattactaaccttctgcatcgacgagaagtcaattccaaaatgggccagatgctcagccaggagcgggtccaaaacactgtcatcttccggataggaataaacatctgagctgccaaaaaatttgcaatgattaagtgctgaagaaatcaaaacccatccaaagaacaagataatccacatgcatcaacattaaaaaaaaaaaacaaagtgatgcagggaagtcccccttatccaccccaaagagacaactatcaactgatattagccatacacaaaagtgaaagttaatgactaaactctggttctacgaataaggaaaca

SEQ ID NO: 80304 - DNA, 477 bp, Arabidopsis thaliana landsberg
cggaagcggaacggtgctcgcgaaaggggcgttaaggagcgcctcttcctgtgctgtttcgtcctgccccggcaaaagagcccgattccgtaaggaatcgggcttttcttatgcgcggggaagcgtacgataggcatatggacctctaccgggagcgggcgagcaatatccgccggacctggctcctcatgctcggcttccttgccgtcgtgacggccatcggctacgcggtggcgtggtactaccaggacacatccctcctctggatagcggtcgccatcgccgtcgcgacgaacttctacagctactggttcagcgaccgccaggtgctctcgatggcgaacgcgcgccccgcgacgcgcgagcggcatttcgacttctataccgtcaccgagaacctcgacatcacggccggcgtaccgatgcccaagctctacgtcatcgaggacgcgtcgccgaacgcgttcgcgacgggcc

SEQ ID NO: 80305 - DNA, 277 bp, Arabidopsis thaliana landsberg
gagaatactacataccttatcaaaacatggacatctatttttttagcgcaggactaggttctaggggactggtgaaataaaatatagcacctaacaacgtatcttcacaaaccaataactacaacatcacccctttcattcttgtgtcacttaggtatcgatcccttccacccttttttacatcctatctatctcttaactcctcatgggaacagctctcaaataatatcttagtacgtctacctttactccaatagcttttattcacaccctcttt

SEQ ID NO: 80306 - DNA, 572 bp, Arabidopsis thaliana landsberg
  unsure (1)..(572): unsure at all n locations
cggatgacctcaatttgattcgcgcatggataaggatgccgatttcaggatacttgcttatggtaaatccgatttgagtaagctgaacaagccttttgtttatacgccctacgaaaaggacaagcctatgccctcacggatgatcgggccgtcaaacccgaattatacgccgttagaagatatatcgccatacctgcgcaatgcagtaatgacggccgaagaccccaccttttataaaaaccacggctttgtggaaaaggccatccgccaatcaattattaccgacattaagaaacatcagtttaaacgcggcggcagtaccatttctatgcagttggttaaaaactctttcctgacccgtaaaaaaacgctgagtcgaaagatcgaggagatactgattgtctggctgatagagaataacaacatcatgaccaaagaccgcattttagaggtttactttaatattatagaatgggggccgggtatttacggcattgccgaagcagcacattattattttggcaaaacgcccgccgagcttgatctgggcnnnnnnnnnnnnnnnnnnnnca

SEQ ID NO: 80307 - DNA, 556 bp, Arabidopsis thaliana landsberg
gtctagcctgcttctttgattcgtagccaacaagctggagcactcccaaagtcccgagtcttaacgttttatggcccattaacgatctaaagcccaacataaagaacctatttctatcctttgagaagttttctctgtccgacgattcatagccaattaacgctaagattactatttgatttaatctaaaatatctttagcgaaaagaaagttatttaccaaaatctaaaaatttatatgtaattatcgaaatctttttaaaaaatttgatatgtaattatcgaaatcttcttataagaacaatataccaactcttttctttaataaccctaacaaaaaaaagatacataaatctggtgcatatacacatctctctatccgtctctctgcgtttcaatggattatgaaaacggagaaataatagctcctaaatccaccactttatgggatagacttacaccacgacaaaaaaagtatgtgttcacgtgtgtcttggtttttttgatcgctatcgcaaccgctgcaattatcgtttatgcctactcctgatcagcac

SEQ ID NO: 80308 - DNA, 534 bp, Arabidopsis thaliana landsberg
ggattcttttccaaaagctggtaatttgatacttcttaagtttgattatactcgacttcaatgcttctattcaattgttttaacatagaagtgaaacgattgttgtacttgaatcaggcagattggagagcgatgtgcggggcgcttgttggttgtttggctctactgaagaggaaagatgtagctggtgtggttactgatatcgatgtacaagctatggcgaagtcaatgatacagaatgtgcaagtgcaagctttagcactgcatgagcgcaaagtatgaagcggttatttgtagtattctgttatctaatctgaatgattgtgttctacgctggatggttttttcattatcttctgctaaatgactttgcagctcgcttttgaacttctggagtgccttttacaacaacattctgaagctattttgactatggtatgctaatgctctctacttagttcagaattaaacattcgatctactgtgtgaggaatgttttcttggaatctatttgagtcagctttgttggaagac

SEQ ID NO: 80309 - DNA, 572 bp, Arabidopsis thaliana landsberg
tgcataaacattaaaagcatcgaaaaggaaatcgaacagggcccggttttctttctccgacaccgcatattcgcctgcaccggcagcaaaaggtttataattatagcttgaatttttattaaaatcgatcccgccttcgccatcttcgttaaattcgccgtctttatcgttatcaattccttcgggcagcaaaatatacttgccggtttcgcccttagccgcatcagccagcaaaagcgaacgcggatcgtcggggtttaagcggtaagtacctgtcggatctaaaatacgcatccaggtaatcttaccatttccgtcgaggtcttctgcgccatcttcatttattttaccatcgcgatcgtcgtcggtcgccttagcatttccacttcgttcgctctttattttggcaaaatattggttcggtcgcatctgggctcatatttggaaaaacataataagtttgtcgacttaagagcgttttaatacttgtctgttggagtgccagccagtaatttttcggcaaaacccgatggccattttttacccctaagaggtgcccggccttccactcc

SEQ ID NO: 80310 - DNA, 397 bp, Arabidopsis thaliana landsberg
  unsure (1)..(397): unsure at all n locations
gacacaccncagaaacaacagggacagagaggcattgaataaaaaaaaacggacaacgcacagaagaaaaagcaatncgaacgagaacaaacaannaccccacagaaacanacgggaaacaagcagncaaaaaaaaagccaaccccaagcaaaaagcaaagacggagagaccacgaagcgaacaacacaagaaaagaagcccaaaagggaccaacaaagaaaggggacaaaacaagaagcccaacaggcccaagaaaaccgcccaggagctaacgacgcnngcaacaagcaagaagcaccgaagagnaccgggggaaggagagcgacgactacagaggagtgtcgaagcggaggagagaaaagaacacgacggcgcgtggcacaaacccacgaagaa

SEQ ID NO: 80311 - DNA, 318 bp, Arabidopsis thaliana landsberg
ggagcgacaacagacggcaaagtcgggggggaccggatgacaaagggaaagaagcacgttgtgagaaggtggagatgaacaaggacaagggagagacacagagggaaagacaaccagtggtaagcaatgaacgagcaaccacagggcgggaccatgacacgagggacaaacggaggccaggtcataggacggaaacgcaggatggggggggtgctcgccatagcgcagcaccggggaaaggacacgacagaggacgagacgggggccgcaaactagggcctaatgagggacgaggaagggcagacaactgaggggagg

SEQ ID NO: 80312 - DNA, 475 bp, Arabidopsis thaliana landsberg
ttcataaggacaaataattacagaattactagtaagattaatcagcctataatgtctgcatgtttagaaatggcttaaaataccatggtgcatctatagcagcacagccccgtctgtaggtgtgggtgactggtggcctgctggcctggacacttccctggcacaatgctcaaggacaacagaggcaaacgcaaaagccttgtgatactattgtttttcccctgggttttcccatatccccttccccaaaaatcttcactgggaccgtgtgtgttccctgtttagaaaaaccctcttgtaaaagcgccatttacacaacgaaatttgtcttctcacccgggaattattttaaacacaacccaacccaaacacatcccaacacgacttttgggtctcaaaaaacatatttcaacgcgtttatgttaggccggtgagatggctcccgaggaagagggcttttttaacctgacatgtt

SEQ ID NO: 80313 - DNA, 439 bp, Arabidopsis thaliana landsberg
  unsure (1)..(439): unsure at all n locations
gaaaagatgattnttaataaaggcatcctaatgctaaagaaattgatgattatttataaaaggcaacaaaaaaaaattatattataaaatgcaactttacatttcaaaaaatcatcttgaggattcgaacaagccaattcagaaaaaaaaatcatattcagagccaagccaattttccttgatattacaaaactacatgactgcctaaagaatgacttaaaccattcactaattaccattataaaaccattcagaaacgttcatgacataaatgcttgttctacaaatttcagctaaccgaactcgtatccaccgcatatagatctgtcaaacttaaaatcttgccacatgtgactcatatatcgcttcacattttaatattagtactagtctactaggagaccggagacggataaattagtactaggacatgtttaga

SEQ ID NO: 80314 - DNA, 447 bp, Arabidopsis thaliana landsberg
cgctgttcgtgggacattttgccgagcgcacggtaggcgcgcacgaacgcgtcctgcacgatctctttttcgtcttttcggtttccggtcatgcgcagggcgaaaccgtacagacggcgctgatagtcgtcgacgatgcgatcgaacgtttcgacgctgggtgcagccttgtccgatacccggttggacggcggcttgctctgctgggccgtagatggcacgtggactccccaagggagtggcgctagcacgctcatacggaggctcctgaccactcccggccaccctcgggtttcacgctatgcaccggaaaatcctgaaggctgccaaccagggccggcggccgtggcaagggaacctctagacatggtacacgacgtgccgcacgcaccagttttagaaccgccgctcgcaaatcgcgacgcggcggttttgttttacggcaca

SEQ ID NO: 80315 - DNA, 512 bp, Arabidopsis thaliana landsberg
caagaactcaagcagcaattttaaaaataaaagatatattattttgttatagtctaagggaggatgataagaaaatctgaagatttttttcccataattaaaccattctgtttctgtaagagcagaaggggtcacctgtgtggtaagtctgtagtttgtagcatatagcagttttgaatgtgtgccaagggcacacataattgattgctgttgcgttgcatgacgacatgtacagtgtaaagcactcctgtgggatactcagagccagggctgcagagatagatagtgcatgatgcccagggatggtacaaggttcaactcatgtgagcgggaccattcattatgtgttttattttgaattaacttttgttagctggattctcagaaaaccgactgctgttgattttcttatgccctgtgcatttacacattccccatgtggagttacaacccagcttaagaaggtgggaaccagggcgttcactttccaatgacttgtgaacagaggatgc

SEQ ID NO: 80316 - DNA, 594 bp, Arabidopsis thaliana landsberg
  unsure (1)..(594): unsure at all n locations
gttgatgtgcccgccgcggatcatcgcaaaggattcggaactcgaaaagaatgcgtgtctggggatggtggtcactgcctgcttgcccgcattgatcaggtctgcgtccacttactgttcggaaggaaacgggccgatgcccaacagaccgctttcggactgcagcatcacattgacgccctcgggaatgtgattggacaccaaggtgggcaaaccgatgcccaggttgacgtaaaaaccgtcttgtagttctttggctgccagggcggccatttcatcgcgactccatgccatgtcgactctccttcaagcagctggggtggaaacagtgcgcttttcgatgcgcttctcaggatgtgcattcaacaccagcttctggatgtaaatgccgggcgtgtgaatgaaattcggatcaagcgcgcggacttngacaatttactccacttcagccacagtgaattcgttggccacagcgcattccgggttgaagttacgcgctgtaaggcgataaatgaggtttccagaagtgtctgccttncaggctttcaccaaagagatgtcagccgtcaggctgttatcagcacataatttgcc

SEQ ID NO: 80317 - DNA, 385 bp, Arabidopsis thaliana landsberg
ccggcccctcacagtatggtgacgatgtcggagtccttcggagctgcgctggctttcattcagcgccggggggccttgctgcgtcggcggggttgacttcggcccgcgcgtcgatgagggcgcgcgcgatgagcacatggccttccagcgcggcggacatcagggcgctgcggccgaggttgtcgcgcgcgttggcgcgtgccttgttcgccagcaaaagattgatgtcggccgggtcgacatcggcaatgccggcggcggccacgagggcgggctcgccaccttcgacggtcgctctggcgtgatgcttgactagccattctgtcattaccccattggcggagtggcaggtcgcggtcagtagtgactggcctcaccggttgag

SEQ ID NO: 80318 - DNA, 395 bp, Arabidopsis thaliana landsberg
atggggaactaatcatggtcattttgggaactgcaagttgagtgatggacaaggcgctccaggcactctgtctctaatggcgagagacacgctaggtcctcacaaacctctaggtggaaactacatcattgcgactaacagaacgcagacttggatgggtcctgctcagatgatcaccgataaaagcaaactcttcttgacatatcaaatatcagattgggtcaagcttggtgtgggagaaagtgtgagtagtatgagtcctcagaatgtgaacattgcacttagagtcgataaccaatgggtcaacggaggacaagtggaggtcacaaggggcgatacatggcatgaaatagccggatcttttaggctctgagaaacagccacaaaacgttatg

SEQ ID NO: 80319 - DNA, 292 bp, Arabidopsis thaliana landsberg
atggggttactcttcttgctgtcttgttcagcttagtggtcatagctgtggctatattgactgaagagtatttttatttttcagtcaaatgagatcaaagtacggcatcgagccttgtattgaacactactcgtgcttgattgacattcttggtcgcgcacgacagttgcttgaagcttatgaaattattcaacacacaccagagacaagagactatgcagagcttcttcagtcctcttttctctgcttgttgctcagcaccgttaacatttatttgggagattagaattgg

SEQ ID NO: 80320 - DNA, 517 bp, Arabidopsis thaliana landsberg
  unsure (1)..(517): unsure at all n locations
gggcgtgaagcgtgccactgcggcccggctgatgagtgatgctggctgtccgattctgccgtcgcttgaggagttcgtcattcacggtgtgcgttacgtttatccgcccgaacggggtgagctgacgcgcggaatgccgacgggatatgccgcaccgccattggataagctcattgtgcaaccgaatgatccgccgccggtgtggccttatgccgaaggcacggtgcgtggttacagtttcgcgccgttgttttcttcggtgccgctggccgctgcgcgcgatccgcttctttacgaaatgcttgcgttggnnnnnnnnnnnnnnnnnnggcgggcgcgtgagcgcaatgtggccgtgaaggaactatcgacgcggctggcggagtctaaatgactgcggataactccaaccccaactacgatctcctggtcgcgatggccagggcgctgggtgatctgcgcgaacgttttgtatttgctggcggctgtgcaactgcgctgttgatcactgataagg

SEQ ID NO: 80321 - DNA, 580 bp, Arabidopsis thaliana landsberg
tgcccagcacctaagcagtaccgtggccaatagtttcttaccgtgaaatgatcccttaatatctaacttgctctttgatatgctgtcatctgctagttgaatggtgcatctctattctatcttgctctttattcattattcttcgcgtatataattcgattgagtacaatttcagcgccaccaatattgtctgattcatcgaccgtcgccattaggccgcactgcagcatatttttaattttgtaatcatcagatacatttttttcgccattttgaaacgaagccagaacatcaaaccgcgcctggacatctggtaagtccggattcagttctaagcatttctcaaagccctcgtatgcatctctagtccgattacacgtatcgtactgttttttcctataagcactgtagaatgcaaagcatgaatgatatcacctaccaagacgcctatattataccacgactggtaaatgaacggattgagccgtatagagcgcatgatagcctcgagggcctcttcgaattggttgatatgataatacagggctgcaatcgatatccaaatttgtggagaccatga

SEQ ID NO: 80322 - DNA, 500 bp, Arabidopsis thaliana landsberg
agaacaccttcgataccggttgcttgtagttgcgctcgatggtgaagctgccatgggcgatggaacggtcggttttgctaattctccttgggatgcaggccgccgtggccggccaacggcccggcagcgtttcggtgatggttcagtcaggcttgtgccccggcggcttacttgccgggcttgtccgggggtagggcgtccagaaacgcgcccaggcggtcgagccgcttctcccagccgatgcggcgatcgttgatccacttctcgaccatggtgagcgctcctgcgtcgatggtgcaggtgcgaacccgccccaccttctcggttttcaccagcccgctatcctcgagcactttcaggtgctggacgatggcgggcagcgacatgctgaacggttcggccagctcgctgaccgatgccgacccccggctcaggcgatccaccatgcgccgccgcgtcgggtcggcgagggcctggaacatggcgtcgagggtctgttc

SEQ ID NO: 80323 - DNA, 582 bp, Arabidopsis thaliana landsberg
  unsure (1)..(582): unsure at all n locations
ctagtatactactaaaaagaaacatatgatcattcacaattcacatannnnnnnnnnnnnnnnnnnagaacgaaaagaaaaacaatgccgacaacgttttgtgtcaaaaatttcattatagctagagcatgatgcaaatgtgagaaaaaaataaaaaatgggaggacctaaagaaacaagcttcggctactgtctgccgagggtttcttctctttcctttaatagcagtcagcatatttacctagaataataaatgaaacaccatgtagaatggatccgacataaaatataaaatagtaaaaatgagataaataatcaaatactaataaattataattggaggagttgtgaatacaaaagcaatgcccgtgaagcagtgcatgcgagtactaatagagatgttataatcagtgccccattgacaacatatagacccactcacgagactctgtcgctttatataataatctgctatagagagcactatattatttagtattttataaatcaaattcttaaaaaattataatgagacggataatgtatcagcattttttttttcttgatcaaatttgagatttg

SEQ ID NO: 80324 - DNA, 263 bp, Arabidopsis thaliana landsberg
  unsure (1)..(263): unsure at all n locations
acatgtgaaagatccatccccaacaaaacctatctcatttttttggccacacttttctttagntgccccctggtacattaaatcggtaacgcaccaaattcaatatgcatactttttgtataacacaaccactgcgatcctgaaacccttaattgcctttttaaactcggcatctaactactggcctatctcaactttcttgtctatgaaagcaatgattaattttacctcaatctcctttagaaagtgctccataaaagata

SEQ ID NO: 80325 - DNA, 556 bp, Arabidopsis thaliana landsberg
  unsure (1)..(556): unsure at all n locations
cgggctgtacctcgtgtacttcgcggccattcactatgctctctttcatccttatgagccgcctgccgaacggcctggattgaagcgcccgtgcagccctgatttgcggcaccgcaaaatatttccggaattgactcgcgggcaggggttccataacactcaacccggaaacatcatcatattcaggaaacgcaatgactgcggaatattcgtatttccgggccagggatggcggcaaatccgccgttgcgatacaaaccgtgcaggcgtcgaaactcgccatnnnnnnnnnnnnnnnnnnnnnnnnnnnnnnttataaggcaaacgagatctggggccacgtcgcgaagccggacgaaaaatcgccgcgcggcgacgaggggcattattacatcgacatgctctccttcgacaaggacgacgacgtgccnnnnnnnnnnnnnnnnnnnnnnnnnnnnnnnnnnnacatgccgggcagcatcgtcgccgccatgcccgcgccgggcacggaagacgatttccacctgcgccaggtgcgggtgctgctcgacgacta

SEQ ID NO: 80326 - DNA, 593 bp, Arabidopsis thaliana landsberg
  unsure (1)..(593): unsure at all n locations
gccttccttataccgttggcttcaccaccattcacattctcaagaatgttcggtttgtaaagccgtggttcaagagggtaaggttgttcctctttacggtagaggcaagaaccagactgacccgagatcaaaacgttatccgggtttacggattcctaaccgaccaacaggtcaaagacctgagactgctgctcctcctcctcagcctgaagctgcgagtaattttttcaactacggtattggtttgatgggtggaattatgccgatgatggcgactacgaggtttgggaatttcagtatggggtttggtggtttgttaccttctttgtttaactttcagtttcatggatttcatgatgctacgctttatggttcaacaccgggttatccttacggtggttatcataacggtttccgtggagttcctcctcgtggacaagagcgtcctatggctcgtggaggaaaccaaagtgatgcatttctgaagaatatcctcttttttgttggaatctgtgtggtgatatttctcatctggcgaaaacgaatcacatttggtgtatntccaggtatgatcaaacttacttacttggtgc

SEQ ID NO: 80327 - DNA, 521 bp, Arabidopsis thaliana landsberg
cactgagcgatgtccgaaacccccattcctgcagtctatccttttgatctgcagctgatcgagcaggagctcgggagggtgcctcgcggcgtcgtgggcgtcgccgcccggtgtccgtgcggctgcccggccgtggtgcggacgctgccccggctgccggacggcacgcccttcccgacgaccttctacgcaacctgcccgcgactgaccgccgcgatcggcacgctggagtcacagggcatgatgcgcgaaatgaccgagcggctgactgtcgacccggatcttgccgccgcttaccgcggtgcacatgatgactacctgcgccggcggaccgagctcggcaaggtgccggagatcgccggcatctcggccggcgggatgccgcaccgggtcaagtgcctgcatgttctggtcgcacactcgatggcggtcggaccgggtgtcaacccgctcggcgatgaagcactcttcgcccttccggcgtggtgggacggtggctgctgcaccccggagcgcggatg

SEQ ID NO: 80328 - DNA, 526 bp, Arabidopsis thaliana landsberg
ggcggctggagggcgcacgggccaggctgaccgaggcgatggctgcctttaggacggggacgcgggcggcgacggggatggggcgggtgccgctgccggcaaggcccccttctaaccggttcggccctgtgagatttccacggatgcgccactgacctccgtccatctaccctgtacctatgcgtgtggacatctggagtgacgtcgtctgtccgtggtgctatatcggcaaggcccggttcgagaaggcgctcgccgagtttccgcaccgcgaggaggtcgaggtggtgtaccgctcgttcgagcttgaccccgaccgggaagcgggcccccacgagaccgtgctggccatgctcacccagaagtacggcctgcccgaggcacaggcccggcaggccgaggagcgcgttgcgggcctcgcgcaggctgaggggctcggctacagctccgagcggcccgtgggaaatagcttcgacctgcaccgggtgctccacttcgccaagggcaagggcgtgcagcgggagct

SEQ ID NO: 80329 - DNA, 256 bp, Arabidopsis thaliana landsberg
aaacatatgccgagggagttgcgaaactcgagtgagagaaaaggaggctgttttacatttcatctacctacttggagtcgctcttaagggagaatgagaagaaaatccagcaggcattactttaagcaggatggcgaactggactttcaactctgactacaagcaggattcacatcttgagcgatctcttgcgaaaatatccaaaatggggacctcactcggcagactaacagggtacgtctacctatatgcactg

SEQ ID NO: 80330 - DNA, 613 bp, Arabidopsis thaliana landsberg
atactgtatatacatttgcaaatatcatatagaattaaatttggcagattattgttttctcatctttttaacgataaattacagaattagatttttagcataaaattacataaatatgtttttgatgaaaaatatggaatcatgttttcacagataatttgaagaaaaaatttatagtaagtttgaacaaaatagaaaaaaaaaaagaccttatagtaagttagaaatattggtgcacgttggttttggtccgatatattttcaatgaagcttggaagaaatcgttttccatacatatcacagtacttataattaaaggaacaaaattaaaaaagtgactaaaatattggtcaaaattggtaaaatatcaaaatatgatcaaaaattttgcatttttttaaagatatttcatattattttatttttgtaccaatatattttttttaaacgttggttattacttatagatgatatgctacgctaattttgttttatttctgctatttgttaatattacatggaaaacaaaaaaatcttttatttacagtttgccgattctgctgactatctatctaattaaaataactttatgtttaataaagaaataatatga

SEQ ID NO: 80331 - DNA, 566 bp, Arabidopsis thaliana landsberg
  unsure (1)..(566): unsure at all n locations
gaaaactcgtgcgtcgccatcagaatcgcggtgccctgcgaggcgagcgttttaatgatgccggagaattcattggaagctgtcgggtccaggccgctggtgggctcgtcgagcagcagtactttggcttttttggcaacggctatggcgatgcctaccttttgccgcattcccttcgagtagccggccagtcgctgatcaaaagcctgcgactgcaatccggcagtcgacagcaggttacgcagttcagttgtgggataatcaaaaccggcaagggccgaaaaatattccaggttttcgatgccggtcaggttcgggtacagcatgaccgtttccggaatgtaggccaggtactccttgatttcctgcgggtgatcggctaccgaaacgccgttgatccgggcctcgccggcagtaggctcgataaagcccaggaagagattgatagtcgtggttntgcccgcgccgttctgacccagcaatgcaaaaatttctccctcgccgatgttcaggttcagactggtgagcgcggtatggtcgccgtatttcttagtaagggttttcgc

SEQ ID NO: 80332 - DNA, 259 bp, Arabidopsis thaliana landsberg
ctgatcgatgttcctttatctcatattcctgaacttgactacaaaactttagtcttctggttcgacgaccaacttccaattatgacactatgtggcttcgcattgtttaatttcgcataatcgtattttcactcaattggcagcacaacaatgaggtgccaaaggtggagaggatccggtaattttggaattcaaattcatgatctatgtttttgctaggcagcatttttacctatatgtcttttgttagctaactgac

SEQ ID NO: 80333 - DNA, 626 bp, Arabidopsis thaliana landsberg
gtgaataaaaacgaaactcacttcgagaacggcaaattcctttttatcttttaatttttcttcattacgtactactactattttattttatttttaagagtcaaatgttttttacctcttttattcttatatggatgctgaaagatattcctttattggaaaggtccatagatatccaactggctaacacatggaatgaatggagacaatatcataattaagcatattttcacatctgtatatcttatatataaaacatcattcttattaatatatttaccgttgaatcgaaaaataggaatacgaggattttgaataattaactgcagcggaagaaatacggtgtaatgaggaactgttatgcacaaaaatgttatattatgatggttaagtaatttaggaaattcttataactaaagtgtaattattaatatttagaggccaatcatatttagttatatgtacgtatatcatggatgacagtttgttaccgatctcatattgcattaatctagctatcaaattaaagtggaatgctttttcttgatcaacaatatatacatatccatagtatgtgtgtaagcatatattgataaagtcgtataaagatgcatacccatgtatgt

SEQ ID NO: 80334 - DNA, 548 bp, Arabidopsis thaliana landsberg
  unsure (1)..(548): unsure at all n locations
acacctgaaaaccaaacagtaaaaaaaacgtatagtttgctttgctgttttcaagacgattagtctttctatacacataagctaattattatatattatttcttatagttttataaaaataaaaacagtaagattataaatataatctggatttagtttcggcttttaacatacagtttgtttcacttcacttttctttctttcctcatcctagttaaacttttataacacacttttttaaagttgtattgcattgtctttttcttatttgtttttacagttacttactctcgggacgaatggcgaattgacacaaatccacgaatgtaaataaatagcaatgtcgcattatacttaattgatctaaaaaggaaaaatactattatcataaagtgaaagatataaatacaacttgggatctgaccgacacgatgaattctcatacacagtctcaatccaccaaactaaatagttataatcacattcaataatagaaaaaaaattgatcnnnnnnnnnnnnnnnnnnnnnnnnnnnatacgtctagctt

SEQ ID NO: 80335 - DNA, 605 bp, Arabidopsis thaliana landsberg
  unsure (1)..(605): unsure at all n locations
gaagaaccggttgagcgtcggattgccgacggcgtatccgccccacagccaggtgacgagcgtctcgcctatgccgggtcagcgccgagaacagattggtgatgacggtggcggcccagaagctcatctggccccagaccagcacatagcccatgaagcccgtggccatcatcaggagatagatgatgacgccgaggatccacagcacctcgcgcggcgccttgtaggacccgtaatagatgccgcggaacatgtggacgtagacggcgaggaagaacatcgaggcgccgtaggcgtgcatatagcgcaacagccaaccgtagttgacgtcgcgcatgatcagctcgaccgacttgaaggcgagatcgacgtgcgcggtgtagtgcatcgccagcacgacnnnnnnnnnnnnnnnnnnnnnnnnnnnnnnnnnnnnnatgccgtcgaacgtccaccagtagttcaggttacgcggcgtcggataggcgacgaatgaggcgtgcaccagcccgtcgatcggcagtcgcgcttccagccaacgcatgaacccgtnctgtggctgataggtcgaatgtccgctcatgatcgaacctttttagaacaat

SEQ ID NO: 80336 - DNA, 416 bp, Arabidopsis thaliana landsberg
cttacaacacaggaatagggtggggggcaactgttaaatctgggctctcccaaagcgatacttatctgataaaataattattttcttataatgaaaaacttttttgtacttcggtcccggtctgtgttattgactaaggcatggcgcagcttgcccgatattcagcctgtggctgatgatggtcccgcaaacgccctcatcggcgttatttgaatcaattttgttagacttggtgcgaatctttccgttataaagcccgagctttcgcggtcagcgctctctgttttcgggcggaaaaccagtcgtattgcagttatcagtctctggatggaatacaatatgttttgcggtcattcatgacccggtggcaagctatacaaagttgcctgtggggacaccattcatgttgaaaagtt

SEQ ID NO: 80337 - DNA, 539 bp, Arabidopsis thaliana landsberg
aagccttgcaaaatctctctgcttcaaccccaccaacctgtaagaatgtgatgttcattaaggagtagaaggacaactgcatatatgtagaacatttcagtatatgtagtagaatcagagatgaaacaagaatcaattctttcagtgtacaagtttctaagttgacaagtaagaacaaacaagatttcgatctccattctctggcaaatctcttattcacaattgcacatcagatgcaatgactacggggagacattttctactaaaattatgagctacaactctattggtgaaaattagcttataaatctcattcaataactagaaacgtctgaacaaaattaccttcttctcagcagccgctttcagattttcccaaaatttgtctgtcagaagaagataacagacaatgcacatgttcaatgatatgggaaaggagcaaaaggaaattttactcagaataatcacaaaaccgcttgattctacaacttacgagctaattatatatgtgtataacagtagcatacagatataatctc

SEQ ID NO: 80338 - DNA, 483 bp, Arabidopsis thaliana landsberg
  unsure (1)..(483): unsure at all n locations
nnnnnnnnnnnnnnnnnnnnnnnnnnnnnnnnnnnnnnnnnnnnnnnnnnnnnnnnnnnnnnnnnnnnnnnnnnnnnnnnnnnnnnnnnnnnnnnnnnnnnnnnnnnnnnnnnnnnnnnnnnnnnnnnnnnnnnnnnnnnnnnnnnnnnnnnnnnnnnnnnnnnnnnnnnnnnnnnnnnnnnnnnnnnnnnnnnnnnnnnnnnnnnnnnnnnnnnnnnnnnnnnnnnnnnnnnnnnnnnnnnnnnnnnnnnnnnnnnnnnnnnnnnnnnnnnnnnnnnnnnnnnnnnnnnnccaaaatgcacaacgtccaatactttttcgaccgttttcgaggaatggtctatcagaccgacccaaaactacttggacaaacacagtctgcgaggaatgttatgccatccggctcatatcgactaaagggcgtatacttcactagctgtcgacatccaggggtaatggtttattaagcctccataaaaaata

SEQ ID NO: 80339 - DNA, 594 bp, Arabidopsis thaliana landsberg
agcttatctgtaagtccatacaaatgtacttgttttaaagtagaaaacatgtgtggtgttggtcaagtttttctattacatcctatcaaagcatgtacacaattttaggtagacgtaataatgttgttagtattctctttacggaagatgtgtgtgatgcgtcctatcacatattgtcattgcaaagtgtgttagctcattatgcacatggtggtttagctctttatgtagattgttaggatctggtttgaaaaaataaataatagttacttaacattcatacccaaaaaaataataaagaatagttgataatatttcatgaaaatcgatttgttttggtggacatacatcgccgtctctactctattgtctcgatcgcaagtaatatgacaaataaagcagcagccatagccataaaacatgtgactactaaaataggaggatttatctttacttgacgaactataaattaaatatctactcttttaccttgactatgaaaattactttttaagattgccttttacaattatgtggaatagcggcacacatttacgtaaatttaacttcaatttagaacactagtttattcat

SEQ ID NO: 80340 - DNA, 633 bp, Arabidopsis thaliana landsberg
  unsure (1)..(633): unsure at all n locations
agacggtgttaaatatcatattgtgattaatattttaacaatattaagcgtagagatttctcaaaagcgatcccctaaacaattcctaagtggataattgagtctcctcctcttacaaatcttatccaaactcaatccataaatacagtatttgtcaatccacatatacagtatttttctatcgatgttttattcatataaaaagagacaacatgacacaaacctttccattgacgaagaggcaatttctggttgaagtataccccaagtccccaacatggccaaattggatgcttaattgatatacttctatgatacaaactcaattcggccaaacacaaaaaaaaaatatatatatcatacaaatttcggtttccaaaagagaaatccaaattaaaatgaagatcaaaatcggttttctgataattcacactatacgtttatgctggtacgactagtttatgctatagctacatgtatagcaacataaccagaatagtcaccaacaaaaaaactattgaagtaaacgcaataaccttaaaatgtaatattttctattagacgaataattagtagcattaacaaatntaaaagtaatgtgatgaaaatatatatgttacgctaaatatagtg

SEQ ID NO: 80341 - DNA, 530 bp, Arabidopsis thaliana landsberg
ctcgctatacaccacatacgtgttttcctgggcggggttgaaggtaatggctttttctgtgagcatacgggtatttttaacagcttttagcggtaattgactaattttaaaaacacaaagttcggatatgcaagtgaacagaatcaccctttggattgtttttgctttgatcgcttccccatttattgccggcgcgcaggtgaattccgtggaatttggtaagaaccgcattcagcataaaaaattcaactggaaattttaccagtcacccaacttcaatacctatgtggcccacggtggtgtggaattaggcaaattcgtggcacagaccgcggaaggggagctgaaatccatcgagaactttgttgaatactcactccagcgccgcgccatatcgtggtatacaatgattacaacgactataaaagcatgaatataggcctgggttccgactggcagaatgccgtggactcacgaagctggtgaataacagctggtggtatattttgacggcaccatgacacctgaaa

SEQ ID NO: 80342 - DNA, 487 bp, Arabidopsis thaliana landsberg
ctggagaaaaccttcgttcgggttcctctctcacaaaggtgaattcgctctctgttgtctgaaattctggggtaatgcggtagaaaataaaatttaaaagcaaaggcgaaagtcatatgtaaatgaaaccaaaggaggagtcaggataaaagaatcaccttgtctctctttttaatgtacatgtccttccccgttttcgaaagaacaccttctgtcacgagctgatccatgatttctgaaagtcagattgtgaccagttagtataggaagacagactctgaagttaacaacagatagctattatcaaactgtattattaatcatcatatgatgatgcttcaagcgtgtttttgcctagttatcatcatcaagcttgatttaccttcagatagaacctgaaatcataaaaaagagtggcttagagttaagaaatggcggaaactaaacatgcaagagctcagttacacttttaaggtggaaatgaaga

SEQ ID NO: 80343 - DNA, 550 bp, Arabidopsis thaliana landsberg
  unsure (1)..(550): unsure at all n locations
gaagcttgcgtangagcgggatgaaaccccagacatccaggccctcaccggaaatcatcatcggatcggcttctgcgatgctgccatccggggtcgcgaacacaatctcatgccctgccgcatgcaacacacgccagcttacggcggcttccgtcggatcgaagtcacggcgcggcagcggcacgatgattttcatgggcgccgccgtggagcgcgcgtcaggcgctcaggcgcatctggccgccgtcatgacggcgcagcacttctcccgccagcgcgagataggccttggcgcccgacgactggccgtcatacgtcatcaccggcaaaccgtggctcggcgcttcggccagacgcacgttgcgcgggatgatggtgcggtaaaccttgtccttgaaatgttccagcagctgcgcggagacgtcgttggcaagattgtttcgcggatcgaacatcgtgcgcagcagcccctctactttcagtcggtggttgatcacgcgcttgatcttgccgatggtgtccatcagcgcggtgagacctttcatcgcgt

SEQ ID NO: 80344 - DNA, 540 bp, Arabidopsis thaliana landsberg
  unsure (1)..(540): unsure at all n locations
acctgaaatgcgaccgcctgaagctaacagcggaccggattgaggggatagcggcatagattttaaatgtggccttgcttgatagtccggttggggagtgttttttcggataaaaccatgccaaatggcttgcagatcagtaaagtgcgcgttcctcttggtgtggtcggtgttatttatgaggcgaggccgaatgttacgtttgatgtgttttccctgtgttttaaaaccggcaatgtttgtgttctaaagggcggcagtgatgcacattattcaaataaagctattatctgcttgattcacgaggtattaaacgacaatgatataaatacagannnnnnnnnnnnnnnnnnnnnnnnnnnnnnnnnnnnnnnnncccttttaaatgcaacaggatatgtggacgtattgattccgcgcggcagccagggtttaattgatcacgttcgcctgaacagcaaggttcctgtaattgaaaccggcgccggtattgttcacacttatcttgatgagtttggggatgttaaaaaaggtgctgat

SEQ ID NO: 80345 - DNA, 493 bp, Arabidopsis thaliana landsberg
  unsure (1)..(493): unsure at all n locations
gagcgaaccccacgatccgcttcaactctgtcgcggaaaggccgggaatgttcaatgacaaaagcgagatcgtcgcgagttgggacgcgcttccgcgtcgcattttgtggaactacgatgccggtgcggcgatcgtacaggtgtatcgttgattggaggagattgtgctgggtcatctcacccgnnnnnnnnnnnnnnnnnnnnnnncctgccgtcacgctgaaatagtctagactcatacgccccgccccagccgattgagtatcggcacgttgttgtgtcggtccattgtgagcttttgcaacgggaaacacaagcagcgcaggcgcttcggctcttgtcccgtggcaatcgcacaaggactgttgcagtaatgcaagagcaagcgctggcgcaagttgaaaatttcatcaccggaagagattttgaattttcaatgcgatggagaacaatgtcgcgtcgccgacatttcgtcgcgctgcgcttgcgtctt

SEQ ID NO: 80346 - DNA, 364 bp, Arabidopsis thaliana landsberg
ccgcccgaggtgagcaccgcgacctcgttgccgcggtctctttggttcgggcaaccggcagcagcggcagcaggtgggcgtgctgcggcgtggcggacatgacgactcgcatctgcgaatactcctgactgagcggacagatcatgcgggacgaagtgacgccggggacccaggcgacatcgctgtcatcatcgtttccggccgggtgagcggccaatcgcccgatcagggtgattccccgcaccaggcgcggcggcgacggcgccgcgtccgggcggaccgcggccgcgcgaacctgtcattgacatagcgcgggaatttctggaagcttgactcccctgggccgtgtggcctggagagacct

SEQ ID NO: 80347 - DNA, 552 bp, Arabidopsis thaliana landsberg
gcatacgtcagctaggatgcaatatgctaatcgtgcatcttgggatacatgtcttagtcaaccgagtgcctaaactgaaaatatacatatgaaataattcagagtctataatttgttcaattttatacccccgttataattgccagtcttgaaaaaagaaaaaagtgccggttttgttgatatataacaagaaaaaaatgccgatctttattgtgaaaagaataacacttcaaatttcaaaaaattgaatttcatcatttagttgaagttttaattgactgtggcaaatagaaaactgaagcacttaggcagaatttatatgataataaacatggagaatttggaacgatacttaatttgagtataaataaagttagagctaagtagctaacatgaattcacaaattataaaattttagttttctaatatgtaggaaagtttaattgtaaaaacactaattaattagacagaaacataaaggatgggcaggatagagcttgcaaaatttagattatttaaagagaacacttaaaagtcttcagtttttgttt

SEQ ID NO: 80348 - DNA, 269 bp, Arabidopsis thaliana landsberg
ttgggtaggggcgtgtgtggtggtgttgttgttgtcgacgcaagtcttgggaaaattgtttggtactggtcatgatattgccagaagccgacgtcataaacatggaagaggaagtgttggtgttggtgcaggtgccggaggtggtgctagcggtggcattggagtctgaggtggtggaggtggaggaggtggtttattcagttataattcttaaatttttttttttatcttacattttatactattttttttccattttcattatttaa

SEQ ID NO: 80349 - DNA, 115 bp, Arabidopsis thaliana landsberg
  unsure (1)..(115): unsure at all n locations
acaagcggagagagaccagcnccaaggcnaaccgcanacaacaagaancagaaaggggccggcacgcacancacaaggccgagccggagcaggagcagaagccaaaggcggagga

SEQ ID NO: 80350 - DNA, 460 bp, Arabidopsis thaliana landsberg
tggatgtgctgcttcattggattcgaatagatcgcatgggctgcattgagctggcatgttctgtggctcatgtgtggtatgcggaacgtgctgctagctgtatggcgattaacttagctaaacctgttaagcaatctgtgggcctcaaatactgcgatgggggattggctcgagatttatgttgtacagaataccaacgattaacgcacataccctacaatcaagttcgggatgccctcgacctgacatgtcgctagaacagagtgccatgaggctcagaattgagggggtatccactactccgaagtgataacaaaaggcgagggtggtatggtcgaactataaattcaaaatgttaggcgcacctcgtgatcagaacaccttgcaatgtccaatgacgcgttgcctgatcttgctgaacgagaatcaatctggtaatggatagacggagattatgcca

SEQ ID NO: 80351 - DNA, 466 bp, Arabidopsis thaliana landsberg
aaatatacattgcattgtaagcctaatcatttgcaatataccatagacttaaaaaataggaccaattttttttggcatcaggcgtgcaaactctatgctgggtctgtctgtatatatcggatacaaacataaccatatgcgcaaagagaggtcttgcagcatccacaccatacgccaagacaagaaaagcgagatcgatgaaccgcatgcaggcagaacctaacagtaatacagcctaaatagcctggctatatgacgactagctgcaaaatgaagatgagtgagcatgcaggagtactgaatgctatatagtgcacgcaccctagctaaagtgatgagtatcaaaagtcagacaacttcttaattgaacatcacggcgacacactatcaactatgagcgctcgcataagactatagcgcaatggttcttgtattcgatctgcatcacatactgaacaaactagta

SEQ ID NO: 80352 - DNA, 454 bp, Arabidopsis thaliana landsberg
tatgtcaaattctgttttacttggctcgatagatgctattttattgctctgttaaagctataaagagttcgtacaatatcttctccttctcttttgcgaaaatgggttcttacttgggtttagtttcttaggtgaagtttcgattatttttatgaattggtgttttataagttctgatgtctcatcatctttttcagaaagaaatgtgtggcctactttcattttctaatgccgtatatgaagattttcatattcaggcagatattataaacctgcagcaatcattaactcgattcatctttaatgtgagccctaaggacaagactgagaattttctatcagtgtttaagattgcactttgagtgatcaagtgaatgagtattggtggttgaattgggcccgcgctagtctttattgtctcaattgtgtttctccttatgatagagagaatatt

SEQ ID NO: 80353 - DNA, 438 bp, Arabidopsis thaliana landsberg
gtgcccgcaacacccactctcttaccatgtgttcatcattgagaacatcgatccccgaaaatacacaacctcagcaaccttgtcatattgaaaaaatctcaatttcaatcctctcgatttctctatcatcatcacacatggcttcgcgagctagccttcttcttcagacacaactcaaaggcacgcccttggaatctctctccttaccaaaatcaatcttgcgagtgttatgttcttctctaaacacgattcttgtgtgactcatatctctgagagcatcccgctgacagaatctatgctggtctccgtgaagaaaagaatatattcgaatggggcgttaccattatcagaccttctgatactctataagaaacaacccttttccttctttgctttctttagatcctgagctactttttcttttctgattcttgattc

SEQ ID NO: 80354 - DNA, 1136 bp, Arabidopsis thaliana landsberg
gtaccctcaacacggaatgagaactcagtttctttctcttcttcagagcctttgggtggcatcgttttcagatagatcacacccattactcctactctagcaagcaaggattctctaaactcggttctaatttcctcagagatatacatttcaggacctttcatctcaggcttcttaactaggttatcgatattaactccatctttgccttccactgctttcggatcactggtgtgcaacagctcaagcccaccgagtccttccttcttctgaatcttctttggtcccataaactctgaaggatccaacccacctccccaagcatcactaaacgattcaaaagtttctccaatcgtagcctgttcattgctgaactcaatcccaccatactgcccttcgaatccttccacattgatgtgcgtagactgtgttgcctcggctggaggtaatgtcgtcacttcaagtccagccaatgccaaagtcaaatccgttgaggacggatccttagtcttcttgaatccacccacaagttctttctccttgttaatcgtttcactagccgcaaaaggatccttattctccggctctggttcttccttcaattgctctgattcaggcaccactggagccaagctcgccgcgaactcatctccagcggcaacagtctccggaggcaattcaaatcttgcattagaaaatgcgtttacagaagcttgatgctctgcggcatgcgattcaacagccatccaactatcagctcctcggatcttattctcagtatcaagagccgaatgaaccatcttcgcaatcccatctccgtgcatagcaccaagcatcgccgcaagacggatattactaacaccacgcaaaacaatatcaagcgccatataaacctcagcatacttccgtccaagcttctccggagtaacttcaactccacgacaagcagtaacaataacactaacagcttgattcacaatatgaatacactcaaatacattgatcgaattatcatgatccgcgacagtaacaccaaggatatagatcgagttcactaatctataaactacacgatacttgctctcaacaccaacaataacctgtctattagaagcagcgagtggatcatcacctac

SEQ ID NO: 80355 - DNA, 438 bp, Arabidopsis thaliana landsberg
  unsure (1)..(438): unsure at all n locations
cctagcataactgttctctgagaggctccacccagcagcctacatatacagatgcagagaccctcagccaaccgttaggtggagctcctgcatcttgtggaagagttggaggaaggattgggtaattggaggaggatgaggctccacaggaagacagagtcagttaacctggactcttggggactcccagagcctgacccaccaaccaaagagtgagcatgggcttggcgaccttaactccccatacatgtgtagcagatnnnnnnnnnnnnnnnnnnnnnnnntttccaacaattggagtggggttgtccctgaacctcttgccagcctgtggatactatccccttgaatggacagccttttctagccttggtaggggagggtgcacctggacctgcagttacttgatgaactacagagggtggggtggaggggtgg

SEQ ID NO: 80356 - DNA, 278 bp, Arabidopsis thaliana landsberg
  unsure (1)..(278): unsure at all n locations
caaaatccaacaactaccactctatacacacaaancatcaacccattgggacaggggtaattttaattccatattcaactactcacttattaccaaaaacaataaaacaaaaccaaatttattaacatcttgatatcctttacaaacaaaaaaatcccttacctcattcaacttctatcttcatacataaactaaaaacaattataccacatccacacttttaatgatacccactcctcccactctcttatatcacaacactctcaatttctacactc

SEQ ID NO: 80357 - DNA, 643 bp, Arabidopsis thaliana landsberg
aacttccaaaatgttatattatatgtaaattttcctcatgtcgagatttatgtaggatttgaagtccatgactgggaattgcataataattatagcgtatagatcacatctttaaataacattatttgacacatcatatttgtattgaaaacgattactccaaaggaaatcgacaagaaagaaaatgtatcaatcttgatttgtaaccacaacaactacaatgaccattttaactacgctatgtaaaaaaaaaaactacgcaatgcttttttattttatcatttattagttacgcaatttaatcgtagggatagccataattacacccacaaacgcatatatataaaaaaagaattaaaaatattaattaattaattcagttatgcatgtttaatgtatgcctcctttacggaacaaaaaattacttatatttaaagtgatctctatttaaacttttttcattgaaactttttgtactcgtatttcttaatttattcaaaatgcatgtgacttaattcttttacattattttccgaggaagaactgaagaaaaaacacaccaaagccgttgctttaattttgatcgtacgtagaatttgaccttcaattaccaccaataagctgggctcttttcctttctttt

SEQ ID NO: 80358 - DNA, 215 bp, Arabidopsis thaliana landsberg
aagaaagctctgattttagcctagggcagaagctcgccactgaccgggggctgggggcgccttcccgcgataccctgatgcgccaacccttactgcgcatgcaggctcccacgcctgttcacaggcaccgccggcccaattgcatcataactaggctgacggccatatacatagataaagggcacatgtgcagcatccccggcagcaccagtgca

SEQ ID NO: 80359 - DNA, 472 bp, Arabidopsis thaliana landsberg
  unsure (1)..(472): unsure at all n locations
tcaatcccttgacactgcagtgcgagattgatgtcttacactgtgaaacttatggcacacggcagctgaggctgagggatttctctgtttttgaatgcagagaggggcatttacatcactgaaagaatgtgcgatttcattagctttatcnnnnnnnnnnnnnnnnnnnnnnnnnnnnattgctttgcctcccaatgctcacgcagtggcgaatccagtgattccagatgtttcagtgttgatctccggtcctccgattaaagatccggaagctttactaagatatgcattgcctattgacaacaaagccatcagggaagtgcagaagcctcttgaggatatcactgatagcctcaagattgctggcgttaaggctctagattctgttgaacgggtaaagagttttggtgatcacataagttctcttatactttgtagtgatcagtggatttgcaggtttatgttctgtttt

SEQ ID NO: 80360 - DNA, 163 bp, Arabidopsis thaliana landsberg
ggggggtcgtagaagcctttgctgacgactgaaatacgcgacgcagtattgtgagtggtagtgcggtttttagacgacactatgcactgggatccaaccgtctgttgctaagagtcgtccatgcactaaaccactccaaataaagcagacgacaattgtacac

SEQ ID NO: 80361 - DNA, 140 bp, Arabidopsis thaliana landsberg
gtggttccgaaggaataaaaactctctaaagagctacaatactgtgtttttttgacaatttggtacggtacatatgagccccacattggaagagcacataaatcacaggatgatctacaaacctaaatgattgacattaa

SEQ ID NO: 80362 - DNA, 372 bp, Arabidopsis thaliana landsberg
ctagataaaaacgcgttgggtcgagccatggggtttacataaccatttggaccagtggagaccgcatcacgtctaggccggagagagtcaaggaggaggcttggaggactgagctagacacgtcctttatttaacgatccgaccaggactcttgtgctgagctctggtctacacaagttgattaggcctgcatgcttcgcacgctggggcataagggcacctaatgatctgcaagtgactacccaggagggagtagcggagcaggggaacactgatggcttgtgctcgtatgggcagggcggtgatagaaacgatgtgtaattttaccataggtatgaccaacacactatccactacctgaaaaagagtgac

SEQ ID NO: 80363 - DNA, 432 bp, Arabidopsis thaliana landsberg
aaaactaaactaaactttatgggtggcgatttatgatgttctcgcacaaacgactgctcaatttggaacatcaaagtacaagtttatatgctaaataatattactataattaagataaagatgcatcttaccaagttggtcattacataatgatactttatgtcatcgatattctccttctctctttacatatatatacattagtatatagtcatattaattatatgatttggtatattgctctgtgtacgtattatacatacatgagcctaataatagagaaaaggctatgaaagaaaggctatgtgtgaccaagattttgtaggtacttatcttgaatctttgaacttcatcagaattgcagtacatgtacaaaatttaaatccttttataagatttatgttataaacaattacagtgggtgtgggttgt

SEQ ID NO: 80364 - DNA, 538 bp, Arabidopsis thaliana landsberg
caacgcctgcacatcgcggtgctgctgcacgccgtccagctttatgttatggatgctgcccgcgtgcaggtcgggcagggggatctggccgccgcccaggccgagccagatgcgctggcggctgtcgaccaggatggcgtgcacattggtgtcggccagcccgcgcgggtccagcggcgaaggcagcagcgagcacaccatgcgcgcgtgggtgtcggtatgcgcggcgcccaggtcggtggctgcccacaggttgcccgaggcatcggtgagcagcccgcgcacggagtcgccgggtagcgaagaaggcctggccgcgtcgtgcacgatgtgccgcaccgccggatcgcccgcacgataggacaggatgccgttgccgtcggtgccgatccgctcggcgccatcgtcgccctcggcgaaagcgcgcacggtggcgaaattgcgttgcacgtcgttggggctgaaacccggcaccggtcgccagtggccatcggtgtcgcggtaggccgcgccggtctggccgctgcctacccacagg

SEQ ID NO: 80365 - DNA, 592 bp, Arabidopsis thaliana landsberg
gttacgaccatatcgaggctttgggacaagacagtggcacagctaattttatgcaataggatgtctctcatttgaaagagatgcattttgacggaaattgcgactctgggccttagattgcgtgaagacatctaacaggtaccgggcaggggtctaagccaatcataaccaggtgctgattttgtccactccaaatgcaataagataagatcaggatgacactaaagcatgggcagcaatcgatagtgctctagcagtggggtgcgtgaccggttggatgccttcgcgtagtctaagcgatattgttccaggcgttttacaattgggttttcatgctgctgtgtgtttctaattgtgttctttgatcccttgcacgaccaaggcgtcatcaaaaactagaatattcttcaagggttggaggtcgatactcatgagttaggggcctaactggaacatctacacgatgcctatcttggcacattacgcgtacatggaaaatcttctacttgtgctcttgggccagggttgcagtgtgccacacattttgcccaccagagcgctacttcacctgtcggttcgatatcactagctc

SEQ ID NO: 80366 - DNA, 316 bp, Arabidopsis thaliana landsberg
ccccaggaggcataacttcatcgatttgttgacccattaggctagattattagatgggtagcttgtggcatgagagatccgtcaacaggtaaaagcggaagcagatatcttaaaagagactactgggattgtcccgagaattgttttgcttttcagtcggtaacaatccttctagtgaagcgtatgtacgcatgaaaggggttgcctcggaagaggcagggctctctcatgagacgatctcactttcggaaacgatctttgaacaagagttacttgattaatgttgtgcggcttgattatgatcccaaaacacact

SEQ ID NO: 80367 - DNA, 466 bp, Arabidopsis thaliana landsberg
  unsure (1)..(466): unsure at all n locations
gtgtcctgtggctcgggggccttgtcctgcccgatctttttggcgccttcgagggcggtgacttngggacggggggcatcgaccccagaggcgatcccctccatatattcagcggacgggcccggatcccacgccgtctgatactggtcctcgaagtagtgaaccgtgcgcataatgacgccgatgatctcaccgacgtcgtggatccattcgatcttgccggacgcctgtaccgccacgtagttccaggtcgggacaaaggggcgcacgccgtaccatgtcggcgagatataggcgtggggaccgttgaagatcgnnnnnnnnnnnnnnnnnnnnnnnnnnnnnnnnnnnnnnngattggccttggcgagatgcgattccaggatcagcgtatcgggccccttcgacaggacaaggaacgggatctgtgttgaaacagcccgcttccggcacccgtaacgagcgt

SEQ ID NO: 80368 - DNA, 565 bp, Arabidopsis thaliana landsberg
  unsure (1)..(565): unsure at all n locations
ctcttggttgggtcttcttaatcaggtattttcgtttttcatttgtggtttatgttagtttgtttccgtttataccttttagggaaaaatagaaatcctaagtatannnnnnnnnnnnnnnnnntgacgcacatatttgtgattttttttataggagaataaggacttgcagatttgagattgttgaacgtaactactcactagaccaaacaatataaatagtaattggaccaatagaggcttctgggatacttcaacttctaaatttaaggtgattacctatgtaatttccagcattttaggaaattattttctagatcgtatttgttaatttgcttagaatttctataagagtctttactttttccttacaattcctttattcactttgtccatatattttgttttgatcaagtaagccagtggcacatctggagggttagttgaggttaactatatatcatacacattttcatcatatattttagcttcattctcggagcttcgaacgtagcatacagctcttttcatgcagctttaattctattttgatctttcggaattt

SEQ ID NO: 80369 - DNA, 505 bp, Arabidopsis thaliana landsberg
ctgtccagattcaagcaatataaatttatttggataatttgtctttcttttttattaaagatcatttttgtttctgggttatgggtattgcaatttttgtttagaaagaagttagtataattttattatttatatatgagtttgtttctaccggcattatttgtataaattctaacgttaagattttattttttggtcgttggacattaaaaaagaaaaataaataattagtaagctataagctcagtgtcgagttgtcatattgtgttaacaaaatgatgccgttttaatcgttgagattttttttaatgaataaaaatctcaataagaacatataatgtaagaaaatatgaaaatcatcgtaaaggtataagtgtaaagtgaagttattattaatttgaaggataggggagagtacaaagacgctaaagacgagaactgaagaaattaaacacataacttaacaacatatttggatcatggatcaagtcttgcgaatcacaat

SEQ ID NO: 80370 - DNA, 578 bp, Arabidopsis thaliana landsberg
  unsure (1)..(578): unsure at all n locations
ccttggagatttttttttctctgcatataccaaaatcacatgtattcgttcggacaacttcatcatccagttatcagatatgtttcaagtcataaaaattttggtgaacagatgataggtttttgacaagttcttgcaacaatagtttgcagttcggagactnnnnnnnnnnnnnnnnnnnnnnnnnnnnnnnnnnnnnnnaacggaaatagcagcttgcccatgcaatggtgcatcctggcctcccatggcaaacttccatataactattaaaactatctcgtaggcatttgcgacattgagctgttgtaatatctggagtgcattgcattaatgcgtgtatagcctgngaagttgtcacgttttcctcagcagttgcatagaattgacggtaagacaaccctgcatctttgggcgaagaagcttccttgatcataggatccgtcaaatcctgccacctcttctcaaactctgttaaatttgacatgatactcacactgtngaactctgtgtaacgtgggtgcgtatcacccattgcaaaaatgggaccggaagaataacgtgcaaaggcaaaggtt

SEQ ID NO: 80371 - DNA, 166 bp, Arabidopsis thaliana landsberg
  unsure (1)..(166): unsure at all n locations
caacatgatgctgaaaccggagaagaaggcaattccctcaaatangctgaatgtaaaatgaaactgccttaggggggtaacattgcacagactttcggtgtaacaacaccagaagaaactaccttaatgcagactccaacaacacgtggatcttcattaaaagcga

SEQ ID NO: 80372 - DNA, 550 bp, Arabidopsis thaliana landsberg
  unsure (1)..(550): unsure at all n locations
taatgccttcgnttatctttaacttggttttgattccaaacatgtctgtctgttattgaacgagtagcaagatttcattcactgtgttgcgttcctttctttgaggatttgtgtggtttagatgtaatccaatttagatatcggtcacacttattgtttgactggcttttctttttcttttctaagattatgcttggcaatttacattttctggttaattctgtgcttggtattttggggcaaagatgaaacaatgaatttgggattgtgatttccgattatcatcttacatgactttggtggattagatagtgaaataggtttttgatgacaaaattctgtcaaactttaatttgctttcttctctctgtacttgaccacaggggtggagtctgaagctacaatcacaatcgtaggtgctggtaatgtaagttcaagaacaagtcaacctgggaacttgtatatcaaactaaaggtttgttaaagcatctgtattttcttcaaatttgtacttgtatattntgtaagacgtgcctagagaagtttgaat

SEQ ID NO: 80373 - DNA, 285 bp, Arabidopsis thaliana landsberg
tactgccgtacaggtcatgatgctttgagcgctccgcgagcgcagccacggtcttgtcgcccttgtcgctgacgacacggcccacaacacgatggaccgtcgacttcttttcgatctgtacgctcatgacgccttcacctgacgcgcaatcagtttcaccttggcgatctacttgcgcgcgtagcgcatcagatgcggtttggtggcctgcccggtcgtctgctggatgcgcaggttgaactgtttgcgacgcagcgcggtgagtttttttttgagcgccttttg

SEQ ID NO: 80374 - DNA, 512 bp, Arabidopsis thaliana landsberg
atgtgaacttctatttatatcaatatgttgttctcctttttttaagggtggactgttttacctacaaaaggtgggtgaactgctaacaaaaaatgggtctaacccttgaaaaaagatttgacccttctgagccataaagttctctttattagtgatctctcataaaaatccatggttctaggcaaaaactttactttgtgattaaaagcttcaacctttgaaaactgagaagcattaaacatgagatccaagaccagattcttacttaagacgcaagcaatgttgagactgaagttctgctctgttcttagcacttttatatgaattatgttcgcttgaaaggtgctaaagctgaatctttgtgaatgtttactctcacttaaggctataacgtcaactaacgaatctttgttgtgtgttacagtcagactgatgcaaaccttcagacgaatgtgggttcgagtccgtaaacccaacatcctggaccaagaacacaactgggaacacacact

SEQ ID NO: 80375 - DNA, 498 bp, Arabidopsis thaliana landsberg
  unsure (1)..(498): unsure at all n locations
caacttacaatgtattttttaattaatattttaaatcatttagtatttaagaaactcgaaaatagaaaagcaactaacgtttggtaaacccggtaaaaccatataatggtggatgaatcataagggaccagagctgaacatcaatctaaccggttggtctgcgtttggaaacacaacaattgcaacaataatattatatataataggaatatgacctcttcagaaatcgacaattcatcatttaaaaataaacatatataagcaccaaaaaacggaaaacggtaaactaatcaagttaaaattattttaacatcatgatttgtatgaaccaaatttagaaaaacaaataaatattccaaaaagcaatactagatggaagagattattaggatcataaaaaaaaaagtacgagaagatgttaaaacatgcttatttacaacacanaataaaagaacattcgcaagtatgagtttagcatgttgaaaattttgataatat

SEQ ID NO: 80376 - DNA, 293 bp, Arabidopsis thaliana landsberg
aagccgtgccgccacatcacgccagcgcgctgacagcacgtcgtttgctttagggaatccacagcatcgcgtagccgacgccgcaccactggccgagcagcatggtgcgcacgtgcccagcagcttgctcccatctcagccgccgatcgccggcgtggcgtacatcagtgccgccgcgaccccagaccacgttggccttgctgtcgatgaacccgagcttcttatcatgtcgtgacatagacctgctgcccttaaccgatcgctccacatttcatgagaagaccggctgagac

SEQ ID NO: 80377 - DNA, 391 bp, Arabidopsis thaliana landsberg
  unsure (1)..(391): unsure at all n locations
gccgaccaaggggcnnnnnnnnnnnnnnnnnnnnnnnnnnnnnnnnnnnnnnnnnnnggacacctatcactaggtcggcggcaatgacgacggcaaaacgaacaagcgcaaggggggcaaatgagcatgcaagccaaacacctgcgcctgctgatgatcctgctggcgatgggcaccctgctggccggatgcacccgcggcaccgcggacctgcaccagtgggtggcccagcaaaaagccaagaagggcgcgccattgccgacgctgccggtcatcaagacgatcgagacgttcgcctacaccgaccaggacaagcgtgatccgttctcgccggccgttgcgcaacagcagaaacagcatcaggccaacggcccgcatcccgatctcaatc

SEQ ID NO: 80378 - DNA, 401 bp, Arabidopsis thaliana landsberg
aatcagtttgtatgtaatgttttctttttatctatcgtggtgtcatactattcttatctattttacatattttttaaccaaaatcattcggcctttgaatgatctttctgaaatttgttctgaattcgacgatggtttaaactaacccacatgtgacatgttaaatggaaacaaaatttcatcttcctttcaactttaaccgttattcatatttcacaaggaataaaaattttattattgtggtacgtcctttggtattattataatatttggaaaaaaatagacggctgataagtgatatttttgacattttccaaaatatttaagaaatgttaattgataaattggaagaacaaactgtaagcttaaaaataatttatgaaagtttgtattttttgttc

SEQ ID NO: 80379 - DNA, 575 bp, Arabidopsis thaliana landsberg
  unsure (1)..(575): unsure at all n locations
aataattatgatgnnnnnnnnnnnnnnnnnnnnnnnnnnnnnnnnnnnnnnnnnnnnnnnnnnnnnnnnnnnnnnnnnnnnnnnnnnnnnnnnnnnnnnnnnnnnnnnnnnnnnnnnnnnnnnnnnnnnnnnnnnnnnnnnnnnnnnnnnnnnnnnnnnnnnnnnnnnnnnnnnnnnnnnnnnnnnnnnnnnnnnnnnnnnnnnnnnnnnnnnnnnnnnnnnnnnnnnnnnnnnnnnnnnnnnnnnnnnnnnnnnnnnnnnnnnnnnnnnnnnnnnnnnnnnnnnnnnnnnnnnnnnnnnnnnnnnnnnnnnnnnnnnnnnnnnnnnnnnnnnnnnnnnnnnnnnnnnnnnnnnnnnnnnnnnnnnnnnnnnnnnnnnnnnnnnnnnnnnnnnnnnnnnnnnnnnnnnnnnnnnnnnnnnnnnnnnnnnnnnnnnnnnnnnnnnnnnnnnnnnnnnnnnnnnnnnnnnnnnnnnnnnnnngatctgcagaaatcaatcccgaattggcgaatattctttttcttaatatgaaaatggggattactaagcaattcttttaatcttgataaaccctt

SEQ ID NO: 80380 - DNA, 498 bp, Arabidopsis thaliana landsberg
aaagcccaaagacttgtacgggttaagacagctaatagtgtttttcacacgctctacacatgtcttcactcccatgtgttcaatcggggtcatctctcaaatctttaactggctccaagttcaatgctcccaaaacccacgcccacacatgcatcctatgaccttaccttttctatccatatacttcccacatattaccactttgcaaacacacaaaagccaaaaactcatttacaagatgagttaataaagacactaacacacaaccaatgtgaaaacagacctttacattagatattgttacctctaagaagtcattaatcatataatgagaacatccttgcttgctaagctatacaagattattaacctctaagaaaggagagacacttttaacgcaatagtaactacatgacgctataaatataggagagagtggaaaagaatattacagccctactaagacagagaatcatcatcgaacagtaaagaggagac

SEQ ID NO: 80381 - DNA, 578 bp, Arabidopsis thaliana landsberg
  unsure (1)..(578): unsure at all n locations
aactctatatttgactggtagtaattcaaatttcaaatagttatacatgcaataatataacttctacgtgctctttctacttcctaattttataagtatggaatccatgaaaaaatggaaaaagatagagagaatctagaatcttaagataagatgcaagtaaaaagaagaaannnnnnnnnnnnnnnnnnaacttgacaaactaggaattactaccagattgatactgttttgacaagagattggaatataccatctacttctaattcttatctagaccgagacaaataccatttataaaagatctactgcaatattagtaatgcattgctacctgtccacacgacagatatatcaatccatgtatttagagtttccggcaaacagaaactaattagttacttaagattaaaacaaaataatcttaaacttgacaaaaaaaggcatcccaaatagattagcaccatatgacactagataagtaccatccttttttttgtttttacaccatgacatatctataataattcgatagcaatagtcatatatgacttgtcacacgacaaatattgtttcct

SEQ ID NO: 80382 - DNA, 221 bp, Arabidopsis thaliana landsberg
ctaggccgtttaattttatataatatagatttaaaataaaattaaaattaaaaaaatcgtatgtgttgcgattaattttaagagatctacgctaccgtaattttatataatattttcaaaattttaatttggtggttgtttgacgtgtttcaagacgttatcgttagaaaataaataatgtatttttcatttaacgcaattctaataggagattactccaa

SEQ ID NO: 80383 - DNA, 505 bp, Arabidopsis thaliana landsberg
aaaataaaatataccatctaatgttcatgttaacattttttgttgggttgaattaattacttgggcatggggagtcggtgcttgtcttttggtttctgaataccttttcttctttgtctgtttttggttggttgtcgccacgtaacgtccacacaaacgccgtattaccgctttttgttgctactctatgtcccggtttccatattacatcttcccgttccaattccgataatcttttgcgtatcttatcttctgacttaccacaatagtctgctatctgttgggaagagccggaaccaattacctttagtgtttcgataattaggtttttgatggctgctacgctatcggggttaagattgcggtatgcttccaaagatgtcttttgtacggtatttttcatggttatttgaatttctgtttaccaattttaacccattcaatcccatcatccaaaagtaatacatcactgtagggagtgcatccttctgcatagttggtgtgc

SEQ ID NO: 80384 - DNA, 358 bp, Arabidopsis thaliana landsberg
tgctacacctcttttcatttatttactattatctaaggacgggtatttattctattccctttttactgactctatctttatttaaaatattgcttttaactaaaatatttattcataatacccaatttataaacatgtgttctttacactttatctgcacttaacacactttaaaggtataatgttacacttttatttgaattattctaagactatccaatatttttttatattaaccacacaatccgtttcgtttaatttaatttaatcgtatcgtataatcccttttttaactgtttacactaaattacaacaaacatatgtgcatttatttaaacaattttctataaagctcaac

SEQ ID NO: 80385 - DNA, 555 bp, Arabidopsis thaliana landsberg
  unsure (1)..(555): unsure at all n locations
ctacttcgtcctggtgctgcagcagattgcggcgaacatcgacggcgtgtcgaactttaacgttcgcaccggtacgccgatcacgctgaatcgcccggttctcgtaaccgactccgcgtcgctcaaggtcacgtccggttcgccggctgtcaccgattactacaccctcggcctggtggccggcggtgcgcaggcggaagtcaccgaaacgtcggatatcgtcgttgacgatgttaccggcctggaagtcctcatgacccggctgcaaggcgaattcgcctacaacctgggtttgaagggtttcaagtacgatgtcgcgaacggtggcgccaacccgaacgcgactgcggtcggtaccggctccaattgggacaaggctgcgaccgacgacaagtcgctcgccgcgtcgtcatcaagagccgataagcaagcangggagggnnnnnnncnccgnctnccttttccttccccgattccgaggaacacatgcatcacctgattttttacggtgctgacggcgctgcggcgaaagagcgcgctgtcgatcttcgcgcc

SEQ ID NO: 80386 - DNA, 144 bp, Arabidopsis thaliana landsberg
atttgagattactgggctcgattaacggtcgcgtgggtgaggcagaggaagaatactttggtgactaaccaaccgatcgggtttggcacaaggaaccttatgttcagactctctgacagacgcagccgactatgcttcggcacc

SEQ ID NO: 80387 - DNA, 567 bp, Arabidopsis thaliana landsberg
  unsure (1)..(567): unsure at all n locations
tcccggtgcctcggccccttcgccggcggatatggctttggcgtgcgcagtacgctgttaggctatttcctgaagctggatgccggatggcctatgaaaggaattttcaaaggaagcccggtatggtattttgctatgggatttgatttttaagaagatcaactatcattttttaccattttgggtaactgcttcaatgtatagtagataatggaaagcagcacagcaaagagaagtgtaaatacccatagcttggaatagcgttgcggaaccagcacatgatgagcggatgtatatacaagggaannnnnnnnnnnnnnnnnnnnnnnnnnnnnnnnnnnnnnnnnnnnnnnnnnnnnnnnnnnnnnnnnnnnnnnnnncaggcttaacgccacgcatacatgcacccaggcgggcttcaggatgcgctgcaggaatttttccacgttcataagtgataccagtccgaggatcaggccattccatgctgctgatatcaccagcaatatatcataccagaaaggaaccggcgggcgctcttcataatgcagcangtctgtgataata

SEQ ID NO: 80388 - DNA, 569 bp, Arabidopsis thaliana landsberg
atcgacgggtatattcggcaagtgatgtatgatgtatgatgtattatgatatatcataagaataacgtagcatgtagaattgtgataggttaggtgtaatgctaggttctagattatgtgttatgtttacctttttttgtacaaaagttttgtttttcattcaatcattcaaatttaatataaggtttaagagaatatacatttcaatgtcgatatacaaagttaaaaacaataaaagtaaaagtataataaaccggtaatagttccgagataatctgaagataaggattgtagaacacaatatcacatgtgagaaaatggtaaatcggagatcacaaccacgaatccgggacgtgaaagattggttattgtcgcaagacataataacattgaaaatgattctgtagcctcgagacttgccggtacaaaacacactacattacaaggtgggaaaacgattagaaagatcaagcagtttcttcgtttgcataccggagaccaaatacgaaaattggtttataaagttttctccatgaaagagaagagagagaacaatgttctccccataa

SEQ ID NO: 80389 - DNA, 573 bp, Arabidopsis thaliana landsberg
  unsure (1)..(573): unsure at all n locations
cgctcggcgtggtcatcgctgattttccgtttacgccgaatgccgacggcgtcggtgccagtcagttcttgccgacgtttatccgcgacgccttgagtggcagcagcaactggcatgctgaactgccgatcgaggaacacggcggcactgcgctgacgctcagcagtgacctgcgcggtaccgagatccgtctgccggagccgctcgccaagccggcggacacaccactgccaacgcacgtgcggatcggcggcgacgccgatgtgccgctgcggatcagtgtcgactacggtcagcgcgcgtcagccgaaatcgcgatggccggcaacgacgatgtacgcgacgccggcttgcagctcgaaggactgcgcgtgcgcttcggcgacgtggcggcgcccaaagcgcagaagggtgactacatcgtcgatggtcatgccggcacgctggatcttgcggcttggaccgctctgatcggaagcgatgacggcagtaccgcgtncgcgcccgcaggcgccgcaccgaagtcgtcgcccgcgacgcgcagcggcctgccgctggacttgatgatctgga

SEQ ID NO: 80390 - DNA, 166 bp, Arabidopsis thaliana landsberg
ttgggccagtactattctacaggcccatatgatttgctaaaattaatatatatatacaagtttacttcaaatgggcccattttttagagaaaaatagtaaagtaaattattttcttgggtcggcaaattaatttagcgagaaaaaaaaaggaactccctcctcttt

SEQ ID NO: 80391 - DNA, 538 bp, Arabidopsis thaliana landsberg
  unsure (1)..(538): unsure at all n locations
ccagaagggggtctgctgaggacaacagggaaaaaagctgtcctttttacaggcacaccacttatttcagttgcagcgtggcggacaccttgtctccttccgccgaaatggcctccaggatatagttccctttgggcaatgccgaaaggtcggcctgatgcctggtatccaggtcctggtcacggtacacgacctttccgtccgggctgtacaccaatacccggtgcgcaacgggcagtgctgtagtaaaatggccgtccgaaggnnnnnnnnnnnnnnnnnnnnnnnnnnnnnnnnngaatttttcggcaagcgcaagttctgtacgatcgttgctgaggatcaggccgctgtcgcctacgatataggcaatgctgtcattacgtaccgctacatcattgagccattgctccgcttcggcaatattcatccaggggtctgccgggtcggaataataaataagccctttaccggtggtcggcgacttaccgacagagatcagggaatcccgcccggaaagcgccattgacttcatttc

SEQ ID NO: 80392 - DNA, 448 bp, Arabidopsis thaliana landsberg
  unsure (1)..(448): unsure at all n locations
gggaacacgccatgttatatattccgaaagacaaagcgaaaagttatgatgtgtaatgaataaacaaacatttcaatggagaatgatgtgtttatacaaatatatatctacaaactacaatgaataatttcattctcttatggcatatggtgctataaacaaacacacttaccacgcttgatcctacaacacatgaacnnnnnnnnnnnnnnnnnnnnnnnnnnnnnnnnnnnnnnnnnnnnnnnnnnnnnnnnnnnnnnnnnnnnnnnnnnnnnnnnnnnnnnnnnnnnnnnnnnnnnnnnnnnnnnnnnnnnnnnnnnnagttaccactactagcgagaaatacattgttcctacgccgataccaccgtttttacgaccctcattcccaccgnnnnnnnnnnnnnnnnnnnnnnnnnnngggaatatagcacaaccaccgttacct

SEQ ID NO: 80393 - DNA, 590 bp, Arabidopsis thaliana landsberg
  unsure (1)..(590): unsure at all n locations
tgaccgatccgncgaaacaatctgggttattacaaagcagatagttttgtctattccgttgaaagccgtaggggataaaaaaagctgcagggtacctccgggacccacagcctaaaccaaactattatcgtaaatattatattccccagtgcttattgggaaccgggcccattttcagcaccagtttccctcctttcagcaattcgctggcaggaaatttaaaagactgcagtggcttaccgcttaatgtagctttttgtacatatttattgtctcttgaaacatttggggcctcaatagtaaaggactttcctcttccgtactgcccgcccagatctatggtcactgaaggaaaaatggggctcgcgatttcatatacaggatctgcgctgcagccgccatctgtttggaacaagcccagtgcagccatcacgaaccaggcgctcatctgcccctggtcttcatcgcccagataagcatttgcaagacctgaaccataatacctgtccatgatcgcacggctccaggcctgtgtaagccatggctttttcacccagttaaacagaaatgcaaaatgcatcgactgttga

SEQ ID NO: 80394 - DNA, 564 bp, Arabidopsis thaliana landsberg
gactcgccgcccgtgccccgaaccctgctgtgtgctcgtcgggattgagtaccgttaccacccagccagcatcgagttgtagaccttggtcccgtacgcgctgatgatcaccgccgcgtcggcggctatacaggcgtccaacagctcctggtggtcggcgggacgtgtcatttccaccctgtactcaccaccccgccgcgtgcccggatcggtgatgtatggcgggtccacgtacaagaggttctgtcgatcccgcccgtatgcctggaccatctccacggcaggacggcactccaaactcaccgacgcaatccgccgtgctgcgggtgccagccgtcgcgcatacctctgcaaaacaacaggcatcggcgtactggtgggagccgcgtggtgccgccaacccgtgcgggtgattgatcccgtgcgcccttgggtgagtgcgatccacacgcggcgggcgatctccagttcgtccaggtcatcggttatctcataagctgattcgcgctcagcgcggctgtgcggcgtcaacgaacatgcccgctccagatcatcgggttggtc

SEQ ID NO: 80395 - DNA, 493 bp, Arabidopsis thaliana landsberg
ggcgcggatcgcccgggaacggtgacgggccgcctgatcggctgagaatcgccaggcgctagccgccgtgatcgctcgacgggtcacgggatgacccggccggggtcgtggcggccgccacgacggtctggccgccacctcatttgaggtagccggccctcgtccgtccgtgtggcgccaccggcgccgcgaacggccaggatggacggtgttgtggtggtgcgtcagcgaaggatggcactgcccaccctcccctatcgactccccatcccttccctcgggggagcgtggcagcggatgcgctccccctacctctccgatctctccggccgtggcccgttctgacgccgggcgaccgaatatggttgtggtcatgacagacagggagcaactggcgcggctgcgagcttgttccctaaagatccgccgcctgcgcagacgcgatcagatcatcgaacgggcgctggccctgagtctgtttgtgatcgcgttc

SEQ ID NO: 80396 - DNA, 592 bp, Arabidopsis thaliana landsberg
  unsure (1)..(592): unsure at all n locations
gttgccttttcttcatggcatcaaaagttaacggagtcggatttcccatgacaaattcttacggctcatgacncctgcatgcatggcnnatacaaggctttgggataaaaggcgaaaacatatcttttttggggttaattgcacccacacctgaaccaattctagaaattcaagtctgcctaattaaaagcctcagacgaagaaagcgatattatgatccgattgttttagtgtaagatacgtactaaagaataaaagtacatcatttatcttttgaatactaaatttctttttaaaaaaatttgttcgcttcgactcacaaatattctatgctaccgtacaagttacagtaaatattatatctttactcccctcaaaattcaacctcttaaagaactaagatccgtttttttacttccaatgtacgatattttttctcagtattcttctctaagaaaattctcttgtgggtccaatctctaccaaatgtatcacttaacttaaaattgtgttctaattttagttatttggcttcaattattttgctacacgcaaagagaaagaaaaaaagaagagtttgattccatacatc

SEQ ID NO: 80397 - DNA, 140 bp, Arabidopsis thaliana landsberg
gggggaggaaaaaacccaaaagcgcaaagagagagcagaacaaaccacagaaagggaaagaaagcaaggatacaaccaatcggccacaagactgggaggccgaccccgcccacctaagatcgaaaccaggaagctacacc

SEQ ID NO: 80398 - DNA, 475 bp, Arabidopsis thaliana landsberg
  unsure (1)..(475): unsure at all n locations
gaaattggaacatgaangatgaaattgatgttatactatatagttcaaggagaatcaacaggggggccccggggggaatttatagttgcttcgatgaacatcatgttatttctttgaaaccattgaagtccattctaagaaaggattcaggagtaagcaaagatcaatgattacatattgcatctgttttaaaaaattaaaattccgtttatatgtaagttacgtaattatgtcgtgattgatatgtaaaattaaaaatttacatactatcccatgcacgttatgcatgggtttaagtaaaactttttaaagtgtaaaataaattagttttttttaaaaattattgttgatatttaatcaatattttggttttggggactcttttagtctttaggcttataaataatagcgttcaatgtcaattataataattaaatatggaccgtttggtatatatattttttttgtttcagct

SEQ ID NO: 80399 - DNA, 509 bp, Arabidopsis thaliana landsberg
taaagccccacaagccgacgccgattccatccgtcgcaagattcaatcgctcggcagttatatttttacgaaggtcacgctgacggaagccggactctggatctgccattacccgcagggcgtggtgatcttccgtccgcgagaccccggcgagcggccagcgtcaagctgactgtcggcttacttcctgcaggaactcaacgggtgagttgaaccgctgcgacgttggagacgtcgatcacatccgcctggaagcgcgcgtcgcgggcgcgattgccgtacaggccgagcgattggccgacgtactgattgaggtccaccgtcgagctttgcaggtacgccagaaaccggccgtccggcgcgaccaaaaaatgccgtggcacgccctgcgtcccggccgcggtcgcctggatcacgccggcgccgctcatcttctggggagccgcctgcatggttccgccggctttgtgcacctgcggagccaactgaacctgcggagtctgtcccgg

SEQ ID NO: 80400 - DNA, 576 bp, Arabidopsis thaliana landsberg
  unsure (1)..(576): unsure at all n locations
gtcatgtgggttttgaagtaagaacagatttagggtgaaaacaaaaaggcaacaaaaatcagtgggggtaataaagcaaaagagagtaaaatactgggagaaagacagagagagagagaagagtgattgcaatttaacaaaggagaaagaaaacaagtgttactggatttgccagcaacaggactgtgacacatgatttggccataggaaaaaggtaactgctttttcatctcttaattataactcctttcctctcttctctctctctcttccatggagggttcttcttttagtagatctctgcaccacccaaagcccaaagctcaaagctttgcacagaagatacagagagaaagaaaccacatacaaaaaaaaagagtctacttttctttttgtttctacttgctatttattacttttcacaccacaccctctggtcaaatgactttctctctactcttctttcctttgggctgagacaacagnagcaagagtccgtgaaagaagaaaacanaatgttagaaatttgaagaagatgagggaaaaggaagcaactctatctgttattttgactga

SEQ ID NO: 80401 - DNA, 471 bp, Arabidopsis thaliana landsberg
cggcgtggcgctggtgctgccgcggctcgatttccccgaaccgcgcgccaggctgctgggttggctgattttctgcgacggctgggcgaacgtcattttttatctcttcggcaacttcgccccgaatcgcggcctgagcttcggcccgaaccatttcggcgaagcgagcctcgccggcgtgatcgcgcttggaccggcgtatctcttcggtggcatcgccatcgtggtactggcgatgatcgggttccgcgcgctgcggtcaccggcctgaggaaggccgcggccgagtcggcgcctcaggggtcgaagcgccaggtcacgctgaccttgatctggccttcggtgaccgaaccgtccgatcccttgcccgcttcgcgaggcttgagcacggtgctcttcgtgcccgaggccggcgcctggcgcagcagctgggcgacccattcgagcgcctccttgctgccgttgatctcg

SEQ ID NO: 80402 - DNA, 401 bp, Arabidopsis thaliana landsberg
  unsure (1)..(401): unsure at all n locations
annnnnnnnnnnnnnnnnnnnnnnnnnnnnnnnnnnnnnnnnnnnnnnnnnnnnnnnnnnnnnnnnnnnnnnnnnnnnnnnnnnnnnnnnnnnnnnnnnnnnnnnnnnnnnnnnnnnnnnnnnnnnnnnnnnnnnnnnnnnnnnnnnnnnnnnnnnnnnnnnnnnnnnnnnnnnnnnnnnnnnnnnnnnnnnnnnnnnnncgatccaggaaatgcgacgctagaccttactgggtctgcgtgtctgtgtcgatcacgactggatgatatggggatgctggcgtacgaaagcctgaaccgcagccggatcctaaccgcctaggcattgtctctttgttttttgatccaaagccaaagcctcatacggactctgtgttcaccttccaagccttgggaagccag

SEQ ID NO: 80403 - DNA, 360 bp, Arabidopsis thaliana landsberg
  unsure (1)..(360): unsure at all n locations
cgccggcggcgaccgtaccagcgtccgannnnnnnnnnnnnnnnnnnnnnnnnnncacggcgcgggcggcctcggtgacatgcggggggcgataggtcattggacgcaacctcgggcttgtgggggcgtgtatcatagcttcgtgagtgcacttttctctcccatcacgttgcgcgatctcacgctggagaaccgcatcgtcgtttcgcctatgtgtcagtactcggccgatcgcggcaccgccaacgactggcacgtcgtcaatctcgggcatttcgccctttccggtcccgggctcgtgatcttcgaagcgacccatgtcagccccgaagctcgcatcacggaccggtgtctggggct

SEQ ID NO: 80404 - DNA, 395 bp, Arabidopsis thaliana landsberg
cgactcaaattaaacccggtaaaaaaaccactaaatatttttaatttttggcaaactcctaatattattatacatgaattggtaaattttatgatctgaacattgttaatttatagagtttttactgtactttatatataatttttgtcgataaatatgcaaataacttcgttacataaatagtaatgtagtaataaggagaaaaaaacgatagaaataaagaattagaatacaaaaaatatatgtaaagaaacaaaattactatgtacaaaacatgttcatttatttgacgcgtaagaaagtggttgcacagctctgcggcaaagcgtgggtctatttggaacaacatattattccacacaataagatcgtctctactatgcgtctacacacaa

SEQ ID NO: 80405 - DNA, 237 bp, Arabidopsis thaliana landsberg
aaactctatcgtgaactagcagatctcttctctatctaagcggacacacacaacgggttggagtccataacaaaagcgcagtggtatccccgtatatttaccggggttgggttggatggacgggtatgtatgagagacaagtacgcatctcaagagtctgatcatgcgctttacaggcctatacatgcacgggccgcgttcggtgaacatggaactttctggtgcatggcagacacc

SEQ ID NO: 80406 - DNA, 438 bp, Arabidopsis thaliana landsberg
cccgcatctcgtctctaccgaggaagaaaacagaatcagatcataatggtctcaaagctccagtaacttcaaacatgattgaacatcattatgacaacactctctacagattataagtcaaggctaaaaatagcaacttctaccatacactgatcatgaaactgaaaagattttaacttacatcaatggatttattagaacagtctctgtatccatgatctgaaaattcacaaaaccctcttcatgaatgtgtaaaatcaatcaaatggtaatatacaaaaagcaatgagacagaaacaacacataccacatgaaggaggtggcagacgaggcaaagtaagtccaattctttttgcattctttctaaatcgggcaaagagaaatccagcgcaagatacagcaagagctgctcctaattgaaacacaaacaagcttata

SEQ ID NO: 80407 - DNA, 575 bp, Arabidopsis thaliana landsberg
aaacctatatatgtgcttagaacttaatcagattacatataaaaataaaacttgactttcatttttcttcttttgctaaacttgactttcatttttcaaatcatagaagtaggtttaacttacaaaaatcattgatgaaaataagtattatagttttgataagagttttaatattcattgacttttgttttgtatctatataatacaaattgactttctgcctgtgaaataaaaacataaaatttcttgagggatctaggaccaaagacttgaatacttatttgtctacgtccttattaattttggaagttagagaagtctaactatcaccaaacatcttgtaaaattaatacattaagtagtacatattaattttaacaactatttcacctaaaatatatagaatcatgtgccccaccatagattacatattaagtttgaccccaaaaaatgattacatataatttacgaactatagtacgtaaagttaatgtggaacaatctgatatgcatggatcgtgtaaatcttgaactttttatagctgaatagaacatctactttatctagatctata

SEQ ID NO: 80408 - DNA, 426 bp, Arabidopsis thaliana landsberg
gccgggtattgcgggttgacccttttctgttagtttttaaagcaaaggatacccgtattccaggaccatgttaagctgtcacatgttgtgcgccataaccgtacctagcatctacatatatgtagaggtgtatgccaacaatcttgggctattcccaatgcggatgtcctgtacgttcataacaacatattagtagatcccagtatacccagtgtcacacagctgccaagaagcacaaaccatatgacactatatgtgcttctgttaccccttcgtaactctcagagacccgggttcgtgatagtctcccttgaccaatcaaaaccgccccacgaattggttattcctctacccgtcatggcaggtctaacgaacatacgttgtgttcacaatggatcacgagcggggtcggagggatcaaaaact

SEQ ID NO: 80409 - DNA, 405 bp, Arabidopsis thaliana landsberg
ggttcaaagagcccgattgcatcttttgagcgatgagtttagaaacagaacccgattttttatgcaaacgtggacatcttacaaagatgggtcatatgctaagtatagacggacctataggcattatgattgaaggagattcgttctatggagcactcaataccccttgagaaactgttcaagcgagcttccagaggaatagcggatggttggaggggaatgatgagatctatacctaactgaacttaattaaagcgtgaaacccttctgtattaggagcacgtaccgctcgagtggatataaacaaatgaaaattgatcgcagaccttatgcaacgaacatgtgcatgataagacgtccgaaccaactaattggagagagttgtagatgttgcatccagaccgt

SEQ ID NO: 80410 - DNA, 444 bp, Arabidopsis thaliana landsberg
atacatcattaatttcaatagtaataaatgtgtctacaccttagaaattaaaacaggatttgatcactatttcccggaagaaaaactaaagctatcaagcctgatgttagggatttttttgcccatcatctttaactattttccatacacattcgtatgtgtgataaaaacaacttattaaaatgatataactacagttactttatgcatgcgattgttgactatagctagctactacaccttactgtaacatgtgacacatttttttttacatgtgacagcatttgttacgatggatggctactagatatccatatgaaccaatgaaaagcgagattataatatctcactcttgtaagtctttacagatttttgtttgtgaggaggacgcatctgcgaatatcggacgcttcattatatgaaaacacgtgccttgtcttgaaa

SEQ ID NO: 80411 - DNA, 624 bp, Arabidopsis thaliana landsberg
  unsure (1)..(624): unsure at all n locations
actaaaattacactacaacatgccttagggtcgtaaccccatttacatctttttcaaaacgtatttgacattgtaacaatataaaaatagattataagctaagagttaatatggtttacaaaaaaagaaaaaagttatgagttaatttacattctaacatttttttttaattaccaaaaaattcgaacataggtccaaagtccgtctttagtcttatagaaatattctcttctcaagagtaatcgaactaatgacacaatagaaccaactctaaattctaaccactactctactatactttgacgagaccattaacttttgattgagacaattgatgtattcagattttggttttatttttagtctcactctcaaaaataaaatatctagtttaccttgatctaattctaaggtcttagctatgtcctttttagcttgattctatttttccgaagttttatgacaattatgagctaattcagcggaactacaanttttcacatacagacgctcattttatgaatgtggttagaaaagaatactactagtatagtaagttttagtcaatgaaaaagtataatttctcaagatagtactttagggagagagtaagagagaggagtt

SEQ ID NO: 80412 - DNA, 538 bp, Arabidopsis thaliana landsberg
  unsure (1)..(538): unsure at all n locations
accgcgccattcggctaaatatcacgnnnnnnnnnnnnnnnnnnnnnnnnnnnnnnnnnnnnnnnngcaaggatgcaggcgaagcattgcaccttttgtctctggcgctttcgcggccgcgtttcgataatagttcgctcacgcaggtgcggatacaaatgattcagaagttgcatcgggagacagagaatccatccattgtcgcccatcgtgctttcctgcgcgcgtttttcaacggccatgtttacggtcatgcggtggacggcaatgcggctagtcttgcagccattacgcctgcggatttacgcgatttttcgtacagccactgggtgcgcggcggcatgaaggtggctgtggccggcgatattacgccatcgacattgacgcatttgctcaagaatgcgcttaagccactttcccttacagcgccgcatccgcttcctgttgtgggcaagctgggtacgccgggtgttcattatgccgncacgcccgcgccgcagacggttgtggtttttgggttgcccggcatcatgcgtga

SEQ ID NO: 80413 - DNA, 602 bp, Arabidopsis thaliana landsberg
  unsure (1)..(602): unsure at all n locations
aacatccacaaggaatgatcctaacaacggacgcatctatgtacctcggaaatgcacagaagaattcatcgaacactgtcatcaaaccatcaagcacgacaaaagattgggagacggagacttttgggaaaccatccaccgacacttcacgtgggaaaacattgccgcaggaccaaacaactacttgcactgcgaaacctgcaaaagaaaccaatggccatacccacgaaagacgctcaacgccacctatacagtggaacccgacaacccactcctacgacaaatcgaagaatacaatgatcaactcccggacaaacaaaagacagctaaacaacaagtcccaaacgagctacagtacgacctagttcgcgaaatccacagacaccaactacacggacaccagggaatcaacaaaaccctagaacgagtcaagacgacatttacttttcctaaaatgaagaanatcgtatcaaccatcatcgaacaatgcgatctatgcgcaaaaaccagggctcgacgccacataccttatggtaaactacaaccactcccggtatcacaattaccatgggaatcaatcactatggatttcatcaccaaac

SEQ ID NO: 80414 - DNA, 330 bp, Arabidopsis thaliana landsberg
  unsure (1)..(330): unsure at all n locations
agctctggggaattttccaaagaagtaactgtctcttgcatggattttggtggagagaagaacagcgttagtgttgaggaataagagggagcctctaccggagaaagccatgatgtgagtagtagtagtgtgatagagagaagagaagagacatttagatattgtgggtttannnnnnnnnnnnnnnnnnnnnnnnnnnnnnnnnnnnnnnnnnnnnngtggcttctttttctttcttcttttacctttttttctttagaaattgtggacttttttttaatgtgttttaatttgaagtcggtaggtggaaatggggactggataggtgat

SEQ ID NO: 80415 - DNA, 603 bp, Arabidopsis thaliana landsberg
  unsure (1)..(603): unsure at all n locations
gcagagcacaccctttttgaattgtcaaggtttaatagccatgtaaaagaaatgtgttgtaaaataggagtgcaccttggcatttgtcacagtgagatccacatcttgcaaaaacggtgtacatgtcagatactgcccagtatcaacacgctgcagcagagtagccgtatccattggaatttgaattattgagcgatagtnnnnnnnnnnnnnnnnnnnnnnnnnnnnnnggaatgcgctgaatcttttatcatatagtattctgcaaagcaaaagtatccgataagtaacaatatatcttttatcatatagtattctgcaaagctaaagtcagcactgttatatctaataatgttcatctctaggcctcccgttgacaaaaagcaaaaggccttcttgatctaagtataaaggcaaacaataataaagcttcaacataaacacgcaagcctagcagtagagtgtaatgaagattataaaaaatgacagagaagatacaggggaagtatttttaaaagctgatcttagtattttttgagtggtacagatctacaaaccaactgttctatcacatatgcatatagattaaacgagagaattaca

SEQ ID NO: 80416 - DNA, 161 bp, Arabidopsis thaliana landsberg
accggaagctcaatttatctaacgatatggcgaaaaggaccgacacagtgccactgcaagactctaatgagacagagatgggctgtcatgaacgtcgaggaggccggacacacagatgggcacatctaatcaggatcgcgcatggaccgtaacaggagtcg

SEQ ID NO: 80417 - DNA, 451 bp, Arabidopsis thaliana landsberg
  unsure (1)..(451): unsure at all n locations
acaatgcccaggatgtgcaggtatatgatgccatcggcaagaaaggagagnnnnnnnnnnnnnnnnntaaataccttgtagtgtataaagacctgtattctgcctatggcggcgagcttgactggttctatgcagggcgcggcatttacacgtattccaatgagctgtggacaccctacctgatgttcatgaaagacaataaccgggaagccaatgccacgtacaactttgacagatacctcctgttccaggatgcgtttgtgccctggaaggaatttgatcatccgcaatatggcaagatcgagataggagggttcaagaaaaatttcggaaggccgcaccctggcttcctgctggagtcggatgcacaccgcaatatggctttcagcatttaccattgctattccactcccaaactttccgtgcaggaggttagcgaaaaggatcttgg

SEQ ID NO: 80418 - DNA, 429 bp, Arabidopsis thaliana landsberg
  unsure (1)..(429): unsure at all n locations
caacaacccacacacactccganaactggggtcgttttaaagaaaaacccccatcaccccacaactacgcggtctatttctaaatacaactacatcctaaaactcctatcataaattaaaaagcatcatagcaaaccaccttcaactccaataagacaacacttcaagctaatgatatcaacacatgaagaaccaataattcacagtgaaactatcatggacattccatatcaaactacactgggaaacttaatgtactctatcataagtactaaacctcatctaactttctcaattctcttattctgcacattcatgaccaaaccattaaagcatcactggcatgcaatgaaatggattctcaagtacttaaatggctctcttaaaaaaaaactcatttacaacaccacattcttactttatcatcac

SEQ ID NO: 80419 - DNA, 376 bp, Arabidopsis thaliana landsberg
cgcatgactgatggtggaactgagtatctggtaactgtagctttcgtctgcattttcattggtgaggttacccacattgaacttggtgcttgcccgggtagcctacatacagccttgctgtctgaatgattacgggcacgctgttattgaatttgatatagttgccgttaaaagcattatatcctccctggctgtacacaagtttattcgcaggccctacactggcctgtacctccttgctcacataatatgttttattggagggaatggtagcagtgctggtagttgtccctgtggtaagaggtgtaccgccggaagcagatgtataccagaaatagttggatgcatccgggttattcacttttaaggtgggcgt

SEQ ID NO: 80420 - DNA, 636 bp, Arabidopsis thaliana landsberg
taatggtaacattttaaggaaattaccaaataaatgacattagaattgaaatacatataatttttcatttattttcctggagatctaagtagaaatgtatagttcctttttgcttgaaagaaaataaaatataaaaggaaacatacatttatatttaaattaattaatataataaaatatattgtatttaatggaaacgtcattttggtaactttcttaaaaaaaaataagattctagtctgaaatatatttcttaattaatatagaaagatatgtttttatgttagtacaaatcacattaaacaattttgaactattaaaatttaatgtagacgattgagatcaaagttaaaaaaaaatatctcaaaaatatcagtcatttcctctataaatacgtgattttagttcattgtcaaaacgtcaaaaacttgtacgcaaggatggaaaaaccaaataattagtacagaagaaaatatttgcctcttaagtcttaatagatccaactagccgaagaaatgaggtattttacaaactttcagttataattctattagttattaattatgatgaattccgatcttaacgtcatacaaatgtatatgtattttaatgttaaaatatctaattaatcacaaa

SEQ ID NO: 80421 - DNA, 597 bp, Arabidopsis thaliana landsberg
  unsure (1)..(597): unsure at all n locations
gaatataantctaagtctaagtaaatcctgtcgaatgtaaaatacaaagaagctgacattttatgtataggctaatatcatagctaacggtcaacccactacaataaggaaataaagactcgaataggaaagaatcccaagtgatggccattggcgcctttgatgatatcttgaaattcgagaagaaatataagtttgaaaacagtttgcttcaaagaccttcaaaataggagtaaattcccagagaaccctagggctaataagtttcctcaacttgaacagacttaagagagattggaaaattaaggagaaatcttgaagatgtgacaattctgaaactatgactgatgaccattagtgtaatcgcggtttacttttatttgttggcttttacaggttaagttggtataccacatgtgtatatatataacaacatcacagttgtacagattacaattcatcaaacatatgaaagtttatttttaacagttgctttaactactaacagatctgcatgcataaatttgattcattgatatcacgtctgttctttcattttagtatctctaacgctccaatgttttctacataatcgaa

SEQ ID NO: 80422 - DNA, 240 bp, Arabidopsis thaliana landsberg
ccaaacaaaaacactcactatcacaaaaaaaaaaaacacccccacaccgacaaagagaaaaataaaaacccccgaaacccccaccccacagaaaaaaagcgaccaacaaaaaccacctaaccaaaaagctaaaacaacaaacccctaaaaggggaccacaacacctaaccacaataacccaaaaacgcacaaaacaaagcagacagcaaaaacacacctacaccaagaacaaaaaaacta

SEQ ID NO: 80423 - DNA, 493 bp, Arabidopsis thaliana landsberg
  unsure (1)..(493): unsure at all n locations
gtttgatctaaccagtcgctctactctnaatatgttatcttttaaaaaaatttcttcatcaatctagctgaggttttatattaactgtaacaatatccatccctaaaaatatcttaattctgttttaatatagatatgcaatgtcaccacttagaataaccatgctacaaaatgtaacaaggtacccacaatatatatgttctctgcaaccgaatcataaaaagatcacatcactcattttttgttgattaaatacctgatctatctatatatgatttagttgaattttttattttatagtaagtaaagaaaccaccttcaaattcaattgttaccacacgattacttacttttttgaacggccacataacattttttatacacaaattggatcctgttttcacgttttaatttcacctgaactaaataaaatttaccacgtcgacttttctaattacttgttaacattcaaggaatatattataaagtattt

SEQ ID NO: 80424 - DNA, 486 bp, Arabidopsis thaliana landsberg
  unsure (1)..(486): unsure at all n locations
tacgccggcaagcagcagggcgtcgacggcaagcagtttgcccattcgctcaagggcatgctgccgatgatgctcgggcagatgaacatgccggaactgcagaagcagatctccgacgccgccaacgcctatctcgacgacccgaagagcctcgaagtgtcggccaagccggcccagccgatgcccttcccgcagatcatgggtgctgcgatgggcaacccggccgatctcgccaagacgctcaacgtgcagatcaccgccaaccagtgatcgatcgacaatagcctgaacacgggagcccggaaggtccgccttccgggctcaaattgttgataagctccccgtcgtcgtgctcgggcccgtcccgagcatctgcccacttttctacaggcataagttcaagcacttatccgacgttgggcagatcctcggcacannnnnnnnnnnnnnnnnnnnnnctgtgtccggtttcgtcggcaacctgac

SEQ ID NO: 80425 - DNA, 316 bp, Arabidopsis thaliana landsberg
tgataaaatcgcattaacaatattgtattttgtatattttcttttcgaaaaaccaccatatggtttgttccacatttagtaacgacaatgtcaaattgtattgaaattttataatttatagactacatgtataggttttaaactgctaattaaagagtatataatagacgagaagactgttgaatatagataattaatttaactaacacttttaagtcttaaaggctttaataaccttactcggggggcctgccaataccattaaacattggaaattaaaatcaaaaggggtaattcatttttttttttttttttg

SEQ ID NO: 80426 - DNA, 532 bp, Arabidopsis thaliana landsberg
cgggccggtgctggtgccgctgcgtattgaagctggctgccctcccggtggtgcggtttgaccatccgtcgggcgacctgggcggcgtatgccgcgccctggtcgcaacgcaccaggtgcaggcacaggtcgatgcccgctcccgttccggcgctggtcgcgatatcgccgtggtcgacgaagagaacatccggatcgaccgtgacctcgggaaaggccgcggcgaactgcgcggtgctacgccagtgcgtggttgcccggcggccgtcgagcagcccggcctcggtcagcacgaacgccccggtgcagatggcgacgatccgcgctccacgccggtgagcgcgctgcagcgccaccacgatgccgggggagacctcgtcgccgggcgatcgccagccggggacgaccactgtatgcgtctcatccagggcgggcagtcctgctttgacgagcattgcgtatccggcgccagttggcagcggtccaggctgctcggcgcagacccgagagctgtagcggcgttccatgccct

SEQ ID NO: 80427 - DNA, 418 bp, Arabidopsis thaliana landsberg
tttccatgcaggtggccctacggggctatcgtgtaatctatgaactcggggcctacgcgatggagcttccttgtgatgatctccgggaagagcggaaaagaaagatcaggatcagcgccggcgctttccaggccatgagaaagcttggggaggcttttaatataataaaacatccccggttggcttttcaatttatctcccaccgggttttcagatggacggtggcgcctgtatgccttttgctggccctggcactgaatgtcatattggtaatatatgaaaatcatcttgtatatcattatctattggttcttcaggggggcttttatctgttggcaggcctcggctatttattttcattgcgaaatatgaaaatgaaactattttatattccttactatttcatttttatgaacct

SEQ ID NO: 80428 - DNA, 277 bp, Arabidopsis thaliana landsberg
agggggaaaggcacatggagggaattgatgaagaggatgacgacgtttttgaaggtttttttgagaaaaatccttacttagggatggcttggggggtatatgaagtcaggtgctcgtccttataccatcatcaaataagaggttacctgagtatcatgatagaagcgatgatgccaaatttacacatgttgctggacttgggaagattcttcctccgaaccatgaggaaatcgattatcttctttactcatggagatatgtaccgtaggagaggggc

SEQ ID NO: 80429 - DNA, 563 bp, Arabidopsis thaliana landsberg
taaagtaaatcgaagtcataaaatatgaattttttcattcttctttataataaatacatattggtgggggtctttggcgtttcttcctttacacctcaatccgcatataccacataattttaacgaattgtagtttacatttttttgtgtaaagcaaaataaaactcgctgaattgtaagttattatattttctatacaatgactataactttaaaatgtaactaaattatttaaactgaaaatagagcattacacttccacaacttcttaggatattcttccacctaataatctggtgatcatattttaaaaataaaatatcaatgtctcaatgtctaatgcaagcaaggatgagaactgagacttgagagtggactttctttcttccatcaattggaaactgaatttgtttttttttagatctcttcgattatctcttcttgaacttccgctgtcattgtcaactaaaaatctacagttgtttgaaaaaaaaaaactattctgtttaacttaatctcgactgccataccattcattaccataatcgacttatatttatagt

SEQ ID NO: 80430 - DNA, 557 bp, Arabidopsis thaliana landsberg
  unsure (1)..(557): unsure at all n locations
ggagggcccgccccgtcgatctgcaacaggcggattctttttgctcggttttattgcctcgaccacgtgttggcctcgtggggggnccacctgcgacaggtaggcgtaaggcgtctgccgggtgaagtcctgcttgaggtagtcgggggcaatcgcagcattgacgtagcggtcctcgatctgcaccggcacgccgttctcgaaatgcacgatcagcgagtggaacacccgctggccttcgcgcatgtccagggccagggcccgctcggaaccggccgtttcctcggtgagggtgatcacctggcagctatgctggtggccacgagcggcaatttcatcggcgatgttgttgacctcgaacagcgccgaacgccccttgggctcggccacgaaggtcccgaccccttgcatgcgcaccagaaggcnnnnnnnnnnnnnnnnnnnnngggcgcggttgatggtcatacggctgaagcccagctcgctgaccagttcgctctccgagggtactctgtgatgcggtggccagctgccgttgtacatctgctggatgatca

SEQ ID NO: 80431 - DNA, 506 bp, Arabidopsis thaliana landsberg
aaaaaaatataactttaatttttcctttttaatttttaatcatgtttccctaactgtagtcagaggacaatatgggtgatcatgagcgatatatttcagtccacttggatgaaatgtcataatgaaatctaatgtttatatactagcttaaaacgtatcaagtttgccctttgtcctttacgtttttaaatatacttatactcaactgctttcatctctgtgggacacaatcccatgggctcatagccactagcagatttgtgtgaatctcaatcagaataactccccataacttttttcaattaggttttattgcctaccaacctctcatctcttaactatagctggtctgtgttccattcctatggatttgtgttttaattgccatacaattcacatcatatggtttataacctttgaaactgccttatctcacttgctttaagaattattcatctggcatgtcataatagcttttactataaatcagaaagcataattaataa

SEQ ID NO: 80432 - DNA, 100 bp, Arabidopsis thaliana landsberg
  unsure (1)..(100): unsure at all n locations
ctctctgactcttcaaacctagagggatccatttttgtgtgttgtngtgaacacacagactgaatttatttaagctggagggtcattctaaggtaggagg

SEQ ID NO: 80433 - DNA, 540 bp, Arabidopsis thaliana landsberg
  unsure (1)..(540): unsure at all n locations
tttccagtgacttgcgcgaaaagaacatgacgatctccttacccttctgttcacatcatatatgtagttacgtcacgagcctcagcaggttacgcagagggggccgatcatatcgccgtcatccgctctggatgcagaacacaaatcaatcccgggcgtagccgatcagaggctttgcaggcctgaacaagatcaagagcacgatgcctacaatgccgagcaccgcccaggtcggctggttcaatatcaacctgatgccgttgttccagagcgcgggcgagatgccgtcaatagccgcctgggccgcctgctggctcgcctgattgatgtcgttccagaattcgccgagacgcgtcaggcgcaaggtctggtcggcgatcgagcgtgcgccgtcatagaccaggaaaatgaaggcgcccgccagcagcaacaggccgataaaccggaagaacccgcggatcatgcctcttcctttntgatggatgattgcctcggcaatagccccgagagggggtaaattcaacccgaaccgggcttttt

SEQ ID NO: 80434 - DNA, 418 bp, Arabidopsis thaliana landsberg
  unsure (1)..(418): unsure at all n locations
cnnnnnnnnnnnnnnnnnnnnnnnnnnnnnnnnnnnnnnnnnnnnnnnnnnnnnnnnnnnnnnnnnnnnnnnnnnnnnnnnnnnnnnnnnnnnnnnnnnnnnnnnnnnnnnnnnnnnnnnnnnnnnnnnnnnnnnnnnnnnnnnnnnnnnnnnnnnnnnnnnnnnnnnnnnnnnnnnnnnnnnnnnnnnnnnnnnnnnnnnnnnnnnnnnnnnnnnnnnnnnnnnnnnnnnnnnnnnnnnagaacttacgcccccttgtggaaatgcccggtgccgtaccaacgatagctctgaagcatgtgtacagctctaatgagacgtatcttgcagtcaggtaataaatatccggaacttgcaaatggagtcctgactactgctgcttggaagttgaaagagatcacatttactttccaccatc

SEQ ID NO: 80435 - DNA, 240 bp, Arabidopsis thaliana landsberg
caacgcgcgttctacctgactactcccgacgaccggtccttttccacgatttcgacggatgacatcatgcagggggcgttcgggctgcttaccgaccgaagttggtacggtcaggaagatgctcctatgatctggccggactgcctcaccacggaccagatggtcactgtcatgagtgaggaactggggcggcacaatcacctaccgggcgatgaccatcgaccatttggcgaagagcat

SEQ ID NO: 80436 - DNA, 473 bp, Arabidopsis thaliana landsberg
acctacgaagaatgtttcggagagatctgagagttagagacttcgaagaaacggagagagcgagagggactcggggaaatttgaaagagaaatgtgagagaagcttaagagaaacgcgatgacgccgaaatgggaagtggtggagagcaattttataagggagaggggtaccggtttattcgtcgtttctcacgccaattaacgaaattgccatttgtaattgacggaattaccctcttcgaatcttctatgaccaagtgtgcaggtgttcgcgagctaaccaattaaaacttaacacgtgagcaatactctatccttaagtgctacttcatctccagcgaaaatttcgatatttggtgatgttgtctgaccaataagaaatcgtcatttcaatcaattatgataaagtttataatgattaacaatactctaatatatataatatgattacatatctacatctattaatgata

SEQ ID NO: 80437 - DNA, 502 bp, Arabidopsis thaliana landsberg
  unsure (1)..(502): unsure at all n locations
gatctactagaatatctctccagaccaaccacgagtaaagtaaacgcatcatgtcatgtttttgatgattagagtctttctttatttcaaaagtatatccaagtagattagtgttgtatagattacgtcatcattgtgacatcatctcgtaaccgcttcatgtcacgttgtcatcccaaacacatcatcatctgacgtaattttaacgttgatatctccgcgttcttttactcttttacccctggtcccttttttaacaattataaaaattatgattactattttgaatttacagggaaccaaaaaacccatttataaagtttcgaaattaaatatcctaactaacttggaaaaatatctccattttcgttttttggtggtttaaattgtaactaggaaactaaaaggacttaagagtaaaagaggtggggacgggtgnttttaagtcttttttaagagaggtttcgtgatgactaatttntttcctttaaaagaaagtcat

SEQ ID NO: 80438 - DNA, 523 bp, Arabidopsis thaliana landsberg
  unsure (1)..(523): unsure at all n locations
gctatatatattctttagcattatagagataataaaagtttcttaaagtccatttggtggaataatattgggtctgatcattgcgaatttttttattctaaaaggcttgaaagaattttcaaatataatattttcaagaatccactcaccatgttataatggaatgtacattgattaaaaaaaaaaagagtagtggaatatacagtgagtgatacatatctctacatccacacatttgcattttttttggagagtggttgctttaatagtccagcctaaaatttagtataacaacagatttttttttttatcattatatagtagattttggctacattgctttggagtttcgataagcagagcatatatttcttttgtctcttttcaagagcatatatatgctaaaacatagtttatgggtgtcacaaaaaaaagaaatagttgatgtcgattaatatatacttgtagtccctactgctaacttttcagatttattntaggtctgttttagaatatcatgtta

SEQ ID NO: 80439 - DNA, 125 bp, Arabidopsis thaliana landsberg
  unsure (1)..(125): unsure at all n locations
cgttaactcttttctttttttggtaaagcctataaatacgtaacccttaaacttctctcttntgtttgaaatgatcttagctattgctttgacatatacaaagtaaacgttaaataagaaccggc

SEQ ID NO: 80440 - DNA, 450 bp, Arabidopsis thaliana landsberg
  unsure (1)..(450): unsure at all n locations
tatttaggtatgcctagttatttgatgtacacctaaatattgtcgaattaatagaggtgacaatataagacatagcattcatgcaatcttaaaagtctaaaaaaaagtataatttatatgattagtttggcatataacacacacattccataatttatatacttaaaatttttgaagaaacttctaatctttctatcttctcatttatatatttatttttaataatgaaactatgtgaaactactgaggagatggttagatgatagtgaggtaagatatacatccagccttttattattgtgagtattagatattaatgaaattggatnnnnnnnnnnnnnnnnnnnnnnnnnnnnnnnnnnnnnnnnnnnnnnnnnnnnngatagagacgacatttgacatttgaccattgaacgttctgtccattctataaataacattatactctac

SEQ ID NO: 80441 - DNA, 506 bp, Arabidopsis thaliana landsberg
  unsure (1)..(506): unsure at all n locations
acttaccatggtcatggaaatggatgattnnnnnnnnnnnnnnnnnnnnnnnnattcctcttcagaagctactacgctcagtgaagacatgagcggtattacgatgatggacagcctgtcgctgttcttatcccttttggcttcctgtgtgctgaaggccggctggctcagccagagacaggcggcggcgatgatgagcaggatggatttgtaatgtaagatgagttccggcttccccgctaaaggtgcaatattgagcagcagnnnnnnnnnnnnnnnnnnnnnnnnnnnnnnnnnnnnnnnnnntctttaatcttcagcggtatcttaaattcccgctcattggcgctcgctatcttgaggtcgtaatgcactttcacagagaagttcttgaaaggcgacttctcaatggagaccgattgcaggtttttccgaagatacagcatcttttccctttcgcggggatgtgcgtgctcaagcgtaatggcatcggataaaaaaacggc

SEQ ID NO: 80442 - DNA, 604 bp, Arabidopsis thaliana landsberg
tggccctttaaacattcacttatgtgtttctgcaagttagtagtttggttttacaagagcatggtgctttgtgacagagggctgaggaggtgttttacatgaaaattggatgtcctaacctatgaaaaggaagagcaatttagaggctacattcattctgaacattacagcttaaaattacacattcgttatgacgcttgtttgctaagttttttattcttcttcgaaaatctgagcttttgatgataacttatatatccattaatcaattacgagtaacaaatgcaaagaagaagcatgttccatgaaaaaggtcttactatctccaataacaatatctacacatatcatccttcataaaacgggattcacattatcaatatgaaatcaaaaacgtggaggagccatcaattcactaagtgaccttaaggagacacacaacaagacacaaagcataatgattaacatcaagcagaataagattttacaatcgaatattcaaactgtagtgatttatatctttttacggtgccacattatgcgatcatttgaaacataataatatgtccgatctccataacttaataaaaaaatcacgtaacgc

SEQ ID NO: 80443 - DNA, 206 bp, Arabidopsis thaliana landsberg
gatttgttcttgattgctcctcatctctaaatttatgtttctagtttagcttttgtgtatcgtacattatatatatcaaaataaagggttgttcatatggggatacatacgatcaaatcgtttcaaaggaaaaaaggaagaaaaaagtggtgggtatggaatatcgataaagacagtagcatatacccctactcctccccctctcc

SEQ ID NO: 80444 - DNA, 535 bp, Arabidopsis thaliana landsberg
  unsure (1)..(535): unsure at all n locations
aagcgagtgtcttaatgtctttgtggctgatagaaatttattgttttgcggtatctctatctctgaccaagtatatggggtttatggttgtcatactttatccacagaagtagcttcgaatttgattatgtttttcgtattttgtagacacacaatttaaccggtaacaaaatatttcggcgtgtgttttggattggcatattacaattttcgcatagctataaagttttgaatagtattacacttttagttatccatcaccaagtggggctcttctaatctacttgccatttgtagtaacataatttaatgatttgatgtgcgtcgtttgtcttatatttagcctgatattgagaaaaagaataaattattcctcaaacttatctatatatatagcaaaccaatataatattatatncgcaaaaattgttatatagacgattaataagcttaatgaatatgattaattgaaactttgacacttttgaatatatatttttagttattattagaacacagaagaaccatgatgcgt

SEQ ID NO: 80445 - DNA, 454 bp, Arabidopsis thaliana landsberg
ttgcgtatatgatggaatttgagacctgctttctttttattctttttattggctcgaggtggctttcatggggaataggctaggtaactctaatggagtgggaatttcgaagaaatccaggtctttagatcttaagacgctctataagtctagcatttccaaggattcagtgaataagagctttaaaagaaaacataggtctgggattgatggtgatcagttgaagcaggacaagaagagcaggaaagttgtttctctaagtagttttaagaaagtaggtagccagaacgagagtattctggataaggcatgcaatggcaccactatattgcacaatttggaggactccaaggaggtgggtttggatgagacattgcgtgacagtaatgggcttcaagggatttctgttggtttggcaagtagtacgatttatgttcctagacgcaagagagat

SEQ ID NO: 80446 - DNA, 518 bp, Arabidopsis thaliana landsberg
  unsure (1)..(518): unsure at all n locations
ctctccatgattgcatacttgacatgcggttgtttttggatatattttaaatatatatatttaaccatggggagataggggtatattccatatatatgaagaacaataacatattttgtttaagcagattttcctgtagattcattcatatacatcatttgaaatgttttaagaaaggccttcatcactcgttacagatatatccaatatacagcataaatatgcatacgaaggtttttaaaatttaaacccaaataactttgctatccaaattaatgttcactttataaaattgtggatttcttcaaaaattgttgggaaaacgaaagaaataaaccgtttgttttttaatctagagtattctttatttactaatctgatgaataattttacaaatctttaggttcaatttttggaaccttctaaatttttttgtaccatatttaaatttcacacggtncgagaagatcattgtccaatagttttattttcttttaaaatatctaatatttaaatat

SEQ ID NO: 80447 - DNA, 379 bp, Arabidopsis thaliana landsberg
  unsure (1)..(379): unsure at all n locations
cccggacccgggcgccaggcgcggacgccacctctttttggccggttttctcaccgtcggcatcccgggggggaactgggggtctaggtcctgtctcctcgaccggacagtgctctcacggcgcaagaacgggcgtgctggccggcctgggcgcggaccgcggacctgcggaggagttcacgtacnnnnnnnnnnnnnnnnnnnnnnnnnnnnnnnnnnnnnnnnnggctcccggcgcctggctctggacccgggccgtgcaggccggcggacggctggtgatcgcgatcgacggcaaggccgtccagggcgcgaaggacaaggccgggaaggccccgcacctggtcgaggtcctggcgcacggcaccggcgcggttct

SEQ ID NO: 80448 - DNA, 506 bp, Arabidopsis thaliana landsberg
  unsure (1)..(506): unsure at all n locations
gtgctgtctggaccacaattagtcccttcttatgtataagaactttcttaacttacacggcatctgggatatatgtgggaatgacccacaacactaatttacaatcaaaacttaattaattgcctttagagagacatgaacactttaatcatttaatctggaaaatgagctctctccttcattccgtttgtttccttttcctacaaagggatgtttttcatgagtattagaataagtttagatgtctcctctttcccaaaaacagaatcctgggtgaatgaaagtggtttcgagacacgctttctcgatagttnnnnnnnnnnnnnnnnnnnnnnnnnnnnccttggctagtcgatgtcgatataaggcaccattatgtcttttctttttaagcggtactctaaaaagtataaaacgagaaatatcggctaataacttttggcgatgcgatcgtatgactattttactttttcagtgactactagttgatatagtaaatgaacaca

SEQ ID NO: 80449 - DNA, 524 bp, Arabidopsis thaliana landsberg
cattccttaatagaatcctcgatgaatagccgtaaagggttttattattcaccatcttaattataaataagggcccgcgactcctaatttcatcgagagcgaaatcaagattcttctatgcgtgatgaacactccatcacaaaatctattattaatctccgattcgaattcacaaaccctaatttcgcaatacatcaataaacctgatcatccaaaaaaaaaagatccatttgagattctagtactaactgcaaaaacaaaaaccctaattctagaaacggacatgtatgaacgtaccttgaccttttgcgattcgtgaagtggggattttggcagacggagaagaatggatcggagatttctcgatccatagggagagatgtggaaggaggttatggttaagtagatggtaacggcaattaatgttatgcgctttccctctgtattattagcttaagttgcctaaaattaacctttcccttaatttattccaatcttaggaatcattagaatcggatctttta

SEQ ID NO: 80450 - DNA, 441 bp, Arabidopsis thaliana landsberg
tcttatgcccttttactattgcaactttcaaattaagaacaacaaaatcatcatccatgggtgtggctcacataagatccgtcgctatgcacgagtggatggactgccttgtatgggtattttcatgcttgcatgtccttatattgtttgtcatgtgacccttatcttacgttgaaaatcatcacttgtaaacctagaatgcttacatttgtatgaaatatgtacattcttaacaaaaataaaaacggcgcataaccgatttagcatcttccaggcctctgaccactatcattatgacgatagaatacagttttgaatctccacccgaatgacatgtttaatccgactactctctttctttcaaactgtgaaaaaagatcctcgctaggctctagacacaccgaagtatgggagagataaacgctagtctgtataatataa

SEQ ID NO: 80451 - DNA, 563 bp, Arabidopsis thaliana landsberg
  unsure (1)..(563): unsure at all n locations
atggcattctcagcaattattttttaatgagaagattttaagatttttatttgttaatactactgcaaagattgggattgggtttgttatttctgtaaatgctaaatttaaatctccatgagatatcaagaaaacaaaaaccgaaaaccaattaatgcttttatacacattatttattacgttcaatgtctctcatataaaatcaagaaaattatatatcattatgttagttatcatatatataagtgtttaattaaatcatatcaaaatctaatccatgacccattaagaagacggattctttattcattcaaattaattaagatatttgtacattaattttggattacataaatgcctatgatatatgaaataattcttgcattatttttaaatgatgacttaggaaaaaaaactctatcctatttttaaatgaactgaatcacgaatgcggaccctagtgccccaattaagattataaatcaagttttttttttgtaatatcattatttcacctatgagggtaagctnttattctctcattctttggcatctcaatgatt

SEQ ID NO: 80452 - DNA, 643 bp, Arabidopsis thaliana landsberg
  unsure (1)..(643): unsure at all n locations
gctgtctcgatctacaatactctgaaataaatcgacaaaaactaaaaaccaggggnnnnnnnnnnnnnnnnnnnnnnnnnnaatattttcaagagatggtgaaaggtaaagaggtgttttgtgtataaagcatttctatataggaacactggaaagatacaagcaggggatacagaagtaaaagaatcaaagatggtaaaagatgtcgggataagtaaaagatattgaccatagtgaagagggagggtggttcagagataggaatggcaattttctaaaacaaaagaacacccagacttttaggcagctcctatcagcttatatttagatctcatcagtagtattaccaactacctctcctgggtgaacgtgttctttgtgtacaccctgccatttgtcaggaatgttgacatctagtaggaaggatggtgcctgctaatcctaggaataagcatcggcaagacacagttctagcactcaaagacagagatgacccgaagtggaccctctaccaatgtccactgtcctaggcaacagagcatttgtaggagacctccttcgtgggtttcttttttttttttttttcttcatgggacccttttgacctgatgatgacctagctacaatataatgaaataagatg

SEQ ID NO: 80453 - DNA, 590 bp, Arabidopsis thaliana landsberg
  unsure (1)..(590): unsure at all n locations
ctatttcaccatctgaatatggtcgcaaactgttgctcggctcgacggcgctgactatcgccacgacggctgtcagcttcccgacaccggggcgcatatcacttgagggtgttgcgaccggtgctggcgcaaccgtctcagccatgcccgcgcatcagacaggcgatttgattctggcattcgcctggcgcaacaacagcaccactgcgccaagcttgccatccggctttaccgcgctatcttccggcgctgtcggcaccacggcggcggcgcaggtggcctataagattgccacgtcggggtcggaaaccggcggcacgtggaccaacgcgacagagctgacaatccatgtctatcgcggtttcaagaggtcatcgccgctcggcgcgacggccgtcaatgtcggcacaaatacgacactnnnnnnnnnnnnnnnnncgctgcagagcaccgccggcaagagctgggtggcgatgttcggcgcgcatgcgcagcacgaccagaccggcatggcaagcccaccctccggcggcgtcaaccgcacatcgcagagcggcagcggcggcgcgctcgtcagccatgacacgcgc

SEQ ID NO: 80454 - DNA, 353 bp, Arabidopsis thaliana landsberg
aacgatagtagacctaactcatatgatccttttcattttctgcaaagcctatactataggatagggggggagggtaatacaccgacaacgaggtggcacaacactagagtatgattggacagcatcagaagctatgatggagtagaaccaactcattccatgagaagagctgagaagttttctttctgtggatggaagggtgctcctaaacatgataaacaggactatctcaaggccacattaatccatatgtcaccaatcgatgaaaatgcaactaaccattgagaaaacacaacgctgcagtgaaggtcgcaccaaattaatgtaagacaatagaactcactgcctaacga

SEQ ID NO: 80455 - DNA, 486 bp, Arabidopsis thaliana landsberg
ataacgtccaggccacaatccatatatgaaatcaatgcacgctcatttgattatccttaactttatccgaacccaatgcccttgggatgtgtggggtatggtgttatgaatcgactgctttttttgtaaaaagacaaaaaatcaatcatatttttaataaaaatttcgatacaataattacactaaatgttcgtcagaatatacatgggccgaatgtttgttttatttggatacggacatgtattccttattggtctcgaaaattccattaataaatacttgggcctaatatgtgacccaaaagaacttggtctcaagcccaataactctatttcgtcatcttccaaattgtttgggcacatatcaaaagacaaatatgagagagtcggattgttgttctctcacacagacttcttcactcggctctaccttgaaattctactttggtgctactcttttcacatacctagctgctgtatactatac

SEQ ID NO: 80456 - DNA, 577 bp, Arabidopsis thaliana landsberg
  unsure (1)..(577): unsure at all n locations
gacactgaagcttccgagtcatcaaaaaagataagagcatcatcaacaaaaataaattatgcaagtatgagaactaaaaatatacgctttgaaatatatgcaagtaaagaataagaaaataacaaattatgcaaggatttttcttgctatgaaaattggaaaggaggtatagagactaattactttagtaattcattaatttctgcgaatctttagatacttaattcacacgctttgtgagtttgcgtcacaaacaacgatgacgtggtatgaaacgcattaccagccaattggatttttgttcttttccattgggagtggaatcttataagatagtattaacagtttaacataatcagagaacgagtaacttacatttctacggngtttaaagttatattaaacattctaagctagaatatttatctntataaataaattttgatgatgcattgcatctatcctctgttgttagacttggggagcttgccatgtacgtacgtagttggatcaaacacttcagaacatttctcaccatcaagcctaacctcacgccacatgaatatgtcagactttt

SEQ ID NO: 80457 - DNA, 414 bp, Arabidopsis thaliana landsberg
  unsure (1)..(414): unsure at all n locations
ggggtatcgatcaacacctttatattgtgtcgtgtcatttaagattgtcctgtatggtgtcagtgtcggtcggcaccgggtctgcaactgcgagnnnnnnnnnnnnnnnnnnnnnnnnnnnnnnnnnnnnnnnnnnnnnnnnnnnnnnnnnnnnnnnnnnnnnnnnnnnnnnnnnnnnnnnnnnnnnnnnnnnnnnnnnnnnnnnnnnnnnnnnnnnnnnnnnnnnnnnnnnnnnnnnnnnnnnnnnnnnnnnnnnnnnnnnnnnnnnnnnnnnnnnnnnnnnnnnnnnnnnnnnnnnnnnnnnnnnnnnnnnnnnnnnnnnnnnnnnnnnnnnnnnnnnnnnnnnnnnnnnnnnnnnnnnnnnnnnnnnnnnnnnnnnnnnnnnnnnnnnnnnnnnnnnnnnnnggggggggg

SEQ ID NO: 80458 - DNA, 537 bp, Arabidopsis thaliana landsberg
  unsure (1)..(537): unsure at all n locations
tgaacctttacacatctgccaccccaacagctcatccctttcttttattcttgcctaatttcagagctcaacggtaccgggaatgaccctattttatcttctagggaagcgacaatcagagaacccgcaggactctcagaacactcaaagccctgagaaccctcagaacactcagagcccacagaacccggcttcaactaccatcgatggtgcttcaggcacttccgctaatggacagcgagagactgcatcaactactacagacacgaaccaagacgcgtctgtcgcnnnnnnnnnnnnnnnnnnnnnnnnnnnnnnnnnnnnnnnnnnnnnnnnnnnnnnnnnnnnnnnnnngggccatcctaacgcacagtcaaacaacacacttgggcccggcgcggttgccggaatagccattggctgcttggctgctggcttgattattggaatcatcgtcggatggctccttcgccgggccaagagccgttcgaagcatcgcagaagaagacatggaagcgaagagagggtctagatact

SEQ ID NO: 80459 - DNA, 379 bp, Arabidopsis thaliana landsberg
cataatattttgaaattatggcagcgtatcaagtcacgagggacaaatgctgttttcattcgcgcacatcaattgttactcatgcatatttcgtatatctatctgtggcagatagaattcctcaaaaacactaaactgcctcaagactctgaaaggtaaacatagctttctttttttctttgcctccgtttcgtttctgcatgcgacactgaatgtttctctctttccatacctataatttgattctattatatcaatattaatgaacacacagggtaattcaacttatatgattctatttacactagtactacatttgtggtttacgaagcttgggtggtctctctctcttttcttgccactgaactattggattttt

SEQ ID NO: 80460 - DNA, 526 bp, Arabidopsis thaliana landsberg
cgccaaaggtcattcttaggctcgcttgacatgggagccaccggatctaaaactttgcacttagttggaatggatcttgctggcaacagtggggattatacccgctcgttcaatttagttgttgatacaacaccaccattaatcacatttaatcccgatccttctactgtaaccaatcagtcctcgtttgtactttcggtgaatgtgatagacgaatctcctgttattacacaaattaaactgaatggctccgcggtttctaacaatagcaccgtgactctaatgcacggtagaaacatttttgaggtaacatccacggacgctgccggcaaccaatccgttttagagaaggaagtcgcgctagacgatgttcggccaatattgcaattaggagtggatgatggcctgctgacaaatcagcctagtcttttagtcgactctcgtgtgttcgacacaggagcgactggttctggtctctatttaaatggagctctagtcaatacatcggccaacaacagcttttcac

SEQ ID NO: 80461 - DNA, 525 bp, Arabidopsis thaliana landsberg
atgcggccgggctaaccgctgatgttcggcacgaagggaattactttggtttttggcctgccgggcaatccggggggggggttggttaccgcgaccgtgttcgtgctgccaacgctaaaccgctggcagcagacgacaaatccgggtggcacgcagcttcgcctgcccctcgccgcgccgcttcccgccaacggctcgcgccggcatttcctgcgcgccacgctcgaaacggcagacggcatcacggccgttcggccgaacctagaaaccgacagcggccacacctcgtcgctcggccgcgcgcaagcccttgtggttcagcaggaaaattccgcgccgctcgcagtcggcagcctcgtcgacgtgatcctgctgcctgggtttcaataaagcgcgacaaaagttcgcctgttcgacaggcgagcgatcggtaaactggcgccgaacccgagcagaggcgcatgaccgagccatccccttctatctccagcgcattccggctggcagagcataccgatcgcgcct

SEQ ID NO: 80462 - DNA, 275 bp, Arabidopsis thaliana landsberg
attaagaccagcttgagaatgacttgttgctaactattttcttttaagaagattgaatacttttcgacatgggggccggatacatattttctattggacgtggatccagataacctttatcagtttatgctttggatcacatcacattttctttagaggaaaatgaatcagtttgacgatattgagttttactgaagaatcttgaagctatattctaaaggtttctttcagtttgcagtcacatgttcttcttttgactctttgaacatgaatgt

SEQ ID NO: 80463 - DNA, 121 bp, Arabidopsis thaliana landsberg
ggctggccaccccaatccgttggtcttgcgggcttatgttactgtcacagccattggaaatggcggctgggcgctttttcagatcgatgcgggtgaatatcaacacatccagctggacctg

SEQ ID NO: 80464 - DNA, 184 bp, Arabidopsis thaliana landsberg
gttttaagtcacttacttctctacgacacaaataattaatagaaaccagattctggtcgggaaataatataatgttaggtttagggtagctcatgcaatatgtctgggggaatcttagaccgtgagatggcgcatcttcgcaaggtcctaccgaattaggaccaaacacttgtgctaaccgctt

SEQ ID NO: 80465 - DNA, 464 bp, Arabidopsis thaliana landsberg
cgacccagttgaggcagtcgaagacgcggaagacttttatgctttcctttgccgcctgccggacgaaaggcttcagcgcattgtcgggatagttcttgtagccgacgccgttcgccccgcgcagcagcatctggagaagcaagttcggcgcatcctcgcggatgcgggcaaggcgctcccacgggtcctccgtgaggaagcgcatggagacgtcgaaggtcgcgccgtcccatcattccagcgagaagagctgcggcagggcccttgcataggtgccggcgatgcgggcgatgtcatgcgtgcgcatgcgggtcgccagcagcgactggtggccgtcgcgcatcgtcgagtcggtgaggaagacccggctttcgccgcgcacccattcgacgaacttcttcgggccgagttcgtcgagcttctgcttggtgccggggggaatatcgccagtgatatagggcacg

SEQ ID NO: 80466 - DNA, 351 bp, Arabidopsis thaliana landsberg
atacttccggggaattgtggcccggtataagttttatgcttcgcgatcatccgtttgggcacgcggggataccgggggggcaggtagcgcatgatatcatgcagtactggttcagcagtgcagatatcatggtggcaggttcacgccaggaggtgtttggcgcggcagtggtggaagccatctcctgtggttgtattcccgtgcttagcaacataccatccttccgcaagatcacaggcaacggaacatgcggctttttgttccctgcgggagatgttacgatgttagctgaaaaaatgctgcacgcagatgcatgcaacagggaagcggcgtaccgggatgcactttcct

SEQ ID NO: 80467 - DNA, 507 bp, Arabidopsis thaliana landsberg
gctacaaacatatcaacagatggtgagacttttaacaaccctttattcggctcgagctctcctgggggcactctggggtacattgcggcaacgtgctcttaactccctatggcttgccaaaccaagagagaggaccatgcctctattataccttaacgaaggctcagaatatgtgagattcttagcatacgaattgacgactttagacacgttgctcgtatacaagattatgagtatactgtcacctgttgcaatggatgagtgtaatgaatgtatcttgaaatcctaaaagatccgcatcattttcaaagccttaagatactaaagagaagcagagactattggctctgtacaatagcattacaacaaatacacacagtcattcaggagctcagcgcacgtagatgatacataccaaagaaacaattgtggttgagttgaaaggaggtgtcgctcatgattacgagacgagaaacaacgaaggcaatcaagcctagtctacgcatg

SEQ ID NO: 80468 - DNA, 524 bp, Arabidopsis thaliana landsberg
  unsure (1)..(524): unsure at all n locations
ctaaacttacatctaaattttaattttagaagattttctaacaaattttctaagagggggggacgagggcaacattttacttctccaaatacggtaatttagtcatatataccatatacaccatagattagattataatggtcacacgataaatatatataccataaaattatgatataaacttgtttgacgataatcttttataaattttgagatcacatattaaatataataaaagtgaaatttttaatccaaaattagttttcttcaaaagtaacatatgctttattatattttaatgtaatattattataattattaaaagaagtaaatttgttacttatatatatccaacacgtttttgattgttaaagctttatccaatgtaactttccggtttaaattttatataaaaaaagtatggacacacaaaaaaaaatcatttatgtgattagttaaggaagggaaatgacaaatggttttataaatatattgatagcngtaattgtagcgagaaaatgtat

SEQ ID NO: 80469 - DNA, 510 bp, Arabidopsis thaliana landsberg
  unsure (1)..(510): unsure at all n locations
ggattaatagttcttgccaaaacttgcccgtgttagaacataaactgaaagggcatcaaaaggagcacctannnnnnnnnnnnnnnnnnnnnnnnnnnnnnnnnnnnnnnnnnnnnnnnnnnnnnnnnnnnnnnnnnnnnnnnnnnnnnnnnnnnnnnnnnnnnnnnnnnnnnnnnnnnnnnnnnnnnnnnnnnnnnnnnnnnnnnnnnnnnnnnnnnnnnnnnnnnnnnnnnnnnnnnnnnnnnnnnnnnnnnnnnnnnnnnnnnnnnnnnnnnnnnnnnnnnnnnnnnnnnnnnnnnnnnnnnnnnnnnnnnnnnnnnnnnnnnnnnnnnnnnnnnnnnnnnnnnnnnnnnnnnnnnnnnnnnnnnnnnnnnnnnnnnnnnnnnnnnnnnnnnnnnnnnnnnnnnnnnnnnnnnnnnnnnnnnnnnnnnnnnnnnnnnnnnnnnnnnnnnnnnnnnnnnnntctgcgttcctatggataggtacaagctactttgcaccactgtacta

SEQ ID NO: 80470 - DNA, 442 bp, Arabidopsis thaliana landsberg
tctttcttttggaaaatacgtttttcctcaatttttttaaaagggtgttgacctatgagaaaaactagggggtaagacatatataacagactcaatagcgtcaaatgataatgaaacaatctggcaagaaaaatggttcgcgcaacggttattaaagatataattcaaactagggtacatacaaacctattgaatttcctaatctacttaaaccaggtttcatttaaaccattggcatgaaactttccaattcacatacttctctaagaattcaactagtgagtgcattacgggtgacatctacaatgagtgttttattcccctacataaaactccatcattaggtgaaaaaaactgttactaacttggacctgaattcgataaatgcttaattttcactttttaactcatccgtattttacaaacgaagagaataaaaatc

SEQ ID NO: 80471 - DNA, 512 bp, Arabidopsis thaliana landsberg
cagaaccattcacatctgaattgatcaatctgccattataattataaaacctttgctctgccctgtgtgacgacaggccgaagagcattccttcttttcggatggattttgccagctctcctattacatcacgatgaggtcccatgtcaaaggcattccacctggacaaggacgttttatacatggcaaatccatcatgatgttccgcaaccggaattacatatttagcccctgcttctttgaacaggcgtgtccaattatccgggtcaaatttttccgccttgaacatcggaataaagtccttatagccgaatttatcctgtgtgccataagtggctatgtgatgcttataaaccaaggtcccttttctgtacatattatagggataccattcaccataggagttgcctccgtaggcaggtacagcatatacgccccaatgaatgaagataccaaactttgcatgccggaaccattccggtgtcgtatactgttttagtgaatcccaatcg

SEQ ID NO: 80472 - DNA, 526 bp, Arabidopsis thaliana landsberg
  unsure (1)..(526): unsure at all n locations
catggggacctgttcatagatacgaaaggttttgtcccataagcattatcacttgtggcacacagtggcaaggaaatccggtcatctggtgatcggtatggctggtcaagattggcaaccgatttggcagcctagaccaaaccatccagatcttnctatattccctcagcctgaacaatcaatgtatcgtacaggtgagtttggttacactcgtttagttgcaaacaaagaaaagctcactgtttcttttgtgggtaatcacgatggcgaagttcatgatactgttgagatgttagcatctggggtagtaatcagtgggagcaaagagagtactaaaatcccaaatctgaaaaccgttcctgcttctgctacacttatgggaaaatcagaatctaatgctttgtggtatgccaaaggagcacgcttgatggttgtgggtgtgcttttaaggttcattatcgggttttttaccccgggaaagacatcttcgtctggaacccgtggatccccagtcagaacgaggaga

SEQ ID NO: 80473 - DNA, 557 bp, Arabidopsis thaliana landsberg
ctatttgttcatatttaaattctttattcttttcatatcataggttttttatatatatattatgtagttatttagtccttgtttgattgtttctatgtatcgaccaaaaaaatatacaaagttgaatcttaaaatattgttttcatattaatattctaaactttggtaaagttgtaagttataaaacaacttgaacataaaaataatgattgaaattaatgagagaacacaaaatagaaaaaaaaaggtcatgagaacagaacagaaacacttttgtggctttcgtgggctaaagacgtgcacgcagacacaaccctaaacatctctccctctctcaccaactctttctctttacccactgcacctacccccaaacaatcccttttaacatctctcattcctctgctcatgattctgtgtctcttcctctgatttctcaatcctctgttttctccgtctcctctgtttttttcacatcaatggaagcgtcattagtgatgagatcagtcttgtgctcctctgcgataggtggttcttcgccatcgacgtgaattata

SEQ ID NO: 80474 - DNA, 572 bp, Arabidopsis thaliana landsberg
  unsure (1)..(572): unsure at all n locations
acggccgggggcaccaagaacggtcattattcctcaagtcagtctctccgccgaccaggtgaaggccgttgggggtggacatattcggcggtatcgtgcgctgcgacctgattgccgaaggcatcatcggcgcggttcatgaagtgggcgtgaatgtgccggtagtggtgcggctggaaggcaacaatgccgagctgggcgccaagacgctggccgacagcggcatgaacatcattgccgcgaagagttttgacgatgctgccgagcaggtggtgaaggccgctggaggtgccaaatgagcgtattgatcgacaagaacaccaaggtgatctgccagggtctgannnnnnnnnnnnnnnnnnnnnnnnnnnnnnnnnnnnnnnnnnnnnnnnnnaagatggtcggcggcgtgacgcccggcaagggcggccagaagcacctcgacctgccggtcttcaacaccgtcgccgacgccgtcaaggagaccggcgctaccgcgtccgtcatctacgtaccggcggcgttcttgaaggattccatccttggagcggcggatgccggcttcgagctga

SEQ ID NO: 80475 - DNA, 606 bp, Arabidopsis thaliana landsberg
cgaagttgcaaatgatgttattgaggattttatgttatgcttttatttatcaggagattcctaagtgaaattctgggtcgggcgtaaaaccatttaacaaattactcatgtttctcatgaacagcgatgagatcctctgttttcatacaagaatcaacttagtaattaattaaaaagcaaacttgagtgtaatgcaaagaagatttctattgaaaaaaaagaccagttctttagttaattaaaaatgacattgccaaagaaaaaaaaaaagagagagcaagatgcattgactaatttcgattttttcttttacgtcttctgcgtttaggtataactgtagcttgcgggatttgaaccaaacttggaacgtacttgaaaacaaatggcctgtgtgatcttattggagaatctccgacatataattctctgtaatatttatcctctccaataatgtagaacatgcgtctgctagtctcattgatgcctcctatataaccatcacaaaacacggccattttctttttctcgtcgatgaagaaactcacacaagaccaatgataacacgtacgttgatcaattgctaagaacttgatccacaacaagttt

SEQ ID NO: 80476 - DNA, 631 bp, Arabidopsis thaliana landsberg
  unsure (1)..(631): unsure at all n locations
tgaccgacgccaatctcaccgaggaccaggtccgcgatctgttcaagggtgacattgtttgcaatgccgaagcgctcgccagcctcgatgcggcgaacatcaccatccccgagatcatcgtcacctacgacatcaagccggccaagagcgatgacgaggcgagcgccgaagacgagagcgatgcgcccgccagcgacactgaaagcgacaaggccgacaacgccgccgagcctgccagcggcggcaagggcgaagtccactacaaggacgtggtgctcgacgacgtcaatgacggcgttgccgcctcggtgtcgttcggcagcattgatgttacgggcgatgccaagagcaccgggcatttcggcaagatgtcgatggaaaacctcgatatcggccggacgctgagcttttacggcatggtgccggccggtgccgacaccgagatgaagacgctctacagcaatttcaacttcgagggcggctcgttcggctcggacgagttctcctgcgatatcggngccatgcagctcgccgaggccaaggcgcggccgctgcagcactcgctgctcgcattcatgcagacggggcgagggatcgaacccgaggaaacgcccgatcccgcgacgatggg

SEQ ID NO: 80477 - DNA, 131 bp, Arabidopsis thaliana landsberg
tgtgagcagggagtgatcactcctcttctatttctacagtgggataaaatctatcacttgctgcagtcaggcgttgactctctctcatcgcagtataccgtgcagtacgactgtctcgccgctttccacgt

SEQ ID NO: 80478 - DNA, 423 bp, Arabidopsis thaliana landsberg
  unsure (1)..(423): unsure at all n locations
cactagctgatccaaaaaaggtattttttatatataagaaattttttaaactctgatggtggtctgttttcgagacgtgaagaataaggaactctttcggtctttgacacacannnnnnnnnnnnnnnnnnnnnnnnnnnnnnnnnnatgataaacgcaccgctttaactctatatcgatagcaccatgaactggcatcgagtaagcataggaactccagaacaggtgactaaaactgactctgttttacttttaactagactagttctcccgtaaccgatgatacatattccttgacgattcagattctcgatctttgcaactgcannnnnnnnnnnnnnnnnnnnnnncacttatgaatcaaaaattaccctgcgcgtggactcaagtacttaactgttgccagacaggtgaggaaaatag

SEQ ID NO: 80479 - DNA, 566 bp, Arabidopsis thaliana landsberg
  unsure (1)..(566): unsure at all n locations
tgggtggattccatcaaaacaaaaaatccgaatatcagtctcattgaagnnnnnnnnnnnnnnnnnnnnnnnnnnnnnnnnnnnnnnnnnnnnnnnnnnnnnnnnnnnnnnnnnnnnnnnnnnnnnnnnnnnnnnnnnnnnnnnaaaaacaatgcagaagccaacaagctgctctcaaggccgcagcgatacccttacggtaccagttacatcaaaccaccgaaaaccaaataagatatggctgccacaggttgcactgctgaccggtgcaacctgtggcaaaatccatatacaggcgctcatttatttttatctgcatcctcaggcatcagctggttaagccgcatggcttcaatgtccagttctctttctacttcgcggatcacagcatcattgtataccgcatttttatatagttgtatcagcagttcccgttcaaactccagtatttcctgctgcgcattgatcaggggcgatagtacgggtattgctgctgtatcttccgctgtttcctttcttttgtgcaaacgtatttccctgctcagcctgtctgcacgcatatcata

SEQ ID NO: 80480 - DNA, 530 bp, Arabidopsis thaliana landsberg
ttttcctggaggggccgggcggctacacgaccgtcaacggcgatttcacggcgatgcaccttggcgacttcgtcaccagccccaactggacctggcacgaccacggcaacgacagccaggtcccgctggtctggatggacgtgctcgacatcccgctcctctccatgctcgggaccaccttcgccgagaaggccaacgcggtgacccagcccctgaccaaggcgccgggcgattcgaccgcccgctacgcccagaacatgttcccggtggactggaagccgacggcgctcgcctcgccgatctcgagctacccttacgcccgctcccgcgagaccctggcgacgctccagcgcaacggcgatcccgacgcctgccacggctacaaggtgcgctacgtcaacccggcgacgggcggccacgccatgccgaccatcggcgccttcatgcagctcctgccggccggcttctcgaccgcgccctaccgctcgaccgacggggccgtctacgcggtcaccgaaggggagggggag

SEQ ID NO: 80481 - DNA, 240 bp, Arabidopsis thaliana landsberg
aaatgtggtttcgtggaacactttggtatcgggtttgattaggaatggtgatatggagaaggcgaaacaggtgtttgatgctatgcctagtagagatgttgtgtcgtggaacgctatgattaaagggtatattgagaatgatgggatggaggaagcgaaactattgtttggggatatgagtgagaagaatgtagttacttggacgagtatggtatatggttattgtaggtatggcagatg

SEQ ID NO: 80482 - DNA, 330 bp, Arabidopsis thaliana landsberg
  unsure (1)..(330): unsure at all n locations
gtattattgaatctgattgattttatttttannnnnnnnnnnnnnnnnactgcttaagcacacctaagcctgatattgcttggcttgactgaaagacttgtgatcaaatcatgagggggagattcacacccatttgcatagatgacgtactatactacaatgatttgatgagcgtttgaggacaatagactaaaagacctactatcagtaactggccacagccaagaggatgcatgattgtacccaaagaaacctcagacgggtttatatcaagctcaatgtcaattatctttagaaggactaactgcacgagcatgttgttgtggaaaa

SEQ ID NO: 80483 - DNA, 558 bp, Arabidopsis thaliana landsberg
  unsure (1)..(558): unsure at all n locations
gcctgtaaccagcgcggaacggcccgcgagcgaacgcatgtctataattttgtctcacctcttgcttctcggataagctgacagcatcatcccgccgtcaacgaccagggtgtgcccgacaatgtatgacgacagcggcgagaccagaaacaacgccgctccggccatttcatccggcatagcggggcgcccgatcggtaggcgcgccgaaattttttcgagcattttgggnnnnnnnnnnnnnnnnnnnnnnnnnnncgtttcaacaaggccgggcgacaagccgttcacattgatgccatcccgaatgtagtccgcggccaaggccctcgtcagacccagtatccccgatttggatgccgtataagccggctgctcgcgcagtgtccggtaggccgcaaccgagctcacgaggattatggccccttttgtcgcccgcagcatcggtcgaaagcgttcggcgcagtcgaacatcgaattgagattgatctccatgatttcccggaggttcgtccgtcgactctgcgcggtgatagcgcgtagcgccgtgacacaata

SEQ ID NO: 80484 - DNA, 483 bp, Arabidopsis thaliana landsberg
aaggaaaaaaaacgtgagaggttaaaaagacaaatattttaagattaaaagctggtcttctcctggtctcaacggaaccggccctttttcgtataattctatttttagtacaagctttatttatctgtctttttcacccctcccagagaagaagattcaattccacttttgttggtgtttggtccaatttgcgtttcgtaatcttcttctctccctaagcttcttgaccgcgcattcattttctttcctccataatccaagcttccgttgcaagctctctctctcttcttcctctttttcgtggttgaattttcctgagattaaacaacacaatctctcaagagcattattgattttgctggaggatatgaaagggatctaagtcttaaattctgcgatcatcttcttttgattcgcataggccggtgacgagctggaaccttgaattcgttcttaccaaaaaagacttgacttttcttatga

SEQ ID NO: 80485 - DNA, 519 bp, Arabidopsis thaliana landsberg
aagcattatctgccatgcatctattgcaaagtggtacagaaaaaaaagagtgtttagaactgaaaaaaggattagtagtggctttatgatcaagtcggttttgattgagttcaccaagttagtggtgccttctcactaaaagctttttatagggattttcatcaaaggtccaccttcagtacatactaagacagataggcaattattatggttgaaaataatgtatgtaaatctttattagtttcacaaatctgcactaacatctagacaacttgaacatatatcttcttgaacatataaactaccttttgaaatttgagttttacgaggaaaactagacgaagttagtgcaaagtataaaccaaacaaacaagattgtttactataaaccaaagaaacgagattatttcagtaaataaatcttaaacaagtataaaaagtccagctttcactttgacaaatgggggacaaaaaaggcacagctgaataaagtttgttaacttttaccagtcatgtgat

SEQ ID NO: 80486 - DNA, 563 bp, Arabidopsis thaliana landsberg
  unsure (1)..(563): unsure at all n locations
tgagcatagcctaagatcttacataacggtaacaattaaggtatctaataagattttattcctacaaaacaatctttttttccaaccaatgggagtttatatattgttagagtcctaacacttttgtgaagaagaatgttggcttttatcgatccatctcaaactgaatctcactaagttaccgacaataatccatagtgtcaatgaattgaatcttactatttgacctcatctttcggttgtaggatttctaacacttatcacttgttttgaatcaacccaagttggagaaannnnnnnnnnnnnnnnnnnnnnnnnnnnnnnnnnnnnnnnnnnnnnnnnnnnnnnnnnnnnnnnnnagaaattgatttttgaaaaaaagcaatgattagtagatgaagttaccattgttctacattcaacanatgggagtcgtcaaatattatatttaccacaataacatttctcaatccttcttcctatatttaagacagagaggtagaagaagaaacgtgtcttaacatgggatgagatatgtacgaacaattactatattcctttct

SEQ ID NO: 80487 - DNA, 570 bp, Arabidopsis thaliana landsberg
  unsure (1)..(570): unsure at all n locations
cgatctttcatgaatgcgctcgatcctgcaggccgatcagctccaccttgccgacgtcgggcacccgttgcagcnnnnnnnnnnnnnnnnnngcgtagtcttgcttggcggcgtaatcgaagtcgtcgccggtgagcgcgtaaatgttgccgtaggtggtgccgaattcatcgttgaagaacggcccctgcacgccctccggcagcgtatggcgcatgtcgctgatcttcttgcgcacctgataccagagctcgggaatcttcgaggagtccatgtcgtcgcgggccatgaacatcacctgcgactcgccggggcgggagaacgaggtgatgcgatcgtactcgccggtttccatgagctttttttcgatccgctcggtgacctggcgcgacacttccagagcgctggcgccgggccacagcgttttcaccaccatcaccttgaaggtgaagggcgggtcttcgctttgcccgagctgggtataggaataggcgcccagngcggccatcaccagcatcgcgtaaagcaccagcggacggntgcgcagcgcccaggcggagaggttgaaac

SEQ ID NO: 80488 - DNA, 480 bp, Arabidopsis thaliana landsberg
  unsure (1)..(480): unsure at all n locations
caaaaactggggcaactaacacagatttatctattttatacaaaaccccactaatgcatagggcttgaggcgcaattcaacgctcatacacaggacaacccatattcctttcccttcacttgagccctccacatcctactgttnnnnnnnnnnnnnnnnnnnnnnnnnnnnnnnnnnnnnnnnnnnnnnnnnnnnnnnnnnnnnnnnnnnnnnnnnnnnnnnnnnnnnnnnnnnnnnnnnnnnnnnnnnnnnnnnnnnnnnnnnnnnnnnnnnnnnnnnnnnnnnnnnnnnnnnnnnnnnnnnnnnnnnnnnnnnnnnnnnnnnnnnnnnnnnnnnnnnnnnnnnnnnnnnnnnnnnnnnnnnnnnnnnnnnnnnnnnnnnnnnnnnnnnnnnnnnnnnnnnnnnnnnnnnnnnnnnnnnnnnnnnnnnnnnnnnnnnnnnnnnnnnnnnnnnnnnnnnnnnnnnnnnnnnnnnnnnnnn

SEQ ID NO: 80489 - DNA, 425 bp, Arabidopsis thaliana landsberg
  unsure (1)..(425): unsure at all n locations
nnnnnnnnnnnnnnnnnnnnnnnnnnnnnnnnnnnnnnnnnnnnnnnnnnnnnnnnnnnnnnnnnnnnnnnnnnnnnnnnnnnnnnnnnnnnnnnnnnnnnnnnnnnnnnnnnnnnnnnnnnnnnnnnnnnnnnnnnnnnnnnnnnnnnnnnnnnnnnnnnnnnnnnnnnnnnnnnnnnnnnnnnnnnnnnnnnnnnnnnnnnnnnnnnnnnnnnnnnnnnnnnnnnnnnnnnnnnnnnnnnnnnnnnnnnnnnnnnnnnnnnnnnnnnnnnnnnnnnnnnnnnnnnnnnnnnnnnnnnnnnnnnnnnnncttttgggtttcgttacttcttatttatgtttatttttacgtagattatgtcttctaataatttttcactgagtctgtatttttagaattttattattttggtttttttacatta

SEQ ID NO: 80490 - DNA, 489 bp, Arabidopsis thaliana landsberg
  unsure (1)..(489): unsure at all n locations
nnnnnnnnnnnnnnnnnnnnnnnnnnnnnnnnnnnnnnnnnnnnnnnnnnnnnnnnnnnnnnnnnnnnnnnnnnnnnnnnnnnnnnnnnnnnnnnnnnnnnnnnnnnnnnnnnnnnnnnnnnnnnnnnnnnnnnnnnnnnnnnnnnnnnnnnnnnnnnnnnnnnnnnnnnnnnnnnnnnnnnnnnnnnnnnnnnnnnnnnnnnnnnnnnnnnnnnnnnnnnnnnnnnnnnnnnnnnnnnnnnnnnnnnnnnnnnnnnnnnnnnnnnnnnnnnnnnnnnnnnnnnnnnnnnnnnnnnnnnaaaccaccagtcgaaaaatgagccgcggacaaaggggggaaggctctccgaacctgacccacctgaacctggaccctctcgaaccacaagaaggnnnnnnnnnnnnnnnnnnnnnnnnnnnnnnnnnnnnnnnnnnnnnnnnnnnnnnnnnnnnnnnnnnnnnnnnnnnnnnnnnnnnnnnnnnnnnnng

SEQ ID NO: 80491 - DNA, 522 bp, Arabidopsis thaliana landsberg
  unsure (1)..(522): unsure at all n locations
atgtttcatgtgatcctctaatgatccaccatctaaatattccattaccaaagcaaagtccttttcacttccaggcgcagccactcgaaaggaannnnnnnnnnnnnnnnnnnnnaataaagccgcatcatacagcctgacaatcttctcacaagcgaatgaacttgcctttacttgagtgatccctcgcgcaacatcttccgtgctcaagattgacgacgatgcacccttcttcttgctgctggacacttccagaagatctccacgactggtcgaggctaagagctttcgatcagacttggtggccggggaaatgacaagagctggcgagttggcagaggcaaagcgctttccgagaccaggtctgcgcagaggatgttgtttggatgatgatgatcgagagaaacgcgctgaggggtactccaaaagtcgctttgaaaaggaagaatgttgcttggtgaggctctttcgatccttgaatgatcctcgcaggtcctttgctgacacactgctgaccaatct

SEQ ID NO: 80492 - DNA, 613 bp, Arabidopsis thaliana landsberg
cctgaagttctggatgccggcagcatccagagcgtttcgccaggcacgggtattggtctgcttgacacttctgcccctgtaagtgaacacgtacggagggtgtatcccgcgttgctcctcgaggaccttgacggcggagggtgacagcggtacacggatggccctgcggcccttggcttgatcggggtagatccacgcggaggcgcggggtaggtcgacctgcgaccattcgtaggctcggttacgtatgttgcggtgcaagccggtttcgaggttgaaggaggccatggccgccaggtggtcggggaggtatccgacaaggcgccgggcttcccacaaggtgaggaagcggacgcggcggttggtcacacggaagcccaggatgcgaggcgcacgatcgagccagcgtcatgagactgtggtgttgcggaccgctcggaaaaccgagatgcgccggtttatggtggatgcggagagcctctagggcgatgagccgtgaccggacatcgtccccacgtttagccgattgagggagctggtaggcatagctgcggtccaacagagcagtcggtcgatgaagctcaaggccgagggcttccactgtttacctgca

SEQ ID NO: 80493 - DNA, 432 bp, Arabidopsis thaliana landsberg
actactaacatagacaaattggatcggagtctttttgtatttgttctaagaaaacgaattcatgtatcgctttccagacgcacagttgttatatcatgaattggcgtttttagatatagtgaaatctttagacaaaaagaaaaagatatagtgaaatctaaccgatccaaattaaagtaaccaaaattcaaaacaagagaaaaaaacaaaaccaagacttaaatatatatttagaatcttataaattcttgatgtagataatccttaaaaaaaacatgttttgattgatattcttgtttacttttcagtgaaactctatgaacaacaaagataaaagtgaattttatttagctcaagcccaaaaagaactagaattcagtttttaatttgggtcatacacttacttaaataagtaggatttaattaaattca

SEQ ID NO: 80494 - DNA, 425 bp, Arabidopsis thaliana landsberg
ctgcgcgcccgtggcgatttcagcgagtggcgtgatgcttttcgagttctgctggcgcagggcatatccccacgcgatatggactggctgagcgaagaggccgccggccacgaattgtttcccaccgtgtcgcctgtgcaaaccacggcgcgtgccatttccgtgccgaaagatttcgtgcctctggccgaaagcctgatctgtcacagagatccgtcgcgtttcgacctggcctaccggttgctgtggcggctgcaagaagaaaaagacctgctgcatatccgctccgatccggatgtcgccaaggcccacgcctttaaccgctcgatccatcgtgatagccacaagatgcacgccttcgtgcgcttcaagaaggtgccgtcagaaacggagcgccgcgccttcgtggcctggttcgagcccga

SEQ ID NO: 80495 - DNA, 401 bp, Arabidopsis thaliana landsberg
  unsure (1)..(401): unsure at all n locations
aaataacnnnnnnnnnnnnnnnnnnnnnnnnnnnnttttgttgttttaatctatttttctctctattgccggggtttactggcttatatgataaataaatctttctggctcccnnnnnnnnnnnnnnnnnnnnnnnnnnnnnnnnnnnnnnnnnnaagaaagaaagaccacnnnnnnnnnnnnnnnnnnnnnnnnnnnnnnnnnnnnnnnnnnnnnnnnnnnnnnnnnnnnnnnnnnnnnnnnnnnnnnnnnnnnnnnnnnnnnnnnnnnnnnnnnnnnnnnnnnnnnnnnnnnnnnnnnnnnnnnnnnnnnnnnnnnnnnnnnnnnnnnnnnnnnnnnnnnnnnnnnnnnnnnnnnnnnnnnnnnnnnnnnnnnnnnnnnnnnnnnnnnnnnnnnnnnnn

SEQ ID NO: 80496 - DNA, 610 bp, Arabidopsis thaliana landsberg
  unsure (1)..(610): unsure at all n locations
tactgttttgacaccaaagcagctgccataatggccgatgccatgtaccacgccggccagcaggcgttttgtttttttatctgagagattaccgaannnnnnnnnnnnnnnnnnnnnaataggacgtgcacccatcgtgaatatatcacgctggataccacccacgcctgtggctgcaccctggaaaggttcgatggcgctcgggtggttatggctttcgatcttgaacaccacgccaaagccattgcccatatccatgagcccggcattttcttcaccggcggccaccagcatccttcccccgctgcgcgggagtgttttcagccatttgatggagttcttataactgcagtgttcactccacatgccactgaaagcacatagctccgtgaagttgggagtgcggccgagtttctgtttgatgagctcaaattcctctgcggtaagccgtagttgttcggcagtcttaacagttatttccatgatgccgcgaaggtaggaaatagtgggctcataccttcaccaccctgccgcttcctgacgtgtgttttttcacatctgtggctgcgcctttgtaggatacattaccgctgccgctgatgctggcgtc

SEQ ID NO: 80497 - DNA, 434 bp, Arabidopsis thaliana landsberg
  unsure (1)..(434): unsure at all n locations
atgccgtcgaggtaggcacgacggctcgtcgcnnnnnnnnnnnnnnnnnnnnnttgtttcttcagcgaggacgggatgcagcgtggccattgcagtctcggtacagttgagggtgcagcggatcgatctgagggggcgcgccgcgcgcgtggctgttcggaggaacggacaggcttcctgacaccactcatgcgacgcgctaccgcagagggcgaataatccgcaccatcacacttggagttgtggtgcgttctataacacggcgcacatagggtaatccactccgtcagtcgattattacatcacgtgatgctttttgtccccttcaatttgcaaatacaacttgagcgcggatactagacaccggcagagacatcatgatgcacggctcgtcgagatacagcgcgcgcataagctgcaccagcgcttcagcc

SEQ ID NO: 80498 - DNA, 429 bp, Arabidopsis thaliana landsberg
gattaaagaattaacaaataaggggcggttttttttgacactgatcttcagaggatttcaggggagaccagggagctacaattagagaaaaactcaatccaagaacgcctgcaccgatcatatgctgttgtggatgaaatggttacaaggtatgagcttttgctctgacatatttgaatcgtcttgtcagatatacaccaaaagaaacgttgccatgtcgctctggctttagagaacatgcataccctattataatgtggtgatgaggacggttcttctttctctgcagggaagtgaagaaagacccaccagttcgacaagtctacaagctactgaccagtattcacagtttatttgagcaaatctctgagaaaattcttatgactgatcggcttagaagagaaacaattgattatgaaaagaaagttg

SEQ ID NO: 80499 - DNA, 335 bp, Arabidopsis thaliana landsberg
  unsure (1)..(335): unsure at all n locations
aaagaaaaaacaaaatgaaaaagaacactaagagataaatcggaaaaacaaggaaaagtaaacgtccaaaaacgaaaaaccaaaacgagggcgagaggaaaaacagaaaaacacaaacaagagaanaaagacccaacggagagaaagaaaaagaaaacaaaggagaaaagaaccgaaaaccagaaacaagaaagggaaaaacggaacaacaaaaaaaacaaaacgaaggggaagggacacaaagacgaaccgaaaggagaaaagagagaaaaaaggaaaagagacaaacgaaggcaaagaagaccggagagggngacagagaccgggcngagggg

SEQ ID NO: 80500 - DNA, 235 bp, Arabidopsis thaliana landsberg
  unsure (1)..(235): unsure at all n locations
gcagagaaaaagaagggcaccacacaccacgacaaagaagaaggaccgcccccacgggcgaagcccaaaagaaccaaaaacacaagcaggagcgagcaccacccccgaaaccaccggagacaacggagcccacccagccacgacagcgccgggcacgaccacagaaaagaaccccnccaagggaaccagccgagcccccggaaggggcccacacagagagcggaacaaagacaca

SEQ ID NO: 80501 - DNA, 263 bp, Arabidopsis thaliana landsberg
  unsure (1)..(263): unsure at all n locations
atggaaacagatgaatagaattctttattgaatgcacccaacgctggatgggtacaagcacagacgaataaaatataattaaaaggcaatcatcaaaacacacagagaccatgagacatgtttgagagataaaaaaaatagaaatctacatatggccannnnnnnnnnnnnnnnnnnnnnnnnnnnnnnnnnaagaccaaaccctttctctcttcgagagtgaaactgaggaaacaactctaacagagcaacaaagggggaga

SEQ ID NO: 80502 - DNA, 446 bp, Arabidopsis thaliana landsberg
cgcgtcggcaatgcgctgagactgcgcggcgcgcgactgtgagtttttgccctgcacgaaattgcacttcttgtcgcgcgcggttcgacgcagatccagcatctcgccatgcagattgaggtattccggccggtaggtggtcgcgctcaccagccgtccggcggcgctcgggccggccttcgccatcagcgccttcaactcgcgctgacggttggcgatgttcttcgcccgttcggcgatgtcgacgcagcggtacgtcacgtactggccgggcgcgaccagcacgcgcgcgagcttgtcgtcagacatgccgcagccgctaagccacgacgcggcgagcgcggcgacggtcaacttgacgatgacagactttcgcatccaagtattcctgcactgaattgaagctggtgcggacgccgggactcgaaccggacggggattactcc

SEQ ID NO: 80503 - DNA, 359 bp, Arabidopsis thaliana landsberg
  unsure (1)..(359): unsure at all n locations
aaacgacaaaaaanaaaanaaaaaagtacggcacaaactcttctaacacttctagnaacnnncanncaagcaggagaacttgcgggaagaagccccanaaccaaccnncaaccannnncannaccannaagcaaaagnanaananaaaancccanaanncananacagaacaaaanaacaagcngccatcaaagaacccggagcgagganannaaaaaaaaagagaggccagacccggggggggncnacncanaccaaaggcaaaccancnancgacnaccagacggcannaaagggaacaaggaacaacaaccaaaaaaaaagaagaaaanncaccacancaacagnangggacccca

SEQ ID NO: 80504 - DNA, 574 bp, Arabidopsis thaliana landsberg
gaccttgttgaaaaggggcatgagcatggccactcacctcactagcatggtattattctcaactttatgagcctgtaccgagttggtaccttttctgagagcttcttttcccttgactgttgttgaatgtaatttgtcttgaatcttttggaagaacagatagtcatgtgcactttgaaactaggttcatgtcaaaacttgtagtaacaatactcagatataactgataatatgatgtacgataatcaagtatgttgtatctggagaaccgaattactctaaattttgtgcttccaagcaaatattaataggaatcttacaagtctaattgaggcttcttagtaaggtgagtggtagatatgtaagagagccccagcgatagttttcatggtagctaaatgtttttgggtataagaagaaagacttaatcatgtatacactttatcttttctgcttgctgaagatggcaaagaagaacacaagaatgagactgaaaccgaagcattgaatattcttggctgtgaccaagctgctgagactatgattaaaaagtgaagcaggcattggcagatgg

SEQ ID NO: 80505 - DNA, 242 bp, Arabidopsis thaliana landsberg
  unsure (1)..(242): unsure at all n locations
ggagaacaaaccccaaccaccaaaaacgngagggagaggagacggaaaccggccccggcgagagacaaaagacggagagggccaaaagccgaggggaggaacacaacagcggaaaaaaaagagggagccaaagggagacaaaagaacacaagaagcacaaaaagcaagcagcacaaggacaacagacagacacagaaaacgcaccacaacacgaacagacccacccaagaaacacagcaagg

SEQ ID NO: 80506 - DNA, 566 bp, Arabidopsis thaliana landsberg
tttggagttgaagacatagttagtattcaatacaattggtacttaattttgagttattcattatgtctactttggtatggtgaaggatactttatgggcataggttctatcactctgacaatattgctggtcaattttgtaggttggattgatcattctcagaattcgagttctactgaaggatgaaaattgccatgaaggtatgtatacctgccatttaggttatcataaaattcttcctgtaaaaagcggacttgttagttgtaagtaccattacgatttttggttagtcatcttagacacctgatactgtggttttttcattgtcggttgttatctattgattctacgagaacatgctttcattcgattttggtttaatttagtagaaaaatggttaatagaaaggagaatataaagtgaactgatatcctagcgagatatatttaattcttctttacatgcaattttttaaatggatctatattagcgatttcgcttgtttgccgaacagatagtgtctttctaattgccgcttcatgtatgttcatgtttaatgatggcta

SEQ ID NO: 80507 - DNA, 587 bp, Arabidopsis thaliana landsberg
  unsure (1)..(587): unsure at all n locations
tcaccgcgcggatcatggccgaggtagccgacagcctgttggtggacgttccctgtcgacgcggcggtaacggaacctgtggtggtgacgctggacggctccgacgcgagcgtcaccgagggtggccacatcgtgatccggatcggcgagcgcgcgaacgcgacnnnnnnnnnnnnnnnnnnnnnctctgccgccgtcgcgcagttggtggagatcgccgtcggcgacggcgcgcacgcgaacatcgtcaccgtcgccgactgggcggccgacgccgtgcacctgacgcatcacgccatcggggtggggcgcgacgcgacggtcaagcactccgtgctgaccttcggcggcaacgtggtgcgcacctcggtgggcgtcgactaccagggccccggcggcgatgtcgaactgctcggcctgtacttcgccgacgcgggacagcacctggagcagcgcatcttcgtcgaccacgacgcgccgcactgccgctcgcgagtgctgtacaagggcgcgctgcagggtcgcggtgcccgacggtgtggatcgcgacgtgctgatccggcagagcgccgaaagcaccgacacct

SEQ ID NO: 80508 - DNA, 444 bp, Arabidopsis thaliana landsberg
cctagctatagcaaaaactatttcctacatgaaattttgcgtgcaacctcactttaccaagctaatgaataagacccaacctgcaggaatggctgagaagttagtggtcggtaacgttataagaagtagctctgataacagaggtaaagataaaaatcaagatttagggatcatgatcaaattcagccagacatgataatttaatagatcaagtcaatgatgggaatggatagagcctacaggggcagtaacaatgtagatgggcagtttacttcaattttatgctacgtataacactacaacgaggcctgagctatctgggaccaaatgttacaggctatctatattaccctatgcatagcacatcctaacaaacattaactcgacctaatgcaagaactactgaaccttattttgtgaaaatgtctgaattttcattttttg

SEQ ID NO: 80509 - DNA, 481 bp, Arabidopsis thaliana landsberg
cacgaacattcaaaacatggtctttcctatttatcgaaaaaaacatggtctttccatatttaacttataaatatattgtacatgagaatatatgggcataacaatttaaaatacgtgacaataatatatatagctagctagctcttaagttgaggcaaaacaaattacgtgagtgtcatcgagactcgagcttttttttttgggtctacagagacttgagaggttaacacggatattataaccatttgagtcggcctattcataataaagtggtggccttgtgggctctaattaaatcatgagagatcgttgctcactaaaaataaagaaattatgaagatttgtgcgaagatgaagcaaggaaactgcctcttgcatatacaagatgtaattatgcatatcgaaactagacaaaaaaagaggttacggatcaaacatattgtgccagaagtacttaccagacacattataaccatcacta

SEQ ID NO: 80510 - DNA, 266 bp, Arabidopsis thaliana landsberg
ttgaggggccccggccccgaataggcggccggcgatggtcgacacgctggaagctcgcatcttatgcggagttacgtttcgatccgtacagccttccgtgagtgctgccgaagcgccttcgatcgcttttttaaaaatctttgcaaactccgcaaaatcttttgtcccccaggaccccattgtggtacttaaaaaccgccgaccgaacccgctcgtttttgaggtcgtatttacaaactagtgattcgcccgccaccaacacttca

SEQ ID NO: 80511 - DNA, 401 bp, Arabidopsis thaliana landsberg
ctgtggctcgctcgagtctcttctatgaccagtgatgtgagccatcccgagcctgctgagacctataaaggtgattcagctagcaatgaggctaagacttcatgttaaagagacaaatcttaaaggagagaagagaatctctctctattcttcttagattattatctctcttattctctctatatctctcttcttcttttcatcaaactttcatgaactcaggaacataaaaaggatattttttgggtggagagacaacaacagaaagcaaagcagagagatagacgaaaggagttctctctactcttctatgtcatgtctctcctcttaggtctctcttaccatgttcatattattcctttatacgggccatctctctgtctcttgctcttccttttctt

SEQ ID NO: 80512 - DNA, 312 bp, Arabidopsis thaliana landsberg
aagaggttcgggaatgcagtcccgacgagtgcaacggcgatggctccgccgattaagtatattgttccttcagaagagacatcaccgacggcggcgacaactacggaggaagaagatctcttgtttttgggaagaatcacattgtttggtgatggtgatccccacgaagaagaatgtttcaggaagttggttgatgacacgaacgtcgtctgcaatgccggtgcgatcgtcataatttaggggtttaagtgactgatttccatttgggggaaagtaataagaaaaggtgattggattttattggaagggttt

SEQ ID NO: 80513 - DNA, 323 bp, Arabidopsis thaliana landsberg
  unsure (1)..(323): unsure at all n locations
cagagacgggacgagcaaaaaaggcgagaggaccgacgggacaagacggccttccgagccttcctggccaaggacaccgagcggagaaaggggaagcacagcccagcaacccccacgcaccccccanggagagaggcagcgacaaccaagccagccaaaccaggccacaaagacagccaaccgaaacacagngaggacaaaaagagacaaaccccgaaacgaaaacaagccggaggcaaacgccacaacaancgccgagaaaccaggccagggaaaagcaggccaaacagacgcagccagaaaccaaccaaaaacaacacgca

SEQ ID NO: 80514 - DNA, 606 bp, Arabidopsis thaliana landsberg
  unsure (1)..(606): unsure at all n locations
tacattatatcatatgaatattacggatttgtttgtaacatcataactactctctatgatactacatgaatttttatgttatttgtactacaccaacattttcgttaaatagttcgagaaattatgtaacatttttttttagtttgaatctatcatacttcatgttgaaatagatcttaatgaatacaatttgtttttcaatgtatgacaattatccctcttataacctattactcatatttgtttgatagtttcacaatttaatttgagatttgtttttgtataaatatcattcaaatataaatagacataatttcaaattatatattatcatattttagttttcttagatttatctttatcattttagatatttataataggaaatattgcattaataataataaacatttaatttatgtgtattttaactaataaaaaaagttgataaagtttttgaaactaatagaagtagttgatagactttgaccaataattaaatacttatgtaaagaactacatttatgacttttgngaactctgaactctgacagacttagttaaaagagcatgntatatatatatttttttttattgaagaagaca

SEQ ID NO: 80515 - DNA, 530 bp, Arabidopsis thaliana landsberg
  unsure (1)..(530): unsure at all n locations
acagaagaaatcgataaccatgtataaacaaatgataggggcaggtttgttggcattggtgttggtaacaggctgcgaggggcctgctattgttgagcaggcagccaacacatctgttccggctgcatacggtgcaggcaatgatactgtaaatacagcagctgttcagtggcggaatttttttacagaccccaacctggtgaacctgatcgataccgcattgcggaataaccaggaactgaagatcaccctgcaggaaatagagatagcgcgtaacgatatcagggcaaaacagggagcgatattgccctcggtgggagcgcgtgcaggcataggtacagaaaaagtaggacggtataccagccagggagcgggcgatgcatctaccgagatcacacccggcaaggaagtgcctgatgtgctgatggattatggcgtatctgcatatgccaactgngaagtggatatcnnnnnnnnnnnnnnnnnnnnnnnnnnnnctgcggtaaccaggtacctcgcaactatggaag

SEQ ID NO: 80516 - DNA, 433 bp, Arabidopsis thaliana landsberg
ctcctcactgccacgcgcaatttctcaaaacgtaaaccctaaaacaccctctaaaatacctgttattgttcttatttttttttgtactttgatatgctagatctttgaatcgtatctcgaggaccctgtgtcgacctcggcccgggaggccccccccccccttgcccccccccataatttccctctcccccttctatttctcccccctccccccccctatctttcccccctccccctatgtcctcccccctccccccacacccccctccctccccctcctctctcccctcctcccccccttctcttctccccccccctccccacacgccttccgtacccctctccctcctttcctcctcctcctcacctcccttcccccccccccccctacctctttccctttcccctcatccctcccccccttcccctcccc

SEQ ID NO: 80517 - DNA, 432 bp, Arabidopsis thaliana landsberg
  unsure (1)..(432): unsure at all n locations
gaaatttatctgggtggaacatatacacaggattagcttgtccttcatgtaattatgatgctatggaatttcgtttacgtcatggaaagaaaaactgctacatgggacatcgccggtttcttcctcataatcataatttcaggaaagataaggagcattttgatggttgtattgaaacaagggctgctcctattacaccaccaggaactgttattctcaatattgatgtaattttgggaaagaatgtagattctcttggaaagaagaggcgcatgatagaagctcagaaaaatcagtggaggaagtgtagtatattctttatactgccttactggaaacatctttttntacgtcacaatctcgatttgatgaacataggaaaaaatgtatttgataatttcatctttacattattagatgacaaaggaaagt

SEQ ID NO: 80518 - DNA, 649 bp, Arabidopsis thaliana landsberg
cttgaagtgaccaagtaaaagtatagtttatatgtagaaataattttattcaataaataatctcacaaggattaggggagtattttatatataactttttggatgaattgcctcaatcaaaacataaagagtaattacatcttaaccaataagttataattactcatgagtagttgactataattttattggattgttagtgtttgtcaatcacttctaatgcaaagtattaaccaattaatgtgataagagtcttgaaaaaggattagtctctatggtctacaattgtgttttaaataatgttatatctttattgaataattttccttgcattactttggttaattccgttgatccaaatctttatccttttttctaaaagcatttgttatctctcttttactttagattcgtctagtagtcaattacttgctttctttcatgattacttgttttttcacaaaaagattaaacaaacatttgttaaaccacatacggagccacatggtcagtgaaaaaaaaaagttttaaagttcattactgatggataaaagttgtgtcacacattttgacttatacaaaacacgcgtttttgttatttacccaattaccaccaaaccccggaaaaaaaaagtaaagaggatacaag

SEQ ID NO: 80519 - DNA, 259 bp, Arabidopsis thaliana landsberg
taatcctattgttggatattttaaatttgggaaataacggattctacaatgaaaataaaatcaaaacataatcaagaattgtcataaagaaaaatcaaaaatcctacatgtgtagatttccattctttagaaataataagtggaaagtatctttcaggatatgagaataaatgcaactaatgaaatgttgggtttacccttaggttataatactcgctgtggacctatattttatacggactgcactttctttcacagc

SEQ ID NO: 80520 - DNA, 470 bp, Arabidopsis thaliana landsberg
acatgtcgtccggcagatggcgcatgcccacgatcaggcggtattgcttttcttccatctgggcgttgatgccccggcgggccaggtacatcaggcgcaggttgcggtcggtgttgatctgggcgtccttgatccagcctgccaggtcggactgccgcccgatataggtggaatagagatcggtggcggtgacgaagccgatctgctgcatggattcctgcaccagctggtattcgtcgctgatgagacgctgctccaccacattcaggtcgatcttcagcggcgcctcctggcccatcagcaccaggtcgtaaccgcggtcctcgatggtgttggcccagatcgtgccattggggaagaccttgaagaaggtggcgatctcgctcttcacggaggcttcgtcggttttatagagcggaacatacagcgtgaagaaaccgttcggattgagatgctccttcaccttgcgg

SEQ ID NO: 80521 - DNA, 372 bp, Arabidopsis thaliana landsberg
gtatatgaccaatgtttcccccatactgtgacccctttatttttattgtcttcttatctatttcagccagggggttttataggaccttaatcagtattaccgtggttataatgattctaatcttatcttccaacaatatttgacgtcactgagtctccatgcgctgtgggcactgacagccacaaatggtgcaaaacaggcttcaccattgccccagaccatcagaagcttctcaaccgatggacggatctccaaccaccgtataacaaaatcaacaacgatccctgccttccaagaaaaataatggttgtctccaaacggctaaattcactactgtttgctttaactcgatccacataagaaatgcttgct

SEQ ID NO: 80522 - DNA, 277 bp, Arabidopsis thaliana landsberg
aaacggttacacacataaaagagggatgcaagcactaggacttagggcacgtattcttatactactcttgcccaagcacgcgtacctgcagatttttgatggcatcgttagagcacattgacttgggcacgggcatagctgtacaccgcggaggtctaccatgatgtcgttatgggatgtgagtggggcacagcgctaagtctttgtaaagctcgcattgtcctgcctctttcgcccgagggctgacgtgctcctgtcctgattacattaaccttgt

SEQ ID NO: 80523 - DNA, 246 bp, Arabidopsis thaliana landsberg
actatgactgatgcatctctactactaactatacgtataacccagctatatagcactccccatgcacaaagaaaagagataagatcatgagaactatttacctttgggtttgattcctttttaataattggagcgtcgaaaagatcttgtggatcaatagttgcccaattctgatatttttctgggaaatctacactagaatatgagagtggcattcagaaagactgagcaatctgcttccaaata

SEQ ID NO: 80524 - DNA, 573 bp, Arabidopsis thaliana landsberg
  unsure (1)..(573): unsure at all n locations
tggagccaagtcaacaagaccggccgaatcggcttctaatttttataatataatttttgcaaacttttcacaagtggggggacaataccagcggtctacgtataccgaagcttaaacgccggtaaaagtgaagaaaccggctgtccaaaaccgacaatttagctatgatgaaactcgttggtcggtaaaaacaaaataattggcggcccgaccaccattggtcgagctctcacgttgctcgaacgccagaatcctaccaaggttataagaataattctttttggtcttattttttgtctagtcacgtagaacaacattcaccagtcaacacaacggtcagtgggtcaatagaattttaaaatttcccatacacaatcggacaacatcagttgttaatcaaggtgaatcaaagagagtgtgatggatcgattatttattgaagcaacacaattnttggtgtggtttcagctaaacaagaagcctnctagtaaaaaagtccgtcctaatgcaaaanaacaacaaccaaaggcggctccagatccaaaaagcttttatctgaaaaaatctaaatat

SEQ ID NO: 80525 - DNA, 529 bp, Arabidopsis thaliana landsberg
  unsure (1)..(529): unsure at all n locations
tgtctgaaaacatctaactggaacattcagtggagtgatttgcttacctgttcgccccctctttttggggggctctgtactacttcgtaatatattctcctcagctctcaagctgagaacattgatgtgatgaaataaaaggccagttctttggctgtcagtctaaaggctatagtgtgtnnnnnnnnnnnnnnnnnnnnnnnnnnnnnnnnnnnnnngctccgggtgaccattgaggctgggtcgacacattcctcatggaattcctaaagggaatcaccttccaaccagtctgctttatttgcctgttatggtatatgcacagaatgtgatggtgatggttaaagctcgtggcttatctgtatctaaaaccgaacgaggacgccagagagcagcttcagagagagttactgggttcaatttgcagcacccacaaggtgacctatgatcttctaaaatgagcgttatgtggggacatgacgctcacttttggcttgtttgcgcaccatgcatgtatatactgcacaga

SEQ ID NO: 80526 - DNA, 553 bp, Arabidopsis thaliana landsberg
  unsure (1)..(553): unsure at all n locations
ttttttgtaaaagtatatgtttataaacatgaaatataaatatttttacttaacaaaacaaaacagagtggtgggatacagtagttaagagagcttaaagcccaataccaatcaaaccatctctagcttatacaaatgatgttattatgacaactaagcccaatcaaataagagtatgtgcagtaaattgtagtaactagtagtatcaaattataataaatacgggtacgtaagtgtaagtgatgtcggaagtaccaaagaagcgggtcagagccgtgttacagaaactgataatgcgacttcaagctaataataatccacgtgtcttgtgctcgtgtgacgtgtcatgatttgatgttgttttttggattttcctttctttccacaaataaataattggtcaatgttgagtgatggagattttctcttgtntaaagtantcatgttcgntaagttatatcccgccattggtccccgaatggtcgacgaggccgacatatgtatgcaaatacatggtctaaaatgaaatttaataacgtcatgaaataatatt

SEQ ID NO: 80527 - DNA, 442 bp, Arabidopsis thaliana landsberg
gcatgtgagattttgttgaagttttgagttctgtttctgttttaatggagaattagggtttagattgtttcattatgagtattgattgcttgtgcttatggtagattgttcgcaaaccagctcacttgttccttgacgagattggtgtggcttacgatgagcaagacacctacgttgtggttaagcacgcggctctgttcacatcaaccatcatgagcaagcttttggctcgtgctaatgtgaagctcttcaacgctgtggctgctgaggatttgattgtgaaaggaaacagagttggtggtgtggagactaactgggctcttgtggactagaaccaccacacacaatcgagtatggaccctaatgttatggaagcaaaaattggggttcgctctcgtggtcatgatggaccttttggcgctaccggtgttaagaggttgaa

SEQ ID NO: 80528 - DNA, 421 bp, Arabidopsis thaliana landsberg
aacacacattcaaacaagagcgagattatagatcaagattcttttcaaagcaaacgttttgactcggacaccaaacgtgaaagtcatgtgggattcttcgactttttatccgttggaaactctgcctcctaggattagtttttttgcagtaactcctaaatttctagattaactatttagtccgcatacgtacgagattatctaggtcgttagcatgtatgcttgatgtgtataatcactaactagtgagctattacctgcgaaaattgtaagacaaatacataatgttgatgtatcacacattctcaatgtctgtaaaatttccatcgagttgttaactatcaaagttatgcgcttgaacggatttgggtaatttggcttgaatgagatgaataacatgtttaaatgtgtaattctgtta

SEQ ID NO: 80529 - DNA, 512 bp, Arabidopsis thaliana landsberg
cgggggactcacggcaggaccatggaccagatgcttcgactcaagtatctccggatcgcacttgtcgcggtgggcatcatctggatcgcagggagcgacctgctgatgatcgtctggcccgcgggctggacctggcacaccgggcactcggactatccgctgatgatcgtcggcgtgtacgccaccctcggcgtgttcctgatccgggccgcgcgcgatccgctggccaacctgggcctgatctggttcacggcgtggtcgagcctggtgcacgccgggatcatggcctaccaggcgtccaccaacgccatgaaccatgggcacctgctgggcgacgtgcccgcgctcgtcatcgtcgcagtggtgctggcggtgctgacgcccaggcagccggcccgcatcgcggcggcctgacgcttcggcatcggggcagcgcgcgttccgtgggcctcaacgaaccagcgggctgaggacgcccgcgccaccgcggttgagcacatgggtgtagatct

SEQ ID NO: 80530 - DNA, 526 bp, Arabidopsis thaliana landsberg
  unsure (1)..(526): unsure at all n locations
caatagggcggggatatggaatatggcaatatatgaaatagctatttcttctttgatcacattacgggccgtttcttatgcggctttttatctttcccgctttaacccttcccgggtcctgaaaggaagttttgccaaagcgaagaccggggcctacatccaacgcctgctgttgatctctcagattacattaacaactgtattcttagttggagtgatgattatggcaaagcaggtcagctatttaaaaaacatcaatataggtttccaacctgaccaggtaatgacaatacctgttcattcaggcaatgcatataaaagttatgcgtcattaaaaacagaattgttgaataagcctggcgtaacggctgtttcccgggttgataatttaccccggaatgactttggaggcaacgactatcaatataaagatataacaaagggggttaaatttctatgnnnnnnnnnnnnnnnnnnnnnnnnnnnnnnnnnnnnnnngttgaaggagatgatttgacccccaacg

SEQ ID NO: 80531 - DNA, 153 bp, Arabidopsis thaliana landsberg
atgggggttgagaagaaaaaagtatctgtgtaagtgaaaagatggatgaattggattataatttaattgatgaggaatataattagagttaaaggtggtgtaagagtgattagtaaaaaattattagaagattatgagaaaaattgttagata

SEQ ID NO: 80532 - DNA, 534 bp, Arabidopsis thaliana landsberg
aaacaggagcactaacagcgagagaagaccgacaatgcgatctatgacaatggcaaacaccacccgccccgggcttcccaagacccgagaggcaaaaaagctcttagccacgtccgaagacatgtttcccggcaaaaaataggtaaaaaagatggcaagaaagctaaacgaaagcgactgaccaatggtggcctccaccgacagctccttgagaatacggcgccaccgaaggctcaccagaaagtagaccacgaacttcaagaccaagagcaccagcaacatctggggaaccatgaggtccttcagcagcccccaatggaagtcgttttcttcaaaaaaatagaccaggatggcaataccaagtccgtaccttagcaccatgcccgcaaatttcttaaaatgaagttttaagtcttgatcggctatttcgaaattatagacgtaagggaaacaccaagtcttgacttgccgctccaatgtcgcgtacttttgcacaagcaaaacctgtatggaaactaaaaaagatctactttt

SEQ ID NO: 80533 - DNA, 551 bp, Arabidopsis thaliana landsberg
  unsure (1)..(551): unsure at all n locations
cacacattttgacacgaaaaattcatatgaataccgaagattatcaacaagctcaacacaaagatcaacattgcagattggacaagttttgagattctttgttattaacttgttatgtatgcagttgctgcatattgttttcagaaatatttcaatcaatatatattcagctataaaatcaatgatagtcctaaaaatcatgaaggtacaagatatgacaacgtttttcttaagccaaattaaatgtccaaagaaacattaagattgatagattccttaacaaaaagttcagaatttttcaaaactcaacaattctaatacaacaaaacgaatgattgtattaggcttgaaaaagcttttaagtgttgaaaagttttgaactcttagggaagaaacatgttaaaactcttaatgtttagacatttagcttaagcaaaacattgccatatattgtgccttcatgaatntaagactatttctaattctataattgaaatttataacaggattgcttgttataatacagtatctatcggagagagatattattt

SEQ ID NO: 80534 - DNA, 612 bp, Arabidopsis thaliana landsberg
tctttttaatcgcctcaataaaatctacttaaacctttgcatactcttatctagttagatcgcgtaagccgatattcgcaagacatcaaaccaatattccaagttattctgatgatctctcttatatatagtgtaggtttatctacttcctagtggtggtcttcccactgttcgtttaattttttagaaaataattgaccgtagatacaatgttatacaagtttgaaaccaatatctaaaaagccattattggtaccgtagtagacgatgtcacaaattagtaatttttaacttctccgatatggcttcaaatgagctagaacatcgttcacgtttttgtcattggatttgacttacttgtatagtactctgccaagtgccatgcgttaaacgaatgttggtaacttacacaagaattaattcgaaacttcaatagaacaagtgttacaattaatacgtataacatgatggagtaagtgtttttggaaaaaagcctaattgtgttgagaaagactgacaagtggataatctgttagtcctataaattatcgatgtctaatttagttgatataagtttctattttctaaatatcaccaggaaaaaataaatac

SEQ ID NO: 80535 - DNA, 620 bp, Arabidopsis thaliana landsberg
aggaaacatcattttttaactgtagacacccaagatatcggtataaattctggtaatagatgcgtctattaatccattgttattgctgtcaattaagattttttgcaatcccctctaagtatacctcggtgaaacctctgaatctactttgcactaacttttaattaattcgtactaattaacgaaaaaaaaccttttaattaattcagaaagacagagaccaactccttgaaaaaacaaattgtttttccgagccacgtgtatcacttggatccgacgattattgtgtccggcccattaagatagtcaacacttattgggcttccaaatatcagctaattagacacgtggatctgattctcttctccgtcttcttccgacaagctcgacggcgacacagccaaagaaactacgcatcaccggtaacgacagagattgctttgcttctggtatttatgtaccaattctgctctcttttttactgcttagatcttaacccatatagagttattatatctgttgctcgtttttgaagttgcccttatactgctcgatgaaatgcctcagtgaatatcttaatcacaaaacccgaataagttcgtttctcttatactttaaat

SEQ ID NO: 80536 - DNA, 584 bp, Arabidopsis thaliana landsberg
tcggccagctccagcgtgcgttcgcgcacccggttttcgagatcgtccttgccctgcttgcgctcgagcgccgtgaggatgtggctgctgacgaactgcagcaacgcgcggtcctccggcgtgtagcggatgccttcggcgtaggtctgcaccaccagtgcgccgcaggccacgccatcgcgcatcatcggcacgccgagccagtcgatgctgctcgggccgaccagccgataggcgccgcccatctgctcgttgagctcctcggccgtacccatcagtggtcgaccgtgggtgagcaggtgcgccgtgagcgtgccgtgccagcgcgcgaacggcatttcctccaggctcgggccttcgttgtcctcggtgtcggcgtaatagaggaagcgcatcacgttgcgctccgggtcgtgccgcacgatgaagaagttcttcgcgtacatcagcgtgctgacgatgccgtggatgcccagcagcatgtcgggcatcttcaggtccgagccggacaggtcggaaatgctgagcagcgcgcgctgcacggtttccgagcgctcgagcttgtcgtgcgagtgctgcaggtc

SEQ ID NO: 80537 - DNA, 557 bp, Arabidopsis thaliana landsberg
cgaggaaaacatgggtagtgatctaagtggacattagtaagatttatgagcaccgattatggattcatcaaggaatacactttagattataaacatagttatgctctaagcaaacagtagtaagatttacgagcaccaactaaagatacatcaaggaataaactttagtttctaatcatcgatgttgatctaagtggacaatagtaagacttgtgagcaccgatatagattcatcaaggaagataaactttagactctcaacatcggtgattatctaaacagacattagtgagattaacgagagccaagaatagatttattaaggaatatgaagaagctaaacattaatgatgatagaagctagagattagtaaaatttctgagcaccaactaaagatttatcaagctagaaactatagattctaaacattagtgatgactataaacacatcgaggaagaactgtgagattctaaacatcactaatgatctaagctatgatcattatgctcaatttcactgtaaagagttagatccaatagaatccagttaacaagc

SEQ ID NO: 80538 - DNA, 575 bp, Arabidopsis thaliana landsberg
aaaaaagtagttacgtttttccatatgtattattaacggtagttttaaattattattctgacaattaaaaaacaatctacaatacaatacgagagaaaatacataatagtagtagtgattagtaaaagtaattgcatgaattttgttttttaaaaataaatgaaggggaaattaaaaaatttcgggtctatatataaatttcgacccactctcttgtttaatccctccttaagcgcctttgtgggtgcgcaaaaaggcaaccaggttcaatgaacctggaagttgtatgttcttgttttattatctccatcatcattcttcatcgctcgtaagcatgctcatcagtataacaatatcatataactctgtaattatttattcacacacacctaaccaaacgaataaacaaatcttttgctttcttgaatttgttatttaaaccaaaattgtaatttggtatatttgcaagcgacttacatgttaacgaagctttgaaactgcagacaaaatgggctgatgaagagaggtatcaaacatctatgtttcaatgcttcacgggctactcatcactttat

SEQ ID NO: 80539 - DNA, 616 bp, Arabidopsis thaliana landsberg
  unsure (1)..(616): unsure at all n locations
aaccatatccgatacaaaatgaagacaagtctcccgttaaatgtcgaatatgtcaactttttttacttttcatcattgtgaccgcggggggacttgtaacgtcttacagactccaacctttgcaacttcatctcatccttgaattttgtaatgaaagcttcgactcgtgaattgagctcctctcttcccattgataactcttttttcaacttcacccacgacggaatcctctccatcaacttctttcccggccgcgcgggagatgaaggagacctccttgttcgcgacgatgacggtgatagcgaagacaacgagggagtaggcctcctcgctcgcgacggtgaacgtgacggcaacggccatgaagatgttgacatttttgtgtctcccctggagatgacgtggtcttgcaacgagttaggtttctttggttgcttttcggctttgactctctcccacatctcctccatggtctcgctctcgtcccncgatgtattggctgatgatatagttatatatacgaagttggagtttttactgggattaaatcaaagtaattaaacgtaatattcattgttcataacgaaaatcagacaacttaacttatcctttttat

SEQ ID NO: 80540 - DNA, 610 bp, Arabidopsis thaliana landsberg
cttattagtggtcccttattgtcttacaatttaattttcgaatcaaaatctatcagccctctcccctactagtacttgtatactcatccaacaagtactcttttgctctgcaaatatttatttctccatatactccaaacttcactgccaaagaatcataacaactgtcttcagtcaaatgatctcttacaatatcataaacaaagtagttgttttacaatttaatctcttagagtaacaaattctagtagaattaaattgtttattaacaatttttaatttttaatatggaaattaaaaatatagaaaatagattttttaaaaaagataaagaaagaataagtaacggtatctctgaataagagtagcattaaatttgcttaagctcctcacatggccctgcatgtgtcctttgtaaatgttagtgtaccccatatatataggcacacaaccatgtcttttatttttatcctttgaatttaacaattttttataatgaaaggagaactttcctcgaatacaaatatacaattataattatagtaattggtacaatgccaaaagtacattaatgtgactatacaattatttagaaatagtatattaattg

SEQ ID NO: 80541 - DNA, 512 bp, Arabidopsis thaliana landsberg
  unsure (1)..(512): unsure at all n locations
ggatccatttatgcaatggacctctccatggcgcctgcagcagttcttccgatatcatgcagatcattgtactttcacctactgaccccgggaagatcggtcccgatgcagtggtatgtacttccaataatcannnnnnnnnnnnnnnnnnnnnnnnnnnnnnnnnnnnnnnnnnnnnnnnnnnnnnnnnnnnnnnnnnnnnnnnnnnnnnnnnnnncgcttctacggtgaacaccaaccaggctacttatacttacgacaaccttaccactaccactttgttccgcgcgctggtgaagaatggcgtgggtgtggcaaaatattccggtatcgccgccaccgtaacggtgctcgacctggtaacgccatccaatgcagggccggaccagtcgctttgtaataccactactgccacgcttgccgggaatgcgcccagctccggtacaggtaaatggatattcgtgtcaggccccaccacaccaactattgntgatgcccttgatcctgcgact

SEQ ID NO: 80542 - DNA, 316 bp, Arabidopsis thaliana landsberg
tgtttggccttaagggtactagaagactgagcagaacctccgctgttgaggtgtgtatacacttcctcatagtttcagcgtggtatacaatagcatttagctttacttaccaatctctgttttctacttaggcgatggtcaagcaaaggccctgctgctgatatagaggcaatcactagattacttctatcatcatggaccataacacgaccttgcatactgatatctaaatgagaaaaaagagctcacctatcccctgtgtggggggactacggctttctgggatcataactggatgagtgatatattgtactat

SEQ ID NO: 80543 - DNA, 607 bp, Arabidopsis thaliana landsberg
tggtgaaaaagagtaatccaaagaagatcaagctttctgattccgttcatgcgacaacagaagttaccaagaaagtattggcagaaggaaaaaagaagagtgagaggagtttatcttatatgtgcccttgcaaatctgagtactatcattgaaaagagactaacacatgaatgttttctgatgcagagactacagcaaaaggtatcaaggaaaacaatgtagcggagaaaatcaaaagaattaaacctgctctcaaaaagaaagaggaggatcaggttgagattaaaatacctcagggcaatatctcaattactgtttcaggcattgacttggctcctgaagatgctggaaatgtatttcagtttttggagttttgttcagcttttgggaaggtatcctctatccctaagcacagtttgaatgattgatcacatgtttgaaaggtttgttaatgggtccttacctgcttcatttgactttctatgacaggcacttgatttgaggaaaggacaagctgaatgtgttatacgcgaaatgttatctgggagaagcaaaagaagacaacaatattccactctcacacagatgataatccaactacttactg

SEQ ID NO: 80544 - DNA, 630 bp, Arabidopsis thaliana landsberg
agctaacaaaaagaacaaatttttaacctaaaccgtgataataatactatactacagttgacacagactctgatggatgatgtctatgactccgatttaacttttcatacttttcattattaccgaatatcaagaaagatcttcctttgaatattgtataggtacaaattatcaaaaataaaaaaaagaagtccaaaaataaaactaatttggccttaactagcaaagagaaacaaacaaactcaaaatcaagataataattagaagaagaaaaaacccatttttgtatatttaaacatgagagaaagaggtttaacaaataaaaataagagtactgaattcatttatagggttgcttgcacatgtgccgacaccaactagttcccttgaagtgtcacatcttttgttgtgttccaataactgtactgctcatatttcagtctttaatacttttaaccttttcacgatcagtataaaaaaatttcttatcatattcgtcgttactctttaactaactacagtatagaagaagaaactacctatttatagaactctgatctcctcggcagtttgctattgggtaccactgctgagtatatagaatccatggagaatagattttaaatttag

SEQ ID NO: 80545 - DNA, 559 bp, Arabidopsis thaliana landsberg
gtattgccccttaaccaaagcatgagaaaaatatatatgttcaacactcggtatgtttaactatttatagccaaactttcattttttcttgctttcgcatccgatgtgggactcattgctttttttcacgtgggtttttaatcacaaaagcattggatgaagctaaatatgatcaatataaactctatttacattagttattgggcttttattggataggtcaaatttcatatttactattattttgaaaatgtgaaaattgtaattataattattaaatctacattttaaacaagaatttgttttttctcgattgtttaaaactgattataatttacaataatatttatttaccatcataacgtttatacatcgtcacatgaaattatgaaaagaaaataaaaaattaaagattctcttcataaaaatttctgtttaccataaaatctctttttgagaataatttcaggtaaccccaagcgaacaaaagttacaaaacccgaaagataccgctaaacccgaacacccccaccgctaattcagtttttccatttctgat

SEQ ID NO: 80546 - DNA, 381 bp, Arabidopsis thaliana landsberg
  unsure (1)..(381): unsure at all n locations
gggacaaacgcgcgaaccatagaaaaaacaaccgaaacttaaaacgccacgaccaaggaaagcaaccgggaggaggagaaaaaaaaggacccgcgggcaccaccgaaggancgaaaagagaaaaagcgagcacggcccaacccaggacacgacggaccgcaaaagacacagcacacaaccagccggacgagagcaagaaaagccaccaggagccaaaggccaagaagacaaaagcaccgcaagcggccaaaccggaggaaggagagcacaagaacggagacacggacgcaaacagagcggaacaaggaagccaaccgaaacaaaaagggagggccaacgaaacgcaccaaggaaacagcggaaacaagggaagaaccaccc

SEQ ID NO: 80547 - DNA, 472 bp, Arabidopsis thaliana landsberg
aaatttgttgagggttgaagctcgatggccatttcaaggaggtggtgaacaaggtttataccctttctttgagagaagcgagagtgctaatgaagatatattgatctttttctttcagctggatttggctactcgtgtacaggttaagactaaatgcagggtttatatctctttcaagatggttgctaatggctctgatgtgttacaatattgaatgatatgtggattggtgtgatatgaaatggcagtatgcaatgaatctggagcagtacgacattgctcaacaactaagagaaaagctaactgaggtatatgaaatgctatgatctgatctttaagtgcaataagttttgaactatttgatcattcaaagatgttagcttttggctagacttatctgtgtattcttgtataccgcaatcgcaacggatgagttgaataacagtctgaggttggtacgtggaagaagagt

SEQ ID NO: 80548 - DNA, 557 bp, Arabidopsis thaliana landsberg
gttgtatgcattctctgtgagcgaactaaatccaacgaaaccaaaacaatcaatatcggttttcaaaagaatcaaacaaaaaaataaatctagaattcgatatttaccttgatggttcctgaacaagaacaaggagcttcaaagtagctctcagcttcttcttcgtgacagattctacagcgattaaaactcgatttcaaatatgtttcatctatgaacaaaactacatctcccatcgtctctgcctttgaattttagatgacaagaaagcgctccaagctctgctttttgcaaaagtatgctctgttttttcttgctcttgaccaaaaaaaatgctctgtttttctgtttttctctgaagaaagaacaaatgaatgagaagagaaagagttcaactttaaaaggtagaatttacaaggttacccttaatttctgtcctttgttccttaatttgttttaattctcttcggtaatatataatcattattttactaataataatggaagctgtaataacaatttcccaaattgaagctttgaccaaagttttttgactt

SEQ ID NO: 80549 - DNA, 598 bp, Arabidopsis thaliana landsberg
atgggcgttaattctctggattatataaggtggggatttttttttgtgtatcccttggctgttttgggtagagacaggcttaattgaactgacgagatgattctaattttgtagcatgaattgcttcgagtgatgtatcctgtgtttattcattgttacatggatctggtggggaaagggcacactcaagaaggtacttgtcaatatagcaaattagatgtactgagtattttttttaccttcggtataagatttttggaaacagtgacttatgctactgtgggaaataatacgtctcttgtattccagctagaaccttctttaacagcttccgcaaagatcatgagatggtacacttacgggatcttcagaagcttgaaggcgtgctttctccatctcatctagaggtttatgataaaccttatatggtcatataatattgataatggattttttttttttttttttttggttattatctttcttatgaccttggttcttatcaggagatggagtttgctcgttcttttagaaaaaagcaggctaacatcaagttttgtcagtagacttgagtgaaaattgactagtagctgtaata

SEQ ID NO: 80550 - DNA, 393 bp, Arabidopsis thaliana landsberg
  unsure (1)..(393): unsure at all n locations
tcacttgtgatgcgggtgaagtnnnnnnnnnnnnnnnnnnnnttttagatttatcgggggtaagaaaatattttactccatctataccgccggggaaactcatgctgtgcaaagacaatattacaatgagaataaaaggtaagnnnnnnnnnnnnnnnnnnnnnttcgaaaggctttttatgcctttccgcaatactaaaaatgaaaccgcccataagataaacagtgatgccacggttaaccaatttatgcccccaggatgagaaggagaatcggttaatctcaatacatgcttaaaaaagaaattcaaagtatctgttccccattcaagtttcaggctgtagatcgcatacttgaaatgaccatgccatgatcacagtataatatgctact

SEQ ID NO: 80551 - DNA, 570 bp, Arabidopsis thaliana landsberg
aagtaacattcgttgctttcaggattcggaatatcagtccgttggtgttgaagtaaagccattttttgaagattgtcatatcctgatggggatcaaggaggttccggttgatctgcttgttcccggcaaaacgtatctatttttttcgcatactattaagaagcagccttacaacaagaaactgcttgaggctgtgctcgcgaaacatattcgactgatcgactacgaagcactcaaagaccgacaaggaaacaggcttgtagcttttggaagatacgcggggattgttggcgcttataacggtttatggacatatggaaaacgtagcggcaagttttctctcaggcgggcttttgaatgtttcgatgttaatgacctgaagctcgagcttagaaaagttgttttgccgccagtcaagataattcttaccggtgcaagaagggttggtcgcggtgcaatggaaacgctcgacacagccggaatcagaaaggtaaacccaaccgattttttgaatcgtatatttaacgaacccgtttacacgcaactcagtagtgccgactatcataagcg

SEQ ID NO: 80552 - DNA, 614 bp, Arabidopsis thaliana landsberg
  unsure (1)..(614): unsure at all n locations
aaatgcctgaactttctattttgagattcaaccaacaaatatcttgtgtatgttactttatataatggaaacttctttatacccatacatatctgtttggacacaaagaaaaagaaattcctttttttactaaaacaaaattcatatatctgtcactttttgttgttgttttcttatgttttacttttaagtcatttacaaatttatatgcatgttacaaacatggatttgaatggtatacaacttttttacgttttgaaaatgtgattccgctgaatgtaaaaaataacaagtgattagtgatttgttaattaaccccacacattttaaattattactaaatttgagaaagttcattcatctactatatcgtagattttggcattttttaaagtcatctatacttagcttaaaattgttatagtcctactaaatccgctatttcataattcagctattttgctattcgattaccagtgaacaaacagttaggttcctagtctaagtgttaaatcagttgaccacacaaaatnttgattttatagataagagtatttctatcaaaatattttgaattttctggactggcatctnntattctaacataattcatc

SEQ ID NO: 80553 - DNA, 549 bp, Arabidopsis thaliana landsberg
aggaattatgttcaagattcaagattcagtactattctaacttcttttgtactttatctatggatgtcttgtttatgattgtataaaaagttttgttttttcggatgggtgggctattaatattataaatcatatgatatgagtgttctgtaaaaaaataaaaatgatatgagtgtaaatcgagaacttaaaaaatcatgacacacgtttatatattaaagaaaaaacgaatataaaatatatggataaaaggagtataacattttcttcattacaataattagatttcttcaagtatacgtgttggtgcgcgagaggtggttgtgtgaagccgaagcaaaacttcttgctcgctaagcctcatataacacaaaaaaaagggttctgtgacacacgtcgatttattttatacaattgaaatatgcttacatacgtatacaattaattaaataacacaacatttgcttaccttgaaaatgaagacatctttgaatagaaatagacatgctcatgaatatatatattaatggtatatactatcatatatca

SEQ ID NO: 80554 - DNA, 344 bp, Arabidopsis thaliana landsberg
gcccagaccaccccccaagggcccccaactccccccaagaaaaaacgcacagggccggccagacacgaccgcagcccaaaagaacacgcagaggccaaagccccaaccgaagcgccccggaaccagaggcaacacaacaccgcgcaaaaaagactccccagacgcagaccagcacccgcggaccagaccagagaaacacagagaaccagccaaccggagaccgaaaagctgaagagcccatcacagaaggcaacggcaagccctctgaaggacccagcaacttccaaaacacatctcactctaactcttggctggcagccccaccctcagtagagaaaaacctt

SEQ ID NO: 80555 - DNA, 127 bp, Arabidopsis thaliana landsberg
ctaaatctgcaaatcaccggatacggggagagatgactaataatatggattcccaagcggaagtccctatttctaacacgagtcaccgtctaacacgatcccgggtacgcgacgcggagtaggtgag

SEQ ID NO: 80556 - DNA, 495 bp, Arabidopsis thaliana landsberg
ttgatggatttattgtatttttttggccgcaaggttcaatgaatggttaggcgtatgtattttttttttcaataatccaagagactagaatggaccacatatttataaaatactatgatgtgtatatctctatacacatacataagtgtcattcagtcaattacagaatttcaaagtagcatctagctactacttaatttatgttatagttgatagtagctatttttgatatatctcatctcactgtatgaacagttttataacttgggtttggtgtttcgaacaacgttgactatatatttactattttaatctttcatacacattttctcatagtggataactatttaaatcttccttttaggtgtattactatttattagtgctgatttcaaaccaatcataagggaaaacaagccgattatttcttttttcttgtattatgaaaatgaaaactcccccttatgagtctatgaccaattaaaataatcacta

SEQ ID NO: 80557 - DNA, 499 bp, Arabidopsis thaliana landsberg
  unsure (1)..(499): unsure at all n locations
nnnnnnnnnnnnnnnnnnnnnnnnnnnnnnnnnnnnnnnnnnnnnnnnnnnnnnnnnnnnnnnnnnnnnnnnnnnnnnnnnattgagatcattagaaatggagcccatatatcgctattttcaacttttataatttgcaaagcacattactctaagaatatcttctggtattacaattattcgaaaaatataataaattcaattggtctaaaaacatggctataaactttctattggtaaaaataataaaaaaagttataagtgataaaatgtggtgctaagataactcacaagagttctaaaatagtttcagcatttgacataataggaaggttattctgaacacaaagttcaatagctaaaatttagctaacaactactgaattcgcatatgtttaagcacctatcacactaattagataaaaattaaatcaataccaacccatactaattaaatattaaaaaaccagctgtaccaagagattgaattgtttactca

SEQ ID NO: 80558 - DNA, 511 bp, Arabidopsis thaliana landsberg
caaaccccgcagagatggtgactttaccttctatccacaacattttatatgtcagacgtgaccaaataacatggggttgggtacatacattataaggctatcacatacctatacggttattgtgttaagaaaatcgatcttcatactagtgccattcaaagttttactacagcatattgttgacaaaatatatagacaccacttttgcttgtctcttgaaaactataaattacaactggaataggtcaggcatgttatatacatcatttaacaagattgagttgcaccatatctttggacactacagaattttaaaatttatatttacactgtataatattaagatctcactaatgaattatatttgtacgaaaattgacaggacaaactatgttgtattctaacgcttttattctggttacccaaacattttttatgtgaaaaaactacttttcttttgatacacacacacactcatatacgtatttagtacacagtttaattattgatg

SEQ ID NO: 80559 - DNA, 487 bp, Arabidopsis thaliana landsberg
gttttgccgggtacggcgatttgggtcttttggctaccaccagtttttccccgcggttgcggattaccacttggttgccgatcattccactcattgcgtgcgtgagcacgttgttttgttgtgttgccataaaattatggtttgtgcggagcagcttttttttgcgccgcggtgatgtaaatggtttgtgtgcctgctgtttttgggggtgaaggatccggggacgcacctcccgttttctcccgtgcgtacagtcctatataaccgctgacaggatgcaaattacatcgcctccaaaacgattttttgtaaaatggacgaactcacgttagtcattctacgaatgttcgatagccgtttcacgaagcttcggtaatggccggtatgaatggaattagtaattactaattgggcggagaggaggaggaagtaccgagattttatatggcttatgatcgactttactgggctttggctagggattcta

SEQ ID NO: 80560 - DNA, 429 bp, Arabidopsis thaliana landsberg
gggggagagcgtatttagcgaatttactacctgatgaaagttttcattatgactaggacggatagattcatgggcgtggggcgtctcttattgagtatcactgagtccattcctactgcgagacttcaatatagtgcctggccctgcaaccgctacctcattcccaaaactaactttaactgaaaactccatttcaccctctaactacaagcaatggacaaactttgtgtgaactaccaacactatcaatgtacctgcattctacccaatatgccctgcacatgcattcctaatgcaccatcttcctccatgaaccaaatacacttcaacaactcctactgagatgaaatgtacataaaacacctgccaatcggtgaagaatgactgcctaaactatgccaattatagacatataaccacatcactatc

SEQ ID NO: 80561 - DNA, 475 bp, Arabidopsis thaliana landsberg
catcccggtaccggtgatgggtggttttctgtgcctgctgttcggctcgatcgcgggggggggcatgaacaccatgatccgccacaagatcgacctgtccgaagcgcgcaacctggtgatcgtgtcggtcaccctggtgttcggtatcggcggtgtgctgatcggcagcggtgacggcccggatgactggggcctgaagggcatcgccctgtgcgccatcgtggctatcgcgctgaacctgatcttgccgggtaatgatggctggaagcaaaagaagctggacgatcagctttgacctgacctggccccttcgcgggtgaaacccgctcccacaggcattgtacaaaacctgtgggagcgggtttacccgcgaagaggccggcaaaggcaacctgacaatcaggccttttcgcacatgtcggccaacaccctcacccactccgggtgatcattcaagcaaggcaccagcaccagc

SEQ ID NO: 80562 - DNA, 298 bp, Arabidopsis thaliana landsberg
ggccatgccgctggcagtcgccacgcaactggcgccaccttttttcgccttatggcgcttttcgaacgcttcagtcgtcggatgggtgaagcgcgaatagatgtagccgggctcaacgccggaaaaaaccgcggcggcctgcgccgcgctgccgtagacatagctcgacgtcagcgacagcgccgcggaatgctctcggttttcactgcgcggctcggcggcccgcactcccagcgtcgcactgccccactgcggatcaaagaactcttccatcgcctctggacttctgcgggcaatg

SEQ ID NO: 80563 - DNA, 462 bp, Arabidopsis thaliana landsberg
aaacactactacagcctcgaggatatggatgcggttcaagaccttattaatacttattcgcatgagcacaccaaatagaaggatgacaattgcgagtcccacgtctgcaaccaagtgaaagtatgatgggtcccacaagcctccactgctatatggatcatgacatgtcaaacaacggaacacatcgcaggatccaaggataagaaaagacattaaagattcatcctaaagcagacacaaggaaataagttacaatacgatacaaaacacacaagaggctcgttctagcgggtaacagcttgcatgggcacgacgaaataaatttgagacagtgtctccgtggctcacctcaaggaaacaaatgactagcttggaggatatggaagccgtatagggactaatgctcgatgatacacaagacatcaagttataaacgggatcacaacactaaccaggcataag

SEQ ID NO: 80564 - DNA, 525 bp, Arabidopsis thaliana landsberg
gattctccgatgaggatattgaagaaggaatcgatagtataatggggactgtggtggaatcgaattcaaattcggggatttatgaatctagggttccgggaatgatcaatcgcggtggaagaagttcttctaatcggattggtaaactagaacagatgatgatgatcaattcatggaatcgaagctctaacggattcaatttcccgttagggcttggattacgaagtgctctcagagaaaacgacgacacaaaattgtggaagattcataccgttgatttcgaacagatctcgccgcgaattcaaactgtcaaaaccgaaactgcaatctccaccgttgatgaggagaaatccgacggtaagaaggtggtaatctctggagagaagagtaataagaagaagaagaagaagaaaatgacggtgacgacgacattgattacggaatcgaaaagcttggaagatacggaggagacgagtttgaagagaacaggtcccggtgtgaagcttgattacacggcgttttgga

SEQ ID NO: 80565 - DNA, 405 bp, Arabidopsis thaliana landsberg
aataccctaaatgtatgaagatatgaaccacccacaagaacaaacatcaaaatttatccgattcctcacaaaatccgtagaaaattcaaaatcagatgagaaatagcgaaaaggaacatcaaacccatctcacatttgagaaatcatatacctgcaacgtagtgatcagccaaaaatctcttttccagaaaacgtaaaagctgtagaagaagaagaagaagaagtctaaacgattgttgaatcttacgaaactcaccagaatgtgtagagagagagacaagttagggaagtaaatatgtgtgtgagcagagtctctcgctctctctttttctgtgtctgctgcgatagagagagtagatttacgttttggtgagagagagagagagagagggaggaattggggga

SEQ ID NO: 80566 - DNA, 581 bp, Arabidopsis thaliana landsberg
  unsure (1)..(581): unsure at all n locations
agatagcgacgatcagcttgtaggnnnnnnnnnnnnnnnnnnnnnnnnnnnnnnnnntgcctgccatgaagcggtctaggtcgttggcggctttcgcgccgcacctataaggcaagctatcgtcaccacggcaaagctgatcggactcaggcgcgtctatacctgataggcgaacgcgccgctggtgaatctcgattgtgtcgccgtcgatgatggtagcttttcccgtgagagattcagcgaatgcagaacatggcatcaatattgcgataacgataagccaatacataagccttcgatgccttgtcgcccaagaatcggtcttgaagcatggtagcttacttttacggattctcacgggactgcttacatgtcggaaaatggagaatactccgtttggtatcacacgccacgcggcgaaagcgctggaaggcttgtccttgataacgggaaagttacaggcgaggggaccgctctttcatcagcggttcttacgttatgaccggtggcagttttatcgcaactatataaacgtggcgacgaaacaaagatgtcgcatctgtactgggcgttgatgatct

SEQ ID NO: 80567 - DNA, 434 bp, Arabidopsis thaliana landsberg
gatagcgccctcgctaaccgcagacctgccgggctggcctgcggcttactgtaccatcacattcttggtgcagctgtgcatgttgggggcgctatatgaactgcgtgaatattttgtgtgcaatgtccggccgaaactgtggttactgcccgcaacacaggtacgtgccgtactggcaggctcctggctgatagccagcgaatgcatggagcccaacctggtgctggccgtctgctgtacgcggccatggtctatgatactgcttacacaaacagggttactgctgggctttacctgtgttaccgccggctatgccagaccgtttgccggatggagataccgtaactaccgaaccagccacccgagccagcatacccatattaccatactttgatcaaacaacattatcgggacgagttgaacttatatgacca

SEQ ID NO: 80568 - DNA, 364 bp, Arabidopsis thaliana landsberg
ttataaaattttaaaaaattatgaacatttcattttaatacacggttaaatctacaatttattaacaattgcctcgtgcttaatggtataccgtaatataataacaaccataaactataaaagataaataattgttaactatatacaatttacaaacttaaatatatgctaaattaaaaaactaaatcgtcttgcggtaaattgtgaggtaaaatataggttaaaatataacaatattggattgttaataattatattttgggtatatcggttaccctttggttatgtttcataaaaaaaaaaatttggattttgaatataacccaataaactaatatgtatttgtgttttaaaactatttcgg

SEQ ID NO: 80569 - DNA, 642 bp, Arabidopsis thaliana landsberg
tctctgatcgtttgaatcaaacatgggttaattaagggagttaatgtttaactttgtgctgcaaatttttgttagttttaaggaagaactttctacagatctgtgtcgatcaaactccaaaaatttaataatggaataactgaagactgttttacacaaataataatcatatccattattaccttatattccttctcatatatggaagaaacaactaacttcctgacaaaagaatataagtatctaagacaatttagatcatttctagttaaactatttaagtgatgcatgatagtttagtggtcataataatataggtttaggattgatgtaattttgttagagacatcttaacgttcacgactttgaaattcaggcttgaaattttggaaattaatataagattcttgtgatcctttggttttatataagaacaagatgtaatattgaatttttttttctggcttatataacgtatagttgaagacgcatgactatgcacatgtgatggctcactgcattttacatatgagagagactgaaaatatttaaaattagattcggttgtgatgataattcaaaagaggttcatgtgttaaaacattgaaggagattgatagatcgcatgcttgtctttttgag

SEQ ID NO: 80570 - DNA, 513 bp, Arabidopsis thaliana landsberg
  unsure (1)..(513): unsure at all n locations
atggcgcgatataaatcttccaaacccccgcgtaggcatgctgggctccgttcacaaacgtgacggttagtgacttctttcccgcatcgaacgcgacatgcttgatgtttgaacttttcggcgtaaagctctgtgccgtcgcaagcgggttctgcggctttattccaagcatggcgcaacctcagaaagtgccttggccttttcacggatatgcagcgggatgccaccagaaaggctaccaatgccgattgcaatcttctgggtctgctgtggcccttcctgcgtnnnnnnnnnnnnnnnnnnnnnnnnnnnnnnnnnnnnnnnnnnnnnnnnnnnnnnnnnnnnnnnnnnnnnnnnnnnnnnnctgccacgccgatagacaacaaacccgccatcttcgaccggcatcactgtgaactctgacttgtatagctctccgcgatccatgttgtgttcctcaggctgaccaggggtcggtgtttctcggacgttgggaaaaccggcgatgacgat

SEQ ID NO: 80571 - DNA, 522 bp, Arabidopsis thaliana landsberg
  unsure (1)..(522): unsure at all n locations
ccgttgatgttcggaatcgctgtctccttttaaacttttacggtgtttcacgccgtttatctcatcaaagctgatatcttactgaagtgtgggaatgtctttaaaagccggctgaaaacgcagatagagctcttcatcggaaagaatcagaatacgcacttccgactgattgagaataaacgcgaattcgtgcaggctgattgtaggataaatcggcactaacacggccccggtttgctgaacggccatatcagcaatcagccattccggccggtnnnnnnnnnnnnnnnnnnnnnnntcctgctgctccggctccagaacttcattttttatattcagggtcagcaacccgcccgcaaattcagcagcctctctaagcaccgacttgcaggaatgcgtctgccatacgccctgtcttttagccgccagcatggtactgcccggccgaagggcagtctgattttgcgccagatcagaaagccgttccataattaagatattttatgcttgatagatgctttt

SEQ ID NO: 80572 - DNA, 552 bp, Arabidopsis thaliana landsberg
ggaggtcccttccctcggggccgaagatggcgggctgctcttgctgcattgactgacggtcactctttcttggacacttttggggctggggtgcagcgcacactggcggtcggttgcacatggggatggcaccggccgctggcctctcatttaaaaaatatgatcggagacacgatgagcgtgaaggttcgatgctttgtcatcgaatgcatgatcgcgggggcgatctcctcttacggggggcgcatctcgtaaaacgcggtctggcttcccaagatgccatacctgggacacgagacgctggacgtctcaggttctgacggcgggtcgagtgttgatctctctgccagccaatacgccaacatgctcatggttgatgtcgaagccgggaaacgtgtacgttacgagatgtcaaccaagaacctggtgctccgagacgccgctacagacagtcctgttctttacagagaaagcctcattgcctttgggcagggctacaggatcagctctatcgaggacccgacatgaatacctatgaggagattaccctga

SEQ ID NO: 80573 - DNA, 631 bp, Arabidopsis thaliana landsberg
  unsure (1)..(631): unsure at all n locations
gtgacttctcgagccttttttcctttgtaccttaacccaatctatctgcatgatgacaacattgcgttatacccagctcactcagatgcaaatatgcaattgctgagaaagcgtgtaatctacttctgatctgctcttttattctctacatttatcttttgacaataaaaaatgtggcattcttgctaactaagagaatagatctgttgtcactgacatcaaccgcaacgttgctgccactctcaaggcttgcggccctgcagtcctgactgccaaggatggcatgctgcaagaggtcatctccgtcgttactcttctcatcactcgctctcacccttgccagctggatcttggcgatgaggatgaggagcaagaggttgaggatgccggatcttcagagtatgactggcttgcaattgacactgctctggatgtcgttgttggccttgccgctgctctgggtcctgctttcggcgagctctggaagattttcgagaagcccatctacaagatggccagctctaccgaggacctncagcgatcgacttgctgtggcactattgctgagctcgttaagtacacgggcgaggcaattaccccatacaccgagtctattggacagggcttgatc

SEQ ID NO: 80574 - DNA, 479 bp, Arabidopsis thaliana landsberg
atgcggtttaaatcctactccttcttgtagccacttgacagacattagatgcattagttccatttgtcaaagcttaagcggttctatgacacacaaaagtggatacagtagcaacgagaaggcagaaacaccaagatctccttcatactacaacggcatcaaaggggctgtcgcgaaggataacctgaatctttctgagactaatgaaagatacagactccatggagaagcctaaacctggcttaaattaccagaaagcgcctgcggaaattccagacttatcgggaagtacattaaaagtacaattcttattatccttgaagatgaaatgaccaatgtacattactacatactctaatgttacacacacaaaacataccatctggctcttggaccctatccataaaagcttgaaatttgagttcaaaccagtgctaacaaacggactatgatgggttattgctaatgctggaacgggg

SEQ ID NO: 80575 - DNA, 462 bp, Arabidopsis thaliana landsberg
  unsure (1)..(462): unsure at all n locations
tataccaccgggtcctgttatacaacttttgccttagccccgcctcctgaatttgattttcctgatgcttgcataaccggctatcatcagataatgaatatccttaacattaatttataactaaatactcagtttataaaggattgtcatggattttagcgccggatagcatcctctagaatctattaaccgcttaacaatgagaaaattcaccagggcgccggaattgatcgcctgtcttttttccctatctgcagtgttcccccaaagcactcttaaaggtactatcagggacaccttgaacaaacataatcttagccaggcagtaaccaccattctcagggccaaagattcnnnnnnnnnnnnnnnnnnnnnnnnnnnnnnnnagggtaatctcagcctgaagaaaatcggcggcggaaattatatcatgctcgtttccatcctacctatgctgattat

SEQ ID NO: 80576 - DNA, 575 bp, Arabidopsis thaliana landsberg
  unsure (1)..(575): unsure at all n locations
tactatgtaattaattagtgtggttactaattagacacgcgcacagacgcaattgcaaatttgcatttttattaaggagaccaggatccgttatagctcttaattaggtagggtagtttatccaacacaccaagcatgcatttaacgttaattgagtgtttgctagtacaatccatgcttgataagctaaatgtattgatattcatatattacaaattaaaatatgtctgcttgtactatctatataaagttacggattgtgactttttcttttggtgtaaaaccgatttattatcactgttttctgcacacaaaannnnnnnnnnnnnnnnnnnnnnnnnnnnnnnnnnnnnnnaaatttttataaaataagattatctaaattgaagctaaaataataacaataacacgttaaatacttaaattagatccatttgttcattctcatctcaaacactcgaccttttataaaagaaaacttagcttaactctgtgcgactacttgcaaaatgatttactttttaatatccaaactcatctaaatttggtctatttatggctacggatagatatat

SEQ ID NO: 80577 - DNA, 572 bp, Arabidopsis thaliana landsberg
cgctgccggccgtggcatacaccgtgtgccccagctcggttcgcgagctggatggccgtggtgccgatgcgggtggcgccgccgtgtacgagcagggactcgcccgcggacagcctgccacgatcgaacacgttgctccacaccgtgaaataggtttcaggcaaccccgccgcctcgacatcggacaaccccttgggcacgggcaggcattgcgccgccggcgccacgcaatactcggcgtagccgccacccgccaccagcgcgcagacccggtcgcccacggccaggccggtatcgcccacgtcgccggacacgatgcggcccgcgacttccaggccaggcaggtcggatgcgccgggcggcgggttgtagcgcccctggcgctggaagacgtcgggccggttgacgccggcggccgacacctggatgaggacctcgcccggcctcggcgtagggtcggtgcgatcgaccagcttcaagacatcggggccgccgggttgggaaatttctatggcttttatgcaggacttcagtgaaaataggcaggcacaagctcttgcatacgggccctg

SEQ ID NO: 80578 - DNA, 245 bp, Arabidopsis thaliana landsberg
ggagggggggaaaagggagacagggagagggaagagaaagggagagaaagggggagagaattggaaggattgaaggggaaagaaggggaaaggggagaaggaaaaaaaaggggggggagaataggagcgaagagaaagaaaagggaagagggggaggagaaaaggagaaaggcggaagaggggagggaaaagaagaaaggaaggggcggaataagggaaggaagaggggaaaagaacgggggaga

SEQ ID NO: 80579 - DNA, 478 bp, Arabidopsis thaliana landsberg
  unsure (1)..(478): unsure at all n locations
actgactgaggtcataacgcatactgcgatgttctactctaacaaagcttcttggccaaccgggcagctgtggactttggactgaactgatcaagctgttagacaatgttgcatgtggacctccctatgggggcttttgccaagcggaccgccaagagaataactgtcttagtgcccggaggctcatcaggcgcgtatccaggccatcgattcttgggtggtccgaatatcgagccgtatgttacctgagtttagctttcacgcacttacgctaccctgccaagaggcccacctaaaggttggctctgtaaacgaacgatctaattattatgatatatacttaatagcaaaaaaaaaaactatgtcctaatgttgaccacttgtctgtctcctcgtatactgatgaagatacatgatggatataatagggtgccaacctgccaccacaaaatnttatgaggaacgttgcatgtcggtt

SEQ ID NO: 80580 - DNA, 100 bp, Arabidopsis thaliana landsberg
  unsure (1)..(100): unsure at all n locations
gaagggaaaaggaaaaaggaagagaggagnnaaagaaaagaaaaaaaagaggagaaaaattttatttttaagaaaaaaaaaggaaaaaaaaagggaaagg

SEQ ID NO: 80581 - DNA, 575 bp, Arabidopsis thaliana landsberg
aagagcgcatggcgatacgagcagtgtgggggtgcgcgcgaatgtaaatagagtctaacgcagcagatagtgaccctgaacgaagatggtgtcatcaggaaagtgcagatcatccaagtaagactcagtcatagagttttcttttttctttcgttctcgtgtaagcgcggatcaggcaccatatctggctgtgagattccaaaggagggcggcggccgttcaatggagtttccctaataataacatggccgcgtcgttttcgtattctttgttatcacagatgctgacacttggcgctgggtgctggatctttgttgctgccagactgcgaccgaggtgaaaacacaacccgggggctcgggccagtcttaaaaaagcaatctacgaactgccagattgagcagggtctaagaaatcatcgctatctttggtgcttcccgtgggtgatcctcttggaaccttttgaccctaaaactctgcataaactttagttgacaagctcgtgctgcgcctccgtcatcattggcaacagcttgtaaccgcttgaagtcggtagtagaacttacagttaaaaa

SEQ ID NO: 80582 - DNA, 465 bp, Arabidopsis thaliana landsberg
  unsure (1)..(465): unsure at all n locations
gtccactcattccaaggctggcctcaaaggcaattactcagttagtttcctgggatgatatgggggcccatgtggtttgattctcaattcccattcatttgattccagactatgttcagccatctgtattcacctacagggaacctggggatactctgactgttccactggagtggctggaccaggacagacccctcactggacttgggcttccctatccttgtgagccatttgcttcttacctaagttgtttttgcttgcactgaccttgaccactgaacgctggtggcgtgtgcacccttcagaacctcgaagtccatgctcctccctgcctgcccacccatgctcctccctgcctggcctgcactcttngttggatttgcttttggcgtcatgaacttatgctaggacccagggaaacatgcctaactcggtcttgtccctgtttctctgctgcctgttgag

SEQ ID NO: 80583 - DNA, 528 bp, Arabidopsis thaliana landsberg
  unsure (1)..(528): unsure at all n locations
ggtagattttttatctgtgtaccttaactctatctgcagaaagtggctgattgactttgtctgatgtcttgcaactccaaaaatgatgcccggcgggtacaatgttcttggctttgcgcacttgtttaaactctatggaacatgatgttgcgatatcttcttacataacatacatatggttcgtgcttatttgcacatatcaagaattcttaacaatcatggtttgatgccaaaccccaaagtgagttagattctttcactcagcatcttactataatnnnnnnnnnnnnnnnnnnnnnnnnnnnnnnnnnnnnnnnnnnnnnnnnnnnnnnnnnnnnnnnnnnnnnnnnnnnnnnnnnncgatgatacgaaagcagtcaaagacgcatattctggacataccaaatgtagaatggatcaaaacgtttatctttcatgtgccacttggaaaggtgacatttctttccaaaaaactgaatgtcacctgaattacaataaccacattctaataaagactactttccaaaa

SEQ ID NO: 80584 - DNA, 469 bp, Arabidopsis thaliana landsberg
gcttacgctgattgtttccaggactttgaccatgttgttgttttaaaactatttcgctgacctgggccgtgtggggcaagccaatcatatctaacgtttttagtttgtagatttcgtttttctttaaatgtttgaatcattaatgagcgttttaatacatcatatttaaaatgagacactagtttctcatcacaataactgatcatcacgttggttccgttttgattcaatatttcaaaatattggagttaaagcagagcaaacaaaattactttcctttcaaaataacttctccctctgtttcaaaataaatttgttactatagtatagatctcaaatttctaataaaagataatataatacaatcaaatcctatttttttgtgtaatcttttattcataattggttctttcccattaaccctagtggcatttccatctaaccacattttcccgaaccttccattaat

SEQ ID NO: 80585 - DNA, 572 bp, Arabidopsis thaliana landsberg
taagatattataacataaattatgatattcaactttattaccatctactaatcttgtggtaaacggctttgatggaagtgaaaattatttagaagatttaacaaactattaccagattgatggatattcttagtagttgttttcatagacttcttggctctggtgaattttcctttcgctttgatctcctttgaggactcagttgcagtttcagtcttctttctagccattctgaaaaagaaaaacaaaaattcggtatcaaaactcaagagtcaaaatattcttttctccatactatttcacagagatttatagcaaaacctccaaacacagattcaaaccctagaaatccaagtgtctcacatatctagattcatccgcaaccgaacgaaacttaaaaacaagcccaattaatctacaaataaactcatacttgttaatcaaacacaattacagtcgcagaaatataaaacaaaatttcaatatccagatctaaacccagaaactcaagcgcttttccaatctcgacttaatcaaaaccgaatgaaacttagagagactaattagattcg

SEQ ID NO: 80586 - DNA, 373 bp, Arabidopsis thaliana landsberg
aaataccgattaaggcgtactccaattattcaatggatggtgctaggacggggtgaacaggattttatgtaataacacctaggggaagatctcttctcgaagatggtatacagctatcttgctcagatcactcaaagaaacttgttaaatgcttagtggagggcagttatgtgtaggggttcaaaaaagggtggtcagtttacccagaatcatctgttatatttacaaaactgactaaatggtgataagtactggacgacatggaataaggttcatttaaaaatttgctaacggaatgcttattgcagacggagaccctggttggtcttacccatggagaccctacgctgaagaagacgaatagaatgctcct

SEQ ID NO: 80587 - DNA, 236 bp, Arabidopsis thaliana landsberg
gtcagagtttggaaaccatatagaaaacggagttctataggtctcagacctgatgatctaatcatggaagcatcaaagatgaccagttttcattcaaagatatgtaacatttttttttgacgaattgtttacagtattatttcgttatttatgcaactcttatttatgtttatttgatccgttatttttaatcgactttcttatttttttttccttactaatttttttctatctct

SEQ ID NO: 80588 - DNA, 472 bp, Arabidopsis thaliana landsberg
  unsure (1)..(472): unsure at all n locations
nnnnnnnnnnnnnnnnnnnnnnnnnnnnnnnnnnnnnnnnnnnnnnnnnnnnnnnnnnnnnnnnnnnnnnnnnnnnnnnnnnnnnnnnnnnnnnnnnnnnnnnnnnnnnnnnnnnnnnnnnnnnnnnnnnnnnnnnnnnnnnnnnnnnnnnnnnnnnnnnnnnnnnnnnnnnnnnnnnnnnnnnnnnnnnnnnnnnnnnnnnnnnnnnnnnnnnnnnnnnnnnnnnnnnnnnnnnnnnnnnnnnnnnnnnnnnnnnnnnnnnnnnnnnnnnnnnnnnnnnnnnnnnnnnnnnnnnnnnnnnnnnnnnnnnnnnnnnnnnnnnnnnnnnnnnnnnnnnnnnnnnnnnnnnnnnnnnnnnnnnnnnnnnnnnnnagacatggggattggcttgggattgatgggccggacagtttaccattgcgtctttgccggactgtctgatgacttcgaatccgaagattgaccgttttcg

SEQ ID NO: 80589 - DNA, 312 bp, Arabidopsis thaliana landsberg
tatcaatcagaaagacttgggaagtattggacaaatggtaattttttaaggggaatgtcagatctgattggacattttgggtacctggggtgaatcttgagacaaggagccgctggacatttgtaggagtacccgactgtattacctgactggttgaacgtaaggattaaggcctggattgtgaggaaatcttaattgaatgctgcgaatgacagaacaccatatttggatgcttgaccaatattatggctttaggctttaacttattgtgtgctaaagaaatatattagtacgtaatgatggggggatatt

SEQ ID NO: 80590 - DNA, 578 bp, Arabidopsis thaliana landsberg
  unsure (1)..(578): unsure at all n locations
ttattgttatctccgatcgccaatccgcgcgccgcaagtggctgattgaaaatcggccttctctggccgctgatgttgcggaagcgcttaccggtccactgcaacagaattggtcgctcgtcatacgtcacctgtgaatgcacaagatcgattaaatcgtcagggtgtccgttcgctaggaatagatccaggtttccgtcgttatcgaaatcgaagaatttcagtccccagccgctcatgagatagnnnnnnnnnnnnnnnnnnnnnnnaccggcggtatcgtcaaaggtctcgtcatgattgttgcggtaaagcgagtaatcctggtggtcaagattggcaacgaaaagatccataaagccgtcttgatccacgtccgcggagtccacgcccattcctgaacgtgccatcccatcggcactgtaagccacgccggatatttctccgatttcctcgaacttcccatttccgcgattgacgaagagaaagtttgggactgtgtcattcgaaacgaagagatctatccgttcgtcattgtttatattcgtagcaaccacaccccaggcttttcccaaatg

SEQ ID NO: 80591 - DNA, 257 bp, Arabidopsis thaliana landsberg
ctactcagcttccggattctggcatcgctctgaaatgataagagaggaaatgcggttaagaggttaccggaaacatcctgctaaaagctggataatccatgagaacaaaatacattcctttcacgcgcgtgacacatcccacccgcaagagaaagacatatacagcggattggagatactgataatggaatgtctgaaagttggatacgaaccaaacacagagtatgttcttcaggaggttgatgtgttctatgaag

SEQ ID NO: 80592 - DNA, 135 bp, Arabidopsis thaliana landsberg
ggtcatctcctataccattatttctagggagatacatcgcatgtagaagtttttctactagtcttctttccagggtcatagggagtcatagcactctttgcccttttcctatcaaagcttgtacaaaccaactat

SEQ ID NO: 80593 - DNA, 580 bp, Arabidopsis thaliana landsberg
  unsure (1)..(580): unsure at all n locations
gttatttttataagctaataaacctttgaacaaatcaaaaccctaaattttccccatcttataaaaaccttttggtctcgtttagtctctttagcctcccacttgtcctctctacgattaaaaaatgttattgccactttctggagatattaccccaagaagttatgttgcatatcctttgccaattttgtaaattggtagtggataagggggcaaatttgatttttccaatttgttagcagaatttgcctccttatcttttgccgattcacaaagttgccacttaaaaatgtaagcgtcattcctaaagtgtttatttgaaacaagcttttttatttattttgtttgcacttttttttatctcaaaatattgcatagacatagcttgtggatatgtatgttgcagaaatgaaaagtgtgatataatcaaattaaagcatctccttcaactgaaagtctgaaacaactctcactctttgtataagtcaaggatgtgtcttatgaagatgggttggatattcaaagctctcatcgcattaggagaaatactntgattntcgggaaggatcgcacctaaatc

SEQ ID NO: 80594 - DNA, 100 bp, Arabidopsis thaliana landsberg
ccccaaggaccaacgaagaacacgaggggggttcggaagcaaaacacgcggcccgccgccacgagccaaagagaggcagagcggggacgagacacaaagg

SEQ ID NO: 80595 - DNA, 336 bp, Arabidopsis thaliana landsberg
aattttaaatgtatcgtcttcttttcgctgcgtagtaatctatgattggccgggtttcctgcggctgagctcggattgtatgaagacttcgtcgatgggcagtccggccggacaaccatcaagaatgaccccgattgcagggccatgagattcgccaaaagtggagatcttaaaaagggtaccgtatgaattactcatgggaaattacaggcaattaccagataatggtcgcaaagctaatcgtgttggcgttaaaaccgtaatgcacacctactttctaaacaccagataggccgaggccccgagtatcaacacactgatgatattgaaagccag

SEQ ID NO: 80596 - DNA, 190 bp, Arabidopsis thaliana landsberg
  unsure (1)..(190): unsure at all n locations
nnnnnnnnnnnnnnnnnnnnnnnnnnnnnnnnnnnnnnnnnnnnnnnnnnnnnnnnnnnnnnnnnnnnnnnnnttttaaacaactttacaaccaccaccacaccaggacgcataggcataaggcaaaactaacgtatgattttcatagaatgattctaacatacacaaatactgtccgatcaaatacaat

SEQ ID NO: 80597 - DNA, 297 bp, Arabidopsis thaliana landsberg
tctcttatcgaaattgaaattaatatatataatttttagttcaatcataagaagaggtaacatggcatgtgagtgcacagctgtgaccactcttcccttcaccatttgataaataccttcttccatcttccttcttctgtcttttgactctcttctctctctcctctctttctgcttctctcaatctgtctctttctatctctagagctcacacttcctctctaatggtggaaaccataaccctagcatccccctttgatcttctctccttcccacacttttctttcttacaatctc

SEQ ID NO: 80598 - DNA, 440 bp, Arabidopsis thaliana landsberg
gtttcgcttttgtatgataacaaaacagacttgtagtttggtgttgatgtagtcttactgtaatgccgtctgtcggtatggacctattccgacgcagtttcctcaagaacaatattaatgcaaaaagcaacaattctaaggcaaatacataagcaaggcaagcaaaataaaattgttgtctcttcgaatttcttagaataacttatgtaacaactcctcgttacttgatgtttcattaattaacggacaaaacaaagaatgacacatgataatttcatactaatttaaccatttaaccacatccacttttaatgaaaccaaaagcttattaaaaacatattttaccctttaaccaaattttattttattttaatgacaaaatatcaccttttctttctttaaaaagtgaatttttatggtccccccaaattatagatttt

SEQ ID NO: 80599 - DNA, 420 bp, Arabidopsis thaliana landsberg
  unsure (1)..(420): unsure at all n locations
nnnnnnnnnnnnnnnnnnnnnnnnnnnnnnnnnnnnnnnnnnnnnnnnnnnnnnnnnnnnnnnnnnnnnnnnnnnnnnnnnnnnnnnnnnnnnnnnnnnnnnnnnnnnnnnnnnnnnnnnnnnnnnnnnnnnnnnnnnnnnnnnnnnnnnnnnnnnnnnnnnnnnnnnnnnnnnnnnnnnnnnnnnnnnnnnnnnnnnnnnnnnnnnnnnnnnnnnnnnnnnnnnnnnnnnnnnnnnnnnnnnnnnnnnnnnnnnnnnnnnnnnnnnnnnnnnnnnnnnnnnnnnnnnnnnnnnnnnnnnnnnnnnnnnnnnnnnnnnnnnnnnnnnacgaaaaaaaatttttagtctctaaacaaaatccaaccatgccgtttggaagttattaagattgaaacctcttattattctttctttcttcac

SEQ ID NO: 80600 - DNA, 145 bp, Arabidopsis thaliana landsberg
gaaacttaccaacgctctactgaatctagactgcatatctatcctgacaattggctgacacaaagatgacggatgaggctgattgatcctgatggtataattaataacttaccccgaacatgagataccggctgaaaagaaccat

SEQ ID NO: 80601 - DNA, 507 bp, Arabidopsis thaliana landsberg
atatacaattagaaagggaaaaattcagtttcaagtgtttctaattttatcaaacaatattgcaaattagaaaacttattggtctttagacacatctacgtaatgaaactatgtatgttagtagagacaagaattctataactttttaccaaaaaaaaaaaagaattctataacctttaaattaacgaactctagccttcttaatatacgtactccaatgtaaaacattcagttaataatcatataattatttattctttttgcacgaaataattacttagagttgagcacaaactgattattcatttcgaaggttttattgttaattgacatcgaggcaactactgaactactttaagctatgaagcccctatattggtataggtcatagaaaacagtatggtgtttataaacataaacttcaaacggcaaaatgtctacatgtatttagtaaagacggcaatacgtttttaagtctctgagtgagtcagcgtgaaagcttttggt

SEQ ID NO: 80602 - DNA, 384 bp, Arabidopsis thaliana landsberg
caaaaagccataaagtagactgctctttgggaaacgatgagaacgatttttggttttggtacaatagccaaccgatgtctatgctctagggtgtcttattctatataggatgctgtacgtatgctcacacgatgaccattatggccttgtctatacaactgtcgactcactatgcatcagtgcttagagatccactacactgacactaactacatttcaacataaaacatgtggtctgagtacttactagttgtgatccacgagagaaaatatacttgcttgctcctttctagcaaggtggaataactaaattggttcgagcggtccattggtacagggatgtcaggtgcggatccagattcgaaataagttaggattctatct

SEQ ID NO: 80603 - DNA, 444 bp, Arabidopsis thaliana landsberg
  unsure (1)..(444): unsure at all n locations
gccccggacgccgagcaggtggcggacggcgcgggtggagcgcagccggatcacggtgcgcagcgcggcgccgcggacccgggcgcggagcagggcggcgagggcgggcggcacctcgccggagagcggggcctggatctcgtcgcgtacgtcgggggcgaccgggatcttcaggtgccagcccgcgtcggtgccgccggtgcggcggcgcagcgtgagtccggcggcggccaggcgttcgtcggcggtgtcgtagtggacggcgtcgagggcggcggtgccccggtcggcgacggcggcgaccggaccgacgccggtgaggtccggcagtcggcccgtaccggactcgtacttncgctcgatctcgcgccggacggccgccatgcaccgaatgttgtggtccccgccgacggaggcgcctctctgcgcacggatccggtgcgc

SEQ ID NO: 80604 - DNA, 282 bp, Arabidopsis thaliana landsberg
cagcaacaaaagaacgaagaccagaagagagaaaagaccctttaaaaccggggaacgccaacaaggagaaacagcaagggctagactagatgccaaggaaaaagaggaaagaaaaggcagaggaagtggataaggaaacaaacggaaagaagaggaaggactctaaagacaacggaaacggtacaaaagaagagtctacgcaagacgggaggatcgaagaacacaccgagcaatggagggagcagcagaaaaaccaagagcagacaccgaagccggaagaag

SEQ ID NO: 80605 - DNA, 401 bp, Arabidopsis thaliana landsberg
  unsure (1)..(401): unsure at all n locations
ctgatcactatctattacagctaatctttttggacacgagacagcgggnnnnnnnnnnnnnnnnnnnnnnnnnnnnnnnnnnnnnnnnnnnnnnnnnnnnnnnnnnnnnnnnnnnnnnnnnnnnnnnnnnnnnnnnnnnnnnnnnnnnnnnnnnnnnnnnnnnnnnnnnnnnnnnnnnnnnnnnnnnnnnnnnnnnnnnnnnnnnnnnnnnnnnnnnnnnnnnnnnnnnnnnnnnnnnnnnnnnnnnnnnnnnnnnnnnnnnnnnnnnnnnnnnnnnnnnnnnnnnnnnnnnnnnnnnnnnnnnnnnnnnnnnnnnnnnnnnnnnnnnnnnnnnnnnnnnnnnnnnnnnnnnnngcccaccagattttttattgatccaaaaaaaaaaaaaaaatcactat

SEQ ID NO: 80606 - DNA, 330 bp, Arabidopsis thaliana landsberg
ggcaagagcaacgggagacaaaggggacagaagggaaaagggggggagccaaagtacagaaagaaggggaacgagacctgaggggaggggggaaaggaacaaggcctaccgaaaaggggagagcaagagcgggaggggcgaagaaccagaggagggaccaaaaaaagaaaaagtggagggagaagggcggagcggggggaacaacaaaaggcaggatatgggagcgagaaacgagaggaagaatggcagagagggggcaggcacgagtggagaggcggaggatgcgcaggaccgggggaagaaagaaagggagaaccgaaaaagggaagg

SEQ ID NO: 80607 - DNA, 597 bp, Arabidopsis thaliana landsberg
  unsure (1)..(597): unsure at all n locations
acactctcgattgtggtatttggatgatgaaaagcatgcgatttaggcacgacatttccggcttcaatagccgtggtccacgtgcaacctatcgagtacgatagtactgactcctttgccctccagtatagaacgcagtagctaggcaaagacacgcgatgatttgaatcacactaactatcagaattagtagttaataatttaattttgctctcgtcgagaccttcacttttcggatccagtttataccaacgtagcgaaccaacctcaaacctgcactggcattcctcgaactatagtactgatttgctagcaaacgcttcacttttttcctttgaaaaagacatccgggagcgccgttgagtagtagccagatgttaacagtttggagataagagtgcggggaagacatagtccactagaaaataatgaggctatatcaattgttaaatactggtttgccctggcgcatacctgctttagtcaaacagcaatttttttaacattcgtgttgtagggagattacaagccataatgtgggnnnnnnnnnnnnnnnnnnnnnnnnnnnnnnnnnnnnnnnnnnnnnnttagtagact

SEQ ID NO: 80608 - DNA, 478 bp, Arabidopsis thaliana landsberg
  unsure (1)..(478): unsure at all n locations
ggaaacttccaccttgccacctgcgtttccaactgcattttgtctttcccccttctacctccaaatagacatgatacctgggtctccgcacatatattaccctgcctcaggtgccctagcagcagtccaaggttgatcctgaagaaccacgccctttttaccctggggccttatttcttccgtcacctcaggggcactgggaagattaatcccacaccccttgtccccgaggtatctccagcagctcggccacccactacagatgagctacgcattactcgcccannnnnnnnnnnnnnnnnnnnnnnnnnnnnnnnnnnnnnnnnnnnnnnnnnnnnnnnnnnnnnnnnnccatcgccgtcgacgactttgagtttcctgacgacctagactttttgtcatcgccactgcccgcaggtccctcggatatctccttcatctcctcgtctagggacgacatgttttcgggggactctga

SEQ ID NO: 80609 - DNA, 498 bp, Arabidopsis thaliana landsberg
  unsure (1)..(498): unsure at all n locations
cccaacgctcgggtcatttactggtgaattatttacccggnnnnnnnnnnnnnnnnnnnnngggcaccacacatggctcgccttattcatatgacacgcacgtgcccttggtatggatgggcgcaggaatacgccacggaaaatcatcggcttataccaccattacgcaaatagcccccactgtttgcaatatgctcaatattccttttaccaacggcaccacttcgggggtgattgacttcagataattttattggttaagttatcagtatatcggttatcagaaaatccgtaaaaaagcgaatggttacactccccccattattataccgataaccgatttccgatcgatcaatgactatttaagtacttttatggtgaatgtactacctggcactgcacatcattgttttcatctggggattcacgggaatcctgggtcataagatctcactggaggcgccacagcttttatggcacccgattgctcattgcttt

SEQ ID NO: 80610 - DNA, 570 bp, Arabidopsis thaliana landsberg
ataaagtggggaaaaagaaaaaataagcaagcagaaagaagaaaaatgaaagcaacagcagaagatttattttttgtagattcatattgttcactcttactaaacattttttctcacatctcaatcaaaagaaatgaaacaaaaaaaaaaaggaaaatttggagagcatgtggggaaagctgaaattgttataccaaaattagcgaaacgtacaattgaaaaccaatcggaaataatgaaagtaaaccttaactaatttcattcaaataataactaataagttaagagagttacttataatgtaatttcaaaattaaaaaaaaatttgggcaaacaatatcaaagattttaaattataagctgtctccggctcgtccatgtagactacatgatgtagtttgtgtgtgcgtgaagcaaacataaacatggttctatcaatttctagattcatcccaacatgtcttttgttcataattaagtaataggtaacaatccaaattaagatgatcataaagatataaccatatcttcttgatccttaccaaaataagcggggtttttttttttttt

SEQ ID NO: 80611 - DNA, 453 bp, Arabidopsis thaliana landsberg
gtattacttgtgtaaaagaagcgctaggcgctaagtggactggtgacctaaaaccttttttttggacgaatcactaaattatactatttggaaattggaaaaatacatttaaacaaaatttatgaaattttaggtagtcgaaatggttagcgtcacataggcttctaacacttagacaggggtctagacgaccgactagaccgttttatagaatattggtactatttgatatgtattcttggtttctaaattaataacagtagacggtattaaaaagagaatgatgaaaatattatatagcaaacttactttttttcttggttaagaaagttcctataaacttacatttgttcatgaagagtaaaataattaaaaaaacattgatcatatatacaacaatttttgttgcatagtgaaaactaattcatttattaattgaaaattaatttatgt

SEQ ID NO: 80612 - DNA, 280 bp, Arabidopsis thaliana landsberg
  unsure (1)..(280): unsure at all n locations
cttgttaaacttgagccactaaatccttctcattatagtcaagatcggagattaggagaggtcatttatgtatcaagaattaagaaagttcctgcttgtagttggatacaagcaggagtctgagaatactcaattcttttgattcttcttctctatcttttactgtatcaaaaaatctttctaagtataattgaaattgtgagaaatatcggaaaatctgttgaaatctctgttaagagacaaaaaataaagagcccaaccggatnttttctttttctcc

SEQ ID NO: 80613 - DNA, 572 bp, Arabidopsis thaliana landsberg
  unsure (1)..(572): unsure at all n locations
tacgctacttcaaagttaaaagttccaatttcaaggatatcactacaaaataagtctttaaatttggatgcaattttgtcaattgtggccgagattaatcataacaaggtcttgaatcccttgattccgacaaaaaagaatcccttgattaaaactagttcagagacttcgattgtattaaaaccggcggattttagttaaccgaccgatttgatatgaaccagtaaatatactctgaaccggccaaaggtttattttcttaaaaaaaacaaccctagatttctaaattctaattgttggcccattttcgcctcttcttcttcgatcacgagatcgagaatcgtttctctcaattatctcaagctctaagatctcacttcttctctctcaaactcgacgccgttcgttttctccgtcgattaatcggttcgttttgttccttaaccttttaccgatctaatgtatctcttgatccgtcggcaagtctccgattttcactttaagggttccattctctgtacatccatggagatccngacaagaatagagtagatattcatatgtaaattgat

SEQ ID NO: 80614 - DNA, 510 bp, Arabidopsis thaliana landsberg
aattgttgcgtttgcaattccggtagtcctagcaactatactcgcgtttcccattaagttgccgtaagcagcgtgaatcttgtcaaggttaccgtttacaactgtaacgtcaacaaggtcagtaggcccgaacttctgaaggttcaagtttggtgtagtagccattacatttcctccagaatgacaaagtatttggcgagtttcggaactccaccattgttatgctctcgcaataaacctaacgggaactttgcaatgtcagggtctgcaactccaccaggataagggctgataattccatcaaccacagtgagtgcgttttcaccgtcgcacacgttcggaacccattgattaagagcgtactgacgagcaatcttcttgtacggattaatgttctctcgtgcgagaacgtagtttccttggttagtaaggtctgcatcgttcgtagagaaaatgccagtttgaggggtagcggtttccttaaacagtcccagcccaataatgatcata

SEQ ID NO: 80615 - DNA, 358 bp, Arabidopsis thaliana landsberg
gggtcttttgcgctcggtaatccgcgcaaggtgaccagattttctggctccagcacattcaacagttttcttcttgtcgggcaggaaacactgccaatgaaaagcggtggctgatcgccttcgaggtgaatcggattgatgtccagcgcgtcgacataaaacagctcgttgacgcgattggccgtcatgccaatcaaactaccactggccgccacgacgacaatcgaatcggccttgtccggtgcaacggaaaagcccaacagctgacacaggtcaaattactggaaccaccaccccccgaagattcactccggccatcaagcctttggctgtgcatggcagaggcatcaggtcatgc

SEQ ID NO: 80616 - DNA, 560 bp, Arabidopsis thaliana landsberg
ggattcttttatgaaaatgggatataattatatagataatgactatttatgtagtttagatagctattgtaattcaataagattgtacaattgatcagatgggtaatatatattcttaattaatttgtttgacctttttatatacaattgatcaaaataagagcgctacgattaattttattggatttttactcttttttttgaatttatttgatgttttggggttttaagtaatatgaagttttttgatataatattttaatgtttaaagatttaacatgtgatacatatgtaatttactaattaattaatatagttacacaattagaagtattaaaagaaattaacatttcatttaaatcctatttgacactattggtaatcctacccactccacgatttaattgtgaactattaaatatattgatttatttaattatcatttcatgttgaaataatattaacgaaaattaacttatttttttcttgaattttgggtatatttatatttatacaattatgcttatataaccgtattttggtttgtaaatctaattaat

SEQ ID NO: 80617 - DNA, 554 bp, Arabidopsis thaliana landsberg
gctgaaaccagccggggagtaaggtcgacgcgggcagtaccggtctgccagcgcccccacattgagcttgggggctgggagcacgccgtgaatccggtcccgcgccgccgtaccctgttctgcggacgaccaatcgaacgtgccctggagcgaagacccgtcagccagaaatacgcccagcgccgcccggtgcagcggaaacgccgctgtcggagccaggcgcgcctggcccgtcatggtgatgccctggccctgtcccgacaacgagacatcgagccggtcggcatcgccctcgcccgtaatggttacttgcgccgaacatgtcgcagcgcgggcgtcgccgacaggctccgcatcgccagattttgcatcgccaggttccgcatcaacaggttttgcatcgacaggttttttaccggcggccctggccgtggaagcacccgcacggctgcctgcggctacgtcttgcggcaacgccgcgacgtattggcgcacgcacaagggcgaatccttgccgtggccctgtatgttcagggcaagatgcgcactgacgg

SEQ ID NO: 80618 - DNA, 591 bp, Arabidopsis thaliana landsberg
  unsure (1)..(591): unsure at all n locations
aaagcgaccatcatgtcggacgaattacaattgatcgtggaagatgcggtttacagtttgcgcaaggcgattacacaccttgaaggggaactggtgaagatcagggccggaaaggcgagtcccgccatgctcgacgggatatcggtagaatattacggagcgcctacgcccatcgcgcaggtagccaatatcagcgtgctggatgcccgcaccatcagcatacagccctgggaaaagaatatgctgtcacagatagaaagggccatcatgcaggccaatatcggcatcacaccgcagaacgatggcaaccagatacggctgttcatgccgccccttacagaagaaagaagaaaagaacttttcaaaaaagccagcggcgagggtgagcaatcnnnnnnnnnnnnnnnnnnnnnnnnnnnnnnnnnnnnnnnnnnnnnnnnnnaactgcagaaagacggcctcagcgaagacgccgccaaagacggcgaaacctctattcagcagatcacagacaaatacattaccctcgtagacaaacacctttccgncaaggaaaaggaatgatggcggtataggagatcaggctaatag

SEQ ID NO: 80619 - DNA, 622 bp, Arabidopsis thaliana landsberg
  unsure (1)..(622): unsure at all n locations
gaatacttgcaaaagcgaggctgatcaacacgtccagctctgcaatagaaagaattcatttcaaaaatgtatccacataaaggtctaagtgcaacgttgtttgcatgcctaattctataaaacaatcttccacccaagaaacctcttgcttataagatgaaacctcttgcttataagatgtaactgaactatacgtctgcctaagattcattttcttctgcatgcctacttctaactcaatctataaagtgtgggatcaaactcaattctaactagctcaacaaatgttcacaacgaaaagggtccaagcgatgacccacaaagctaacactgggtgacagtaattaacaggaattggataagcaagagacatattctggaggaagatgctgaaaatttcttaaacaaaaaaatttataaaacatgaacttgtccataccagctgttgcagaaaccaattgtctccatttttcttgatgctcgcagaaacgtccaatcaatctctgtgaaatgctcttcagggccgactctttttcagatnttgcttgtgataagctctttaataatttctttatggtaggagtccaatatcgagagacaccctgaaagagagtaaaagtaa

SEQ ID NO: 80620 - DNA, 465 bp, Arabidopsis thaliana landsberg
atatacaaactggtttggttcaaaccgtgacgattagggacagttaatgaaggagatgccacatgatgttttatccactttgatcacgtgtcggtcgagataaggtcagtgaatggattacagctggatttgtcactgaccaatcacaagtgccagcctgtccttacccctttcacttttatgaccttaaccttttcttaatttcccccatgtttttttttctggtctatttttgttttctatttaatttttgtagatttgctttttcttaattaatagattcctaagtttaaaatatatactgattcctaaaaatccataaaaaatttttactattatttattagggatcaaacctttattggcattgcacttcaattcctttgtttttggtggtttcataaaaataaaaattttttttgtctttctttttgtttctttcaattctctttatataaaaaaaggt

SEQ ID NO: 80621 - DNA, 113 bp, Arabidopsis thaliana landsberg
agggagagggagggaggagtaaggggaataaaaagaaaaagaaaattgagtaggaaaaaaagaaaagagaaaaggggaggggagaagagaaaaaagaggagagggagaaaaaa

SEQ ID NO: 80622 - DNA, 508 bp, Arabidopsis thaliana landsberg
aggaaaaataaaatgcacacccttagcaatcttatgagcatgcgcaactcggttaatagggtgagcttccaaagaaggagaaaaattactgatcaagtgaaaatgagactacttagtctggggagaaacagacgattacgtatataaaagcgtggggagcttccaaacgcgagatcataaagactcattatactataggtattaagttcattactttctacaccatcttatatcatcttcttgttcttccattgggaaagagtcaaagagagatcgagagagagagagaaggaaagcatgggaatgaaaggagaagggttctatctgagcatatgaacggctaatgtaagagtgcaaccaccgacaactacgagccagcatgggtggagccacgagccaacaactaccttcattgggataaaagggagaagaataactgctgcgggtgattcttgctcggaggctaaaaacgctttgctttggacacttttacattgcgcttaaccta

SEQ ID NO: 80623 - DNA, 553 bp, Arabidopsis thaliana landsberg
accccgcttatcgttgccctcttcccgttcgccgttgcgatccgttcggagaaggcatcgatcagctgtttcattcgcgcaggcgatgctaatcgcgggcgccgccgtcgttgtgtttcagctgaacaacccgtataccggtccgcttcgtaccggcccagggcctatctcagccgtggccgctgaaataggcgcccggttagaggacggagccaatgagagccggcctcctgtcggtctgcgcggttttcgtgcttgctccggtgctgctcctggtggccttttccgcgcgttcctacgccgcggcagggcagtcggcacgacccggcacgctcggaaccgcgcacgtcgtctcgtcgcggcatgacccgtccccgatcacgttttcgtaccaccctccttggcatcatcgctggtgccagtgtggtccggctgagtttccgtttccggtcgtgtgtgttcgcctgggtccgactgtgtttccgttcgtcgtcggcccaggtcagggagcatgtccctgtccgtctccgagtccgacggcgaccactccgac

SEQ ID NO: 80624 - DNA, 570 bp, Arabidopsis thaliana landsberg
  unsure (1)..(570): unsure at all n locations
catatagtttgaaaaggtccttatatacttttcttttaattttttaaaattttggaatgtttttttttgggggttgggttttgtgagtcgaaaaagggtgtatgcatggaaacttatttgtgggattatgttgtttatgtaggaggaaagttagataaggaaaaaatgactgcattggagaaacatgtttccttcttcgacaggaacaaagacggcaccgtttnnnnnnnnnnnnnnnnnnnnnnnnnnnnnnnnnnnnnnnnnnnnnnnngttgaaaaacttttgacaaaataaatgttaagtaataatatattaacgagattttgatatattattctggttaactttacaaacatatttaattcgttgatgtatgtatatggaaaaaaggatttagagcgctcgggacagggcgtcttttggcggctcttgttgctatattcatcaacatgggactcagcaaagaaactcgtccggtaccaattataacacttcgctttccttttcgtttntttccttctccacacttggttnttgcattgcgattaggcatatgtgaaaaaaattaa

SEQ ID NO: 80625 - DNA, 433 bp, Arabidopsis thaliana landsberg
  unsure (1)..(433): unsure at all n locations
tgcaaatttttacaagtataaattaaatgaatataaggatatattagaaaatttggaaggatttatgtattggtttcatgaactcatgtaaatggaaagagtcttcgacggtttgttggcaatgagttcccttaaatggactgaaatttccacagaagtggcacgctctgaagagtaaacattgaacttcaaaaaagtcattgtgtgacgtgctcactaaatttccacaaaatttaggacacaagttattcatgtatcaacatcctgttttcgcaaaccctacaggggatgagagcttgcactgagaatcatcagactctagaattttgaatgtgcgtgnnnnnnnnnnnnnnnnnnnnnnnnnnnnnnnnnnatgatattactgacaattcttacttaacgctcgatctatatattgcgttcactcaactga

SEQ ID NO: 80626 - DNA, 261 bp, Arabidopsis thaliana landsberg
aaagtttcataaacattataaaactttagtcattgtatacaattatcaataagttttgtttcccatgcatgtgaaatatcacttgactcaagatgaatggtcctaacacgtttacctttagagacacatgttaattttcatattgaaaatgaaagtaaaaacaaaatgcttaatatagcatagaagaacattagctatcctactaaattaccatatagaagaaactcatgaatttcacactgtgttcatgagttcatcgag

SEQ ID NO: 80627 - DNA, 243 bp, Arabidopsis thaliana landsberg
caaaaagacaaattagatttttttagaaaatagcctttctatattaattttaaattcgagttcacgtggcggtcgctaccaaacttcgctaaactttagtgctttactccaaaacccagagtccatcacacaagtccaagcccgaaaacaagggttcttgctccgacacgacaacaaatccagattctgagcttaggtaaactcctaactccccttatactctcttcttattcaatctacctt

SEQ ID NO: 80628 - DNA, 539 bp, Arabidopsis thaliana landsberg
  unsure (1)..(539): unsure at all n locations
gacctagaacaattgatagaggcccttccatgcccctcaaactcgtcataagatacggcggcgaaatctggtacttacgcgggtgtatccgaggaatccgcgtcgatgaaagcactggcactagcaatgcaaaagccgccgaggaaatacgcatcaggcgggaagcgcaactcctcaaaaggtcaatccacggtgattccgttacacggacgttcaacgaagcagccataagctatatgaaggcgggcggtgacaaagagtttttgccgccgatccttnnnnnnnnnnnnnnnnnnnnnnnnnnnnatatcgggcaggctgtcattgaggattgtgccgagaagttatttccaaaggcagggccagcgacccaaaaccgtaaggtctatactcccatttccgcagtccttcaccacgcagcccgtaagcaatggtgcgacaagcccgtaataggccgtccgaagcagccacgcgggcgaaatccgttcgtgacgcatgatgaggccctaaagcttatagccgcctcagcagcccatata

SEQ ID NO: 80629 - DNA, 455 bp, Arabidopsis thaliana landsberg
tatttcatattttataagatagaacacatagcattcaagcatgatgatgataatcatcaatcatcatcactcatttattattttaagtagtactgacgaagataagacgcagcattaaccactataatcagcgaaacttgtcactaattaatcatgattaacatttccttaacagcttggggaaggaatcttgcaactgttggagactttccttgcgttaggggagctaacgtattggcggagggtagggctcctcatgtacccacaaaggcatggatgctgctctctcagctttgtgcaacacgcctacgatggcggcgaagatgacgtcattaacgccccacatgaagccagctgcatatgcgagcacgtcaccctttctgccaccgggaccgtcaaaaggagaatcgccggccccagatttaataccggaaactcctcaataccttcaccat

SEQ ID NO: 80630 - DNA, 546 bp, Arabidopsis thaliana landsberg
tgacatttgttttcaagtttcttcttgcaaatagatcgaaagttagattttagacaagggaatagtagcacatttgcatattcagaaaatccaaacaaaccctgcaatagtagtagcagtgaaccttttttggcttttacaaaacatcagtcttttttaacttcctcaaagctaagcaagcatgtcataatcatccaatgtgtcattgtactcaagaacctttcgtttaatcttggatgaatcaacccaagtgatgaaatcttccatgttccgagttactaagaaagctggatcagtaattgtttctggtcctacacgaacgtgtccttgctctatgtatgtcacagcttctttgtggtgctctgcaaacttcaggtgaaccagcacagtagatagcctacgcctgcaaataaaaaaaaagaaccgatatgaggcaaacgaaatgagaacatttggctatcaagggtttaagtaactgcctatataggctcttgcatatactcttacctacagaaggatgaaactgataacccctcagttagagtc

SEQ ID NO: 80631 - DNA, 568 bp, Arabidopsis thaliana landsberg
cttactaatattgtctatgatatttttgatttctaaagtagtaaaattcgaacaatctaacttttctttttttgttgttcatgtaatcattttttttttatccaacaaaataagcctttaaatttttaagtcagacccattgatgtaaacttaaactctctacaataatttttaatctaaacctctaatataaagtttttgccattcaattccaaagttttctcttaatgattttaagaatataacaagaaaaaaacaaaaacaaaaaataaagcagttagatttttacgacctttaaaatttttaaaaattcaaaaaatctgattgggtgaaaaagactattgagcaacacatgtaagccagcagactactttaaacgtgttattaaacagtttgaacaactggtttacttgttgaaaattattatatttgcaagagtttatgacttgttagcgagcggatggaacatcgaataaataaaaaaatgattcagataaatataatttataattataaaatttataaaaagaccaaaaattatcttattaccaaatgatttaaaaattaa

SEQ ID NO: 80632 - DNA, 429 bp, Arabidopsis thaliana landsberg
  unsure (1)..(429): unsure at all n locations
caggggaaaaccaaagcaaaccggcgacnaaaaccaatgtataaccaccggcgaccgaaaccaaggggagcaaancgaaagagagagcccaaaaaaaccccccgggcgccgaaaagacacggaaaacagaacaccaaagccacggaaaaaaggaggaancaccaagccaccaacggagaaagacacaacagccaggaaaaaaagcaaacgaccaggaaaaaacgaaccagcgcggcaccaaaaacaaaaggggnaagaacgaaaggggccagaccaaaaaccagaagcccagagagggccgaaaacggacgaagggaaagaaagcgacaccaccctcnaacccangaaagccgaaggaaggccccgcgcgcagaagggacacaaaaaccccaaaaggaaaaacagcaacggccgcacggacaccgggac

SEQ ID NO: 80633 - DNA, 415 bp, Arabidopsis thaliana landsberg
  unsure (1)..(415): unsure at all n locations
ctgaaattcagtcaggggcgggacactagaaacgaaccggtctattatccccgccatctgcacgancagcttaaggaacgactcagccatctggagaagggaaggctccagggccttgataagctgagtgaataccttagtgttctgtccgagtgcgccttccagcagggcagccataggcttcatcagtgcagtgatgatctgcgacagaacagggataagaggctcaagcgccgccagcagctcactgagaatagtaagaccgaacttagcgaaagcactagccagctgcgtaacaatcgggatgataggagcaagacctgtcagtagctggtcaataaacggcagcagcatctctatgagcttatcgacagtgccgataataaggctcagcaggggcatcagcataggcata

SEQ ID NO: 80634 - DNA, 429 bp, Arabidopsis thaliana landsberg
  unsure (1)..(429): unsure at all n locations
attgtcgctctcactttttctcgcggttttataatgtgtgtgtcactgttgactacttataaattaattcgccattacatgctgcaatcgatactcggtctcgttannnnnnnnnnnnnnnnnnnnnnnnnnnnnnnnnnaatcgacagcctgtggagctaatgtgcattaggacatgtgcactgtctcactgtgttccctcggcagtcagtgctgcagccagtgctggccattnnnnnnnnnnnnnnnnnnnnnnnnnnnnnnnnnngccgccaactgcatcacataacatctcactgtccagtgtgtcttaccgccagctctaaagagtatggtagtaaaactgaaagagagagagagagtaaaagttctgcagttccccccgtgtgcttcccagggctgtgacaacttggatctctactacttggc

SEQ ID NO: 80635 - DNA, 557 bp, Arabidopsis thaliana landsberg
tttgatgaaatagatgcaaatttcatctggtcacaaagtgcctcaaccgtgaaaacagaatttctgtaacatgttcaatttaatacaaaaatttcatggaaggatccctttattatctctcggagatataaaataaagaaacccttgtttgtctggtattaaaacctaggtcaactagctgaatgtttcactttttttttttttcattttctccaacttcaggttataaagaacggagaaatgctaggagtttctcacctgagaaatagaagggttttgtctaatggatttagctctcttggcagggagaatttgcaggttgatttgattgtcactgttgtgttctgtttatcttgtgtaaatgactagattaggatattgaataatcctagcgttgctgcagttaatgtatagtgatggtgataaagcatttggcacatcaagcgaactatgcattgacgaacgacttagaatttcttctgatggcattatagttctgaggtaaatctgaattggaacattcctgtgccagcgcattttgttagtcgtatttaata

SEQ ID NO: 80636 - DNA, 176 bp, Arabidopsis thaliana landsberg
ggagagaggggacaggggggggaaaagggggaagggaagaaggggaaaaaaagagaagggaagaagagagaggagagggcagaggaaaagggaggaggaaaggaaaataaaagaaggagggaaggggaaagaaaggaaaaaaggagggggggaaaagagaaaagaagagggaagag

SEQ ID NO: 80637 - DNA, 312 bp, Arabidopsis thaliana landsberg
aataagaacgagggcatatattactcgtagttttcgataacacagagcaaaccccgatggagaatgatagttctactatgatcattagatccatgatcaatgataattcgaaattgtggaaaattactactctacattttattaggaaaaaaataaggtgggagtcgctgcctcctattgtattatgttgctattagtattaattttttttttcagaccatacaaacaagaatagatagtggcgtaggggcggatggagccaagtggattaaggccgcagcttgtgaaattaccagcaaggccgcaattccc

SEQ ID NO: 80638 - DNA, 424 bp, Arabidopsis thaliana landsberg
tttatacacccaagaaacactcattgatgatattattttaagattcactaacggccgactgtatcgggcttccatactatatggtcgctcttaattgaggagtcggctcaattgtgatgattattatattctaactctacctaattatacaaattcttaattttatttacaaaatataagacacttgaagatttgcatatggaatagtagtcgtgaaattcaacgttcttaattacttatttaaagttatcggatcggagacgccatttcatgaaactaacaaatgtcgtaaactcgtaatagatattagatagttcaagactggtgaaaaaaaaaaaaaaatggaagctgaacacaggtcataacttatatgtacgtgtatttgttttgcatgaagttcacatgcattcaaatacaatttttt

SEQ ID NO: 80639 - DNA, 483 bp, Arabidopsis thaliana landsberg
cgtatactttgttgtgtatgacaaatataaaattaaatgtttaaacatgtattttgattttcaccaaattttgcttttcagacaaagcggctattaattataactaataaacatgagggatgtttgttaaaacttataaattaactgtttgataacaaaaaagaggaagcattgataaccttgttaataacatagcatgtgagaaaactaatctcttacttagtcaaaaactcatttacaccgtctgccgattatttcactaaaatactctaattaacctgaatgccaaaagcgcctataaactattaagcttctttcgcattagagccctgtaaacgtacaataatttgtacaggtatgtagtctattttctgataagcaaaaataacgccttgtgcaacacaggctctacgtacaataccaccaaatatgtttattaaaataatcgtacacattgggtcttttaaaataatggagaaagcc

SEQ ID NO: 80640 - DNA, 612 bp, Arabidopsis thaliana landsberg
gtttcccattggcaagaaagaaaatggaacaaaattacttaaataaagaaaatttaagtcttcggacataaaaaatatgtaaatgaataataattgattattttagttattaagaaagaatattagaaattttacgttaatggaaactaattaagttttctagtttaattagtttacttagtttactttcaacgaaaaaaatgagtttaaaattttatactacacaatttcagatgaattgtgctttcattttttgaatatatcaggatatatcaatctttaaacaagacataaaaaatccaaaacccaatttatttggaatgaagcagtaaaaaatctgaagattaatggatataaaattggtttaaatcaataaaaatatacgataataagtcatctttcaactgtgtaaattgtaatctaaacataacttacaaaataatttcatataatcttgatacatcatggtatcttatatttaactgaatacataaaatggaagataattaaaagtaatccagacaaaggataaaatttacattggttaagttggaatataaaacgggaaatagttgaaaaacaaacctaatttattatgagttatctatgaac

SEQ ID NO: 80641 - DNA, 552 bp, Arabidopsis thaliana landsberg
aagccgtctttagttatttaaaattattttccgtatttcggtacaaaaagaaaatttacggtgtgggttgaaaattaatattaaagtcatcatttacaaatttaaaaactttactcgtacaaaactaatcactagtgggaattgaacagtacaagatgttttttctcattctataacaatcaatatatgagtacgagatattaacaagttgttttatttctgttaagtgatattgcgcgaaactgaaaacggaatggtgagtattattttataatagtgcaacataggtattagttaatagttattaactagtggcaaatgaagaattattaagtataagacaaaattattcaatgcaactgcaatgaaaccccgagggaaagaaagaccctgtgtggttctgctatttccatgtggctgctagtggtccatcatacgtcaactatacttagcaagaaaaattaaaaatcaaggttaaaatggaaattgaagtcagttcgattgttttatattaatgttctgagatagtgcttgagtagtggaaacaataaa

SEQ ID NO: 80642 - DNA, 500 bp, Arabidopsis thaliana landsberg
cggcaacgtgcgcacgttgccgatgcggcgtctgcgtgaattcacctggcatgtctacttttcgcgaactggtggttgccggcatgggagcccgcgaaccggcggcagtgttcaacgtgcgcggcctgcgcgagttgcacgaaagcctgggccgactgcccgtgcgggtggatgccatcgacccctggcgcatggggacaatgcgcgtggcacgctgggggctgcgtcgcttgcagctggatgccttgcaggcattggcgccggattttcgtgccaccgtgacggcacagttgcgcgtcatggccgaccgtctggatgcgggccaaagcctgtatttcgcgcccgagggacacatttcgatggatggccgtttcggtcgcatccgtgccggtacctggcggctcgggcgcatgacgaaggtgccgacggccttccttgccgtgacgctcagttacaatgcgttggggccggagcgcacgcttgccatctttcgcatggga

SEQ ID NO: 80643 - DNA, 608 bp, Arabidopsis thaliana landsberg
gcgtgtccacaatgtgaaccatatgtatgtacagttgtttacttatatttgatcttgtcaatttttttccagtgagcgaagcgaggatggtaccaagtgtgtacaaaatttcccaccaaacgactaagggaacccaaaaaatccaagaaatttttaaaaaaattttgaccctaattctcctacccaccctgctcttactgcgcgcgtatgcgcgtgcgtgcgcgtgatatcatgggtctgtcaacccgtcaagcgcggcccggaggtagcaccttatggaaaacttatcgaaggcaatcgtcccttctcctaacagaattatgcctgccaataaggctgttgttaacaagtttcctaaaggtggcattggtccgcaatttgtgaacagatacatgcacaagtttgagcaatactggctcagtgaagggaagtaccctgacgatgtgtggattatctcagaatttggcttctccaaggaccagtgtcttttcctcaacaactcaaagttctggcttcaaagtcttgaccgacgaggtatccgtcgcccaacttccgaaccttctaaactttcagcagagcaaatcgctgcaatcgcggtcattactatt

SEQ ID NO: 80644 - DNA, 585 bp, Arabidopsis thaliana landsberg
  unsure (1)..(585): unsure at all n locations
ggcgctccgtgaggatctcgatcgcgcgctggcggtggcggtcgaggtggagaatctgtgcgagatgtactggcgcgcgttgcagttgggcgaaccgcggctgctttcggagcgcgagatggccgaggtcttcgagcgcttcaagggctacggcaagtgggcgcaggacgccggttgatctcctgaatagcagtccggagtcgcgcttttcgaattgtgggggtagggcgattccagtaaaatggtctcccgtccgcaatgtccacaaagttccattnnnnnnnnnnnnnnnnnnnnnnnnnnnnnnnnnnnnnnnnnnnnnnnnnnnnnnnnnnnnnnnnnnnnnnnnnnnnnnnnnnnnnnnnnnnnnnnnnnnnnnnnnnnnnnnnnnnnnnnnnnnnnnnnnnnnnnnnnnnnnnnnnnnnnnnnnnnnnnnnnnnnnnnnnnnnnnnnnnnnnnnnnnnnnnnnnnnnnnnnnnnnnnnnnnnnnnnnnnnnnnnnnnnnnnnnnnnnnnnnnnnnnnnnnnnnnnnnnnnnnnnnnnnnnnnnnnnnnnnnnnnnacgaatccgtgatcaagaggagcg

SEQ ID NO: 80645 - DNA, 540 bp, Arabidopsis thaliana landsberg
gatcgacaccgcgaagcgccgctggacacccgcatccgcgccggcggcatggtctaaaaaggttcggtgcagcgctcggccgatgcgctggacgtgcgcttcttggtcaccgacttcaacaagtcggtgccgattacctaccgtggcatcctccccgacctgttccgcgaagggcagggcatcgtcgccctcggcaagctcaacgccgacggcgtggtagtggccgatgaagtactggccaagcatgacgagaagtacatgccgcccgaggtcaccaaggccctgaaggaaagcggccaggccgccactggcggggaggcaaggccatgaacgcggcgctggtgatccccgagctcggccagctggcgatgatcctggccatctgctttgccgtcgtgcaggccagcgtgccgctgctgggcgcctggcgtggcgacagcctgtggatgagcctggcgcggccggcggcctgggggcagttcgctatcctggcctatgccttcgcctgcctgactcatgcctttcatgaccgacacttct

SEQ ID NO: 80646 - DNA, 589 bp, Arabidopsis thaliana landsberg
  unsure (1)..(589): unsure at all n locations
agacgccacatatatagttgcaaaaaaagttgtaaaccnncaaataaaattttttcaacacgaaagcttcatggggcnttcaaatatatcaactcttttgtcaactcatttatccatttatgtttctcattcctatagtctccaccctgcaattttttcatataatttatgtcaaaatttttatacacacaacataaaaagaaaaaaaaagaaattcaataaaataaatgaagagattattactgagatgattgaagtctacgacatttgcgggtacatttatctttacagtatttttctggatgtgtaaaaaaaaagttacacttggtctcgcaaagatccatgcatgtagcatatgaaagccgcccttcaacgtcatctaccatagccaccataactaccaacaccaccaccatcaatacaacacattttttcatactcactttttcttgtataaataattatatatatgttcactacaaactttgtatatatatatatataggggagaatcatgcactggtaaatcttatgttatttaatttattaatgaagcgttacttttataagtaggttaattattatattt

SEQ ID NO: 80647 - DNA, 130 bp, Arabidopsis thaliana landsberg
cgaagggggaaagaagaaaagaacgcgaagagaaggacggggagagagaagagggggaggaagggaaaaggagaacaaagaggagaaagagggggaggccggagggaggcggaaagcggaaaggaagcga

SEQ ID NO: 80648 - DNA, 437 bp, Arabidopsis thaliana landsberg
  unsure (1)..(437): unsure at all n locations
cgatccacggcaacaagacgcagggccaacgacagcgagcactccgtgaattcaaggagaaccgttttcgcgttctcatcgccactgatgtcgctgcccgtggtcttgatattccgaaagtatcacatgtcataaattatgatgtgccaagcacgtacgaggattatgtacaccgcatcggccgtaccggccgcgctggtgaacgaggtcaggcactcaccttcatcgaagatatccggtagaggatcggctccgttcctggtatgatcatggatatgagacataccaccgccatcatcatcgcaatcaccgccgccacgcttntgggcggggtttttgcgtatncgcatcttcctgcactggtcgctttccactggaacataacaggcgaggctaatggatccatggatagattttggggcatctttattgtcccc

SEQ ID NO: 80649 - DNA, 398 bp, Arabidopsis thaliana landsberg
caggagaaatccgcagccagacaggacagctggctatttgagcgtctggtctaacgagagagcctgtctcagaaaatggagtggaacatagtgaaatgtcttacttacagtaaaccagtccccaaagaagtctttctgaaaatactttccccatccatcaattttacattcctgtcttactacatagtaagtgttcttggatgacttttgttggtcatgtgttttggggacaaaagggaaatgaatgtcactacaacagaatgtttgttcttaactcacatatcaaatgtccctcagttttctttttatttagatttctaacacttggtagattagccaattttagtgaaggtgtttgtaaatagcttattgctcatttgaacaaattaattataaat

SEQ ID NO: 80650 - DNA, 449 bp, Arabidopsis thaliana landsberg
  unsure (1)..(449): unsure at all n locations
gaaacgaaaaaaacgaacaaaatcaacttagaggaagaagaagagaacaaagcctacgacaacaaagccagagggnacgagacgagacaaaaaaaaccggggacgnagcgcccaaagcacaggcccggcactggacgcagccgcccccccgggcaaaacgcctaacanagacaacgctccggcggccaagggacgagagactctcggacaagaaaggaacgcgactcgcgaagcacagcaatcattaggaaataaccgagctagagctggagctatgagagcgacagagggcctaaagagaggaacggacgaggctgagaagggaaaccctctaagcgacccaggccgcggagcgaccctaggacgaaccatcaacgagcatggggaaccccgagacaaatcaggacccgacgacactcgcacaacatcggccatccataaatccgcgc

SEQ ID NO: 80651 - DNA, 468 bp, Arabidopsis thaliana landsberg
aactcttgtgggcctgaatacagctcagttggtaaagtgctctgcctagtgtgtacaaagctcttaagttcaatcctttggcaactcctacaactgactggggtgggcactgtaatccaggagggtcagaaactcaaggtcactttcagctatatagcaagttctgggcctgagttatatgagaccctgtctgtggacaaaaatgattcttgtaggaatcataggaaagctctccaagacttaagttttgtttttgacagagtcttatgtaatcagtctctgcctttcaccttccaaatgctgtatccaatacagttagttaaatgaaaagaacacacaacattcatagcaaaacatctaaagtcctatattgtgtctgagtgaattcacactgaaatatggtggctaactggaaagataggaattttgagcaaattagttgatttcagtatgtaaaaggcatattga

SEQ ID NO: 80652 - DNA, 243 bp, Arabidopsis thaliana landsberg
  unsure (1)..(243): unsure at all n locations
ccaacctgttttctttaacaatccgtatggtgcatgtcctacctgcgagggctttagccaggtattggggattgatgaagacctggtgatacctgataaaacactgagcttatacgaaggcgctgtggcgccgtggaagggagaaaaacttggcttgtggcgtgagcagttcattaaacatgccggaaagatcggcttcccgaccataagcangtcatcgatcttaccaaacagcaataccac

SEQ ID NO: 80653 - DNA, 149 bp, Arabidopsis thaliana landsberg
aacggcagaggaaacgacggagagaggcccagcggcccgcgccacacgcagagaggagttcgcagcaaatgagaggcaaccagagcaggcgcgccggcaaaaacaccacaaagagagcaccccgaacaggaagagcaaccggaacacac

SEQ ID NO: 80654 - DNA, 433 bp, Arabidopsis thaliana landsberg
  unsure (1)..(433): unsure at all n locations
cggacgagttgttcgtgtgggacggcccgacgcgccagcttatattccgggaagccgagcacgagcgggacatggcgaaccggcgcgcatggctggctgcgcgcggcatcaccgaactgccactggccatcgccgcggacctcacgccacacgtgtgggacgacgtgagcggtgccttcgaggccggcttcgcgacggacgtaaacggcagcctggcgcgccggccgcgcagtgacgagccctggtcggaggcggagaaccagaactggccgcaccactaccagtggtccgacgagcgctgggactggttcgtcggctgcacgagcgagctgggcgccgagcagctagccgcgctgcgatcggngctggagtcctcgacctgagtgcgttgcgccggttgtcaggctaccctgacgccatgggtccgcagtcg

SEQ ID NO: 80655 - DNA, 479 bp, Arabidopsis thaliana landsberg
gggccattagttatgatgcgagaaacctggcgagtatatgttctcactgaaatatatgttttaatcacttgattttcatcaaccaagtttatactatgtctgaaataaatgtagtcatatatgacaaatatacagataatacaacgttattttacgatattgtttttttcttttaccgctaaaggtcagaatttaattactaatgatgaacttttaaatatattgacggataaaataatcaaacatagatttaaaataattgcgactatatggctcaagtacagtgaactcgaccgattaaaaagattattattgtttgattcttattagaattgaattatggcgatatggtctttttgtaaagggttcagctttggtattattaggttagaaagagatattgtgcgctctgccaaatcactctaattaaagcaaataattatggctttggtgcctgcaacagacactcgaacatgatt

SEQ ID NO: 80656 - DNA, 658 bp, Arabidopsis thaliana landsberg
  unsure (1)..(658): unsure at all n locations
ggccttgcttagncgacgcaaaaccaagaaagatgacactctctacactttcttggacgaatactgaatttccatatccggtttttattngngcaagcgctttactaaaccggaaaattgtggatttcctattttttcttttatttttctatattatattttataatataaatacacaaactataccaaaacatcgaatttttacccatacaaaagtcataatcatgattcgtgttgttatgagatataaaatttcacgatctgtacatcttctcgatttgatatactatggtcatagattcgatcattagcaccaaagggatatatattatatatattagacatatacatattaacatatataagagaaaaatttaacataatacatttacaaccaatcgtaaatgctacgttgcatgtctattgacacccatcgggacatgctttgtttttcggatatacgacatgcatgacgggctcttggtgtatctgcatcacatgcccaagaaacaagaaagtgaggatgttcaaaattttattcatttgtaggtggaactttgttaccaagaatgagatcgtatgaaaaaaaaaatggttgagtttcgaacttataaataatcttatggttcagacaatatatggtaatctaatggaaaaa

SEQ ID NO: 80657 - DNA, 429 bp, Arabidopsis thaliana landsberg
tgaaacacttacgaagagagatatagattctgaactcgggtttaaattttaggatctcatgaaggcaatagggacaggggagacctgcaagtctgcgtgaaacagaatcaatactaaccatgtgacctgtagaacataaggttggctcgtgcgtttagctaggaacaagcacaaagtgaatgcaaacagcaacggaaatccaacaaaacaggaattagacctcaacgtaccaatggtatgaacatatagtgactgcatgaaaaaggctaggctgctgccaggactagcttcatatatatgagacaactttctagatagccagacactcttcatatcagcaaaggttgccaaatcatcccgaaattaaaaccagaagagattcaagattcaacagattgggagatggaagataagcgaaaatcaaaattt

SEQ ID NO: 80658 - DNA, 421 bp, Arabidopsis thaliana landsberg
  unsure (1)..(421): unsure at all n locations
ccaaccaacaaagaaagccgaggacaaaacgccaccgaaaataaaatacgaaacgncaaaganacgcagccaggggaagctaacagaaacgcgacgagccgaccccggcccacggaacacganagaacgaaggacaagcacccgcagaacgggcaacaaccccaaccaggaaggaaacgcgccaccgacacggagacccaccacgaccagaaacccgagcgcaccgcagccgaccaacgacccgggaagcccaccagagaaaagggcgcgaccaacaccaaangaccgcaagcgacgaccganagcccccncaggaaaaacaccagagaggcngnncacccgaacaagcaagaccgaaagagccaaacacccaaaacaccccggaaaagaaccgccgcagccgccgggggacaaaacaagc

SEQ ID NO: 80659 - DNA, 287 bp, Arabidopsis thaliana landsberg
tggatcgaaccgaagaatcactaacacgaaatcgagagaattttctttttacacttccaaatgactgaactggggagggataacagatagacatcgacacgtatatgaatgcacaagagaaatgatatactagcaataccgctgcagctatagtgcgaattacttgaggaatcgacaatcacatattaaaacgcatggaacaatggctaacaatccggaatagcatatcctctgcgtgtaccactatgcatggacgatatcagagactagctacaactgtacactaa

SEQ ID NO: 80660 - DNA, 155 bp, Arabidopsis thaliana landsberg
ccgcagcgggccaggagttcgcgtgaatcgtcactttttacgctctgattattgaatagctatgcctagaccctgctcatcttacattctctattcctccctaacccgttttaacctgtctgaatgcggtccaaaaaaaagccccctgaagataa

SEQ ID NO: 80661 - DNA, 547 bp, Arabidopsis thaliana landsberg
ttctagtttagacttaatttgatcatcaagacagaactattcatttagctgaatttaatattcaacccaagcgataacacagcgtataagagcaattattgacatattgtcatcatgcaaattgtaaagtcactagtcattgatgtaagatctcttaacaaactcttttttcaatatatttctaatgtgaaatcggataattataatatgtagaaaagttgatacaatcatttactttcaaattaattatcgtctaattcatataaaatcatgcgtagttgtggaactttatttactactattagtaacttattttactgttataatgaaattttgcgtgaaaagcttcttacttgtgaattaattcgcatttggcattacagtgacatgccttgtcgcttttttccagtttagtgtttttttaatcgtatattcgtatgagagaatatcattaattaaaaacgttaaaacaaaacattatcaactcaattattgacaatattacagcatcaaggaacatgttcgtgaccgcgacgcccatttttta

SEQ ID NO: 80662 - DNA, 554 bp, Arabidopsis thaliana landsberg
aacaaaagcaggggtgtagaagtgatcgggctcgcttacgaatactccaccgactgggagcggtcaaagaaaagcatccagaaattgagggatcgttttcatgtcaaatataccctgctcaatacaggcgtaaccgtaacggattcgctgcgcacagaaaaaacactgccccagcttactcccatcaaatccttcccctccaccatattcctcgataaacagggccgcgtagccaaactccacgccggcttcgaaggccccggcaccggcctccactacgaagccctcaaaaaagaatttgcagaaaccgtagacagattactaaagaaataaaaagaagctaatagctgtgagccaacagctattagcttcttcctcctacttcgcgttcttcacatacttctccagccactcattctgttcccaaagcatatgcaacaggttttccctgccgcgatagctatgcgcttcataaggaagatatacaaaacgcacggtgccgccatggcctttgatggccgcaaagaggcgctcactgttgatgggataagtac

SEQ ID NO: 80663 - DNA, 379 bp, Arabidopsis thaliana landsberg
  unsure (1)..(379): unsure at all n locations
catatgcacatgtgcgtagaggctgcaagggaaaataactatagtggtgcgattcaagaannnnnnnnnnnnnnnnnnnnnnnnnnnnnnnnnnnnnnnnnnnnnnnnnnnnnnnnnnnnnnnnnnnnnnnnnnnnnnnnnnnnnnnnnnnnnnnnnnnnnnnnnnnnnnnnnnnnnnnnnnnnnnnnnnnnnnnnnnnnnnnnnnnnnnnnnnnnnnnnnnnnnnnnnnnnnnnnnnnnnnnnnnnnnnnnnnnnnnnnnnnnnnnnnnnnnnnnnnnnnnnnnnnnnnnnnnnnnnnnnnaacctacaccatctttcattatcaaacttagaacgtcttcttttattcataaaatccaagaaatccccggaacacaa

SEQ ID NO: 80664 - DNA, 140 bp, Arabidopsis thaliana landsberg
  unsure (1)..(140): unsure at all n locations
aacgannaacaaaaaggagaaaggaagaaaaaaataacaagnatttaanggaanaaganacagagaaangngaagagaaaggaaacgnnaccacggaccagaagccgacgaaaacaacaacacccgacagaacccaagaa

SEQ ID NO: 80665 - DNA, 589 bp, Arabidopsis thaliana landsberg
gcgtgaacgacctgctgatggccatgcgcagaaaacaccaaaaagattctgggccaggaatttttgatccttctcaacgagctcgaagaaaaatggcacttcagctctttggagaaaatctttattgagaaccgcatctaccgcaaaatcgaagaagcggaaacctgggaggctgtgatcgccaacatctggaagggcctcaagccgcacctgcacatcctgcgccgcgaggtcacggatgatgacgtggcgcgcctgacagaaatcaagatcaagcgcatctccaagttcaacagctttgaggcggacgagcacatcgccgagctggagaaagagatcgaccaggtgaacaagtacctgaagcagctcaccaagttcaccatctcccatttcgagcagctcaaaaaaacgtatggcgccggcagggagcgccgcacggagatcagcactttcaaccgcgtggccgtcgccgaggtcatcgtgcatggcgagacgctgtacctgaacgccaaagaaggcttcgcctgcaccaggctcaagcgcgagggcgagccgatctgcaatgctccccgttgatgatgtgattttc

SEQ ID NO: 80666 - DNA, 342 bp, Arabidopsis thaliana landsberg
acacggttccagcacaatgaacttgtctaattcaattctagagaatttaaacatgcaccgagacgagattaaagtcatcactgaggtctaccccgacccaatgccacattgaagcgattatatctctcgtatactatcacgtacataattctcgatatttcatacctctaatatctgattatttaggtgtctactctttatgaggaccactcggatccgcttgaagagttcactaggtttctaccagactcattaacgcctcatacaaaaacccatttacttcgaaatcaagcccaacggaatgatgaccgaagatcaggccctccttatgcgcagtcaatg

SEQ ID NO: 80667 - DNA, 436 bp, Arabidopsis thaliana landsberg
  unsure (1)..(436): unsure at all n locations
cgggaaacggtcgaccaaaaacgcgacaaaggccgccactttgggtctgaccagccgccgcgagctgtgcaggacccacacctccacgcggcgctcgggcaaggcgccccagagcttcagcttgccttcggcgatgtcgttgcgcaccagcgagcgtggcagcatggcggcaccggcgccggccacgacggcgtcgcgcatggccgtcagcgaagacagcacgaggcggtaatccggccgcaggtggcaaacctgttcgccggtttgcaactgccacgtggtggcgttgatcgggcgcgtcatggccacggcggggacactggccngcgccgtgggatctgtccgccgtgggcgggatcaagccgggcggcgccaccacccattgctcgtcgcgcgcaaaacaatggcccaccaattcgctgtcagggctggggtt

SEQ ID NO: 80668 - DNA, 435 bp, Arabidopsis thaliana landsberg
  unsure (1)..(435): unsure at all n locations
tcnnnnnnnnnnnnnnnnnnnnnnnnnnnnnnnnnnnnnnnnnnnnnnnnnnnnnnnnnnnnnnnnnnnnnnnnnnnnnnnnnnnnnnnnnnnnnnnnnnnnnnnnnnnnnnnnnnnnnnnnnnnnnnnnnnnnnnnnnnnnnnnnnnnnnnnnnnnnnnnnnnnnnnnnnnnnnnnnnnnnnnnnnnnnnnnnnnnnnnattgaaattaccttcgcaggggtccttttcaattacgttgttattttgtgattatcttttgtattttttaaatgagaacttttgatggttggtggtgtttttaggcaaagcaaacgaaattagagccatagttttttaaatctaacacatcatggctgctcacttaattaattgcattaaaattaatttaatgatgtacataatggtttaaattaaaatttaactatctcctcaa

SEQ ID NO: 80669 - DNA, 538 bp, Arabidopsis thaliana landsberg
  unsure (1)..(538): unsure at all n locations
gggctngcgttggtctggtcgtgatggtgtatcagaattggtttcaattggtgaagctgtcacagctcttcgtgtgagagtggaatgtggtcttttgagtgaagcattcacataccaaaggacactctgcttgaaagtaaaggaaaataatttgaaaaatggagctgtgaaacatgcgtctgatgatctagacatctggagttggacggaatggatggagatacttgtcaatgaattctgctgtctttctattcggagaaacttggttgatcgaatcattgagnnnnnnnnnnnnnnnnnnnnnnnnnnnnnnnnnnnnnnnnnnnnnnnnnnnnnnnnnnnnnnnnnnnnnnnnnnnnnnnnnnnnnnnnncttggttgtcttttatcttcaggtaagtaattatattttcaaactttaaataacttcacttgaacaatgggctgagaattggttttcagaacgagaatagctttagcaacaggcaaatagatatttagacagcagcttaaacctcccgagccttaagctacatatt

SEQ ID NO: 80670 - DNA, 407 bp, Arabidopsis thaliana landsberg
  unsure (1)..(407): unsure at all n locations
nnnnnnnnnnnnnnnnnnnnnnnnnnnnnnnnnnnnnnnnnnnnnnnnnnnnnnnnnnnnnnnnnnnnnnnnnnnnnnnnnnnnnnnnnnnnnnnnnnnnnnnnnnnnnnnnnnnnnnnnnnnnnnnnnnnnnnnnnnnnnnnnnnnnnnnnnnnnnnnnnnnnnnnnnnnnnnnnnnnnnnnnnnnnnnnntgcatctcatttcttcagttgaatcagaagttccgcacccgcccgcatatgaacttaancagtttacctcctggtttttccttgtgtataacatcagtactgttatttatttcgtttatagtaacgggaatctctgtagaaaattgggagaaccatactcccncncgcnncgnnnnnnnnnnnnnnnnnnnnnnnnnnnnnnnnnnnnnnnnnnn

SEQ ID NO: 80671 - DNA, 595 bp, Arabidopsis thaliana landsberg
  unsure (1)..(595): unsure at all n locations
cgaatagccggtgccgaagtcgtcgatcgcgagcgacacgtttaggtttcgcagcgcgcgcagcttgtccggggtctgtggcgcgttggccatgannnnnnnnnnnnnnnnnnnnnnnnncagcgacgcgggcggcagcccggtttcctcgagcacgcggccgacgacgccggggaagtcgccgcgcagcagctgcagcgccgacacgttcaccgacaccgcgagcgccggcaggcccagccgctgccacttggcgaccttgtggcaggcttcgcgcagcacccattcgccgatttcgaggatcgtgccgctttcctcggcgagcgggatgaattcgaccggcgggatgtcgccctccgggccgtgccagcgcagcagcgcctcgacgccgacgatgcgcgatgtcgcgatgtgcaggcgcggctggtacacgaggcgtaattcgccgcggtcgatgaccttgcgcagcgcgcccgacacggtggcgcggtggcgcgcggaaacatccatcgcctncgtgtagcgcgagaacgtgcggcggcccgcggccttcgcctggtacatggccgtgtcggcctgcttcagcagctcggtc

SEQ ID NO: 80672 - DNA, 630 bp, Arabidopsis thaliana landsberg
  unsure (1)..(630): unsure at all n locations
acattcatatcgtaggtttagtcatttgagagagaatgagggtagatttgggtttaaaattttataacaacctatcttaccaatcgactaaaaaggtatatatggacaaaagttgttgtagatatcctacatatccaattttccctatatatttttttccaaattttgagtgtgaaaggaatacaaattcaatttgtttggatgaaataatagttaattttacttgatttggattttattttcttacaacaagtcaaatatattttatgtctatatttaatctatcttatctcctcgtaattaactacaaactacttcatgtatatataaacgttctcatctcatgttcctcctacctatgaataatctaaagtaacaaatattttcacttttcttttctttcttcttcacaaaaaaatatattcctttaacaattcaacccatggagaaatcgcaatcatcgtgtgatacacggaaaagaagtgttgtagttgatgttgacaacactaaagatcgcattagcgatctcccaaacagaattttgggtaaaatcatagtaaaacttnctttagacgaaagtgtgagaaccatggctctatcaaacgattgaagagtatatggatgataatg

SEQ ID NO: 80673 - DNA, 369 bp, Arabidopsis thaliana landsberg
  unsure (1)..(369): unsure at all n locations
ggtttagatcagntcaaccggctaagtctgaattactccacacattttccgctatattatcccccaatanncatatggaagaggatattaatctaaacctttaatctaaaaagatnnnnnnnnnnnnnnnnnnnnnnnnnnnnnnnnnnnnnnnnnnnnnnnnnnnnnnnnnnnnnnnnnnnnnnnnnnnnnnnnnnnnnnnnnnnnnnnnnnnnnnnnnnnnnnnnnnnnnnnnnnnnnnnnnnnnnnnnnnnnnnnnnnnnnnnnnnnnnnnnnnnnnnnnnnnnnnnnnnnnnnnnnnnnnnnnnnnnnnnnnnnnnnnnnnnnnnnnnnnnnnnnnnnnnnnnnnnnnnnnnnnnnnnnnnnnng

SEQ ID NO: 80674 - DNA, 123 bp, Arabidopsis thaliana landsberg
aagcaagaagggcccaaagaagaaccagcgcgaacacagagactaccgcaccggaggaacaaaaaaaacacgcggattaacttgagcgacagacgcggagccgggagaaaagacacgcacaaa

SEQ ID NO: 80675 - DNA, 583 bp, Arabidopsis thaliana landsberg
cgaaaatatggtcagcacgaagtttgtttatcaaaatttagcctctcgttacgaggaagttttgaagataagtaacccgggtgggcaggaaaagttaagcgccggactaattaatggtataccgttttcttaccctgagagcagggcggagcagcaagcaataatcgatgttctagcctttgcagacgaagtgattgacacgcaaagccagaaagtcgaagcgctaaaaatgcacaaaaggggcttatcacaaaggctttttgtcattccagctgaggggacgatatgaaagcgggacaggccttttctgagctttcgacactggccacttatttgcgaagcgagcttgtaagtaagaaggccattctgctttatgcgtataatggtacgggcaagacgcgactttctatggccttcaaaaacttgggcaaagatagcgaggcccgcgatacgctgtactataacgcctatactgaagacctgttccactggaataatgatctagagggtgatgaggattcgcgcctactgctcaacgaaaactcgcgtttatttcaggggcttgtcgatctagagatggaca

SEQ ID NO: 80676 - DNA, 574 bp, Arabidopsis thaliana landsberg
  unsure (1)..(574): unsure at all n locations
tgggacttgcacattatataagtacgacgacaataatttagctactgcataaccaccaaaaacgcagacattaattcttgaaaattaatcatttcaatatagctacatttatttttaaagtttaatccaaagtatgtagctagatgatagatgattgataatttaatctaagactccaatttcccaagagagtaaatcaatcttttcacatgggacttgcacaaattacaagtacaggctacaaagatgtcatcccaattttaaaattagaaactcaaagacttttgcctaataaagcaacaaagactagtcaatgaaactaagtaaaggactccgaacattactctaatattggcgcgtggctccgcaattccgttagaacataacaaaatccgtatttctacaccgtatatctcaacaaaatatacgtatacacatacacatacctcaagctttctagattgagctttggctttagcgtttttcaagattaacccatgcttgaatnttggcctcttctctttgataccttcaaaaaaattcactttcaattttataattcatcaagattttt

SEQ ID NO: 80677 - DNA, 436 bp, Arabidopsis thaliana landsberg
  unsure (1)..(436): unsure at all n locations
gaaaggtttttcagcccgcgacaccgataggactcacccatgaattgtaatactctcgccgctctggccctggccgccagcccgctcgcgcaggcggcgccactggtggatgtttacgccggcggctacctctggaatccggaggccagcggcaccattgcctccgggggcggcgacatcgacgtgcacgatgacctgggcttcgacgacgccagccagtcggtgctgttcatcggtctggaacatccgctgccgctgctgcccaatgtgcggctgcgctactcggacctnnnnnnnnnnnnnnnnnnnnnnnnnnnnnnnncgatcacctttgacggcaccaccttcgccggcaacgtgcactccagctacgacatgaaaatgctcgacggcaccttttactggagcccgctgaacaactggatccacctggacc

SEQ ID NO: 80678 - DNA, 100 bp, Arabidopsis thaliana landsberg
ggcaaggaagaaagaaggacccgccacgcccagaaacggaaagaagctgagggcgggggtggcgggacccagctccacccccgtcagaagacagcggacc

SEQ ID NO: 80679 - DNA, 230 bp, Arabidopsis thaliana landsberg
  unsure (1)..(230): unsure at all n locations
acagaaagcgcacagaccgcgaagaaggaaacacggacacangcgcccaggaccaccaacaccagaccaacaccggagcacggaagcaacacgcgcacaccagcaacaggcacaccgaaaagcccacagagacaaacaccgcgaagcagaagacaaaacacccccaagaaagcgagacacgcaaccccaaacccaaaggagcaaccgaccgacagaaaacggaaagagcc

SEQ ID NO: 80680 - DNA, 389 bp, Arabidopsis thaliana landsberg
cgtgccagacacgtatgcgcggctgagtcggacgttggatgagctgggcgtcgactggtatgtcatcttcagcgccgatccgtgcacgggtcgcaccgaagacctgatcgtgcagctatgccacgaagacgcgcgggtgaagatgctgcgcttctcgcggtggaccggccatccgatggccactatcgccggcatggaggccgctcgtggcgacgccgtctgcgttgtacactgcgacctacaggacccgaccgagctgccccccgagctcgtgcgacgctggcaggagggatacgacgtggtgtacgcgcagaggcgaacccgcgccggagagacgctgcccaagcggatggtctgcgccgtcggctaccgcctgatcaggcggatcg

SEQ ID NO: 80681 - DNA, 565 bp, Arabidopsis thaliana landsberg
ggtgcccttcactgctgttcctgacccgggtggagcatgccggcatggtgctggtgttcgccgtgatcaccgccgggcttctgacgatgaccggccacccacccatctgctttgtgatcacgctggcctgtgcgtgcgtggtcgaagtgatcctgtggctcggccggtaccgcgcaccgagctcggcggtagtcggctacgccgtctacgcggtctggtatgtcgggccgctgctgccgatcttctacgcgcgtgacgactacttctccagccagtccatgagccgcatgggtcccgattacctcgcgcaaatggaccggttactgtcaccgacggtgctgatcgcattcgacgtctccacgctattgttcgggttgctcggtggcctactcggattgcgtttgctgcgcaagcacttcgaaaaggccggcctggcgtgacgcgtatgatcgccggggccgccccgctggaccccagaacgaagaccctgctggtgctggccctaagcatcgtcgtgatgggacccaacggggcgatgttcgtccccgtcaccgtcgccctggga

SEQ ID NO: 80682 - DNA, 598 bp, Arabidopsis thaliana landsberg
  unsure (1)..(598): unsure at all n locations
tatttttctctttgatttccctgaggattgattttttgttctgacctttcctctcttatttttgaagtcggatttgattgaagatgacatgagatatggctgcattgaatctatcaaaggtaattaatcatggcttctttgtgaggagttgtaacatcatatttcctttactcttttgaccaatgattttcctttttgagtctcttgtttaaaatacttgaattagtcttagtgtacatgtttatacatcacatttggccagtgatctgagcaagttgaattgactctatgtttacctgaggtagcgagtctttacattattttctttaaaggccaaacaatgtaacatataattagaatggtcaaggtatcaagaaatagtcgttaactaccttatgagttaatcctagacagtagttgacgaagaactagtagtgaacactagagtttgaaaaatagtagtgaatatagagttttgaaaaactgttatgtagtatatttgacttctgatctagacgctgtattgatgtgttctacgctagtcttttctttnggttatacaaatcacatgtatggagtactatcatacaatcttgtt

SEQ ID NO: 80683 - DNA, 354 bp, Arabidopsis thaliana landsberg
ctcggaccgaatgcgccaggcgggacgttgccctctcctggcggcggcctggctggacaacctgccgtcgtgacatctcctcgggaaggcgcggtcaggccgagactttcccgtgttcgttgcgcaactcgcgccgaaggatcttgcccacgttggacttgggcagcgcgtcacggaattcgatgtggcgcgggcgcttgtagccggtcaggttgtcgtggcagaactgcttgagcgcatcggcggtcaaccccggctccttgcgcacgacgaacagcttcaccacttcgcctgagtgctcgtcggtcacgcccaccgcggcaacctcggccacgcccggatgctgcatgacca

SEQ ID NO: 80684 - DNA, 339 bp, Arabidopsis thaliana landsberg
gtgaggggtctctgaagctaaacaagacacctttttcccaattttgttttaccaagctggaaacccccaaactagaccacagatggggtgttcttggttcttcaagcagcgcagccagggtgaggcactcgtcagttgttccaacgatctagcggagcgggatgccgggatggtgcttcttcggcccagactggacgtgcacataccctttttgcccacgcgggctcctaaaccattctgcaatggctttacgaatgctctcaagtagcgaaactcgctgctttttccttacacagggcatagtcttatgacggaataccacaaattttccattccaag

SEQ ID NO: 80685 - DNA, 664 bp, Arabidopsis thaliana landsberg
  unsure (1)..(664): unsure at all n locations
ccgttcaaactcacttgctctctcacgtcctttttatgtgttaaattgtcatacacaaaaaaaaatcttatatttataatcngcctaaagcctttaatgtcaaaattatatgatctatttatatcagtaatacaaatgtaaatcgctatattttatatttttgttaaaaactaaatacaataatttaaaagaaatattttctttttctttttatttgcgaagatattgtttagtcgtatggcattatattagttacttacttagtagttttacagaatgaggtgaagaatgtcggaaaaaagaaagaggtgacgaagaattttgaccaatttgctactttgtaagggaaatataatacaaaaaaattgtatttagcatcattacaaacaatttctccattttgttttaacttttactatcaattttattatttttatacgaaacttataattaataacacgaggtaagcctgtttggtaaattgagtatgtcaattcatttcatgagataataaccttcaaaaaagttcataagatagttgccccatatcggtacttaggctaataaaacagcttattattgtgatataaacagaacttaacacctatatataagtacttacacttatttttatatgttgtataaaacactaagttggtaaatc

SEQ ID NO: 80686 - DNA, 582 bp, Arabidopsis thaliana landsberg
  unsure (1)..(582): unsure at all n locations
tcgagattttgncgacgccctgcagcagcgccgccatccgctccaggcccatgccggtgtcgacgttccgatgaggcagcgggccctctacgtcgaagtcgtccttcttgcggaccgcggacagctggtcttgcatgaagaccaggttccagacctcgaggaagcggtcctcgtcggcctccgggccgccgtcgcggccgtagcccgggccgcggtcgtagtagatctccgagcagggaccgcccgggccggggacgcccatgtgccagtagttgtcggacaggccgcgacgctggatgcggctttccggcacgcccaccttgtcgcgccagatccgatgcgtctcgtcgtcgccgtgcagcacggtcgcccacagcctggactcgtcgaagccgaatccgccgtcccgctcggggcgcgtcagcagttcccaggcgaacgggatcgccgcttccttgaagtagtcgccgaacgaccagttgcccnnnnnnnnnnnnnnnnnnnnnnnnnnnnnnnnnnnnnnnnnnnnnnnnnnnncgagggtccgcacgatttttgcacttccggatgcgccgggccggc

SEQ ID NO: 80687 - DNA, 346 bp, Arabidopsis thaliana landsberg
  unsure (1)..(346): unsure at all n locations
aacgtgcgagtgattctgtcgatggctccaggccaatgcctcgacactctcctacgcagaggctacgagatgtttgaagtgcgctcggccgactcgaatcgttcgagggaaagcttttcacctccgttagatgcgcttgcttcaggagggagannnnnnnnnnnnnnnnnnnnnnnnnntcaactggcaaagcaaaagactctttgagaaacaagtgaagagttgggcggtttctcgcgttttctttgccattaatagtgtgagtgagagtgtattgttgactaaacatgactgatgagtttgtatatgacacacaggcacatcattgattcaggagcatggtatt

SEQ ID NO: 80688 - DNA, 542 bp, Arabidopsis thaliana landsberg
atttaagtaaaaacaaccttactctcaagactcagaagcaagttattcccaggggacttcttcataatggagaattgaactgttttaaacttcttgagagaaaaaacctttttcgaagttccttttgagtaaaatatacagctatctgcaatttgagtatgaagtcttcttgacctgagagtattcttcaggctagtaactaacgtgctctagacagaaatataagataaaagacgaaagatggtgtaagtatgttgactcatttcacctacacaaaaaaccattaacaatgttcacaatcgctccttgtaaatttgattaattttgactctgcttatgatcctcaccacataaataacaagaaaatctgtgttttattttattagtcgaaatcgctttaatttcagtttaaactctcaaaaaagttatattgctgaaattaagcgattcaccaaacgctcacctggtttaaagcagcttgaacttagtattgaagaataacctttttcctttttgcttctatgttcataataattttcata

SEQ ID NO: 80689 - DNA, 534 bp, Arabidopsis thaliana landsberg
gctccgcgacgcagatgatccaccaggaatcattgttcttcgtactgccgtttttcttcatcaccaccttctgttaacagcggccagctggtgttcaccggcctgctcggtgccgccgggctgatttcgatcatcgacccgctgtactacaaatggctggcaccgaggcgctggctgttcctggcgctgcataccctgaccctgttcgccgccctgctgactgcactgccaatcatgctgcacctgaccactgcgcaaagcttcaagctggcccttatcgcagccatggccctgtcgttccccagccttgtcagcagtttcccgatcaacaactggcgccgcgccggggccctggtggtggtcaccctgtcggtcggcggcgggggctggctgctgcgctcctgggtgccaccagcgaccttgtggatgaccgaagtggcggtcagcaccgaagtactgaaccgccagccgggcgactcgctggacgagattggcgccagacgcatccgtagcagagggctgtacgcctacacc

SEQ ID NO: 80690 - DNA, 625 bp, Arabidopsis thaliana landsberg
ttattttttaacggttttcatgttttgaaaaaaaaaaatcttgatttatggaatattaaatagattaccatcgttttgcaattaggcaattaaattagttagatgattgacacaaaaaaaaaaaaaaagttagatagtatatgaacagaactatacgtcttgcatcgatggttcttcaacacatggtccctcggttagcttaattgttcccatcttttttatgtcgacgatatacatatatacgccacatatatatagatatatcatagatatattggctgttgacacgaaaaagaaaagaataatcaatttattctttttatattcatgcattatttatttttagtactattaaaaactatacccacattaacatgctgcttttagaaagtttacaataagctagaataataatttcgtttaaatggaaaaaacgttgtgactaattttaggatgcaatccttttccattcgatatggatttctaggagattttttctgtggttttctgaattagtttatggtcatcaaaatatttaggtggaaattttcttttagaaaaccgggcttgaagaatagattgagaagcaaatcttaaccttttaaaccatatttttgaaaggatt

SEQ ID NO: 80691 - DNA, 627 bp, Arabidopsis thaliana landsberg
  unsure (1)..(627): unsure at all n locations
aaacctctcttttatgtgttttgaatttctcagcataatggtatgaactgtcataattctttatactttatgatttttctcttttctttggtgtgggaaatatatgtctttttacgtgattgaatatataaataggattattgtttttagttaacaaaacannnnnnnnnnnnnnnnnnnnnnnnnnnnnnnnnnnnnnnnnnnnnnnnnnnnnnnnnnnnnnnnnnnnnnngctttttttggtttttaagattcgaaaaagaactttttgcctcatcactatctttacgttaataaactcagcnnnnnnnnnnnnnnnnnnncttaacatttctaatcccgatctttagtcaatttgcttatttcttttacaaacactcccaacattcaataaggatcttgtgtagaaactacactctacacaagtgcacaacgccctaaggcccataacaaaaaattaaggttaaataaaggtgcacttgtagttatgtacaaacgactagacaagagtcataaaatttgaaaagtttaatgtcacattggtatcaaaactattgttggttggctgcaaaaaaataacatcttattgatcttttgaacctttttttgtatgacaaaacaattttg

SEQ ID NO: 80692 - DNA, 137 bp, Arabidopsis thaliana landsberg
  unsure (1)..(137): unsure at all n locations
cgaagaagaacgaacganncacnccaacgaaaaacaaagcgaacttggaaccagttacagaggaagagagacngcaccggcaacggcacaactatagcagaaaagccaccacaaacccgcacacaagncacaaaacc

SEQ ID NO: 80693 - DNA, 488 bp, Arabidopsis thaliana landsberg
ggcctgcagggtacgcgcaatgatcgctggtacgcgtgccagctgtggctggcccgtgttctttcgtcggccggagatcacggacggtgcatgggtggcgtggatcagcgctggtcgcgcaggcgcatgctggaatggggggacgggcttgcccggttcgaccgtgctgctggcggttgtgctctgaccgctacggccgggggcggcgggatgaccggccgcgacctgacagcaccggtattgaccgatccgtagttgatcggcaagtgggccatggtctctgacgggagggcgctgatcgcgttgacctatgactcggtggggcggatcaccgactgcctgcagctcgcaggggcaagacgcgataactggcggtgtgcgaagaggctcaccacccggccggggcggaggagaaggccaccgttgccgcagcgcggtcagggcccagactcctgccggcgaggcggtagctgtccctgaccgccacc

SEQ ID NO: 80694 - DNA, 128 bp, Arabidopsis thaliana landsberg
gcggggattcactatctcgggtgtgacactgcactagtactaaagatctcatcatgaacaactacaacgtgtgtgattacataaacagttatgcaaggggtgttctgagccatattcaacgggaaacg

SEQ ID NO: 80695 - DNA, 409 bp, Arabidopsis thaliana landsberg
  unsure (1)..(409): unsure at all n locations
agcacgaggcagccggacgagagacggctgagcacaaggcaaatggacaaccgcccttacagccgggcggccagacggacggaaacgggggcggccacggaccaacggccgcaagcccaaagggaggaaaagggcgagcagnaaagggcgaaggaaagggaagcccacaccacgagcccaaggacgcaaggacgcgcaacagacgacccgggaacccccgaaaggaacgaccagagggcaaggaagaaccaggacaagngcagccaacacaagacccggaccgggcaagggaccggccaaagcggcgacgcggcccggcagaggaccggcgggccacaacaaaccggacgagaaacggcaggacggacgcgcgaccgaacacacacagaaacccacccacggaaccgag

SEQ ID NO: 80696 - DNA, 523 bp, Arabidopsis thaliana landsberg
gattccatcaatgtcatttggcgtgtaaaagccaaacttagaataggctggcttaaactgctgctcaacagactactcagcttttccatcgtcatcggtctgggttttatcttgctggtttccctgctcgtaaacgctataattgcggcaattatgactcggtttacggatattttcccccagacagaagtattcacctcctatatcatcaatatagcgcttacctttttaaccattaccagtttatttgccattatctttaaagtcctgccagatgccaaagtcaaatggaaggacgtctggaacggcgcctttaccacggcacttttatttatggtcggtaaattcctgataggctattacctgcagcatagtagtattggcaataccttcggggccgctggttccatcataatcatcctttcctgggtgtattattctgccattatcctgtattttggggcagcctatacaagggccaatgcatgaataaaaggtcggatgatctatcccaatgattatg

SEQ ID NO: 80697 - DNA, 358 bp, Arabidopsis thaliana landsberg
  unsure (1)..(358): unsure at all n locations
aagaaaaagagcgacgaagaaaaaaaacaaaaagaccccanacataagggccaccggataactgaaccanaacaaggcaggggagcagcggcaatcgacggacaaacacccgagccccacaccaaaaacagacncacnncaacaaacaaccgaaaaaacgcaacgggacagaagaacacccagaagacgccacaanaagccgaagagccccaggcggggggcaaggggacgcnacccaaaaaacgggaacaacgggcgcgaaagcaacacgaaagaacaagaaacgcagaaagagcccaaggggcacaaagccccncacccgaagagggacaccccgcgacacacccaacaaggggaa

SEQ ID NO: 80698 - DNA, 188 bp, Arabidopsis thaliana landsberg
agacggccagggatttgggaaacgtgacaaatgttggatggtgtcgcggttcaaaggcagcacccatttagcatctctatcagtgtcagccacctgcatcacaagggtcaagtagactcacattgagttgagcaacgcttcggaatagtattgcgtgtcttctttcctgtcagccagttgatcctcgc

SEQ ID NO: 80699 - DNA, 452 bp, Arabidopsis thaliana landsberg
gggcggggggcccttggtcctggtcagacttgccgccagtcgtgtcggcgcgcggttaatgtggatggccggaatgagttagtgccgttcggcgccattgcgcgaaatcgcgcggtcctgcccggccggcggaaagtgatagtagagggtgttcagatacgacgcgacggctgccacgtcctgatcgtcccagccgagcagggtgttttcctgccagcgccgtacctgttttgtcaggctgggccagtcggtcgccagccgctgctcgcgccaatgcacctgggtcgtgtggcaggcgatgcaatgcgtggtgtaaagcaattcgccgcgcgacttttccatttcggcatcggcgtatgcgctggtggcaaggctgcaggcgagggcggccagcacatggtggtaatgcggtggactcatctcgtctcctgcgcgcatggcccgcgcagaat

SEQ ID NO: 80700 - DNA, 210 bp, Arabidopsis thaliana landsberg
cccctttgcaatctgcacaaatttcacatgttctataaaacaagacttaactggtaggctcaacacttaatactgataaatcccactgaagatatctaggaacaggataatgaaatatatcactaagacccactaagaattacaaatctattacactactctatattatataagagccatgagattaaggtatatatatgtagtagctcg

SEQ ID NO: 80701 - DNA, 301 bp, Arabidopsis thaliana landsberg
  unsure (1)..(301): unsure at all n locations
ggattcgtgttttggtaacaattcgcagcgtttgctagtttaccgtgtttcgattaattatactaaatcgacagggatgcgtggaaaattgaggaaannnnnnnnnnnnnnnnnnnnnnnnnnnnnnnnnnnnnnnnnnnnnnnnnnnnnnnnnnnnnnnnnnnnnnntttggtaacaaccaacggcgtttgttaggggattgagtctttattatggatgttatataaacatagatatttcgagcggcgttttgagcggccactatggatagaaacgccgagaagatgctgaagagagtat

SEQ ID NO: 80702 - DNA, 406 bp, Arabidopsis thaliana landsberg
  unsure (1)..(406): unsure at all n locations
agggacacgagacaaacgccggcgggcgccgcggcccaaaggcagcacccatagagcacccccattagtgccagccacccgcggcacaagggacaagaagacccacaangagacgagcaacgcaccggaanaggacagcgcggccccaaaccggacacgccagaagagccccgcaaccacaaacacggcccggcacacgacanggaaggcngcaccgngccaagcaaagnagaggcggaccagangcacgacgaggccagcgggcacagacacgccgaagccaagacggacgagggaaacacggccaggacagcgaacagagcgacgaaaagcgagacagccgggcgcgggcancncgacaagagnaaagcaagaacgaggccgcgagaancgcaccagaccccca

SEQ ID NO: 80703 - DNA, 136 bp, Arabidopsis thaliana landsberg
aatgtctgaaggtgtgatcccttttagctttaagcgaggatatccctgtatcccacttagaaaaatgggcaccctaaaaaccgtatgtaattaggttgcacaatcattaacataaggggatgccgagaaaaacaca

SEQ ID NO: 80704 - DNA, 553 bp, Arabidopsis thaliana landsberg
  unsure (1)..(553): unsure at all n locations
aaggtaaccaagagnaatgaacgattaagtgttttattgtaaaaagatgaaaaattagttcttatctttaaaacatgcaaaatttagcttgtcattccattgtattcctccaaacacaattacatagcctttagacgatcaattagagccttgtgcatcatatggtcctcattaggaacaacataaaaaaactaaactaaataattaaatcgaaccaaaattcatcaatttaaaactgaattgagtaaactggtttaagaaaaacggcatttttgattgatcaagagagttgatttaggatttagactacatgatctcgatgtaaagggtgcaaactaaacaaaatgatgtcagaatctagcaaaattttacatggtgatttgtggcaaaaatctcgcgaaatagttaaatatttaaatcgtaacagagaaatctttctaacaaattgattaatatttttgtctagttgaataacctccaaaaggaaaaataccgtttgagatagtttaatttagtttcaacgaatacatattagatcttagacaaaacgatc

SEQ ID NO: 80705 - DNA, 323 bp, Arabidopsis thaliana landsberg
  unsure (1)..(323): unsure at all n locations
tggaaacagaaacagtattgtcctcatgcataggctccaagagangtgccggccgacaaactaaatacgctcgttagtgaatacataaattatacgatacgaaattattaggggtataatttccaaccataaatgagagtcgttaattgatgtgaaaacaaatcttgtaggagtagtaatttagggaacataacagaaccttcacgttacgtaattagacactaaaataaaactctcccaagaatagcgtaaaagtttttaaaaatatatacagaattgaaagcactcaaatcatacttctcttatcgctctaaaaaaatcaa

SEQ ID NO: 80706 - DNA, 598 bp, Arabidopsis thaliana landsberg
gaagccccttagtctggatactcctggattcagcacaatcaactctcagaattgatacatagaaatagcaattgttcttagtttgcttcactaagagaaagacagtaacatgcgtgtgaattaacctcagatatgcaccttcacaaagtgccgatctttcagatacaaaacagattcctgaatagaatccttattagtccattgctgcacaaatccagtaacagacatttctaatcttttctgatctgtaaattctctcgcatgacaatctggaacctgtaaatattcaaccaccaaatcaatgaacaaactattcattcccaaaaccaaaaagactcaatttttattctttccttcaacagtttggctatggtagctaagccatggactattttacctgaactctggattttccaaagtgagtggcaaataacgtggagatgagggtttccattgtcactgaccaaatcttcccgagctcgccaatctgtagtgagatctgagattaccactggctggttcttagctaagtatctctcatgaaaatcgccgcaactcagctctttaccattgattctctcaattagacctataatct

SEQ ID NO: 80707 - DNA, 105 bp, Arabidopsis thaliana landsberg
aaaaaagcaaaaaaatttgcttctaaagggattcgaaccgggacgattgaactgttagatttattcccctatcctcagaccacatctacggattacaatgcattc

SEQ ID NO: 80708 - DNA, 550 bp, Arabidopsis thaliana landsberg
ggaataattctgacaagctgtcgctgataaaaggcttatggttgaataaagaatagtggcttcagtttgtattatttttttacatagaataattgtgagggtgttaggagcatccgcttttaatgcgttacaataatttcagtaagaaactgcttcctgatctgttttcatattcataatcctatcatgttcttttagatagtagtctttttcctcaaatttggtgcaaagtttctgtgtaattttttttgttatccctgtttactgaaaattatgattattgcaggtttgttatgaatgctttgaaagctaaagaattttacaagcgggatgtccaatatattgtgagagatgggaaagcacttataatcaatgaggtatagccgtataggtagacctgtcttcagttgtattaattgtttcatttcataaattgacgtgaggaacacagtaattattgtagtttcatttgtatcttgtttattctaaaaagtatgaggatctgagtaattaaaggattttaaatcttttcagttgactggaagagttg

SEQ ID NO: 80709 - DNA, 314 bp, Arabidopsis thaliana landsberg
acgatttttatgtcctatagggacatataccataacaaatttatttcattgctgcgagtgaatccattccttacttatgagaatgtgaatctacctaatatttaaaatatgtatgtatcagaagttaaatttgtatatcatttttagtaagagaaatgaagacatgaaacaagttattgcataaatggagtgtatattgttgtgtaaacatatcttacaaggggtgattgattacactcatgaatactatacttaagcaatgtatttttagaaagaaaagagggattatgatattaattattgtacttcgcttt

SEQ ID NO: 80710 - DNA, 633 bp, Arabidopsis thaliana landsberg
  unsure (1)..(633): unsure at all n locations
ggaagtaacctgaattcaattattgtttaagctaattttcaccttacatattacctatcttatctacatagatatatgggggacttggatgcaatcttcatccacaaactcattactataaatatttattattagcataatacaatcttaaattaagctaacaactactttttcaaataaacacactaacacattattttataatcttataaaaatacattatgtaatcaactttacactactttttttcgtcaacgcattacaaaaaaaactaaacttttttacttatacagtattttatattgctctagataaattatccacaatatacacttgaattcttgcataacatgctaaaaaaaggatccaaaggtttgaatttcatcgaatcaaataaatacaaaatgaaaaaaaactgttttagcacatgaagtttaaatattacgacaagctatatggtcctttctaataaattcagaactatgtttatagtcattngcgcacatattaaaatttataacatcacaaacatctcatttaatttacttattntacatagnatattatcatctacagntaatgtaaccaagcaaaaatatactataaaatatcattggtcaaaaaatactaaat

SEQ ID NO: 80711 - DNA, 458 bp, Arabidopsis thaliana landsberg
  unsure (1)..(458): unsure at all n locations
nnnnnnnnnnnnnnnnnnnnnnnnnnnnnnnnnnnnnnnnnnnnnnnnnnnnnnnnnnnnnnnnnnnnnnnnnnnnnnnnnnnnnnnnnnnnnnnnnnnnnnnnnnnnnnnnnnnnnnnnnnnnnnnnnnnnnnnnnnnnnnnnnnnnnnnnnnnnnnnnnnnnnnnnnnnnnnnnnnnnnnnnnnnnnnnnnnnnnnnncccatgagggatttcttgtttatttttacaaaaaaaatttgtttttttttagtgtatgttaattgctttaatttgtgttttgggattgtctctcattccaccttttttttttcttttgtatcaatttttttatgttattttttttttattttttttctctctcctattttctttttttcgtttctcgatatttatcatttcttttcttttaattttatatatcttttttatttcattatatatatatttctttttttt

SEQ ID NO: 80712 - DNA, 442 bp, Arabidopsis thaliana landsberg
  unsure (1)..(442): unsure at all n locations
ttggtaacgncaaccccagaactggggggttcatttacatacatggcgctggatttgccatcttcagtaattacccaccccgcacgaggatccaagaaatgtcattggggatggcgtgtccggaggcttgttttcaagcacagactgcaacggagtgcctcagtgcgattagaacgtggacagcacatcctctatgggggtgtagaaggactctgcgtgatatcgttannnnnnnnnnnnnnnnnnnnnnnnnnnnnnnnnnacgagcttacatctcccacttgggaatactgaacctttggattgtgtgttccggtaagaacagcactcttgcctgtggctagtatatggcccatatagcctcccagaagccctttggctcgatacccctccacatatctgagcagctactgaccgtgatctgtgcagcactttgcgccga

SEQ ID NO: 80713 - DNA, 545 bp, Arabidopsis thaliana landsberg
  unsure (1)..(545): unsure at all n locations
ctatgaacaacccttggacaattaacgacctaattagttaaaataaattctttataaatattttgtgacaatgttttggaactctacgaggtagagatgttgaatattacgtattttttttttttgggcaaaaaaatattacgtaattataataagtgtttaaatatgaaaagtattgactgaaatataacatgaactcatgaaggatacatttgagcggctggtttgactttcatattgttgaccaaaagtagtattattggggccgcaaataaagaagaaaatataaactagacgtggattctaaattaattataacactgatatgctgaaaagaatattgatattttttgttaagaatatatttatataagccatttatatgttacccgcatgttagtttatagattagagagaagcatgactaagctgtccattaaaaaaaatgcaacaaaaatcttaaaaaaactttccatacagacaattcttatagaaattaanatanaagacgtaaggtatttagaaaattaaaatgatcaaacaca

SEQ ID NO: 80714 - DNA, 555 bp, Arabidopsis thaliana landsberg
cttttcttatttaattatcagaacaatagaaaatgtgttaattttgtataactgtcaatcaaccaaataagttaacacttaacgtagcccaccgtcaatatttggccgtttctatgtgtcaactctttggattccattctaaatagataggtcaaagtcaactttttctatttcattgattgaatatgtttatcagcaaatgaaatcttggtttaataattggatgattttgttttaataattcgtgtatgatatgcataatttgaataattgcgaattttaaaaggaatctatggagaatacgactacagttaaagtgaccaacacgagtaacatagagattcggatctacgacaagttcccaagagaagaaactgtgttcttcaaaaaacattagtaagtcccgaagccaagacagtgtttattatatttactgtttaccattttatacttttctctttttgtcgatatatacagatttactgtgattattttcattttctgataaagattggaatctccacgtgtttaccccagatacagtgactgacaatt

SEQ ID NO: 80715 - DNA, 579 bp, Arabidopsis thaliana landsberg
atgaatatagcacaagaaatcaatataagacatcaaactagtgtctttatctttggaggccttattcttggcgggcgctggaccattctcgtccagcacagtataactacacaaaacatgaaacaaccaagcacatcaatattgatgaaaagaaggaatcctatattgaccaagggataaatctcagttccagctcagagttcagcctaccgcaaaatgatttttgcggtaggctgaactctgaactctgacctggaactgcgatttatccctcaacctatagtatgtcccttgagagaagcataccacaccatccttttcgacagcattcgctgttgaaaaagaacgcgtacttgttacagcaattataattattatttctttcaaacatctctgggtcccactaagacagcagtttggataacattgagtttatatattacctttgtaaaccacctgcatcctctatgagatgcttaaagaactgagattcgtctaaagattcgcctaataatgctttggtcaaattaggatctaaacacacatacacacatgggcacattgtacaacacattcatt

SEQ ID NO: 80716 - DNA, 120 bp, Arabidopsis thaliana landsberg
acaatctaagaatcacccacatctcttattctattaaaccaaacacataactattagggccacgaacacctttaaaaaaataaccctcccataatacatctcattcctcaatattaacta

SEQ ID NO: 80717 - DNA, 331 bp, Arabidopsis thaliana landsberg
  unsure (1)..(331): unsure at all n locations
agccggganacgggggccaacggagggctaaaacggaagccacccggggggaccgccgannaagacagnaggacggcggggacggaagccgaaatccgcaaaggagtggggaacaactcaccagcgaaacaaaagcccggaaaatggaaggcgcagaagcgcgcgaccaacacccggccggaggggcaagagccaggccgcgacgagaaggagggcgcggcggaagcagcaaaaccgagggcgcgagcccgggcggagcggacgacggcgcaaaaacaggaggacgaagcaaaaaatcaaacgagaacacaaaagggcgaaaaggggaaag

SEQ ID NO: 80718 - DNA, 487 bp, Arabidopsis thaliana landsberg
  unsure (1)..(487): unsure at all n locations
caacaaacccacaagcccacaccacaccgaacccaaagcattaataccaggccgagcccaagaagcacccaagcaggaagaacgcacgcgaaacagaaaacgacacagnccccgaggaccccacgcacccggagaaggcaccaaaagcagccagaggcgcacaacccgcgccgccacgcgaaccaggacagcccggacncgaaaagcaaaaacaaagaacccgcagaccggcaacaccaaaaaagacaccnggggcgaaaaaaccaacggccagagcccacagggaaagaacccggccaaaaggccaccacaaccacagacaaagaccgcgaggggcccaggccccccgcaaccagagaaagaaaagaggcaaccaaacccacctaacaaagccgacaaagaaaatgctgaccagacagacacaaaggaggaccccgccaaaaaaagaaagccccgcacccaaaagccacgcccggagcggcaacaa

SEQ ID NO: 80719 - DNA, 493 bp, Arabidopsis thaliana landsberg
acagacggccgaaagccctgtgattgcagctacctcggcggatttatgccttttagggtgcctaagtgtgacgcgcgggcgggggttgtatatctgtgttggggccatacctaaggtgtggaaagttagaaatgttatagaaggccggtgaggaagatcaacgtacatttttggtgtggaagctaatgacacggtttccttgcttttatggggcgcgctaatgtcttggcaggacaaaactttctggccctgcctccgtactgatggttgcatcgacattcgtcactcgctgacttgcatcgtgtgggtgtcgagctcaaattagataattgtcgtaggcagggaacgcatcggtcgactctattgagatgcataaactacgttaccatgggtacccccctccgggcgccacgacgacagattcagcaatgaccaggtcgggtcaggtacaggcacaggcacatgaatgatgaataaaatggtgcttgttacc

SEQ ID NO: 80720 - DNA, 1558 bp, Arabidopsis thaliana landsberg
  unsure (1)..(1558): unsure at all n locations
ttgtgcgtatctggattcaatgacgggatttggttaaacgaagaagatttatttctttgttcgttcgattgtaatttttttatttcagagtgagattttaacgaaatgcctcaccggactacttacttctttccgcggcagtttcccgatcgtggattcgattcgttttcgcttaagaatgatcacgacaagaagaaatcgtcgtctaacgttggagagagttttggatttcaaagagataataaatctaatggagtcggagaagattctaacaaggagaaggagagtactgtgttctcctctaatcctctgctttctaaaagctcagccgtttcagatctctttagcgatgatcgcaagtcggagaagaagcatcagcagcaactagccgctttctatgagtggttggcggagaagaaggctaatctctctaggtcatcatctactactactactcatggacgcggggtgaagcccacgcgcttctctatgtctagcgacgccgatgaggagagagagcttctgttgtcttctccggctgatcccgctccgcttcctgctacttcttcgccggattctatcattgattcggctaggacggttaacatacatgaacgaaacattgatcggagctttgacagagaggtttcgcttccccgaatgtcgagtgagagcagcttcgcnnnnnnnnnnnnnnnnnnnnnnnnnnnnnnnnnnnnnnnnnnnnnnnnnnnnnnnnnnnnagacgcaagggaaacttcgaccaccacgcttgtctcagtgaacaaagaggaagaagaagttgaggttagggaacagggcaaagagcaaagcttagcgcagaagtcaagagaaggctattacttgcaggtcacgcttgctaagtggctaagttctcaagcaaacctagcatgtgagtctgttcatatacagagcacagaatctatctcctaccgtttttgggtatgtagtcgtacgtatgtctcttttaacttttgtctcaaatctaggtcggaattgtgatttttattctgtttttttttttctttcaggtaagtggttgtttatcatacagtgacaagatatcagatggattttacagtatattaggaatggatccgtatctttggttgatgtgtaacaattctgaggatggcaaacgaattccatctcttttgttactcaaggagactgagccgaatgatacatcaatggaagtggttttgatagatagacgtgaggactcacgtcttaaagaactggaggataaggcacatgagctgtattgttcttcagacaacatgttagtgctcgtcgagaaacttggcagacttgttgcggtctatatggggtacgtacacttcttgttcttgtttccacaagtattcttcatagttgtgcatatatatataagatgtgtatgctgaggttatggagcttttagggggaatttccaggtggagcaaggtgatctccagaatcgatggnngctggacagcaataaactcaaggaatttcggaaatgtatcattcttccagaggtagtctacaatggcct

SEQ ID NO: 80721 - DNA, 157 bp, Arabidopsis thaliana landsberg
gggatgagttcgttcgatggtacttgggtcctatcctttcagctagagtggtgatttatatgcagtttggaggactttataccgcccatccggtatatacacagcatatggagtactatttatcttcaatgtttagctaattcgtttgatttttttg

SEQ ID NO: 80722 - DNA, 481 bp, Arabidopsis thaliana landsberg
  unsure (1)..(481): unsure at all n locations
tttgctagaattttttttctattactatcttttgttacaagagatgttgacacaactttacttgttggtttcagacggagaaaataagggatgaaactgccaatgacatgtctgttcttcaaggaatatctatcgtcttggatagaaatccagaactaaggtaccaaatgcagtcacattgttttaacttaaaacttttacttctaaaatttatatatctgtaacttctgctgtttttttttgtcttatctaggcaagaagggatggcgtacgaagttttgcagtggtacttatgtaggatggaggcgtggtttgctgtagatgccaatttaatttcactaaaatgttgggatcaggatgaatgtctttcaggtggtcatggtctaatggtgcagggttatgagccagtgatcagaacaattgcaaaagatcttgatattcgcttgaccatagngtatataaatcaacctttgataattac

SEQ ID NO: 80723 - DNA, 481 bp, Arabidopsis thaliana landsberg
gctcctgcaaatattatgttgcataaacatgtgaatttttttttaatccatataggggacgtatgtgtggtatgcgatgttcaagtttttaaggcctaccatcattatcgcgatacagtatcctcatatataatgcgaccactatcatcgaggttctcactggggagagtaatgctcaagatgaatagcagattcgaaatactaaggcattgattaagcctgtacacgcatgttgaaaatttactacttattgttcaagtaaaatttgggtttatgagtctggttctacgaatacatcctccaacgtttactatatatccatttggggtggacgaacagcatcaaccaaaccatattctgctcattatcacctatggcactctcgaattatgagtcattcgactacaaccaaaccatagtatgttgtcattgcatcaacagccgagcgagcaagatctcatctgggatcgtttgctagcaa

SEQ ID NO: 80724 - DNA, 597 bp, Arabidopsis thaliana landsberg
  unsure (1)..(597): unsure at all n locations
ctatcttccattttggtaatataaattcacattatatcattaaaagtatatatattcgttttcagtaccaaagaaattcttacctcgagcttcatagtttatttttttacgcgctatccagccttaatgattattcctatgtagatcataatgtgtctcagtctcagcatttagaactattaaaactgaaatcatttatttgatctttattgcttatgttcgaaaaaactcgtcttgttttttttataataaaaaactatagccaccactgaattgaaacnnnnnnnnnnnnnnnnnnnttatttgattaacactagtcaagaattttttacatattcttttttgtgtgtgcaaaattttttacatgataatctcaccgagaaaacctttttgaatccatttttgttggaatcacataatttccctttattctttaagactttttccatttttactacttttttaactaagtcccattttatcaatctgtccttttaattaactctatatcatttttatccttctttctttctaatcacttttttacttcttatattatatatttatactctttcttatctaccttttttttttttt

SEQ ID NO: 80725 - DNA, 259 bp, Arabidopsis thaliana landsberg
agttgtaaccatataagtatatagaacgatcgtgttagccatggcttgttctgacccgcacgttgtgttttctgtatttattgaagtgttagtcggtggaggacctcaagatttatttatcctattttattccatcgtgtgattaatatttagatgaattgtctaggtactttgacaattatatgcattagcttactgattactctctattaaaccaaatattttttttgtttgttttttgttatgtttttattcttta

SEQ ID NO: 80726 - DNA, 467 bp, Arabidopsis thaliana landsberg
catgcgccatccccggcggatgcagcgccgcgttggtcgacccgtcagtggcggttactgtcatggcggcgttctcgaacgccttgcgggtcgcgatgtcgcgcggacggagctgcaccttgagcagttccatcacctgctcgcccgccttggcgcacatcgcgtcgcggatttcgtacggcgccggcgcgccgcagctgtagggcagcgcgaggccgatcgcctcggcgaccatggccatcgtgttggccgtgtactggccaccgcaggagccggcggaggggcacgcgacgcgctcgagctcgtcgagggtctcgtcgtccatcttgccgacagagtggaggccaaccgcctcgaacaggtcctggacgaccacgtcgcggccgcggaatcggcccggcaatatcgagccgcataaatgaagatcgacggcacgttgaggcggatcatcgccatcatcatgcccg

SEQ ID NO: 80727 - DNA, 600 bp, Arabidopsis thaliana landsberg
  unsure (1)..(600): unsure at all n locations
gagggatatatctatagnggcaataagaagatctttcgagagtgttctgaccccaattctgaactggccatttgtgcttctattcctttcacgccacatagcataaacagaattttgaaaacattttttttgaatgaaccatattgagcttgttagtaaaataatctgtggctaggacaataatgtcactaaaagaggcattgtacttaacaagattctatattatcccgttatttacataactatatatgctataatgggcataattcatattcttgaaaaaaaaacaaaaaaggatgtctacagtatttaaaataacaatcaccatttttttagttcttactaccaaccagatttttttattaatacttaataaaaccaatagtcatattacaacaaaattataataccacacaattcctatttttactaatctgcccttttaaggacattaaccaaagacatgatactttcattatgatttggaaaccaatcaatattgaaacgtttgactccaaaattccattattaatacataattctttgcttcaaacccttatactcaatccttctttacttccactctttgatcatatttaa

SEQ ID NO: 80728 - DNA, 128 bp, Arabidopsis thaliana landsberg
  unsure (1)..(128): unsure at all n locations
aaaaagcggaacaagaacaagaaacccgncaagaagaccgcaaagaaanaccacgcnnncccggccgccgagacaggcaaaaagcagaacccccgncnngcgggncccggacacaacaaggcaggcaa

SEQ ID NO: 80729 - DNA, 607 bp, Arabidopsis thaliana landsberg
  unsure (1)..(607): unsure at all n locations
tgccgnntttgagccgagcggcgaatgcggcgaggtagtcgccggtggtgtcgagcttgcccagcagacgctggtaattcgtgcgcgtgcggtagtggccgggacgcacctcgttgccttccagctgcgggccccacagctgcgtcatgagggtttgtgtctgatcgtgcgcaaacgcgccggcggcgatggcgtcgcgcaactggtagtcgaacaggcgccagctgagctggtcggtcgggctcaaagccttcacgtcgatggcgtgcagcttggccagctcggccttcttgcgcgcgatggtggccttggccgcggccaggctcgggtcgccccaataggccttgtaggacgtgcccgcacgggccgggtccgaatgttgcgcggccttgaacaaggcgtgcagccgcgccgtcggcgtggtggcggaagcggccggcgcggcggtcgacgccagcgcgccggtgctggccagggacaaggcgagggcaagtgtgatgacgtggcgcatggttctgccaagtggacgaaaagcccagcctatcatcgccgaatgcgcccgtgcttgttgtgccgatattggcgtcaggcccgccgaagtccgatg

SEQ ID NO: 80730 - DNA, 364 bp, Arabidopsis thaliana landsberg
  unsure (1)..(364): unsure at all n locations
tgtacaaaactatgtcggggtgtcttaatatacagantatttaatttaaagtgctattcctactaaaaagtgacttagaaatattatcttatcgcaagaaaaagttagggattagtcaatcaaccattgtaacgtttccatttgatccgtcattattctctcttattactatcgtttgctttaaaaagaatgtttggccatgaacttatcacgcctaattcggcatataataacatttaatcaatgatatccaatttatctagattagcttagctagtaacagaatcatatgaatctaggtgtcctttatttactcgtaactcactcactttaatgattcttaatctaattttaccttttgata

SEQ ID NO: 80731 - DNA, 638 bp, Arabidopsis thaliana landsberg
  unsure (1)..(638): unsure at all n locations
acgcgcggcactcgtctgcggcgtgtgcgaagtcatctggccacagtttcttcgtcacaacgatctctccgcgcggagcgtccgcgctcgcggataccacggcccaccggctcttcgttcccgtacattttcgcggtgtcgatgagtcggtagccgtcggagagcgctgtcttcaccacctcgaccgtctcctccggcgttttcatgcgagacgtgcccagaccaaggatcggtacatctctgccattgttgagttgtacgctctgcatactcgtcaccataacatgaagcacagtacgaaatttttttgtgactcgcacgtcatatgtataatcaatatatgaaacgcttttttgttgcatcactcttcacactgatcattatcacgcttccgcacggagcatccgctgcaagtttcgaagtctcgggctggcttccgtactggcgggccgcttcgtccaccaaagacgtgctcccgaatctcgacaaggtcactgaggttaatccgttcgtctatacgctcaaaaccgacggtacgattcaggataatggcccgatggaccangagccgtgggtgagtttgtcgcgactgcgaaggcaaaaggcgtcgcgtcatcccacactcatgacggggaagc

SEQ ID NO: 80732 - DNA, 568 bp, Arabidopsis thaliana landsberg
  unsure (1)..(568): unsure at all n locations
ctgaaaaaaagaacaatgccaatgtctaatatcacccaattttacactctctccatcttctttgactgccagcgcgcattatacacgcactccatcgacctccttaccaccaggcaccttggcagcatcccgctccgcagtgctcatctgcaagccctggtcgtcccagccctgcgtgccaagcttgtacaatgtcttctgctgctcacggtcaggcatggaaccgaccttgccacgtcgctgccgcgactcaagagtctcggtcagagtggcattgtcaccgtccaagggatggccctccagatcctcgttgtgcgcctcgtctgtgaaagtgtaggtgcggtattcggtgttgtgccagcccgttcctgtagaccaaccatgtcagtgttgttcatttcctgtgacagtatccatctatgcacgaaccctggtactggctgctatcctcccagtcctcggtgaagtagtgcaagaatccaccgtgggtaacgagaataatctncttctctggacgagccttcaaccaccggcgtgcagcacgcgcacgttccttgagcgctcgttc

SEQ ID NO: 80733 - DNA, 273 bp, Arabidopsis thaliana landsberg
cctttaccattaattgcatgagcgatgcatattcatttacacgctttgcctgttgcgcgttactttctccctggtaccataggataccctgcacagccattgccgttaaggattctattccgcagtcgaacgcaaatgccggtttatatgcatgattgagtccccattcgtcaccatacccatttaccaggttacctacattctgcatggccctttcccgcgcccacacaggcagggcgtcattctgcatccagttgcccggtttcacttttc

SEQ ID NO: 80734 - DNA, 326 bp, Arabidopsis thaliana landsberg
gcacaggggagagttaaacgggaagagccgcgcacacacaccaactaaaagaagaggagaaggaaaaacccactgagaccacagagacaaagagggcgaacatagcaaacccatccatagaaacaaagcgactacacagaaagaacaaccgggaaggagaaagagggcacgaaggaaagcaaaacgagaaaagagaacacaaggagaacaggctgaccaccaaggaaggagagcacagagacaaaggaggaaaaaacgacacagaagcaaaagacacacaaacacggcagcagcaaacaaacccagtcaacgacagagacagcaca

SEQ ID NO: 80735 - DNA, 444 bp, Arabidopsis thaliana landsberg
accatttttttttgttaaactacataaaagtctattactcataggcttaaggaaacatgactccagtctgtatcttcttttgttttactactacacacagagaaagaaaagcttctatgtttttttttaaagtgatagatactagcttttttttttttaataaatactagacttcacgattacaataatatagtttcttataggtgtaaaatgtagtgtttcttgaacatctaacattacttcatttgttgtataattacaacccatgaagagcaaaatattccttgtgagttaaccaaataaaaagttcttcatgagtttttcccctaggacgatgttttcttgctaagttgcaaagacaaatatatcttttatatataaattctggcctcaaaaaaattataattatatttaactttaagcaacaatttttttttttttttt

SEQ ID NO: 80736 - DNA, 319 bp, Arabidopsis thaliana landsberg
ccctttttatgaatcttgcaatgcaagcaggatttcctgaaatcagcttacattttcctgctccatgccgaatatggaagtatgaagaagacaaagctgaccacatggatacacgagcttgatgtgttcaccaaatctgcggggcgcgcgttaatcaataaatccaaacatggctccttgaaggttctgcacccatatgcccaacatatgaaagcctatctaaactatctactagaagacgcgcgcacacttcttgaccgctaactctaagctatgaatgaacaaacgatctcttatgaatgtatgcactctttagaca

SEQ ID NO: 80737 - DNA, 544 bp, Arabidopsis thaliana landsberg
aagttttttttttttttgtttttttgctgtctcctttttgaatctagttgcataaccatctccagtaaatgatggggaatcaaatccaacggtagagattttctaccacaaatctgaattaaatcagagaacgaatagagatcaggaaagcaaagatggttttgaacgatgaggagatgaaagctggagagtcttcagaagagccaaagggacaagggctaagcaggaaaaatagccatagctctatgtgtccgacagatgatgatgaagaagaagaagacaagaaactcgaacttggtcccatgattgctcttaaagaacagctcgagaaagacaaggctttgatctctcttgttatgatttcataaattattcaaacccaattgcattttggctatgttagcccacaattataatgggtaaatatctagtcatatcttcacgtacgaaaatcttagcgcttttctacaattaaaaatttgtctaggatgatgaaagctcgaggagatggaaagagcaacttctatgcagcgtggatcttgag

SEQ ID NO: 80738 - DNA, 503 bp, Arabidopsis thaliana landsberg
cagagcgggccggccatcaccgggctgctcgggccttacggcgctgttcaagacgacgctgctgacgaggatggccgggctgctgccgccgaccgacggcagcgtcacgatcgacgggcagccgacgcgccggaacatcgcgatctaccgccagatcggtctcgtgccggtgcaggagtcgctctacgacttcctcaccggcgagcagttcgtgcggctgaacgccgagttgcagaaggtggtcgatgctcgcgcagccgccgagcatgcgatcggcctggtcgagatgaccgaggccgcagatcgacgaatctccacctacagcaagggaatgaagcagcgcatcaaggttgcctcagcgctcgtgcacggcccccgagtgctgttgctcgacgagccgttcaacggcatggacccgatccaacgccggcacatgatgggcctgctgaagaagttcgccgaggaacgacgcaccattgtcttcagctcgcacatcctggaag

SEQ ID NO: 80739 - DNA, 162 bp, Arabidopsis thaliana landsberg
  unsure (1)..(162): unsure at all n locations
aagggaagcgaaaagacctcaggngcgaaggagaaagcccggaactacagacacctaggagcgcnanacaagaaagggacgctgagggagaaaaacaggcacgcaccgcccccagaccccgcncgggaataatcaagacccacaggaagagaaaaactgaag

SEQ ID NO: 80740 - DNA, 454 bp, Arabidopsis thaliana landsberg
tccatttgaaggttttctactaatacgaatgtttatataggaatgcaaaaatatattttcgtgttcgctatcaatcccattgaagggaaataaaaagatgagcaagccgaaaccaataaccaaacgacgaaaaatatagcgaaaacaatgctttaactttaatcccgaggtgtcttcaaattcaaagattacccaaacagtcttatatagaacaatacgtcatagaaacatgaaccttaaaaaacgattaaagtgtaaagagcatatagcaaaagggtttggaccttgaaaaaagaaagaaaaatacgaactttggttccaaaccaaacctcaaaagtgaggatagtcaggatggaaagggttcgtgaaatcctcgagttcatagccgtcggagtcgtacattatagtgtacttttcatacttcccaaagtatgggcaattctcatttgcagag

SEQ ID NO: 80741 - DNA, 519 bp, Arabidopsis thaliana landsberg
  unsure (1)..(519): unsure at all n locations
gcaacctttggcggtgcgactgatatcccggctcgcctgcgcactattaagcgccaaatcgagcgcagtcttatgggctaagtgatgacgggcgttgcttgccttgcatcgtgggaattcatggaaatgctgttctcgaacgcggaaataaaggcggcctataacgctgctatggccgcttggcagaactttattgcgctcaacccgacgctgtccgatcgtcgtttctcattcacgattcaggacattacctttgtcgagtacgacgcaannnnnnnnnnnnnnnnnnnnnnnnnnnnnnnnnnnnnnnnnnnnnnnnnnnnnnnnnnnnnnnnnnnntttttcccgctcgggacgcaaaactcggcatttacctacgtcgcaccaggcgatttcgccgaggcggcaaatataccgggccagctgttctatgcgaaggaaaaggcggacgagtggaatcgcggccgggatattcttacgcagtcgaaccgtgtgccgatttgggtgcgtacggagctg

SEQ ID NO: 80742 - DNA, 245 bp, Arabidopsis thaliana landsberg
caccccatcagaacggccgcagccaaacgggcttgggcgagaggagcaccaggacggccgaccccccgggaagaacccgagtagcagacctcacatatgaacaaccctcactggcccgggtaaaacaagacagacatccacaacgtgggacagccgcgaggccaaacactggcatgccgatacacacactcggaacagccacaaagaccagccctcccgacgaaaggaagcaggacacatggaag

SEQ ID NO: 80743 - DNA, 590 bp, Arabidopsis thaliana landsberg
gtgatactctgttcatagaaacagagcagatcatcatcattcgatctctacatgacaaatcaagattacattttaaaactaatcaaaaaccaaatcaaacaaatgattggcttcaacacatcaatgtcacgaactcttacgcttattctctagtaccattcatataagtttcatcttctagactaaagattcatgtaaaatttcatcgatcagtatctttagaacttagaagagaatcaaatgagaaatcgataagagtatttgagacaaacgaaccagaaaactcgatctattaacctaatcgtcagatgatttcacgtgaacgaagaagaataaggtcgtgtagttaccgaacgagcaagaagcttcctcttcacagtgtaaacgacttcaaagatttcaagaaacaaatgcactgagactgttttgacgtattgagttatattatgtatttatacttttacaatatggaccattaactcgcatttatatatctcagaagaatttgatattccatattaacgacctttcttttaatcaaacagagaaattactaattcaaattggttaataattagttggattggata

SEQ ID NO: 80744 - DNA, 470 bp, Arabidopsis thaliana landsberg
cggatttcggcgccgcgcagggtgtcggcggtgtagacgattgtgatttcgcgctcttgccacatggcgaccgggaggggggtttccgggtcgcgcagatggctgcggatgcggccgtcggcgtccggtttgggtgcggcaaagccgctgtcgagcacgcagccgtccagcttgcgccaggtgcggaaatcgcgttccggcatggcgttcagcggacggtaggcggtagcgccgggcagcggaatcagcgcgtcgttggtgacgatggcctgctgcgcctgcagtttcagcttcaggccgtcgatgccggtctcgcgcaagcgcatgtactggtgccagccgaagaagcatggcgcgtcgctgtcgcccatgttgcgcatgctggccgtcacgttcagccctgaagcgtgcagcgtgaatgccactttgagatcgatcttgaaccggtagccggcgtccaccggtttcag

SEQ ID NO: 80745 - DNA, 626 bp, Arabidopsis thaliana landsberg
  unsure (1)..(626): unsure at all n locations
tgagacaaatgcacaaatagcaggtcaccccaacagagactttaattttttacctgattatgcgttcattcaggggaatgagcccattcgtcggcccgtactcacgctcacccatgaaggcttatgcgcggaagaaaaaatcactgtcgtcaaggtagatccttctcatccgactcttaacattggcaactcgacacaagagtcgtgcacggcggtacaattcagcgagcgcttacctgagttcacgcacaatcttgcaccgattgcgagcatctttggctgtgatttgcgtaaaggaaactcaggctcgccggttttaaacgaaaaaggcgaagtggcagcgatcgtgtacgcaggccttgattctgaagttgttagacccgttcaaggcaaagaaaaccgtgtcggtttggttaccaactttgcctgtgtgaaaactcctgttgaaatcnnnnnnnnnnnnnnnnnnnnnnnnncagaagagtgcaagaaatgcacaatggccgaatttataaaggcgcatgcagacgcacacgaagccgaattagaataaaaataatctaagatgctgttaggcaatcgcaagattggacaacgctaacaacccttcgtctttactttacagc

SEQ ID NO: 80746 - DNA, 549 bp, Arabidopsis thaliana landsberg
ttttacaaaaatctctcatctcatttgcgtacagctcttatacattgttataagattgatcttattctcaaaggagcagtggcagaggttaaaactaacagaggattgaaactacaagttgagcaaactctcacctccagacacattggatgtctatgtggtgtaagtggaggatgcatctttcacttcttctgcaagaaaaaagcaaaatctgaatcgcttgtaatggatgttaaaaatcagatcttttatttctctgctaaaaacccataaggaatttacagcaaaactaagcaaaagacccttatgttgaagaagcaaaagaaggaaagatatggtttttgtatcatactaacatttcacaagtcattctaatattctaaaatttcggatctcaatttaacatggagcagaaccacatgatttttaagagcaaatcggttcgaagatcatcgattcgagattcaaaccataacctattcgaagaagaatcacgaagaagagtacaattaccttaatttgggtatctataagctgagagagagagaa

SEQ ID NO: 80747 - DNA, 381 bp, Arabidopsis thaliana landsberg
caaaaccaaatatcagggttttcatcttcaaggggttttattgggtagatccttggcgatcttgttcgtaggatcacgctggtcagcggtttcttcgaggaattgattgacgtcaatgttgaattgaaaaaggatcagattacagggtttgaggctatgagaatcgctcttgattcaagtcttgagctttttcgatcggttaatggaggaagcaagctttttcaggttactcatttacttgctctgttttatttgtatttatatctttggtagctggcaaaagttggcaatttcctttgttttctcttcgagggtttaagattttggtgtttagggttttgttgtttgtctttgtcttctttaacaatatcaagaatttgg

SEQ ID NO: 80748 - DNA, 640 bp, Arabidopsis thaliana landsberg
agggcaatggagacagtctccattccatctgaggtttagaatagactttagtcaatgcttgttgcatgtggacatttttatgtgtccgtgagaagaacacagaacacttaccagagacgggtagttttttaaggaattttacgttttctttgtgtgtcatttttattcccatgtcttctagaacactttttacctctcctgcatgaatcatatctcctttaggaagaagaaaacacggttagctgagactataggatcacatattttataatactatataaatacacttgtacataaaacacatcaggactcatccttgttgacttcaagggaacgagcaagtgacccagagagcaagatgttttatttcagctgggtgtagtggtacatgccagaaatcccagcacttatgaggctgaggcaggaggactgggagtttggtctgtctgggctatagttcaagattttatctacaaacaaataaactcactcaaatatgcaataataaaataacaagacaaagaagatttaacaagtaaatgacactctctttgagctgacacttgtataacaaacacaatgggggtcatataacttctcagcaatttagatgttttgtgatagcttatataagtaattc

SEQ ID NO: 80749 - DNA, 564 bp, Arabidopsis thaliana landsberg
  unsure (1)..(564): unsure at all n locations
cgcagctgggcatccncacggncgcggnttattccgttttccgatgcttggcgcacgccacgaacggcgcgccgacgatagcgtattgattccgcccggcggcgtcgcgcgaaagctatctgcgcatcgagcgcatcatcgaagttgcgcagcagtccggcgcgcaggcgatccatcccggctacggctttttgtccgagaacgaagcgttctgcgccgcctgcgatgcggccgggatcgtgttcatcggcccgccggtgtcgagcattcgcgcgatgggctcgaagtccgcggccaaatcgctgatggccaaagccaaggtgccgnnnnnnnnnnnnnnnnnnnnnnnnnnnnnaggccccgcgcatttgcagcgcgaagccgacgccatcgggtatccggtgctgaacaaggcatcggccggtggcggcggcaagggcatgcgtgtggtcaacgccagtggcgaattcgccgccgcgctgctgtcgtgccaacgcgaagcgcgcgccagtttctgcgacgatcgcgtgctgatcgagaaatacctgcagcgcccgcgtcaca

SEQ ID NO: 80750 - DNA, 290 bp, Arabidopsis thaliana landsberg
  unsure (1)..(290): unsure at all n locations
gagcgtgggtttaaaacacttgcattcgatttaccgtataacattacctcgagagacagctggtaagtggaattcgtaggactgtgttgtggtaacacttggtaatgggattgtttttggaggatagggagcaatttcacaaggtgatctatggtcgggacaggcattgcattacaatacccgtggttttaagtgctgaaaggatttacccgcgtggggnnnnnnnnnnnnnnnnnnnnnnnnnnnnnnnnnnnnnnnnnnnnnnnnnnnnnnnnnnnnnnnnnnnnnnn

SEQ ID NO: 80751 - DNA, 238 bp, Arabidopsis thaliana landsberg
tgcgcgcgttgagctcggccaggcgctcggggtccagatctgctttgcgcacgtaggcgcgcagcgtgtgcacgctgacttatacctgggtcaggctggagttcagcacctacaccagggaattgaattgaggctccacatgctcctgatattgacgcgtctggcgggcgctgtcgagcgcgtggatggcaccatcttcttcgccatggagcgcgttcagcgcaccctgcgcggcatg

SEQ ID NO: 80752 - DNA, 282 bp, Arabidopsis thaliana landsberg
tatataacacaagatttccctaaatatacataacttggttgtattatggatcaataactaaaaactataattacaatgctctactattaaggttcttatgaacaaatcatcctccactcatgatctcctcattactcaaagtaaactttgctcacttgggaaaaaaagaaaccctactttgaatatatcattgcaaacaattgtgaatcaaaatctacctgattgcagctgacgtgtgcataagagtggaaactatatgcctgtgtccgtcttgattgacaa

SEQ ID NO: 80753 - DNA, 595 bp, Arabidopsis thaliana landsberg
ccaacggcatacgacccatcgcgcacgacctgagagagcggagattttttttgcgtcgtaggcacctttccccactggggggggaccacgcggctaaacgccgcggacgcgccaatatccgcatgccaccgggcgcccgggggaacgccgccgcgagtgccgtcgccgtcgccgtcgcggccgccgtcggcgtcatcgcggtggcgcgcacgattgcgcgtgcagcgcgatgagcgcctcgtagcgggcggtgacgtcggcccggtcggattcctcggcgacggtggccaggttcagccgctggatcatggcgggctgatcgagcagcacctgcgtccggccgacgggcgcgacggcggagattgtcagcagcgcgtacagctgccggatcaggacagcgggcatgccgcccgccgcctggcggatcttctcgaacgagcgctggaccaggcgctcgtagctgacgggtgcggtgaccaggcggatgtcgccgtcgcggtcccggtgaaacaggtccggatgccagccgacggcgatcttgccgaggctgtcgcccaccagtcaatgcatgtcaacgccgtgaacgtgtcgttga

SEQ ID NO: 80754 - DNA, 453 bp, Arabidopsis thaliana landsberg
aaagaacggatagatcaaagacggcaacatcaccacgatacatagtctcccttatttcgtttatcagataagaccataagaacggggaaaccaaaacaattaaggtgtctaaacggagaaaacacaaaggggacataccaagccataaatgccaaacggctcaggagatacaaaaataaacgaaatgcaaattaaagaacaaaaaacaaaggggatacacgaagaactaatcaataaaacaaaatcgacggaaaaaaaaaaaaatgaaagcagagaaacgggcgcagaggagaaaaggaacggggtcaagaaaacacaaaagccggaagaaggcaaacaagcgcggctatataaagaaagagcacactactgctccccaaaaaaaaaaatctaggacccagccgttactgtagcggatacgtttaaactaatgcctccggaaagaaaaaatgg

SEQ ID NO: 80755 - DNA, 281 bp, Arabidopsis thaliana landsberg
aaagggaagagcgagacacaacacaccaggctaccggcccgagcagatgttggggcttataaacagaaaaaccaggaccgaggagggggaaaaaaagagcgcacggcgaacgaaacgcgaacacagaaactgccgcagcaagaggaagccggcggaggcagggaccaccccacgtggtcgaagacacaagagacgcagtcgagaaacaacggacgggggggcacccacacagcaaggggacgcaacaaccgaagctacacgactgcggcaacaaaccaact

SEQ ID NO: 80756 - DNA, 536 bp, Arabidopsis thaliana landsberg
tccggcgctgacgcaaactcttcctcggatacatccaccagcggtcggatttggggtggctcgggttcagcaaccggtacttcaaccgactgcgaaagtcccagggctagagcttgttgttgaagcaactccccaaacctcatcgggcaggcccttgccgtcctggtatgaccaaccgcgtggcatctgctgcacgtaggcggcgccttgcgcgccatctcaacgctctcaaacgcactgggttctcttcgggtgctctgtttggggataatggagtgtgtaaacgtcggctcaattagttggcgaggctctagaagtcgttgcggagttcccttgcgctgcaagcgccagtgctggtggaagtgttcaagtgaaaggacttggccctgctcttgcaaggatttcagagtgtggaggcaaggcagcccatgggatctggttaaagaccccgtgcctgtcaatggcggaggaggttttttcctactcaacaacttacgtttgctcctccacctttctcatggcttaatgtgataccc

SEQ ID NO: 80757 - DNA, 579 bp, Arabidopsis thaliana landsberg
  unsure (1)..(579): unsure at all n locations
aggccggtgcggccaccggcgctcacgccggcggcggattttaatcatctggtggtggtcgaggtgcccaggggggagccggccatggctgcggtactgtcagcgatcagggcacggcccatcttcagcatgtggccgtccttgcccatcagcccggcgcgcttagccacgccgatcagggtgccggagttgtcgaacaggtcgacgaacaggaaggcgaagatcacgctgaccaggcccacgttcagcgcgccggcgatgtccatctgcaggaaggtcggggccagcgatggcggcatcgagaccacgccgccgaagggnnnnnnnnnnnnnnnnnnnnaggcgatggtgactgctagaatgccgatcagcacggcgccgcgcactttcagcgactcgaggccgacgatcaggaagaagcccagggtggcgaggatcggtgccggctgcttgaagtcccccaggcccaccagggtggctttgttatcgacgacgatgcctgcgttatgcanggcgatcaatgccaggaacaggccgatacccgcggcaatggcccaacgcagcggcagcgggatgctg

SEQ ID NO: 80758 - DNA, 610 bp, Arabidopsis thaliana landsberg
cgcccacgaaaaacgcgatgaaggcgatgccgaccgcaaggttggccgcacccgccgcggcaaacgctggcttcaacagccagcccgcaagcagcacggccaacgccaccggcaacggccattcccgcagccagggatggcccgccgaacccgcctgcatgtcttgtccgccgtgcatgtgtcgctagtatgcatgacttcggaggcgatccatgcaaaccatcagctgggacgaattcaccagggttgaactgcgcgtgggccgcatcatcgaggcccgcgtgtttgccgaagcgcgcaagcccgcctacgtgctgcaggtcgatttcggcccggacatcggcgtgcgcaaatccagcgcgcaaatcaccgcgctgtaccagcccgacgagctggtcggcaagctggtggtgggcgtggtcaactttccgaaaaagcagatcggcccgttgatgagcgaatgcctggtgaccggctttcacgacgccaacggtgacgttgcgctgtgcgtacccgatcgaccggtcccgttgggcgccaagttgtgttgaaatttccacttgcacaagttaagtgcgtgaatagcaccattttggtgaacaatccattc

SEQ ID NO: 80759 - DNA, 352 bp, Arabidopsis thaliana landsberg
  unsure (1)..(352): unsure at all n locations
tttccccccaaacagcaaaaacgggggccggaaaaaaaaaaaacagggagaaccccccaacacgancgcaacgcgaggcagagaccggaacgacgagccgagaccaagcgaccgcacacccccggccaaacaagccaagagcaagcgcaccccagaaaaccgaagcaaaagggcaagagaagaagaaaggcccccaaccccaaagcacaaccaaacgaaagagaaccaaacagaaaaaagcgcaggaaaaccaaaagggaaaacacacgcaagcacccaaccaaaaacgaaagacaacgaaagccgaaggcggcccaaaaagaaccaaacccggaaangaacaacgggaagc

SEQ ID NO: 80760 - DNA, 101 bp, Arabidopsis thaliana landsberg
gacagaaggagaagagccaccaaatctacaacagctcccagaaaaagcagcggagcagggggtgccataaaagaaatcagcgtccgtacctgtgagcggat

SEQ ID NO: 80761 - DNA, 210 bp, Arabidopsis thaliana landsberg
agttaaaacttgaactccatcaaggcaaaaagcgcgaattctgcctgttttcttgcaggattaatgtttttttgacattatatcgcgtgaaattcggggaactgagtatgatacaaattcaacaacaagaaaccttggaaagttgatacatgcaggcaagaaaacagaaaggggctgctaatctacgactcatgaaaagaaacatgttga

SEQ ID NO: 80762 - DNA, 545 bp, Arabidopsis thaliana landsberg
gatggaaccacgttgacgttcttcttagctgctactttttcatctttgttgatttcacgagtacatggtttcaaattcaacttggtcacattttgttttgtcttcgtggtcaaatgtctttacgaaaatttgatggaccatatcatcgacatgttttgctttttactaattaccctcgatagttatattcggatcgataagtactactggactattgaggttgaatatgttcttcaggggtcaataaatttgcttgtaaaatggaaaatataaattaaaaatgtaaaatatgaaaaaacaacgtaaaaaattgtaaaatgaaatttgtaaaatggaaattttacattttacaactaaattttacatttatagttagagaccgacacatgaaaaatgttttccgaaattttttgataaaaattccaaaattagtatagaaacaactttagttaagatcgttgtcaaatttttgagtaaaaactcgagaaaaatggtaaattcgatgcacaacccacatttataggggggtaattttatgcaaggaa

SEQ ID NO: 80763 - DNA, 246 bp, Arabidopsis thaliana landsberg
ctcatccgaaactgatcgacacgtgatgctgacacacttaaaaaagatggtcttatcttgaactgaatacatgacttcgggggtcaatttcatttatgcagacggattgcagcggggccgaaacacccctgccataaaatttgcatcttgtcacagcaaaatttgtgcgttgtagcgaggctgcatcatcacatgaaagggagaaacagtcgaactacctgtagggatgtgatgtcgtccaaaaaa

SEQ ID NO: 80764 - DNA, 310 bp, Arabidopsis thaliana landsberg
tgcttatatggacccttaacccgagatatgcttccccctgctctaataatagctacttggtctttttcgccagacagaccaagagtccagttcttaacacctgagtatttcctgcataaagtatttcaatcgagaatatcttcatgttactgtaaaattgataaaaccgcatgaagcaataagcgaagtaaaacaatatcctaaaatctttcctggaaagtttacatacaagtttataaaaaacagaaaacttaaaagtttatgaagtccgcatagcatcatttactataaaatggccaatattaattcc

SEQ ID NO: 80765 - DNA, 559 bp, Arabidopsis thaliana landsberg
aggaggcggccaaatatccgattggcaccatgtcgcgatggacggtgcgcaagagcgacggtacttcttttaaagccctgataaccaatatttaaaatgctaatgacctattttttatgggaattgtttaaaaaaacgaccaaaaacgatgcctgttaatgctttgttaagctttttttaagggtgcgattttaggtttgccggacttatcaatcaattttccggcaccatttcctatgaatgattcagacttgtggagaagtttccgaaacggggatgaaacggctttttcaatgctttacaaatcccatatcgacatgctgtaccggtatggacataaactgagcgtcgacacacagctggtggaagactcgatccaggacatgtttatcgagctctggaacagccgcaagaggctttcagatacggatagcatcaaatattaccttttccgggtgttgcgccgcaagatctcgcagcacccgctaaaccgaaacgtagccggtgccggggcagagatttctgccttcgagcatctgtttttttccgtttccaccga

SEQ ID NO: 80766 - DNA, 453 bp, Arabidopsis thaliana landsberg
  unsure (1)..(453): unsure at all n locations
ggatttggccantcaaannnnnnnnnnnnnnnnnnnnnnnnnnnnnnnnncacggnggacgttttggactttttggagaatcttatagcagtccttccgactatccgagncattgtctcctgtattactaccaatgttgtgatgccgcctcatccgggccgcccgttggatggagactctccaaccggccgctccagagctagctgtccagcagctctgttacctctgtggcatcgggcatggacgcgatttccttggcgatgccggccgcggcctgtcggatcagggggtcggccaggaccgtctgcacagccgcagcggtggcccgcggagtggcctcgtaccgttgcagcaccaggccggctcctgccgtcgtgacgcgctcggactgaaagaactggtctgcgccccgcggcgtgaagacgaactggattcccctggacatggcggcca

SEQ ID NO: 80767 - DNA, 526 bp, Arabidopsis thaliana landsberg
cttgaaaaattatggctttttattgctttacaataaaattgaaacccgggtttaaaacgtataatcataaaagagaatctttgaaattagaaaagattgattttgctcacaaccaaaaaccaacaataaagtatttacaggtttcaaatgcatgacattattggactaggaacaacaaccaccctgtcatgtaattttacaaacttgcaaacaaatcatcttccaaagatgaagtattatcacacacacaaggttcactggccaagtatatccgctactgatttcttgacaattttcgaaagctcctgtctgaaaaaataaacaaagacttaggttaaacaaaaacaccagcattcgatttcataaccgcatttaaagaaaaaaaaattacctgtccggtttgaacaagagatatcgataagtgaaccactgcagaaatggagatatcaaatgctagaagaatcaaggatcataacatttatacttattgagatgataccaagccttattacttaccgtggagaac

SEQ ID NO: 80768 - DNA, 465 bp, Arabidopsis thaliana landsberg
ttccgagggatggctgacagttgacttccacctttggttttccggcccggtactttttgcatgaaggatctgggtccagttctttacccactccgttttctccggtaatgagcacccgggcatccgtctccgccactttgtcaatggtggccttgattttattaatctcttccgactgaccaatcatttcctggaccttggcgactctttttttgagggtcttcgtttctttactcaggacatttttgtccgtagcattgcggatggtaatcagtaaccggtttaagtccggaggtttactaataaaatcaaaagcgccttttttaaccgcttccacagctgattcaatattgccgtggccgctgatcatgatgatgggggtatcggaatttagctccatggctctggtcagaaattccataccatcgagcttgggcatttttatatcgcagagaacaacgtcat

SEQ ID NO: 80769 - DNA, 539 bp, Arabidopsis thaliana landsberg
ctctgcgccatagggttggcgttgggctgcgctgaccgcgcgattattgaagcttcccgagcgatacccgcgccgctgggtgaagtacaccagcacgtttgggttcagtcgataatccagactgaggttccaggttggatcactaaacgttttgcgcacatctacgaagcaattgtcgtatgagaaccgaacgttatttgcatcggtcatgttgcagctcggaacgaacgtgagacccaggtcatcgtaatatacccggcggttttctgtccgcgatgcgtagtccacccgacgcttgtcgatcgtatagcgaatgccggccgtgaagttgagatcatcgacgatctcgtaggtcccctgcagatacgccgcataggacgtgttaacaattttgcctgacgccggggccgccgaggcgccgctgttgcttaagcgaaagggctgactgtactgccgatcatagctgtcaaggcggaagaaatagaggcctgtggtcaggttaagcttgttgtcgagcgtcactacgttcagctgcagtt

SEQ ID NO: 80770 - DNA, 216 bp, Arabidopsis thaliana landsberg
  unsure (1)..(216): unsure at all n locations
nnnnnnnnnnnnnnnnnnnnnnnnnnnnnnnnnnnnnnnnnnnnnnnnngggggagaggttaaccatgttatttctaaggttttcgtctatctcgaccggagttatagtttatcaaattgtatattacggacctattgatcaatgacaagactgtgaaaaagaggcttttggtaaatgaaaatgatcatgtatgaacaggaaggttcattctaccg

SEQ ID NO: 80771 - DNA, 524 bp, Arabidopsis thaliana landsberg
gaaagggttaaatcggatgaaacctctgtattggtaatgtcttttttttttttttggttgccgtccttggtttgagaggggtatatttaggctgaagataaggtcaaaagaaagatgcaatccggttttataataatagatcagttggacttttataaatgcattttcgtgacttttgtttgtatcaacaactttcattataatattatgatttggactttgtaaatggtcttctcgtgtccttttgtttgtatcaactttcgcgacctaagaagtcacgacgacattcaaaaatggaacatgagcataatgatcaaaattagaacaagtgtgaaatatcgaaacaaaggcaagtcaatatcggacagcttcgtacgtgaaacctaacccccacttgaggttcttaatgttttaaaataaacaagcggacgatgttttaatcatttgaccttcatgagtgtcggccatattctcctaccaaacatgctgcagcttggttagatcaatgataaacaatccaacga

SEQ ID NO: 80772 - DNA, 555 bp, Arabidopsis thaliana landsberg
agattaatttatcaaactgtaaaaccaaagttggtcgtggccgccacatgccatagccatttttatatctcgtgaccacgtgttagttaaaacgtgtgaaccccacatgctcccgaacttagtagcttgtctggctccgcgtcgcaaggtcacacgtcctcacccgttatggtgagccaaacccgaccgtctttaccgggtcgtactcggacccgccgcatcccatctgctgcttggtggttggaaaggccgcgactttttttatttgggtttttatatataaatttgaagaccccaaaatattgtatgaacctcaccacatttttattttgtcctcgtccaataatacagatcaaaacgaatacgactagttacttattatattgtgtcatattcaacagttttcattattttgtgtagattcaaatatcagataatcgaccaatttgatttattttttttctgatatgttgtactaattgatgtgaaatatcttttgtgtcttcaactgaaaataacttaattgtatcgacctttatgaatatcatttacaca

SEQ ID NO: 80773 - DNA, 174 bp, Arabidopsis thaliana landsberg
aacaaatttcaccttttgaaaacctccaatagatagaaacctcttttttttttttttttttttagatagaaactttgtcttgtggagtaaaaatatttttatttacccacattttatgagggtaaaaaaatttaaactgacattttgatagttaaaacttataaaaatattaat

SEQ ID NO: 80774 - DNA, 413 bp, Arabidopsis thaliana landsberg
caccgatccgcccgagctggccgagcgaacctggagtgggccgagctactgtagatttggccgacatacacacgagcgggaggatagcccaaaacaggacttgccccaagaacaccttccccctcagaccaagcacaaaacggcgaacataacgaggatggccgacgcaacagagcagtcaaccaccaggccgagggccaccagggccataactagactagacacccgactaccacattccgagactccgccaatccgaagtcaaccagacacttacacacaaggaagagaataggactccagctaaacaatcgaaccgattacacaaacaccggggaggaggacagtaataccagcgtcccaataccgcgaaacccctggggaggacggcgcacggaatattctgtaataag

SEQ ID NO: 80775 - DNA, 171 bp, Arabidopsis thaliana landsberg
caattatctaagataaccttctttctgttttcaaaaatctctacctcaattgtcctcccctctgttattatatttgcccaccgccaattgtgtatggagctccctgtgttgcgggagccgcccgacgccccaacccccgtctctagaccccaatcagccaccaaccccatc

SEQ ID NO: 80776 - DNA, 423 bp, Arabidopsis thaliana landsberg
tctatctatagaatttaaatttttattatttaaagtatgctttagcataataatatatagctcatgtattattttatttttttaagtccaccagatgaaatatgggaattttaacaaagaaaacaaaaataattgggcttttctaatggatttggattatggcatagcaacactgggaaataaataaattttatttatttaatcctgaaatcaaaggaaatgaaactgggctgggttttggttccaaaaccccggaacatttaaacgggtcatatgggtaaaaactttcgttggctttggttcattcctggtcaccaaccggagaatggattattcaatgtgtttaccaagaaatttgtgggttcctttccacacacaccaattcattttagatattattccatctcggtttggtctttgggg

SEQ ID NO: 80777 - DNA, 387 bp, Arabidopsis thaliana landsberg
  unsure (1)..(387): unsure at all n locations
nnnnnnnnnnnnnnnnnnnnnnnnnnnnnnnnnnnnnnnnnnnnnnnnnnnnnnnnnnnnnnnnnnnnnnnnnnnnnnnnnnnnnnnnnnnnnnnnnnnnnnnnnnnnnnnnnnnnnnnnnnnnnnnnnnnnnnnnnnnnnnnnnnnnnnnnnnnnnnnnnnnnnnnnnnnnnnnnnnnnnnnnnnnnnnnnnnnnnnnnnnnnnnnnnnnnnnnnnnnnnnnnnnnnnnnnnnnnnnnnnnnnnnnnnnnnnnnnnnnnnnnnnnnnnnnnnnnnnnnnnnnnnnnnnngttgacgcaaagtcaatggcaagggtgcatggaactgattctttcgaccaagggctggctctggggttttccaaaaggctggacctgcccagcttgg

SEQ ID NO: 80778 - DNA, 559 bp, Arabidopsis thaliana landsberg
acgccgtccgctgcgccccgcccggcaacaagcccctgcttatcgtttaggcgacctgccgccccttcctgcagtcgcggctggcgcatctgcctcgtctgaaggtgatcgtcaccctgggcgacgtctcgcgccgcaatgttctcaagaccctgggcaagccggcctcggccatgcccgccggccacagcgccgaggcgcgggtcggcccctacgtcctgctgaacagctaccactgctcacgcctcaacacgaacaccggacggttgacggcggagatgttcgaagccgtgttcgctcgcgcccgcaccctgatcgagacctgagaacgtcgttcgcttggagagcgagtgtggctctcccgccacgcgaatcacgccgtccgggtgtagcctcgggatcgaagaacagtggtcctcggcttgcgttgatcgcctgttcatgaggcagtgatgcgtatggctaactcggtcttttccccacaggaacggaaggcggctgtggtgggcgctgctgatggcggctgcggtcgcctcgatgggcgtcctcgccgatcgat

SEQ ID NO: 80779 - DNA, 497 bp, Arabidopsis thaliana landsberg
tgtggaacgccgtctccaccatctccaaatctctcacattttcttttttggtcgccctttcacagtgctcaagggtctggacctcgaacaccattatcaacctccccaaacccagtagggcagggactgctgggctcagcattgcccaggcttggacagtcagttccgtctcgaaccccatctccggtgtcaatcaaccccccagaacaagacctgccgactcctgatatatcacaaatgcctggagccatgccgctttcaccgtcaacgctaatacaagaccaatttcaaacggctgaggcccacggggcccaagaaagcgacgctgcatccggatcatcgacgcgtctcacaacaccaacattggcccaaaatgagacaccagatcaccgcacagtggatcattccacagagtcgttgcgatcttcatcaccagcatccccagttcgtagaccacaagagatacccatacctgatgtgccgccaccacctgagcc

SEQ ID NO: 80780 - DNA, 600 bp, Arabidopsis thaliana landsberg
  unsure (1)..(600): unsure at all n locations
aattcaaagctggaaaacaaattgaggttctttttttgaagagagtttcctttaaatagtttgttatatataaatctaaaatattagaactgtttacaaaacctcataaattatataagttatttgaatgttgatggttactatataaatatgaggtttacaattgtatataatataatgattttaatctgatcatttacgactgaaatcgcaaactctcagaaggaaataatttaaacgttataaagcggtttttctgatttgtgtcataaccaaataagttctctcaatacgcaacttaaagagacgtgaaagtaatgtctttgctgaatttgcttataaaagcaaatcaagtaaacacattgtagtcttacttgtaatcctcgtttcactgctcattcgtgtctttcttctatcaaggttacattttttttttagtttattctagctagctctaatctttctttcttgcataatgcatgggtcttggcttgatcttaaaatataattttgcttctgtaactacattactcggctcttttattgacanagaatctttaaatcaaacatatttactttaatttttgtcgatctgaaaag

SEQ ID NO: 80781 - DNA, 212 bp, Arabidopsis thaliana landsberg
cgcaacaaccgggtgacaaagcgcgataaatggccccggcgcagagacccaaaggaagcggggctaacaaagggagtccaccaccatgaccccacaaaggaacccggcgagcgagactccaaagcaaaagggaggaccgccaaaaacgggggggggataaacccaggccacacaaagcgagcacaagaacgacgaccagaaccaggaacacc

SEQ ID NO: 80782 - DNA, 181 bp, Arabidopsis thaliana landsberg
catgaactggccgacgaaaattacctaagtgaaataaccaaacacatggtgaagggcctaaagaacaagctcctaactatatgctatgcaaggagcactgacgaaggaaaatcccatctcttagtatccggtgtgcaacatgtccagcaccacccacaataaacatgttggaaacatctta

SEQ ID NO: 80783 - DNA, 623 bp, Arabidopsis thaliana landsberg
  unsure (1)..(623): unsure at all n locations
gggatttagctgtagcaaacctactgacaatttttatgaaaacgaagtagacaacactggtggtgctggaacttacgtatctaaattgggaacaacaactagtcggtatcggaggtgagtaccacttcaaaggaactgagaaattgtctccttatgcaggtttggatatcaacttcggtatgggtaaagctactgctgagggtgaccaaacagatggtactacttgggttgctgcagattactctgagaagcatgagcgtaaaactgctggtttcggtgttggtttgatcgctggtactgattactacttcgtagagaacttctacttaggagttgagttaggattaggatttaactcttacacagctaaagaaggaactgattctttcacagttgctggtgtaactactgaaaacaaaggtaacgaaacaaaaattagcggattctctaacaacgttatgggtatgttccgtttaggatggagattctaataagagagttcatctaanaaatataagaaggttttcgtcacggcggaagccttttttattgaaatcaatngccgattccttgattttagattaacttcgcagcatgcaatcaacgcaacacattacaatcgc

SEQ ID NO: 80784 - DNA, 546 bp, Arabidopsis thaliana landsberg
acaatgaaagatacgtgaaggagagattaataaaaacgaaaatcttatttcttaaagaaaaccaaactagtttcatgaatttaacacatgcatggttcatcctgacttctgaaagatctaagaatttttgtttttcattctcactgcagctttcaaaatgttctttgtgtatttaatcacaatgttaaagttgatacttttttcctcataatataatgtttttttcctagtatattaattaataacaattaagaaagtttatttatgtactagagtttcttccaaaacaagagaaaaattaaaagtatttatcattaataaatgcctaatacttttaattaatgtctcattacatcaggccaacatttgttcggatagtgaaaaagaagtcagtggaggaatattcaccaataccgtatttagcgactcttataaactgtttggtttgggttctttacggactaccaacggtgcatccggacagcacattggtcattacaataaacggcacagggatcttgatcgaaatcgtattccttacgatct

SEQ ID NO: 80785 - DNA, 239 bp, Arabidopsis thaliana landsberg
tgggctttgggatctttccttaggggcttattgacccttttaaacccactctttgttttctttttgcagaaggatcatttcttgtgtacctctgttattttttgaacaagcccttaacaaagacgatattagaatttagagttgacacaggagaggttttagaactagtgaagtatttggttaaggaaagaagtaaaaagatgcaaatttagtaaagaaggacggcatataatactaat

SEQ ID NO: 80786 - DNA, 493 bp, Arabidopsis thaliana landsberg
  unsure (1)..(493): unsure at all n locations
aaaaagataccatcttgctgacaacataaaaccacatgttagcatcgatccccggacaggcaaaaggaagcaagatttcaccttatgagccnaacacaccgcaaccacccccgcggaggcaataaacagggccngaccgaaanngcacggaactaaaaacactgtctgtcaaagctatacccttctggcttaataactggtaggtataatcattccctactaatttagcggcaataacacagccctcatatgggaaaaccgaagaatatactggttcgattaatattttggatttcagattaaataatccatagcgattttccgttctaggataagcttccaattgaacccaatttttaccttcgccattcataatagatacaaaaccatacttaagccgaataagccactttccatgtgcatccataaatccatactgctgccctttttttacaaataaaataaggctcacttgtactatctaaagatcctt

SEQ ID NO: 80787 - DNA, 506 bp, Arabidopsis thaliana landsberg
  unsure (1)..(506): unsure at all n locations
atagtgaacaactctgcgggagtgttcgacgtacctgtcgccttttggcgcgaagataacggtagtcggaatctccttgaatcagacgcagcagttgatgaggatcgggttgttggtattcgaggcggtacccctccaggccagtggtgaagctcaaacaaccagctttcggctgactggggagcggacatgatcttcctctgaaggctcgaagcagtcgcgtcacagacaggannnnnnnnnnnnnnnnnnnnnnnnntgcgatgatccagtgctccccgatgaaagcgccagcggtcgttccggccagtacggcggtgagaattagcagatgacaggggcaggtgagcacagcaagcgcaccccataggtatccgatgaatggcttgcttgtctcaacagaaatcggctcaaggctgttcatggcgaaatctccgtatcgcgtgccagcttcgttagctgaagggctaactgcccttccaggtctgctagcgcgtgacgccggc

SEQ ID NO: 80788 - DNA, 597 bp, Arabidopsis thaliana landsberg
aaaaacaaaaacgaaactctataaataaaatatttaagagatgcattccatatgttttcccattatttttagtgtgaataatcctttttacatgttatatgtttgatgtttcgtcgggtattgaagaaactgccctatatacatatccaccggaaaaagactttcaaagtggggataaattaaactaactaaaagaggataacaggtattactaaactccattggtaaggtgtgaataaaatcatatactgtaaaaaatagtaagattgtgaataatctccgtgaggagtttagactcattgattaatatccgtcggaataacaaattgtaagattgtgaatagtgaatacagcccaatttcatactagataacgtattcgttttgcttgagtattttttgtataaaatgaaagaaacccaaaagaaaacagaaacaaatggtgtatgttttagagatgttaagacttctaaaattaaaaagtcacaatttttcaagcagagttcttagccaattatacttaaactatcataaaatcactcacaccaccctacttaaaacactcacatgcagagttatttttgtccaccatagctca

SEQ ID NO: 80789 - DNA, 305 bp, Arabidopsis thaliana landsberg
  unsure (1)..(305): unsure at all n locations
gggcaagcgccccgaaaaagaatcaagctgagtgccgaaaaggcgaaggtggangtggtgaagaacacacagccgccaacggggaggcacacttcaaaaaccatactagccggcccacgagagaagcgcacacaagaaaaccngccgcgaaccaagcaaaccacgcagacacggcacggcaaaggcgaaacaaggaaaaaagacncccccggcgagggaacagcagccgcaangaagccggcaaaccaggacgagaacaaagacgaagacggggnnccccacangacgcacagcggagagaacac

SEQ ID NO: 80790 - DNA, 334 bp, Arabidopsis thaliana landsberg
  unsure (1)..(334): unsure at all n locations
aagagatnnnnnnnnnnnnnnnnnnnnnnnnnnnnnnnnntttagagacgggaaaagagggaccaggcggaacacactcccgggggcacgccgcaaacgaaaagaacacaagacaggacgcggaaaaaccnggaagagagccctcaggacaaagacaagcgcgaagacacaaggcagaaacaaaacacaacggaagacagggaggaagggcgaagagaggcgcagaccacagccgaagaangaacgcagnncgcgacaggccaaggacgagccagcgggcacaggaaaacagcaacaagggggagctcgagaaaaacagcacaacggcgaccag

SEQ ID NO: 80791 - DNA, 467 bp, Arabidopsis thaliana landsberg
gatgctgctcggcatcttcttcataccgtcggcaccaatgtcgatccggtcgtcgtggccggcgatttcggcttgatcgcgctggcgctggtggcgctgctcgccggcaaggcaatcattctgtacggcgtcgcgcgcgccttcggggtgtcgcgcggcgtggcgatcgaggtcgcgatgctgctggcgcaggccggcgaattcgccttcgtcgtcctcggcgtcgcgcgcggcaatgcgttgctgtcgccgcgtctcgccaccgccgcaacggcggtcgtcgccttgagcatgctggtgacgccgttcctagccatggccgcccgccgcctggccaggcgcttcgaccgcgccgaacatgcggccgaggcgccgggtcttgacggcgccggcttcgacaatcacgtcgtcatcggcggtctgggccgggtcggccagatgatcgcgcgcgcgctcgaagcggaagg

SEQ ID NO: 80792 - DNA, 479 bp, Arabidopsis thaliana landsberg
  unsure (1)..(479): unsure at all n locations
tcggcctgttcgagggcctcgcggatacgcacgagttcatcttcttctaacaagccggggatgtgaagcaggatgggggcggcaccgtaagaatctgttaaggcgccaatgatattgattcccttttacgtcacacaagtccttttgcgacctttgacgtttcagcagatgtaaaccggaaaggtaaattgtaaagattgtaaattcttcacgaatggtaactaatctcaattgtgacttacaattgcttacattaacatccgcggccttcacaccttggggaaggtctacaacaatgactcacgtaccatctgcagcagcttcgccccgccggatcgcctcggcgatcggcnnnnnnnnnnnnnnnnnnnnnnnnnnnnnnnnngccctggctgccgacgccgacaacagcgccgtggtatcgctggacgccaccagcgtcaatgcgaccgaagatgtcagccgctacaagactgacg

SEQ ID NO: 80793 - DNA, 610 bp, Arabidopsis thaliana landsberg
  unsure (1)..(610): unsure at all n locations
gacccggtgagattgtccttgcctgggaagatgcgcgtggtctggtctggtctggtctctgcaagcacgaaatctgtctacctgactggcgtgaggcggcgcgaaagcaagagggataacggtaggctggagcgtaaaccatccaggaaccatcatcatctcccgacgcccacctcatgacgcagctttatatccnctccgaggtattagagactcgcttcctctgctgattccacgccgaatcccatctccaagcgacacgtatgttgatggagctccctctgtgtccttcccatatagtccaatccatgcaacgtctatccgtcgccctgtctcaagaagaagccgtgttcccttccggttgcatcgtatgtatcggcccttgcccaactgtctcagagcgagttgggcatctctgctcctctggctccttatttctcctcgccatgtcccagtcgctgttcgcctggcgttagcccaatctttgacgcccacacatgacaggcaacgtgtttccacagcgccatgcttgtcgggtgttgccattgccaatattacctcagctgcacctgaggcagagcagtcatcttgagtggttgcaactgtcttt

SEQ ID NO: 80794 - DNA, 188 bp, Arabidopsis thaliana landsberg
gaccaacaaaccattacattcattaacattgttgaccttttctagctgttctaagcttttctattttttgataagcgtttatgaatgactgacaggagatagtggcagaacagtatcggtatagcgtttattccacatagtctcttctcacttttctacctaaagattatgcattccatagtatttca

SEQ ID NO: 80795 - DNA, 492 bp, Arabidopsis thaliana landsberg
gccacggttggatttgttgttttgcccactttatttttatttttattttaaattttttaacaacatgttttctaggctagggtagtatctgttacatttcatatagatattgtaatttggttataatccacaaattctccattttagttcaaattttccggtctcgtgaatcatctgataagctacggatcaaaactatttaggtggatatatcagttacgtcataataaatcatctagtaccctaattaaaacaatcactcaccatattaatacgtatgataaattcattaactaaatatggtccaacaattctaagcttttatcaaacaaagacctgccgtttccacattccaggacatgacgatacgtcgtcccttcgaaatttcttttctccaaacaattctaagaaaaagaacgacctgccgtttttatatttaagcataccagtatacgccgtccccaaaaaggtttttcactggaacttaaacat

SEQ ID NO: 80796 - DNA, 681 bp, Arabidopsis thaliana landsberg
  unsure (1)..(681): unsure at all n locations
caatagtctgaatgctcagggcaatcacaagaaactttcatcgaacttcagaacataaaaagaattatggcacaacaagaatgttagttttaagaaataaaccacacttagataaacttgtgtctacaagactctcatatatacaggagaattcaatcctaaaagctcaatccataagcaaaaagaagatactatgatctgataacaattgaaacatagatcaaccaatgtcctactttctctttcaggctatataacatccaaactcatacaactaataacatcaagagcctatacaatgatcaaaatcaaaacaatacctgactagatggtccaggatgaaccaaagtgcnnnnnnnnnnnnnnnnnnnnnnnnnnnnnnnnnnnnnnnnnnnnnnnnnnnnnnnnnnnnnnnnnngctcataaagagccatcttgtttctaggaggagctctaggccctcctttatctgcatcattcacatgaagccgaggnnnnnnnnnnnnnnnnnnnnnnnnnnnnnnnnnnnnnntcttcatcactcacaattcacaacctttttcacttgcaaacttctcagaccccaaataacctaacttcacaccaagaatcttcctttctctaatattcaacctagaactgagaaagactcccacttcacaacataagcttaataaacaa

SEQ ID NO: 80797 - DNA, 318 bp, Arabidopsis thaliana landsberg
  unsure (1)..(318): unsure at all n locations
gaagcgacaacgcaccagaagtcccggtgggacgaaccaacacaccgacaggggcaaggggacctcgaacaacgagaccccccacacccgccaaagccagaacccggcccccgcggacaaagacnacagaaggggccggaaagagaaggccaacaccaggaagagaagcagagagaccaaagcccgaggcgaagcgaacacaggcaacaaaacgaaaagcagaggacggcacgacgggggcgagagaggaaaagacgacagacaagacacccggacagccacacaacagaaccggacaagagaggcccaccgcaaacg

SEQ ID NO: 80798 - DNA, 638 bp, Arabidopsis thaliana landsberg
aaatgtatatctgaaactctgctcatgtggtgctctaaaattaaaatctgaatttacaatttcaactttattatcctgttatatatcaacttcgcagccaatattgtcattgtttcgacttcaaaagggtttagaaactaagtgcacacatttttaactcatccccatgagttcgattatctaccttctttttcttatcaaggctaaatcagttttataaagaagctctatttttggttcttcaaaaaactaatatcatgcaaaatgtataattgtatagattataaatcacatccttccaaaagacaaaatcttgatgaaattcatgttcattttaagggaaaattttcaagaattcaatgcaatcagtttatattttgactagtcaatccaagttttagttattgacgctttcccacataacgtcaaacgaatcggaatactgaaaccaaaaacctttggctaaatgatatcatgatactccaaaaaggataaaccaagaaactggtttagcatttccgggaaggtcatgacagctctaatcctatatatgtgttgtccatgatctattaatgctatgatatgaaaagagactggcttcaaattcactccattattacacgttcttaatttttagt

SEQ ID NO: 80799 - DNA, 595 bp, Arabidopsis thaliana landsberg
ctgaaaagttactaagtcgttaaagtttgcagtggatgaagatgtctcaatacaattggacttcaattccaattggaaattttataatttcacgtatataatcattttctaaataatttactaaaattatgaagtgtccatacactcgtatcgtattatggtgcaagtttttttttttttgttaagtatgctctatatggccttgatatttagttgtcgacagagtcttaattatatttttagatattaattagaacttacatactcaggataataacatcaaaatactttttcttgatgttaaaaaacttaacttgtgagaaaattttttttttttgttaaaagcttgtgagaaaattatgtggaaaattccttcgcaaaacgtttatttgaacggaaactataattataacttttcaccaaatattgatcaagaattattcaactcatttgaatatattttcgtacgacctgttagtgtaaatggagttaacttttgtttaagaggttggaatttaactagacattcaatacgttgactttatcaacaaacataatattatcaatacgtttttttactttcggtttttttttt

SEQ ID NO: 80800 - DNA, 340 bp, Arabidopsis thaliana landsberg
  unsure (1)..(340): unsure at all n locations
aaagcaccacgaagaaaagaaaacaaggggggagtaacgcacngnccccgcgacacacagggccggcgaaaacaaagacccagaaggacaaccaacagggaacaccgacgcacccacaagaagccgcggcacaaccaaacaaaacaaaccacacaacagagcacaaagaagcnggacaaaccggccagccaccacaagaggcagaaaaaaaaaacaagcgaaccacaccagcccaagcacaacaacccacgcagagccgcgacgaccgggcacacaacaccaaccaggagcgaaaacccacccacaaaaacgccgcaaaaaggcacgaccaaacacacac

SEQ ID NO: 80801 - DNA, 272 bp, Arabidopsis thaliana landsberg
tgtcaaaagagtgggtccctttcttttttttttcttaaccgtgtcattgacaaaaagagcacttaataagccaaagccacatagaagaaaaaaaaaagaacattcacgtctctctcgtttttttggccgacgacgatcgctgaattgactgccggagattcctttaatcgtcagattctcgttgagggataatgaatcctgaatagtaagaaacttgtcttctcgttgttccatgtatctatggttccggatcgacccgcgttttttatttt

SEQ ID NO: 80802 - DNA, 588 bp, Arabidopsis thaliana landsberg
  unsure (1)..(588): unsure at all n locations
gccggnnnnnnnnnnnnnnnnnnnnnccgactaacaccgaactcgcatcgccaaatgtcttgcatcatcttacactcccaagccagtcgcgaatctcttccccagccgttactcgcaacccnnnnnnnnnnnnnnnnnnnnnnnnnnnnnnaactctcaagggcgacatgccgcaacaagtacgatcactcgtgagtcgccccgacccctctgtttctctcccttggacctgttgcctcggtgcaaaaannnnnnnnnnnnnnnnnnnttgatatatcgcttcttgaaggccttaatgaatcttgagattgctgacgattgagtttnnnnnnnnnnnnnnnnnnnnnnnnnnnnnnnnnnnatttgccgcgtacaacttccgcgagtatgcgaagcgacggacgaaggatgcgttccgagagcacaaggacgagcaggatccccgaaaggtgcaagagctggtccaacatggtttgaaggagcttcagggcatgaaggtgaggatacacaacatttgtcaggttcagggttgggagctgacggccgagcagaggcaaacagtcattagtcagttctaccagctggatc

SEQ ID NO: 80803 - DNA, 606 bp, Arabidopsis thaliana landsberg
  unsure (1)..(606): unsure at all n locations
tatattgtcatggagaaatcaaactggtgcctaactagaagcttcatccctattcattaattcatggtgttgtaaggttttctgcaaattaacaaatgacaaagatagtcagcaatatcacccaggtacaaaccttatggattacaacagagtcctgtctgaaaaatatactggtgtaatagtagcacagattttacaggagtaaccaaattctttctgattggattcatagcattgcatgatatatataaagaacctgagagtagataggtcataagcctatggcaaaaccaattaccattcttcttataagggaacatagcagtaaaattacacttagtgatgtattgctatagtcattgtcagtgcataactcaacactcatcaaaaaagatttcccagaaactcacaacaggacaatatgcctagagtgaatttggggcagttggtactaaatgtcttaataaagctctcctttgaaggcttagaggtctatgtaaaagaagatttgggaagactgtaagagcctgatatgatgggtgactacaaagaaacaccatctntatacacactgatacacatatgaactcatagagactgtgacag

SEQ ID NO: 80804 - DNA, 481 bp, Arabidopsis thaliana landsberg
  unsure (1)..(481): unsure at all n locations
accttctggctatnnnnnnnnnnnnnnnnnnnnnnnnnnnnnnnnnnnnnattggagtttgtgatatacccatgatctcaaacacaagaatgcatatcacattattgtcgaacctggtctgaggttacatttaagacacgaacgatggtccaaaacataataactaggtacaacaatactcgggaagactaggataccttatgggaaataacatatgaagatgagacatctgagctggctagataagaacctggttggagagccatcttttctacttagaaggagaataacgcatctgtggttctatggtatagactcgagttttggataaagacgctaccatctataagatgggcaccaactacacgaaggcttaaccccaaagacgaatatatgacctgtgtatatacatctctttggacattgacgagtaaatctactcgtgcatccaggcctcatggaactttgggatcgatcttgt

SEQ ID NO: 80805 - DNA, 242 bp, Arabidopsis thaliana landsberg
taatgcaaatgacccaaaatatgcaaaaagattctcctccaaacttgccattattatttttttccttatcatatattagaagaacaccatagacggatatgactctaatcaacaatatgaaaagatgaatctctcccaatacaccattggtttgccatacaatatttcagctgggatgaacacatctcagaaactccatataaaacgaatattatcataccacacaaatatcgtggtaagaa

SEQ ID NO: 80806 - DNA, 510 bp, Arabidopsis thaliana landsberg
gcagaagctgtagggaagaaccaggaagcctggacctccctcactgacccgggcaagggcaaagattatttccacgacctgcacaaaaaaggcaacggcgaacacgaacacccaccggaaggcgacgccgacgtgaacggagcggataaagcaaacacgcaaagggctgggcaaaagggataccgacagcagacagcccaccgccggcagcaaaagacaagcacgacccaaggaagcacccacgagacagggagcgcaaacaagaaaacgaacacaaccaccaagagacgaaaacacgcagaaccccacgaaaagggaggcaagcctaacaagcagccaaaacccccccgcaaggcagaacagacagagccttggctcctggcagaccaagccgaccagaaagaccccagcacgcggaaacaaaacaagccggcgagggaccccacccacaccagagtccccccgcccgcgagcacaaatccaaagggcggggccaccaccgcaaaagcc

SEQ ID NO: 80807 - DNA, 152 bp, Arabidopsis thaliana landsberg
aacatggcatacattccttaaatgaattgccttggtacttatctagactacttaatttaccgaaatgtgaacaaccaaatatcgcaatgcaccagtctctattaacagtttgaacagcttcttcttgggacaagctgtcacacaccggcacg

SEQ ID NO: 80808 - DNA, 521 bp, Arabidopsis thaliana landsberg
ggatgtcagcgccctcggggcgcatgttggtttcggatgtgttggagttggcgttcttgcttcccaaactgtgggcgaaggttcaggccgggcgggtggcctcgtggcgggctcgggcggtcgcggaccgtacccagggcttgtcggtggaggcggccgaatacgtcgaccatcaggtggcgggttttgtgaacaagatgagcttcaccgccatcgacaagctcgtggacgaggcggtcgcccggttcatgccggatctggcccggcagcagcgggagcgggcggccgatgggcgccacttcgacatcaaccacgagcaggtcttcttcgccggcacctccttcatcgagggggaactggacctggctgacgcactcgaccttgacgccgcggtggccaccatcgccggggagttgaaggacctgggctgtgacctgcccctggaccaacgccgcgccctgggtgcaagagagctcgcccggcgccaggttgcctttgagttcgaccaggacaccaccacc

SEQ ID NO: 80809 - DNA, 349 bp, Arabidopsis thaliana landsberg
ataaaatgatacacgacattgcttatatgtacacgcatgttattggatgatgtccctttttcattcacaatggtgagttcttgtacttcatcaactgttgagagctttaacctaacgaaaagtattatattgtgaactcataataactaagagaagaaaataattgttttggttcacattgtgatggatgagacgcaataatttatcttggatctgggaaatatacctttttgtattaggttttgcagatacatctatatatgtacatttcttatgctacgtaaaagattgggcaataattattttgttctatgttcaaaaacggatccaaaattttagcttggatcaa

SEQ ID NO: 80810 - DNA, 508 bp, Arabidopsis thaliana landsberg
gagaatttagcgacaaggcctcattgctggtgccccgagctccaagtggatgaggctgagaacattctatcatgtcgaaagctagagaacgtctcttgggcaagttttgtctgcgcaactcacggtcatgagggtgaggaagagaatattggtcacaaggaataaagccagtgttgttgaggtctttggagccatactcatcccgatcttgtgttttcgatctttatatatgttatatgtgtgtgtttgataccttgagatacgtagcatatatagatatgatgggagacatattgcatctatggagatagataatggttaccctattagggtaatattaaatagaggtatcttggataaagtcccccaagttaatgaaattcattatctgcttgataattgctgatctgctagtgagagttctatatgagggtccctaatccagataataaaatagggcctatataattaatccgatcaaaaattcctagaatgcagagagatctga

SEQ ID NO: 80811 - DNA, 352 bp, Arabidopsis thaliana landsberg
ggggggaggaaaagggaagcaagagaaagaggaccaaagccttttatcaacgccaagcccgcagaacccgaagggagggggacacaaagagaacgcgggaaggaagccaaaggcacaactcaagatcccgacgctcatgccaccaacaaacgacaacgcatgaacgaaaagggcaacaacctcctccacacctccgcataaacaaaaagggagcgcacaacgagccacgcggcggaaacagccccgaaaaagcggggggggcgcaaaccgaaacaggagacaagggactggaaaaccaacactggcgaaaagaagaaaagcgcaggagaggagacgcgaaagagcgccaacg

SEQ ID NO: 80812 - DNA, 532 bp, Arabidopsis thaliana landsberg
aggctattgacaatattgatgcgattattgccgcagcggatgctgtcatggttgcccgcggttacctgggagtagaaatgccaatggaacaggttcctgttcttcagaaaatgatcgcccgcaaatgccgagaagcctcaaagccggtcattgtagctacccagatgcttgagagcatgatcactaccccacgacctacgcgtgctgaagtgaatgacgtagctaattcagcacttgacggtgcagatgcagtgatgcttagcggtgaaacgtctgtaggtgagtttcctttgatcgttatcgagaccatgcataagattatccggaatgtagaagaaacgggatatccgtaccacactcccaaaaagctgatcgactcttcaccaacgtatatagctgatgcggtatgtggttctgcagtttatttatctgagaaaacagatgctgtatggatcattactatgacattttcaggatacactgctttggagagatccagccaccgttctgaagccgggacattcatatttac

SEQ ID NO: 80813 - DNA, 555 bp, Arabidopsis thaliana landsberg
gaggttgtagtcaattgtcgtcgatttcgggattaatcggagatcacgtgagaggcgttcagagtcgtcgtaacgtcttcattgttgtcgcgtttgaagtcttatttcgagaattcttttaaacttttctttaaagacaactaaagagaagcggagaagagatcagttatagagagagagagagagcgcggcgagtgcgcagtggaggcgatgcgggcccttttcacacggagactgcgctcgagagtagcgacaaaagggaccgaaactcgagagaagcggaacttcggatgcgaagagctgacgaagaagaggcggaagcggaaggatgatgtgatgagagacagagagagagagagagaatgttttggagaatgttttccgcaattaaagattgaatattgagataagaaatcgaagtcaagtctgaaacccgtttccaaagctttgacacactttccagtcgacgacctctcaataaatctctctctctcttctctctccctctctgtgccacaactcaactcaactcagtcatggtccacttcgcgcacc

SEQ ID NO: 80814 - DNA, 394 bp, Arabidopsis thaliana landsberg
ccggggggcggccgccttgcccgcgcccgacaatccgcgcgtgccgcacaatgaatccgtcgaatggggcggaaaaacgatcgcagccatcaatgcggccacctgcccgcaggcgcagacctacaagggcaagatcccgaccgctgaacagatcgccaacatgctcagcgcagataagcgctatacggtcttcggcacggcgccgtggcgcgtcgaggcggtttatcaggacaatctttacggtttaaaatctgatattatctttcgcatcgaccctgatggcgtcgatatacgttccggaggccgtgataatccccgcgatctgggcggcgatggccgtcgcgtgctgggtttgctcattaagctgaaagccatgtagcgcatggcctgcatt

SEQ ID NO: 80815 - DNA, 277 bp, Arabidopsis thaliana landsberg
caaacagacccggatatacaaacacgacaccacaaaaaggaggcccaggaccaaagcaaacgacaaaacgagcaaagcagcgaccccacacacaacccgcaggaacagcatccacaacagcgacccaggcaaaagccacccgcggaaacccccagaacacgcaagggcaaaaagcacgagccgcagaggagaaagaaaccgaacaaacaagaggaaagaccgcaagcagcagaccaaacaaacgacaccgcaagaaggcaggcaagccaaccggcga

SEQ ID NO: 80816 - DNA, 433 bp, Arabidopsis thaliana landsberg
  unsure (1)..(433): unsure at all n locations
gnnnnnnnnnnnnnnnnnnnnnnnnnnnnnnnnnnnnnnnnnnnnnnnnnnnnnnnnnnnnnnnnnnnnnnnnnnnnnnnnnnnnnnnnnnnnnnnnnnnnnnnnnnnnnnnnnnnnnnnnnnnnnnnnnnnnnnnnnnnnnnnnnnnnnnnnnnnnnnnnnnnnnnnnnnnnnnnnnnnnnnnnnnnnnnnnnnnnnnnnnnnnnnnnnnnnnnnnnnnnnnnnnnnnnnnnnnnnnnnnnnnnnnnnnnnnnnnnnnnnnnnnnnnnnnnnnnnnnnnnnnnnnnncatattgaaatttttaaataattttttttttttagccccccttatttttaaacgataaaaaaaaaaaagtttatttatttctatcaaaaaaaaagggggggaatgtcctttttgctttgaaaaaaatttccaatttaccagtttt

SEQ ID NO: 80817 - DNA, 598 bp, Arabidopsis thaliana landsberg
gagaggaaatcactcgcgttgagagtattgtcaagccgtgtgagggacctttcttctacgagtgccgcgctgctgggccaagtggcgtggcgtgagcaatccagctacgagctggcgaaggcgatgaccggcaaccttgccttcttctggacccgtgccgagagccacgtctaccgtgaactcaagcgcttggctgatgaggggctggtcaccgccctggcagggtcgaccgggcgccgtcgccgcacgtcttatcgcatcaccgcggcggggcggcgggcgctgcgggcctggctggccggacccccgggcggtgtgagtatggaacacgagccggtgctgcgtgtgttcttggcgccgggtggggatcgcgatgacctgttgcgggcgattgctgcggctcgggagcaggctcaggcgatgctcacgatcggggaacggctggccgccggttacctcgatgggacgcatccgttcatcgtgcaggtgcacctgcgtgccttggtctgggactacctgtggggttggggtcagcacacgctcgcctgggccgaccgggccgaagcagatgtcagccgctggcccgatcttgccccgc

SEQ ID NO: 80818 - DNA, 325 bp, Arabidopsis thaliana landsberg
cgcctctttctgaatatcgtctgatatattttaatatctctaatatcttaattcaccaaaaataataaatcaagcggcctattatataatcaacaaatttcattacttgttagaacaaatgaagcaattccatattaagtgtcattttagagttcgaatttggtttcaaaataaaatgtcgccttgtattttgtacctagaggttttgtaaaattttcagttttatccttactacttaattgtatggaccaagaataaaatctcaaaatttagttgttttcttgatatcctgaaaaaaaattaaacaacacttacaataagacat

SEQ ID NO: 80819 - DNA, 586 bp, Arabidopsis thaliana landsberg
  unsure (1)..(586): unsure at all n locations
catagcgtgacgaatggtgcatgtcagcaaaaacgacatcgtttaagctcgacctgttcgtctcgatgtttacgctttgattagttactatgtttctgcaattctgtttcttctctgtacatcaccaacaacatttaaattccaatggcgcattttaaatgtcaataataaatcgagatccgtaatttcgaagctacaagcaaaccttcttgtgcttctctaatcattgcgttttccttttaaagagtttctcaaagttttcccttttttttgggcataaaattgtttccttttcctcctatcagtgtgtctgaaaaaaattcaatgtctttatgttctgttcttttctgatctctctgaatctctctctatcgcgacagccatggccgaagacccttctttcctccccaaggtacctttcgttctgtgttctgtgagtggtgttgatctgattagctgatttgttctctagtttcaatcttagctcttagttatttttttgagttatttcatattcttatactctacatctataagaatngattctttcagcattataaaataaaaagattctgagattttcttg

SEQ ID NO: 80820 - DNA, 632 bp, Arabidopsis thaliana landsberg
  unsure (1)..(632): unsure at all n locations
caaagtagatggcttctattatttgatgtcaattgaattgattttatggttatctttaagttgatttctatttaatttttgatgtagtttgaattttaaatttacttctaaaattaaaacattttaaatttacttctgtgaatcatgatattttatacgttctattatgtacataataaacgcttaattagaccatctaaactcgtttaaattccaattaaaacgttttagatgttagacattagatcaccacctatttaatgtctgcctaaccattgcttttaagtagttacttgtcatcaaatccaaagcagttgtcatcaaatccaacttacaaccatctatactagtacgactggctaaggcatgattcgaccctactcatgacaaacgcaaaacagcctagcatattaaaatcctaaaattagattatcaaagttgtagtttatgtactcgtattcgacatatagaagacagaacaaatgcggcagctgataacacttggatttttacattatgaaagtggtagattatgtacatttaanatcggatctctatttgcttgggtggcttttactataaattagtcaattaagtttttatttaaggtactgaacaccctcactaccata

SEQ ID NO: 80821 - DNA, 442 bp, Arabidopsis thaliana landsberg
cggcatacgaggggaaaccctcgcccgcggagtctgaccacgccaactgtgcacaaacttactactctactaaataaaaagaaaagtcaatgatgaattaagtgaatatatgaactgatggaagcgatgcgctgtcaacaacgagcaaagcgaataaaactcgatgggtcttgtgctaatattaaatgagatgaaactaggctgctagcacccacgtctgttatacactatggctacatatgcctgaggaggagaaacattcgtgtcctggttagaggggcgcgatcttatcaccctccctatccctaagaggatgaaggtgggcccatttcttaaatacctaatacgttaccatcacgacgcccattgacatgtctactctagtgctggacacgctagattccacttatcttatctgcttcaggacactgcatgagtcctg

SEQ ID NO: 80822 - DNA, 512 bp, Arabidopsis thaliana landsberg
agggactcggccagccgggcccggtcccggacggtgcgcaggacgatcacgtttccctccgcgcccggcagcgtccgcggtgccgcgccggtcgcgatcaccaggcccgcatagtcccggctgctgccgtcatcgagcctgacctggcggcgtgccacgtcgagcccggtggcgcgcgtcccgagcaggagctccgcgtccaggtcctcgcggacccggatccgggtgagggcgtccgggtcgtcggcggacagccgcttggacagcgggggccggtcataaggcgggaaattcggcccggcgccgacgagcgtgagccgcccgccgaacccggcctcgcgggcggcctcggccgcgcggacaccggccagcgtggctccggcgatcaccaggcctggggtaccggcggtcacgccggctgtcccgcggtgccggcggccggcgtccccgccccggggctgaccgtcgcgtggatgaccggccggctgagttcgccgccggtcccgcggatg

SEQ ID NO: 80823 - DNA, 613 bp, Arabidopsis thaliana landsberg
  unsure (1)..(613): unsure at all n locations
gacaccgcggcgcgccacagcggcgacgtcggcacgccatgggcctccttccagtcggccacgcgccggaacagcgaggggcacgtggccggctcctccgacagcgcgatcgtgaagccgtataccttgtcgcggcgggccatctcggcgaacgggtcgtacgtgatgctgcagtggaagtccacgtcgggctccagccgccagtaccatctataatccttcagggcgtcgagcgtgtagaacttgctgtgttgtcacaaaaaaaaaggttagcccggcacacacacacagagagagagagagacagaaatcgagcgtgacacggggcacggagaagtgaaagctaacccggagtagaaccggcacatgtggtggtacgtctcgaggccggcgtagaggatgccctcacggccctgctcggagatgctagcgcgcgcgaccgacgggtccagccactcgggaaaggtccactcggcgcggnggacaacctcgaagcgcgcgccgncgctgacgctcgcgttcatggtggccacgaactcgtcgctccagggctcgtcgttgaggaagacgacngngtagtggaaccacctgttgaagtggcgctcgatgctgc

SEQ ID NO: 80824 - DNA, 401 bp, Arabidopsis thaliana landsberg
aataaaggaaactatttttgtgtcatcacatgtgaatcgagcgactaacacatatgagttattatgtgctctaaaatcgacaaaaccccataaagagagtgaatagatagtgcctctatacttggcactgcccgatataaaaaaagagtcgggatgtacttcgattgtaaaactaataatacctctcatataagatgctgtgccgctccttggactacaacctatatgcgctaacactgctgactatgaccaactatcattacacaatttcccatatcggccaactacatcacaacgggggggacaccgcatagagagagcgttcctattaaaaaggacgtaaaggagaccaggacttgaaatgtccaaccgcccattaaaatcatattctgagtcttatc

SEQ ID NO: 80825 - DNA, 641 bp, Arabidopsis thaliana landsberg
  unsure (1)..(641): unsure at all n locations
tgaacctcttgacgagaactcttgagcctcttagatgcaatagggtttctcctgttttccaaggtctctttactagccaccatctcatacaagatagaatcatatggttcaagctccttctgaagagttgtgaagtacctacacacccaaacccaatccacatatatcaccacacaagaaactaattaaaacttaatcaaactcactagtgatataaacaaattacgagcaatagaagaaagactcactctttatctgcaatatgaatagttgagaccaaatccacctgcaatatagagatgatgaaatcgataaaaatgttacctttatcgatttaaatggaaacccagcaagtaacagagatggtgatgtaacctgaagaaaagggttgagaagaatccaagggaaacgtttcttgtaactcacgattgcagtctgcaactcgctggtaccattttcggggtcgggacggcgtttgaaccgcatgtaatcagcaattgaatttgattcgagaaaaagggcggcgtcggaagcatcatcagacggttgattcagtgagcacgagacatacacatttggacacggtaatttgacccgaaccggtangagatatgccgagaagnttcgagatgagtaaacga

SEQ ID NO: 80826 - DNA, 620 bp, Arabidopsis thaliana landsberg
caccccgtcaaagttggaccttctctcacataacaacaacccttcacatatcaatttgtcgaccaagtaagctcctggctggttaattatatcaaagatagaacattagcaacaatctgacgttttttcacagatattttcatacaagcaatgagacagttcttcaatgatcaagctgatgatacataagggcttaaagataattttgctgcaagcagaggctaagagaaggagacactgcttttacatggataggtgatacaaactgttgatatatacacgtgtagaggatcattacaacgtcacactccatgtcaaacatttgttctacgaacataatatgtaaagataagacatcaaaatctcaaagttagacttgtatgtttttgtgtacctatggaacatatataactgttttgtctagcctaaaatcaagaattacaagtcatatacaacttggaaaacaaacattccagattccatgaatctttcaacatgtttttaatgtatcaaagacattcatgaaggatagcttctagttacgaaacaatatttattacaaaatcatgaacaagcgagctaattcagaaacaacacagaatatgaaagagatgagaaga

SEQ ID NO: 80827 - DNA, 490 bp, Arabidopsis thaliana landsberg
aatagccaaagtaccttatgtctttttattcatttttctttagaactctagcaaatgacacaaccttgctcctccttatcattgaaaatatcacgaatttcacggttgtatctgtaaagagcttcacgttcaatctcttccctcttctgcttagcctcagcaatttttgcttctttcaaagcatcataaggtacatataatgttaatttagcttttccccatttctttctgaggtttctaaccaactccacaggatcaacatctcccattactactagtgtgccttctttcaaatccatataagatgagtgaattcctgaaaacaaaatattaaagataagggctctgaagtttgggaaaatctgtaaaatgagtctttcttatgttaagtaaaaaacagagtgtaaaaagataaatgcttgtttttttgataaaataaatcaaatgcttttaatataacaaagatcaaatgtttgtttatttttttaaa

SEQ ID NO: 80828 - DNA, 552 bp, Arabidopsis thaliana landsberg
  unsure (1)..(552): unsure at all n locations
atgttataacccgcctgccgccatcgccgatctgnnnnnnnnnnnnnnnnnnnnnnnnnnnnnnnnnnnnnnnnnnnnnnnnnnnnnnnnnnnattttgtcgccgacggcacgggcggccatgcgttcgcggccacgctcgcggaccataaccgcaacgtcgcccgctggcgccaaatccagcgacagaatgcgccaaataatggaccaaataattctgggccaaaatgacttgcgttgcgatatcttggcgtaatctaagtgcgatgcgatgactcttgcccgaggccgacatgattgagtacctgcttgatccccagacctggatggcgctgttcacgctcaccgtgctcgagatcgtgctcggcatcgacaacctcgtcttcctcgccatcgtctcggcccgccttcccgcgcatcaacaagcctccgcgcgccgcattggtctgaccgcggcgctggttctgcgcgttggccttttgctgacgctgacgtggattgcgcaggcgaccacgcctattttacggtgtctggttcgccgtgagctggcgcg

SEQ ID NO: 80829 - DNA, 122 bp, Arabidopsis thaliana landsberg
tagcgcgttaaatgtggtattgttttgatttttttgcttagattatatatccacacaaataacatcttacaatatttattttctcaatacaccgttcgacaccacagtacacgttatcgcta

SEQ ID NO: 80830 - DNA, 165 bp, Arabidopsis thaliana landsberg
ctaatatctatatctttatctctttattttctttgctaaattatattaattattttactcatttctggtttgtctcctgaaagctttgttccatctccttacattgcaaaacgaatctatccggattttgtattcacaatctctgtaagtccaaccaataaattt

SEQ ID NO: 80831 - DNA, 433 bp, Arabidopsis thaliana landsberg
atcaacataaaatatctgataaaaataataattgaaatttcatatttttaaataggaacacaagcattttaacaatcaaatcgtaaatatgtcttgcaacgatactgtcgaagaaatagagatcccgtgaaaaccacaatataatgttcttgcactagagaattcatcacataattggtgaaacattaacaataataataatcttctaataacttttttattttcgtatattactttttttttcaaagtttggattttttattttatagttgttactagtatgttacccaaaatatttgtatattataaatcgaatcattgatcagaaatataccgaaaaactagaccaattcaagattaatatgagtcatgtaaaactagaaaaagggaaaatttaattattttaactcgtgaaggaaaagtgtatatactt

SEQ ID NO: 80832 - DNA, 401 bp, Arabidopsis thaliana landsberg
  unsure (1)..(401): unsure at all n locations
aagttcggtttcacgccgctgaagacgccggaggctttcatggaacgccacgacccggacgtgtactgcggcacgtgaacgaccccgccggcatgcccggcggcgcaacccccgaccacgcatgaggtatcgacgaatgctgcgacgcttccggcaactcgacgttttcggcgcaaggccgttcgccggcaacccgctggccgtggtgctggattccgagggacttcctggcgaggaaatgctgcgcatcgcgcgctggatgaatttgtcggagacggcctttctgctgncgccggctttcgatggcgccgactatcgcgtgcgcattttcacgacgcaacgcgagctgtcgttcgcgggccatccgaccctgggcagctgccacgcctggctcggtgccg

SEQ ID NO: 80833 - DNA, 609 bp, Arabidopsis thaliana landsberg
  unsure (1)..(609): unsure at all n locations
tggaaggtttgcgcgacgaagtggttgccttccctgaagacaacgccgttctagcgcagaacttcaaagctgttaacgttgaattccgcatgccaaagatctcgattccaaaactcttgaagtttgtgggcgaaatcgagaaatcggataaatatttgaggttcacagtatgcaaatccgcgctcgttacggtgaccgcctattcttcgaaacaaacctgaagattactggctttaagccagcaaacgggggctaatccatgaatgagaacgtacaaaagtccctgtcgattgtcggttatgtcgtcatcttcttcttcagtttcctgcttttcgttttcttgagcttcccttatggcattctcaaagaaacgattgtcagtaaagttggtaagatgtcgggcctcaacattcagatggaagatttcggcccgtctttcccccttggcatcggcgcttcatccatcaaagtcacggatgctgcgggcggccctnnnnnnnnnnnnnnnnnnnnnnnnttaagattggcattctccctctcttgattggccaagtgtcgattacgccaacttggaaacacanaatgacggtttcatcgatgtaaagaccg

SEQ ID NO: 80834 - DNA, 554 bp, Arabidopsis thaliana landsberg
  unsure (1)..(554): unsure at all n locations
ttgaaacgcattatagctgatgtcaagattataaggttttcattattgtctggttttttttttctttcctttttttcctaatacttttattagttttaaagtttaaactcttttaattttcattacttgtcaccaccacttttatttactaaaatgtattactatatattgctaaatattttcaaatactttattttatttaataaacagatcttgtgtgacacatagcttaattctattgattgaacatttaactgacacttatcttaattttattttttccatgatcttggaaagaaatatgtgtaaatatatatctcatatcttcaactatattttgttgagattacatatgtccacgtcttgtcttagtttgttctatatatggataagccatctttttacttctattagaacctgaactcatctgcctcaacacanacaaaaaaagaggtctactagaagacttgagtaaagcatggacaatgagaaagggacaagttcctcggatttaacgacgagacaaaagaagcctnnnnnnnnnnnnnnnnnnc

SEQ ID NO: 80835 - DNA, 639 bp, Arabidopsis thaliana landsberg
gattccagacatatttgacaattatcatcatctaatagagcttggtttgggacccaatcatctgttaggtactttaccaccctccttgtttcgcattccatctctcattgcgctggacttggcgggcaatttctttacgggttctattccggcagactttgggcagatggcaaacatgcggtttctgtatttgacagataactttttctctggttccttgcccgcctcacttggtaacctgatcaatatggtggcgctaaagttggagaataatcatgtatcgggccctatccctgagtatatgggcactttcacgcagttgcgtatcttgggtcttgatagcaacaaattcacaggcacgattcctctttctctggcgatgttgcctcacatggaattcctgttgttatttcgcaatcatctcgaaggaagcatccccaaaaaaatatttacaaacaacattcacgcagttgcgttgtattctaatatgctgacggtgagcatccctatggagctggagaattgcgatcgacttatcctgttgcgactatatgacaatctgttgaccggcgtggtaccggacaaccttacgcgtttgaaggaccctcaagtactcgaactacaggcaaattacttgag

SEQ ID NO: 80836 - DNA, 543 bp, Arabidopsis thaliana landsberg
ctcttttattaaaaacttaatcacaacaaatttattaatcttaaatttgaccttaggattaaatttatatattaatcttatatctgttatacattaaataaactttaatttctgcgcaacaaactaatttattatttatttcttgtctctgtctttgtagttttagtataaataaagccattttgctccgaggaacttttcattcagtcggaccaacttgtgaccgaagaaagcaaattgagactacgcaccaactagtcctttggtttgtatcttaagataaaggtttcttttatggacggttcttcgtttctcgacatctttctcgatctcaacaccaatcctttctccgcaaaacttccggtgagtccggatttcgtctgatccattttcccgaaatctaagttgatttttggatcccttcaatttctatgaactgggattttgggaattaatcatgggttcatttcaaattttcgtatttcagaagaaggaggtctcagacttggcttctactcacttaaagaggaaatggttggagca

SEQ ID NO: 80837 - DNA, 583 bp, Arabidopsis thaliana landsberg
tatccatatcatgaagcaatatactatgttattacatgtgtttattattttatttattccccgttccaagtaccaagatatattaaagattcaaccactaaacgcaatgtcagatgatcactttgataatattatcaccaaataatacccatattttaacaaggttttattattgacatgataaaccctaatgacccaatgacacacacaccgtcggtcaaggatcatgctaacggatacggccaatgttagagaaacacttaaataagttttttgtttgttataaattatcttgcatgagccagacttaattatatatgtagtttactaattagtatgattacacgatccattgattgattatgaaaatttaaacaaatgtgtaaaagagtttaacagattcattgaatcgggacatcaattcccgatggtgtccattgtcccgatatatagttgtaagtctacacgttaattcattgaatcgggacatcaatttctgatggtgtccatattgtcccgatatatagttgtaataagcctacacattttcaactgcattaattgaaattttaaaacatataaa

SEQ ID NO: 80838 - DNA, 610 bp, Arabidopsis thaliana landsberg
aaaatacagttgttttcatgacagaaaagctaaatatttcatgttttcttgaaaacattctataattgtttttgttccctagtagttttaagagataaagaaagaatctacatatatcatgtacaaaaaagatatgaaaaatgatcagtgtatataattcattattttttactacattaattaatttgagttttagtcttaaattttatgttataatcatggttaagcagttttcaacaaacttcgaaggttaatttccttctcaattattttcttgtatttcagtccattgagttgtatgaatatttctttaccatatattactatgaaattttatattttgattcgattacatatgtttcaagataattcagtatagaccgtaagacgtgggtaacccgtaatcgcatatattatatgcacacactacgttttggtgttatacaaggacgacgttgttaacataaatcaaccgtcacatgagtgagagagcacaataaattttatcaataaaactgacatagtgggacaggaatcacaatgaaatttgtagaggaatcacaatggaatactattttatcaataagagtaaagcatttttacaaaatgc

SEQ ID NO: 80839 - DNA, 476 bp, Arabidopsis thaliana landsberg
  unsure (1)..(476): unsure at all n locations
gaaagaccaccactttcttcaactcaagttcgcaagcattaggcatttgatatcctgtttcttcttcttccaaagcttcctgcaagttttatgcaacatgtattgncgctcaaatctgttcagagcctcatggatatactctccacaaaggactcttggttgcataaagnagccacccattttcttgtcgagttaatggatagggtgaatgatgacgataccaagatggaggccgntacaatggctctccagaaacacagcgaaagaaaattngataatattacgcggacaaaaactggtaatgttctagctgcagagctagaaactgaagatggntgcacactttatctccagaacttgatgaatttggtagaggatgaacagcatgttcctgaagaatcttcaaatatgaaatggnccctagaaccttgctcttagaattcagatcagagncaaacaacggatgataattctga

SEQ ID NO: 80840 - DNA, 567 bp, Arabidopsis thaliana landsberg
  unsure (1)..(567): unsure at all n locations
tatattcgacataacttatattgttgagttacaacagtttttcaacgtaactagttaatttatgcagttttcagctatatattaggctttgcaagtgtgctacaaaaaaaattacatgatatttttcccccccccgcagtttggagaggacttcaaagagaaaacaaggacttctttgaaacgtatgggcatttcgtctctcctaggcccttcttaagtaagagattgtgggatcaaatgtcctcttctaattgttaacaaatttcaannnnnnnnnnnnnnnnnnnnnnnnnnnnnnnnnnnnnnnnttgttatatagttcattttgatgagagttatgttttctttatcaggnnnnnnnnnnnnnnnnnnnnnnnggtttgcgaaaaggatataatgaagacttggtttaggctcgtagctagatatataggagaaaaagcttgaactttatatatacctaggcatatgtattacatattcctatgatgaaatactcatgcttattatctgtggtccttttgatgtcataaggttcccctataagattaagcagataagattgat

SEQ ID NO: 80841 - DNA, 595 bp, Arabidopsis thaliana landsberg
ccgtaaactgtctgtgccgtgctgcgccgtcttgcgtttgacgaggtcgatgagcgcatcgagtacggcttcgtctacaccggtgccggcggatgcattctctgccgacaccacgagcgtcagattgatggagccgcggacgaacaattcgccaactgcctggcgggcgggctgctcgagggagtcgtgcccatgcggcgtgcgcaggcgcacgtcgaggttcttgccgttgacgctcttggcttcccaggcccagccgcaggccgccttaccctcaagtcggccttcagcacgggcgaagcccgtcatgctgatcagcgtcgccccagccgccatatcgtccccgtgcccaagatgcgcgtccgttatatcgggcgggaggccactttcctagcgcgctgcgccgatttccttaataaccttggtcctttgcgaggggacggtgcggggaaaaagcatggcgtttgcgcatattctgatcaccggcgcgtcgtcgggcatcggcgaatccctggcactggcctatgccttgccgggcgtgacgctgagcctttctgggcgcgatgcggcacgcctcgccggtgtcgcggaccgc

SEQ ID NO: 80842 - DNA, 245 bp, Arabidopsis thaliana landsberg
agaggaggcaccggctgaagagcaaaaaccgactcttgcgcccggtttgtggatgccgggtcctgcgggacgaacgattgggccggggacgggaactatgggtcctgcgacagagatacacgcgaccggtccaacaatgcctgaaacgaccggatgcttgtggaagacgcgtgatatgatgctacaaataacactcctgaagaactaatactgagtgccctaacttgaatggtggaagatgatga

SEQ ID NO: 80843 - DNA, 618 bp, Arabidopsis thaliana landsberg
ctttctctcgatttatgcgttattttactgtcctgatatcaagatgtacacgcctagttttaagtggtaacaacatataatttcttacgcatgtttcaattttcaaacacaaaaaaaacgtaacctgtgacactttgacattattttttgggtatgcgaatgaattgaaattaatttatagtgttctagagaataaaagaaagtgccctaaaagaaatgatatcaaatttatttgcaaatacaaagaaaaaaaaaaacacaatttttgcaaatataaacaatagcttttacagttaatcttcatgtcaaaacattcttttgtgcagtatcattccgataaactgtcagcattggacaacggatagaacacaaatggaatggaccacaactgaagaccgattctaagcctagcaactaataatttgaagttatcttattatattgtatgaacagttttttcaatattttttgctctattaatcgaatctcacaatcacattagtcacgttacaacgaccagacttgtagtaacaaacaaaaaggaccatacatttttttttgtttaacaaaaacgaccatacatgttatcgctacatgaatttctctggtattttattt

SEQ ID NO: 80844 - DNA, 325 bp, Arabidopsis thaliana landsberg
  unsure (1)..(325): unsure at all n locations
tatgatgagaacctttgtatttttttactgtcgttttgccaacggctggaaatacggctaaaatgctgattcgcgtaaaaatctttgtaaataaaaacatgattataatttattaatcaataaaaagtactcattatttnnnnnnnnnnnnnnnnnnnnnnnnnnnnnnnnnnnnnnnnnnnnnnnnnnnnnnnnnnnnnnnnnnnnnnnnnnnnnnnnnnnnnnnnnnnnnnnnnnnnnnnnnnnnnnnnnnnnnnnnnnnnnnnnnnnnnnnnnnnnnnnnnnnnngttcatgattgtccagatccctaaaaagaacctttct

SEQ ID NO: 80845 - DNA, 564 bp, Arabidopsis thaliana landsberg
gagatttgccccgcaattcatcccatgcaaaacaatatatctttctttatagtctctaggcaatttatgtttatagttcttggttatcaggttttatagatcgaatcctacatcaatcttggaatctaaaactaccatgaaaggtctctgttggtgagtgtctctcaaaagtacgaggcattaatttgaatgtttctatgttatgataatgtttttttaattccccctttcatacaaatatttttatccttcttcagaacatataaataagtatttccatttgattatggaagttatcgtgtcttcaatcctagtgaaaaaaaaaagagaaaaacgcgtgagtcacgtgaggtcatgcacacactctctaaaattctcatacggttctcgaagaatagcacaatcgtcgacaagattctcaaaatagtaacacaatcgtctttcatcactgttcttatgagattctttctttcttctgttgcgttatgatttatactttctcgttcacaaattttgagttgcacttgttgctgttgattgattgcgaggaaagaaagaaagaac

SEQ ID NO: 80846 - DNA, 511 bp, Arabidopsis thaliana landsberg
  unsure (1)..(511): unsure at all n locations
ccggcaaggtgctggtgagcgcggcgccgctgggcgacgtcgaggacaccgtggagcttctgatcacggtgcaggtcgtcgtcttcgggctggcgctggcggccctggtggtgttcggccggcggatgctgcgacgcggtctgaagccgctgagcgacatggcgagcacggcgcacggtatcgcctcgcacgatctgaccgagtcggcggcgcggctgccgctgcgggccgacgggcgggacggcggcaaggaggtggcggagctgcggaccgcgttcaacacgatgctggagcacatcgacgcgtcgctggcggtccgtgcggaggccgagcagcggctgcgccggttcgtcgcggacgcctcccacgaactgcgcaccccgctgatgtccgtacgcggttacgccgacctcttccagtacgcggcggccaacgcccccggngagcgcgagcggcacctggcccggctgcgggccgaggcggcccggatgggggcgctcctggacgacct

SEQ ID NO: 80847 - DNA, 410 bp, Arabidopsis thaliana landsberg
acttgaatccaatgtttgatcaaaggctgtttttattcaccatatttaaaaccagatttgtttttctttgcgaaaaatgataatccttatgcttggagatgatccttgaggattaatttttggcaattcacctgtcttggaatcataagatcatcttagcaagaagatctacatttcgaacctaaacgaaattcccttttcaaaagtaccaattgatatgcagcggatatgaaacaaacagagctgttgtacagcacttttattttgttgaatagacatgagaatttatagtgacggtaatgttactttgagaatttagaactcaaaagaaattgagctgttttataattaagctaccactaaaaaccgctcctttatttacaaatattgagtctaacacacacatgcac

SEQ ID NO: 80848 - DNA, 582 bp, Arabidopsis thaliana landsberg
  unsure (1)..(582): unsure at all n locations
ataaaccgnccaccccgcggccctcggnnnnnnnnnnnnnnnnnnnnnnnnnnnnnnnnnnnnnnnnnnnnnnnnnnnnnnnnnnnnnnnnnnnnnnnnnnnnnnnnncacaaatctcccgaattcacaccaagcagagggcacccgcccgcctagttccggacagggccgggatggaggtggcaggcgacctggtgaccgttgccctggtcggtgaagggcggatccaccttcgagcagacctccatcgcgaacgggcaccgggtgcggaagcggcagcccgagggcgggttgaccgggctcggcacgtcgccggtcaggatcacccggcgccgctgcttttccaccacnnnnnnnnnnnnnnnnnnnnnnnnnnnnnnnnnnnnnnnnnnnnnnnnnnnnnnnnnnnnnnnnnnnnnnnnnnnnnnnnnnnnnnnnnnnnnnnnnnnnnnnnnnnnnnnnnnnnnnnnnnnnnnnnnnnnnnnnnnnnnnnnnnnnnnnnnnnnnnnnnnnnnnnnnnnnnnnnnnnnnnnnnnnnnnnnnnnnnnnnnnnnnnnnnnnnnnnnnnnnnnnnnnnnnnng

SEQ ID NO: 80849 - DNA, 542 bp, Arabidopsis thaliana landsberg
ttttttatttttttttgtaacgtgatgatttttggatactctcgtttctttatagaaactgaaaggggtcaggtcacctggttctctcgtacacaagtacagaagtagttgctattgttcccaacctacctagtcatacaaactttggaaccataacgatggttgtgtcaattttaacaaagaaataccaagtgtttcttggtttaatggcttctttcactggccgaggtaggacgaatttttattgggtcaaatttttaataaaagaaaaacatgaaaatgtatttagtaagcgaatgtgtttaatcttaatctgtaaacccaaattttataaggtttctagaaaaaatgtggggttttagggttttttttgaagtaatacataagtcaaatttataggggacaatataaaattttgagtggggtcaatcttacaatgtcttttttttttaattattgacttttgttggggcagttgaccccagtcccttacaattgcctatgccactggcttttaattttttaaagagaacatattcaag

SEQ ID NO: 80850 - DNA, 423 bp, Arabidopsis thaliana landsberg
ttgcggcttaggatgacctctggctccaattgctagcaagattggggattataaaaggatatatctcattgcgctggttttcagttaaatcaatatatatatctaccaatgttccatggttctgcattgttatcagtcagaacatttgtgtatttgtttctcattttgtcttttatttgttgttcttacctcaaccgtgtgaaggatccatcgcattggcaagtcacggatgccttaccgacatatgggcggggtattgatctaccagggaagagatacatgagtttgatacacggtgacatgctacatgatgtagcagcacacaggttatatacatattttgatccattcatttcattttgattgctaatgctaaataaaaactcactgttgtataccatattcattggcttatgtgataac

SEQ ID NO: 80851 - DNA, 482 bp, Arabidopsis thaliana landsberg
  unsure (1)..(482): unsure at all n locations
caagaaaaaagaagaaaanggttattacnaaccgngaggaagcagggaaaagggggggcaaaagcgaaaggggaaaacagggaccaacagagaaaaccaggcggaagcgcagaggaagaggaaacggggagcaagaacaaacaaaacacaaggacggaggaacaccagacacaacaaggangacaaaggacaaagacagggaggccggcgccaaacgaacaaaaggcacggngggggagggaaacaggccacagggccagagaacaccaagggcaggccacgggcacaaccaaggggggacgaagacaaagggcaggaacaccacaggccaaaaaggcagacagaggagacagaagggacacaggaaacaaacaaaaagaganaaggaaacnaaacanggcaagaaggacaacacggaaaaaagaaggaccaaggaaaggaaaacgaaaaaagggaaaaaagcgagaaaaaaaacaaacaga

SEQ ID NO: 80852 - DNA, 570 bp, Arabidopsis thaliana landsberg
cgccacgcccccagtgtagcgcgcgccaattgtaacgacttgtaaatggggtcttatccccgttccgtcctgtggtaacggaggacgcatgacagtcgaagagctcgtccagcggctcggtctacaggcacaccccgagggcggctggtaccgcgaggtctatcgagacgcggccgtgtcgacgatccactacgtgatgcccgccggcagcctcgcgccggtgcattgtgtgaacgaccgcgtcgagctgtggcacttctacggcggcaccgcggtcgagctgcacacgatcgttggcgagcgacatcagatggtccggctcggccccgacgcgccgatcgtcgtcgtccctgccggcgcgtggcaagctacccgcgcgggtgacgggttcgcttggtgcggagcgaccgtcccccccgcgttcgagttcacggcgtgggaaatgccgtcgcgcgaagagctttagcggctgttaccgagcgtgctgcatcccatcatcacgaggctcacgcatccggagctatgatcggccgatgcgttggctgttgtgcgtcgcccttgtcggctgaa

SEQ ID NO: 80853 - DNA, 662 bp, Arabidopsis thaliana landsberg
cattgtttaaaattatattttaaatttgtcgggcattgtattgttttcttccatcatatcaattggaatttgaggaacatgcatgtttcattgtcatgtacctcatcgctaatcatggcccgattcagttgaatattcaataacgataatagtaataattagcagcaattataaaacctaattacaagctattccatatatacttttaatactatagtttagttgcttcgggtgaaagatagcctgcggaattgaacgaagcccaaacgaattaaataaacaggtcgctaaatagacaaatagataaacttctttgtattatcatgtgaccatcttattttcaataaatgtgaccatttgattttttttttctttattaggttttatattcacattactatatgtccaattaatctgtttctgagatcatgcacgataagatgtcatatgcataaaattacaaggccgcgtttataagcaaactgcatatactcaaagtcttctcgattccatgaagaaattaacacatttaaagcttagtagatgatagtgcggtaaataattaattattagggtaaattagtgagattttgtatggcttatctgtatataaataggtaacgaaatttacttataagcaagcctataaataatactaacga

SEQ ID NO: 80854 - DNA, 558 bp, Arabidopsis thaliana landsberg
cgaccaagactcctcactcgtcagtgtttccactttccacgttgaaactttattttattttacggaaaaggtgatatatattacatcaactagtacttctttacagagaaatgtttgtttactaggcacagacaaaaaaaaaaaaaaaagggaatttgaaactcatcattagctcaacaagagctttctaagtgagcacgaagcaatgcttgttagcccgacgaaacttccttccgttttcttatcgagtaatttgtattatacttatgtcacactcaatttttattgtgagaacttatgtcaacttatgtcaccttttcaaactcatttcttcattgcacattcaattttccacaaaattttacgagatattcatgtttttttttgtatgtttgataaaatagacaataaacgtaacagtggatcaatagggaatataaatattatactatttatctaataataaagaaaaaacaaatttctaagaaaatcatctataacaaatgtaataaaatactcccacttgtttcaaatttaaatttatttagaaagatttca

SEQ ID NO: 80855 - DNA, 149 bp, Arabidopsis thaliana landsberg
agagggaagaaagatgagtaagatggggatgaggatgagattattgagaaagagagtgatgttgaagaaggagtatataataaagaaggaagggaaaatgaagagtggagagtaaaaaggtaattatgggggaaaaagggtgagaggga

SEQ ID NO: 80856 - DNA, 507 bp, Arabidopsis thaliana landsberg
  unsure (1)..(507): unsure at all n locations
gagaaggaaanggaanaaaaaaaanaagaagttttattttttaagagatgagcacttgtgggctgtgggggatttgacttccattcctcaagtccaatatccgcatgtgcctaaaagcccaacgaaatatacatgaatgcacaatttaatacactatgacccacactctgcccaaaagtatgtatagatagaaatgagtcacaaatgtaatttccataaaagagaatgggacaagattttacagatggaggatattgggtggaacagtgtacacgtgcaatcttactttctccgtgtcttgcataacgtggcggatttgcagggacacctctgtatctgtattatcaaagtcgtaaaaagaaagcattgtcgaaaacagcatgcagtccatatttattatgagtaaacaggcagtacttttcttttaagactgtaaagtaacgcgtaacgagttttgagtggtgactcaacatgatgtattatctcactctttttttttttactgat

SEQ ID NO: 80857 - DNA, 463 bp, Arabidopsis thaliana landsberg
ctctccgagaagcttccaatctttcagctaccacttctattccagcgcgagatctgggatcttcaatgcgggacggttcagctcatttccgatcagatcacctgcatggaggataaccgtctatggaggactctgaagccggctgaggccatcagtcaggccgaggaatttgtttccaagacacgcggagtcctgacttctttgacctctaatgtcaagaccctggattctgacgatgattctacgtgcctagtccgcgatctgattcatctgctcaccaaacactcgaatgagttgacacccaggggcttgtatagtgcaagagcactctcagaactggtccaatctatcacagaggcacacggaacttcgccaagtctcgaggatactcttctgaagcctgatgttctaaaaattggtcccgcgaccgtcttgcccgcctcggcactcatcggcgggtttg

SEQ ID NO: 80858 - DNA, 510 bp, Arabidopsis thaliana landsberg
  unsure (1)..(510): unsure at all n locations
ggcgccgtcgtctactttattactaaaacgcttcttgattactgccgtcgtacttttggtactcggattggcgttccatttcacaggccttaacccaatcgtgaagcgcatctggacacccgcctggacgctgttcagcggcggttgcgcgtttttgctcctttctgcattctattttttagtggatgtgaaagatttgaaagcctggttcctcccactgatcgtgatcggcaccaattcgattgctgcttatgtgatcgccgatggattgggtagtttcattcgcgggtcgttcaaannnnnnnnnnnnnnnnnnnnnnnnnnnnntttcggggaaggttatgcttcgctcgtgagtggtgcattgatcctgctagctgaatggctgnnnnnnnnnnnnnnnnnnnaaaagaagattttcatcaagatctgagctgcgcccctatctttggggttattctcaactatttttcttatgctgaaacttcaatccgtacaccatatcgcaat

SEQ ID NO: 80859 - DNA, 239 bp, Arabidopsis thaliana landsberg
aggggggaaggtaaccggaaagactccctgttaacagactgggtaaggagcacgggctgacttacaactttatttgacagcgaacgccgacacttgacgaaacgtaatgtctgccctcttgttgcaaggtctcggatatgacaactcttatcccgagaatacaccctaaacatgattaaatttaccttcatgcacatccttattttgcgcctctccatgctcagatcaacccccaccga

SEQ ID NO: 80860 - DNA, 552 bp, Arabidopsis thaliana landsberg
atccacctctctgtcttctctcccacatagtcactaaaactttaaataccaaacagacttgaatcttttgataaaacaaatgtgtaacagtaaagtccaaattgcatctttatcgacatatgatacgacaccaaatatggttacattgttttatatggaaagagtagacggggaaaattagcagtcctcgtttttttttgtctttttttttttttaatgattaggaagttttgggtcataagcccgtacatcctcgtaggagaaggtagtagtctcctttgaagagtagacatgcatcttaatacaaatcgagctagtgaactacaaaatctttgtatttttggtaaccaaaagatttaactattaggctacttcgtcgttggatagaaactttgatcatgatctcatattcacatgcataggtcacgttaaccaaaacgggtcgaagttttttaacacaagtcacttgtctttatttcagcattgataaagtaatttaaataaagagttgtcaacaagaaactgtacttgtataacaatcacaaaaggagt

SEQ ID NO: 80861 - DNA, 343 bp, Arabidopsis thaliana landsberg
ttaaaactttttttaagaagcattaaattgggaccgtgtattacgcatattgtgaagtaaaaacagatgcaactgctttttaagatatcttcaggtgctttactttactattatcttacctctataaaaatataatctatcttaatctggactcatattggcaatcacacagaatgcccagacctgaatattgggcaaagaggagtgacacagtctttcactttacactttatagtttgatcaacttaaaatcatgtcactatgagtaaatcgtgggcccactctacttgtaatggatgaaaatcaaggttggacagtactacttcaatgtgcggcctcaaca

SEQ ID NO: 80862 - DNA, 493 bp, Arabidopsis thaliana landsberg
tgatcaactatcgtagagaatataatttattttgcagccattcccttgtgcacatttgtaacgcggatcacgtgatttttagcagaatatgtggcggttgcaatagcgatattggatcggggaactatctaggatgcatgggcacattctttcatcctgaatgcttccgttgccattcttgtggttatgctatcactgagcatgaggtatacatatatgcacacatatatatatatataataatcaatatactcttaatttgtgttaatgtccttctgaagtgactaagggtgtgtgttttgtcttctctcttgattcaagttctctctgtcaggaaccaaaccctatcataagcttttgtttcaaagagcttactcatcccaaatgcgaagtttgtcaccattttgtaagcaacgctacaatcaccttgaaaatttttttaaacatcatatatttctatattagttccaattccatattctctcctcagata

SEQ ID NO: 80863 - DNA, 443 bp, Arabidopsis thaliana landsberg
  unsure (1)..(443): unsure at all n locations
tctgnnnnnnnnnnnnnnnnnnnnnnnnnnnnnnnnngattttcgttttttncagacgccacaacatgacggggagggggggccctttttgaccagaacaccccgatagacatagaacgtttctattgatgagtccccatcgnnnnnnnnnnnnnnnnnnnnnnnnnnnnnnnnnnnnnnnnnnnnnnnnnnnnnnnnnnnnnnnnnnnnnnnnnnnnnnnnnnnnnnnnnnnnnnnnnnnnnnnnnnnnnnnnnnnnnnnnnnnnnnnnnnnnnnnnnnnnnnnnnnnnnnnnnnnnnnnnnnnnnnnnnnnnnnnnnnnnnnnnnnnnnnnnnnnnnnnnnnnnnnnnnnnnnnnnnnnnnnnnnnnnnnnnnnnnnnnnnnnnnnnnnnnnnncgcccgatttgattgggatataaaggaaaaccagtattgaaaaaaaa

SEQ ID NO: 80864 - DNA, 567 bp, Arabidopsis thaliana landsberg
  unsure (1)..(567): unsure at all n locations
ctggggggtaccaagattaaattactcttgaatgtagaaggcatgaaagtggcatgtttgatggattgtgtttgtcgagcattgtgcggacgcagctgaataacgttaatttatatacattcaactcttgaaagacattgaagctgtatctttggctttgacacactagcagctctcgatggagttatgcgtgatctagttagttactatatctcattctccatccgataaatgtaagttcgtataatactttttcggaagcttctaatgcataaaggagctgtatttggacaaatactttgagaaatgtaagaagcgtacaatgtgatgagaaagaatgatacaaagtgattagtgagtactatggagggccttcactcggctactttagcccaatagactagtaatgacatatcagttgatcaaggagcaaaagttaacgaggacactgatattgaacgaaaccacttaagaaaggttgtaatgaaaatctagaaaacccaaactgagttcagactcatcaatctatagattacatngaccattcagcaacattgacaacttcta

SEQ ID NO: 80865 - DNA, 471 bp, Arabidopsis thaliana landsberg
  unsure (1)..(471): unsure at all n locations
acgtggcataaccagctggaccacaagtgttattttttttgtctttcttgaccatgtgcctgcgtggggtnggctttcnnnnnnnnnnnnnnnnnnnnnnnnnnnnnnnnnnnnnnnnnnnnnnnnnnnnnnnnnnnnnnnnnnnnnnnnnnnnnagtcatcatcagcgtattcattcacacgacgagggagggcagcgtttatgttctgtaattcttactttcacttgatcctttttatctctccgcgtcgttaattgtgaaagtggagagctttacataattccccaaaggaaaaagcttcgaattttaattctcataacaaacttcacaacagggcagcctctaatttggggaattctagaaaaccctagtggaaaattttaccacattgattcttttaagaatacaagatgacacgtttcgttcttctgcttggtgctgtaaacattctaagattagatttaacctt

SEQ ID NO: 80866 - DNA, 640 bp, Arabidopsis thaliana landsberg
  unsure (1)..(640): unsure at all n locations
atacataatatatctatatttagttttggaagagtcagccttttattttaaaaatctaaaaatttgtcttttagtcatccttttataggaagaaaatactaaatttctttattcaaataaatactataacaaaatattaatattttaatgtataatttggtaatatatttaaaattcagacacattgacattataattaggcaatttggtaccatgttaatgaaatattaatgttgattaactatttaggctaaaattcaattaatatttggtaaaaatacttattaataattgtattacataatcttgtaatatatttatgatcactaatgtctattaactaattatagtaacttatttatcaaaagatattaaaattaatatttagatatattacttaaataataatatttttctttttaaaattgatcatatcaatgatacatatgtagaaaaaatagtgtactttacaagtaacttatatgacatgtgtaaaaaagtaagaaaattgataacttagctaaaattggtcatatacattgatcaagttgccatatatattccaaagggcgcgaaacagtttctcatagttaaccagaaatttcacttaaacatatgctaagtattntttacaagtaac

SEQ ID NO: 80867 - DNA, 439 bp, Arabidopsis thaliana landsberg
catttcacgaatatttgttaacacaattgtttttttttttggttgagttagaatcagacctgcattcatcggtttgtttttgtctgtagttttgttttttatttctctattgagcgcttaattagttttgttgccgttaattattttagcagaaattaacgttttttggttttctgttctctgcatctattggagagagtagatggagaggagtgagtgatttggtgctccaattataccaagcgcaacgaagtagaagcaataatgattcttccggcggactcttacattggtactgaaagaataggctggcttttccttgaacttaattcttttggacagtaattcagacttgcatatgtttttaatttgtcgaatttggaacttctatgtctgaggaatctgttgccttgcgctttttttaaaccatttggtaatg

SEQ ID NO: 80868 - DNA, 254 bp, Arabidopsis thaliana landsberg
gagaagaaagggagagagaggaaggaagaaaaggaaagggaaaggggaaaagaaaaaaaaaagatggaggggggggggagggggaaaaagggaaaggggaaggggaaaggagggaagagggaaaaaaatgaggggaaagggggagacgggaacagaaggaataaaaaaagggggagcaaagaggaggaggaaggggaaaaaaggagagggagaagaggaaggagaaagaaagggaaggaagaaagggaagggag

SEQ ID NO: 80869 - DNA, 551 bp, Arabidopsis thaliana landsberg
  unsure (1)..(551): unsure at all n locations
agcttttttggtgttatttttgtttaggttttgatcatgattaagattatttgatattatctttgggtttgtctttgatattaaacatagagaaagatgaaaatttcttctcatcttagttgttgacttgttctgtgagagaagttgaagcgtcttctaattgtttaattggtgaagagtcgtagtcatgaaagccatattttacctttgagcttttgactctttggctttcgaagatttaagtaaagtttatgtttctgttggcctnnnnnnnnnnnnnnnnnnngacttataatataaaatttatattgagactgcaaaagaaaaaaataagactttaactagatttcttagatctgaaaaaaaaatgttttcttaagatcacacattagtggtgacacaaacatgctgtatatagtacatagcatgtaacagacacgaaactagaatatgattaanaaaatttccctttgaacccgtgagttatatttgttcttacaaacaatattgagattatttttaagtcttacatggcctatatagtgttcata

SEQ ID NO: 80870 - DNA, 449 bp, Arabidopsis thaliana landsberg
  unsure (1)..(449): unsure at all n locations
gacgccgggcatgggcgccggccagcaaaagatgtttcgctttatgccggtggcctacgccgtgctgttggggttggggccggccggtttgtnnnnnnnnnnnnnnnnnnncaccatttgtcgcttgttgacgcagtggtgggtgtatcgcgaggttgatcgcgaaaccgcccgccgcgaggcggcgaaagccaaatcctgacgcaaagggccgggcttttgtccggccctttggcatgcccatgacggatacgaccaccgacaccattgccgtcatcgccaccgcccggggtgcggccggtgtcggcgtggtgcgcgtgtccgggccgctggcaccggccatcgcggtgaccttgctgggccgtgaaccgacaccgcgtgacgcgcattttgcaacctggcgcgacgcggcctgcgacgtcatcgaccgtggcctgctgctgtatttt

SEQ ID NO: 80871 - DNA, 412 bp, Arabidopsis thaliana landsberg
taatgaatttcatttctccggttttgtaagttgagtgatttcgttttgaagaaactcttaatatgataggaaatcaaaattcacagaggtttcattcagttgggttttctctgaatttcatcaatgtacttctttcttacatttactttagttgatcaaataaatatccagtctttgacaatagctgattttcagattcgataaaagacttcaaatttcgtgtgttttgattcttctcttgttatggacgtagctgatttagggggggggggggggggccatatacaaagacttccgtgaccgtcctcgaggatttggaggaccattacgactattggtctatgtaaaccaataaacgccgatgaatgctcgacctgtggtagaaaacatcgacccggtacgtgacttcatc

SEQ ID NO: 80872 - DNA, 609 bp, Arabidopsis thaliana landsberg
  unsure (1)..(609): unsure at all n locations
aacctaacctctcacacaaatgtgacagtgatgcaaagctatctttgtataagttaatttctattacatcatttatgcttttatacacaaaaatgcgtatttaatgacttttgttatatgcttactcataagtatgagttggaaagaatgtgatgcaaacaacggaccgatgttgtatccttgtatgcatagtacgttgagctagagctacaaagagagataagcttcttaattgggagaatttaacctaatacatttatgttttgctcactaatttaatcaaatcaggaggagattactgcacaaatctaggtttaaagatgagtgattacgcaatacccttttgtgtttagtgtttgatttttgttgatgtttctatttaaattcattaattaggaaagctaagttgcgaagtcaatactaactattcctatcatgcatcacctgaaagggaagttgtgtttaaactaataccttcattgatgtaatacaattttaataactaattntgtatgtngcaatcaaattttgtaggtggcaatttaatattcttgctaaagaaactaattttctaggttgcaaccaaaacacaccaacctaaaacattga

SEQ ID NO: 80873 - DNA, 567 bp, Arabidopsis thaliana landsberg
tacagtttatggctcaagatatataactttctacataaaacaaaaatcgattcttttgtttgttccagcatgttttttttttttttggacaaaggtttcagcatgtaacgttgttagtatagtaacgttacatatgttgctctaaacatgacacgtaacacttgaaccctgcaaacccttaacaactaataaattgattgttttcagttatcatgtatagtcaatgttaatcttataattgcgtacgtacgtggtcctgaaagagactaagcacccttcatgtccctttatccaatttcggtttaagtctaaatgaatggctggttaatgattaaagcttaactttattaaaatagaattatactagtctgagatgtactagctagtgtggttgtattttcatgttaatcgacgttattaattagtcgattacgtactacttaaacttttttcttcattttaccatcagtcttatcacatcttttcattgacggctgagcttatatatattcagttgggttcagagaactcgattgcaagaaaactagaaacttgggggaaatgata

SEQ ID NO: 80874 - DNA, 514 bp, Arabidopsis thaliana landsberg
  unsure (1)..(514): unsure at all n locations
cagtatgcgctgaatattgaagacggcctgtatgatcttcgttacagtaatatcgttatttttactttatgccgatgtacatggcatgcatatacgcctgctgatgatgaccttttgccttcagttctttcccgacctggtgaagaaaggacatgtgcatattcttgaaacgcctttgttccgtgtacgcaacaagcaggaaacgatctattgttatgatgaagtggagaaacaggtagccatccgtaaactgggaggtaaaccccagatcactgaggattaaaggccttggtgaaatatcgtccgaagaattcagccgctttattggccgcgatatgcgcctgtagtccgtgatcctggaacannnnnnnnnnnnnnnnnnacttgcttgaatactatttgggcaagaacacgatggaccgacaggaggttatcattaataacctgaaagtagaactggacatacaagaagccattaataatttacagaccatgttgtatattcgtttttgaa

SEQ ID NO: 80875 - DNA, 489 bp, Arabidopsis thaliana landsberg
gcgggaccaccgacacgttgctgacggacacggtcatcatttagatttcgccgatggcggtcagcgccaggggggtgggcagcacaaagcgcgggtggaacccggacagtgccctctggatcaccgggtacaggaccaccgacatgccgttgagcgcgacgaatgcgaggttggtctccagtgcgctgaagccctgtaccgtctacagtcggatgctggcggcgtagccggtgccgatgtaggctaacattctgagcaggttggctatcgccgcggcggctaacgggcggtggccgtagagccgcaactgcagcagaggcgcctggctccgcagttcgacgacgacgaacaaggcgaggaacacgacggtcacgatgaagccgtccaccacgaggccgctgccccagccgctggtcggtccctggacgacggcgaccagcagaccgagcagcgccaccgcgatcgtgacctggccggtcggatcgagcg

SEQ ID NO: 80876 - DNA, 474 bp, Arabidopsis thaliana landsberg
gcgtcgccgccattcagttcaagcgtgagttgacggcgtgatttgtttttattgggagtgaagggtaatttctgggcctgcggttttcctgtttcgctatcgagcaggacgacttttttcagcgtcctcaagaagttcagcgtgatttcctgactgcagtccgcagccgtgccatttgttgaggtgagcgcgttcaataccatcatgtaaatctggttagtacgatgtgggcggtcgaaggcttcgtccaggggcttgaaccaagagatgataacctctccgggaaggccgtcgttctttgtgcctattgtcactacgctccaaccacggaggtagggatcgtttttatcggcttcccaccagctttcggaattcgcttgtccgggatggttttgaaacccgatcggcgcggctgtcgcgttggtggtaccgggcttgctctttcatgatcaacatgcctggtggtaatccctt

SEQ ID NO: 80877 - DNA, 491 bp, Arabidopsis thaliana landsberg
gtgatgcgacaatttcagacacaggtgtcataacgtttggatatcggtgcagtcgcgaatgcggaacttcaagacagcagcataaatctgaactacgggacaaatctaagcggtgatgcaagtgttgctctaggcggaacgctaaatgtaaactttagcgcaacaccaacctttacctccgttactgcaggtacgtttacgggcagtggagcagttacgctttcgagtggaggtgcgggcgcattaacgcttgattcagcatcaaatactcttgtgttagccgatagtacattgcaatacaccggtgcagggctatcgcttgatgtgagcaatgccggattatcaacgtttaatatcgtaaacacgaatggcagtaatcttgctaatttggatgtagagggtgcgattttttgcaggtagtggaaatgcatttcaggttgactctgacggtgatataacttcagtattcagtcaactagatggcacatcta

SEQ ID NO: 80878 - DNA, 471 bp, Arabidopsis thaliana landsberg
gaaaacgcatgtagttttcaaactttaaatccaccgagattttctttattagttcttcaaaacgacacgcatggtcccacgcattacaaaaaccaaaccccattatgcaaaagctctcttcttttgcccaaactctcgctttcccttttttacacacaacaaaaaacaaaagttctgttattttcctatttaatccataaccattacacatttccaattttcctttcattgatcacataactcatgccaaatctacctcatcttcctcctccaccgcagttgcaaccgcccgaaacgccatcatgggaaacaccatcgtctgtatggtatactccaagaaccacaccatggagaacaccacagagcacacaatccacaccagttggccaaatggtcttaacaaagccagcaacggttagattcaacggtcttgatgcagagccgaggaaagatagggtgattctccgtcag

SEQ ID NO: 80879 - DNA, 448 bp, Arabidopsis thaliana landsberg
aggagtttatgttgtttgacaaaaaaaataaaaaaaattgttttctttctataaatttcatgctttgtatttggttaagttttgagctattattgcattagtatccaatcgagctattattggattgttcttatcactttgttaatttcatttggtcctttagttagatatcaaatcttttaaacttttcaaaaaagatcgcaggtttaatcggtgactttcaataatactagctttaacacgacaagcaaaatattgtgtatgtatactattaaattgtcaatgtcagtactatgaaataacaaatccatcaccattgtaaaacttaatgtttcaacatttgctaagagagaaatggtcaacccttttgacaagacaagctacattgccatggacaaggaacacatcattatgatataacccttcacactatttttataaaaacaat

SEQ ID NO: 80880 - DNA, 546 bp, Arabidopsis thaliana landsberg
  unsure (1)..(546): unsure at all n locations
ccttcgagaaacgatcaatcaataacgtttaattttcaaaagctatattttctgatttttggttgatcataattgggatgagaaagttgcttaggaaaaatattactttgatgcttcattataagcctaaaatattcatttttgcttatactaattaattaattgaacacagaaataattgaattcataaattcgaacccgaggttattcatgattattaattagatttgcacctaattaaggatgtcatgtagctctcaaaattcagaatgtgggtttcactcaactgtattacaatatataatttgaatatctatagcctaagacttaaaactgaactatataagttagcgaagttacgacactatgacatcagacttgtgacctaataagttggggatttagttccaatgtcattttcatctcgcagcccctaaacttggaagataaaaaacgtatataaaagagttggagtntagatatttacctcagattcgctatccaattcaagtttcttcatgaggtacttaattaacaatctaacag

SEQ ID NO: 80881 - DNA, 534 bp, Arabidopsis thaliana landsberg
  unsure (1)..(534): unsure at all n locations
gaccaccacngaaccagaaaggaacctctggaaaaaacagcacggcgaaccaagggaggaaggagagaaacaaancnaggcgcgcgccagaacggaacaatnctaaaaaagaagacgaaaaaaaaaaaagaacccccaaccagggccaagcgaacaaacacaaacggatggaaaaaaaaaccaagcacccccactccaggaaaaaaaaagaaacgagcccccaccgcgaacccgaaaaaccaccccaaccaaccaaacaggaaaaacagaccagcgcccaacacgggaaagggaaggcaccccccccccgcgagccacaatcaacacccccacgaagcccaaacaacgccccaaccagcccacccggaccaggggggagcgtgcaaaaaaagcagcacactgacaaaaaacacacacacccccaaaaccaaaagagcgaacagggaaaaaaaacaaaggcaacccaacaaccccgtgccggcgagccacaacacaacgaacagaaacccaccaaagacagagaaaccgggaagc

SEQ ID NO: 80882 - DNA, 362 bp, Arabidopsis thaliana landsberg
ggggagagacaatggggcaagactacgctcacgcgcagcctttttccgaataaggtttatgttcctttagaaaatggggatcatttcaggggggcggaagaatatcccctctgcattttgccacaatttcctgccggggccatattgcatgaaacgcatataacgcccgatatatattcttatttgcaacaggagctggatgaatcaacccaaacctagcaattgatactaacaggctccaacaactttttattacagcaaaaacacgcgcaaagccttagccggagactggcttactatcatctcttgccgggttccttgacgaacttcagacatgcaatctatcgcctgaaacattaaat

SEQ ID NO: 80883 - DNA, 450 bp, Arabidopsis thaliana landsberg
  unsure (1)..(450): unsure at all n locations
tacgaagcgcggcgcgctttcnnnnnnnnnnnnnnnnnnnnnnnnnnnnnnnnccttggatctgggccgctccgaaggcgttctcggctcgacccgtcatgccgatgctctctatgtggcactcgatccggccgtgcctggatccgtggtcacgctgcgcacgcgggcgagcgaggaagccgaccaccgccgatccgagacgccgcctgtcgctctggtcgacagtcgctggcagctttcgggcttatcgcgtagcgactgcggctttgagatggcggcgcagggatacggccggggcgccatgacctggcaagcaccgccacggagaacataccgcgtagacgcatcgcgtaacggttcggttctctatgaggtcacgcaagccgccgacgagggcggcatacttcgagtcaatgttgctgcatcggcgatccaacctctgcggattcc

SEQ ID NO: 80884 - DNA, 440 bp, Arabidopsis thaliana landsberg
gggcctttatctgatttgcttaagtcgttaaatgctttttgttattacttttggttttcgtttatacttatctgtgttacatcgttctgtggcaagttgtcaatgtgaatatatatgtcaaatcataactggtacaaagcacgtaatacatgacaagattagaactacatgtaggatggatgacctatgtagtttcctatcttgtatgcagatgcagacatttgcgggtaagtaaggtaaaatgaggcggttgatgcttttatactcaaaagaacaatcagttgtttttatgaagaagaaaacaagatcatgaacgtcgtcacagttgggagatacttgacgtgtatcacacgttgtcagatacttagcagaaagatgaatgtgatagcgatccaaccaaaaaaacattttgatcttcataccaataattaactttccgg

SEQ ID NO: 80885 - DNA, 564 bp, Arabidopsis thaliana landsberg
ctaagaaggagaccagacgcatgacgagtgtgagtgtcgagcgggagggtgccgtcgcctctttcatcttgtccagcccggccctgaacctggccctgaaggaggggctgctcgcgtccctgcgggccgtcgccgccgacgaccaggtgcgtgccgtgatcctgaccgggacccggccgggccttctgcgtcggccaggacctggccgagcacgccaccgcgcttgaccaagacccggcgacggcgctcgacacggtgcgggagcactacaacccgatcgtcaccgccctcatgaccatgcctaagccggtcgtggccgccgtcaacgggacctgcgtcggggccggcctcagcctggcgctcgcgtgcgacttcgtcgtcatggccgagggcacggtgctcggaacaacgttcaccggcatcgggctgagctgcgactccgggctttccttgacgctcccggcggccgtcggcctcgagcgggcccggatcctgctgctggtgccgactaccttcagggccgagaaggccgtctatggggaactgcgttcgacctggtgcccg

SEQ ID NO: 80886 - DNA, 467 bp, Arabidopsis thaliana landsberg
  unsure (1)..(467): unsure at all n locations
ttggaatggatgcccgacattgttgtccgcttcgccagcagccactttattcccctttattcaacgataagaagaattggggtgaagggtggggaagcttccccttgaaaaannnnnnnnnnnnnnnnnnnnnnnnnnnnnnnnngaagcgcgcatgtccgccggtcccgccgccgacgtctatgtgaagctcgcctccgaatattccgaactgcagcccgtggtcggcaagatccgcgcctatcagaaggccgtggccgagtttgccgatctggaagcgatgctggaagacaagtccgtcgatcgcgagatgcgcgatctcgccgagcttgaatatcccgacgtcaaggagcgcatcnnnnnnnnnnnnnnnnnnnnnnnnnnnnnnctcttgccgaaggatgcggcggacgagaagagcgccatcctggaaatccgcgccggaacgggtggatccgaagcagcgc

SEQ ID NO: 80887 - DNA, 608 bp, Arabidopsis thaliana landsberg
aagcctttttttgtagtagccaacaaaagtatattcaggaaatatttcgttttcatttatgtcaacttaattcatatctgaaattgggtatgaaaatatgtacttgggtcaacatttcatttctcggaattacttagatatatatttttttcacttgtttcttgtgaaataacattcatggtcgctttatatattgtctatacccaaatgcagtttaagcaaagataatagggaacaaggattattgaaattgaaacgcatatatatgtaatatttaatgtaaacacttaaagaatggaatcaagcaacaaacatgttaaatcaaatttggttatactttccgaaagaatgatgcaagaaaatttgattagctgggagcttcaaatcggatgtaatcatacatgaggccctggaaaggacttgtggaccttggctgtgtgagaaacaatgtattctcgccttctacaagcttagagccagccacttgcacattgaataaccagtacaatccatgtattccatgtctcgctatcgagttgtctctccctatcaatccgctcgtgaacaccggcttgcttttgcatcgttcacacgtatcttcacccccc

SEQ ID NO: 80888 - DNA, 565 bp, Arabidopsis thaliana landsberg
  unsure (1)..(565): unsure at all n locations
ggtattgtccgaatcggtggcgccaacaccaaagagattgaacaatgaagtatcgcgcattgaagaagtgatgataacgccaccagaacttacgtaattctgcacctgtatccgttgggaggaggtgagtgccgtatcggtaatgcgcgagccggtaatgaccacaggatattgtaaagccgtgtcgatagaagaggtggtgtcgaaaggaatgcctgtcaggcgcattaaattgagggtggcctggtagcgggagttattggcttccaggttataagtattcatgttgaggaccaccacctggcgggtctgtgcattggtataggctgctggaaaaaccaggagcaacagcaacaaataaaggcggtaaggtttaatcaaggcaaacaaatatataccttttttgatcggtgtaaggcgattctgaggcttgagcgcccgcgatacgtcagcagatataaacagaatttttctgttttatttcttcgccttggaagttgttttcgaagaagatacgcttttaaattcttctcatacagctcaatccatntcttgggcgttattt

SEQ ID NO: 80889 - DNA, 513 bp, Arabidopsis thaliana landsberg
tgaccgactgtacagggagatgagcgcggccttggccgcaccgtaggcggccaggccgggctcggctgccaccccggtgagcgaggcgatggccacgatccgcgcgccgcgcgccgggtggctcgccgcggcctggcgcaggctgggcaggcagtcctggaccaggatgaacggggcgcgcaggttgaccccgacctgacggtcgaagcggtggaggggatagccggcgatagggccgctggtaccggatcccgcgcacagcaccagcaggtccagggagccgaaccgctccgcgtggcggtgcgcgaggcgatggacgtcctgttcggcagtcatgtccgcgggcacgacgtccgtggcggccgcggtccccgccagggcccgcgccacctcatcgagccggtccgcccgccgcgcgctgagcgtcagcgcgtagcccgcggcggccagtcgcccggcgatcgcccggacgatgccgcgggacgcgccggtcaccaacgcgctggggggctg

SEQ ID NO: 80890 - DNA, 482 bp, Arabidopsis thaliana landsberg
  unsure (1)..(482): unsure at all n locations
acagggctggagtgtggcgtctggatttttattctcgtgctcttttcttgtcgtatcctgggggggccatgccaaggggcttggtggttcgcatcgcagtctgaggttctatgtccgtctggacaaacttcacctgtttgttagctgcatttagctgtttcctaccttcagggagtttcttgggctggtnnnnnnnnnnnnnnnnnnnnnnnnnnnnnnnnnnnnnnnnnnnnnnnttgtgtcccttcttgtggcagtagtagcattcgatgttcttagttccttgctggatggctccaagttccattggtccggcgtgtgttccataggaggcagtgccttgtcgtgggttctggttccttctattgcccccttgtagtcggcgttggttccgaaaataggggttgaagtctgctccccttggccttcgtctttcttaggccttttccttgcgtttttcgactgcctctcgtcgatcttga

SEQ ID NO: 80891 - DNA, 294 bp, Arabidopsis thaliana landsberg
gggcagacagccgacaagaggcatcgcgaccccaagatttttataaccagccccaccaggagagcaacgcagcgaggaatcatgaccaacacgaaccgaccaggaaaggggagaaggggcccgcacaggcgggggaacgaagacaccgacaccggcacaggcggaagccggcccacaacacgaggagacgacgcaggagccagcagacgagcaggcaggacgagaagaggcccccccacagcaccctcagcggaaactccaaaccgacagaaatccaccccaccacgcaccaca

SEQ ID NO: 80892 - DNA, 401 bp, Arabidopsis thaliana landsberg
ggatttccgcgttatgaacttttcggtttgccaggagttaatcatctggtttacccaggcttttgtctgcgtgcgaatgtttttagatcttactgggaaggaggtcgttgggcagtgcatcatgtcgggtaaagaggtcaagcgacgaatcaagggagagacggaggttttgcaagtcctcgaaaatgaggaagaccgggtcaaagccctcgcaaagtactttgatatgcacttccgagcgagcgaggttgagggtattcgaggcttgatctcccaactcaaatagatgtctgcgtcggagatttaccgggaggaaagagaagaatgaagctcaatggtatggtacatcggagtttctagagagatattgcggcagaaggtatgtatagtggtcaaggaac

SEQ ID NO: 80893 - DNA, 435 bp, Arabidopsis thaliana landsberg
cgcacgacgacctgctgcgtcccgccgtcttccgtcatctttaatacgtgcaccgtccgcgcgaggtcgaagggcatgacttcgtggccgcggccgtgcacgtgctcctgcacgctctgggccgccgcgatggaggaaagcgcgagcagcgccgctgcggcgagcatgcggacgctgctggccggattcggggagaggcgggaattcatcctccgagcataggaagcccggcccgtttgcgacatgattgcgatcatgtcgtcgatcacccagcgcctgctcgcactggccgacggggaagtgaagctcggccccggcgagtcgctcttcgcggccggccagccggtccgcaatctctacgtggtgctggaaggctccgtccggctggttcgccaccaggcgagcggcgctgctgtggtgctccagcgcgcgcac

SEQ ID NO: 80894 - DNA, 463 bp, Arabidopsis thaliana landsberg
aagaaatggcaaattttttattttattaagagattacttcatatttctgatttaccaaactataaatttgaaatcgttcttcttgctaatgttaaacaagaattacaacccaagttaagtagaattacaggaggttaccctgttgacatttataactttgaaagggtctattctgagcttgttttccctttaatttcgggctctttttataatgtcaaacagcttaaaataacaataaacgttgacagaaatagcgcaggacacagaatacagtattatccaattacaagatatgcagagtgtactgttaatgccctatttgtaccgacaattgagattgcaagaatactcttcaagtacaagaattcaatactgaaatttaacccaagaagttatctagatttagtgacaggcagtgtatatgacagaataggcaagtcaatttcagaattaaatacaaatg

SEQ ID NO: 80895 - DNA, 535 bp, Arabidopsis thaliana landsberg
  unsure (1)..(535): unsure at all n locations
tgcaattcatctgtattcaattttgatcatatagtttattgtcatatggtgtataatgcaaattcttgtggttttcattggattcccatattagttatgttgtgtgtcaaatataactaagacacctttattagatgatgagacggcgacccatgatatgcacaacagtatgggggatgatatatgtaaagagtatatttaacaacttcgcagaagaacaagtaaatggctagaagctagcctagaaggtatattaattaaccatatagaggaatcatatctatacaaatatatctatggggataacataagaaattactaagatatatgtgaactaatattcggnnnnnnnnnnnnnnnnnacttatacccacgttcataattacaactcccatcaatcgttntaaaatacaatgatccttacaaatctctatctgcacacagataaaataatatataagattgagtcnnnnnnnnnnnnnnnnnnnnnnnnnnnnaattgcaattctcatgcgaggtagaaacaaatacatga

SEQ ID NO: 80896 - DNA, 539 bp, Arabidopsis thaliana landsberg
cttatgaggaactatatcaagactcttcaaaagcataatcttttccgttaacctcctccttcaagaaagagatgattgtgatgatcaatgttagtatttaacattgttcacaatgtttgatagattctctttttgcagagaaaccttgaatcttcttgtcttgcttcatagttacggttgttgctttttgctgttgtggttgtctttattactattgttgatgatgttagtgttgattgatctataagttgtctttagagaacaacatatttgtgtttccggtgtaccgcccgtttatcaatatctctattcgacggatttccgatttgggcccagccttgttttgtaaccgtgtatatcgagaggcccaatgtccatttgggttgattaataaaaggaaaaatacttgtgtatcatcatcaatattagttcgttttaactcttgcgaacccaaatgtgatcaacatacaggtttataaatctttgattgtacaattgccatttcaaaattttttgtgaagtgattcaaaagatatgta

SEQ ID NO: 80897 - DNA, 239 bp, Arabidopsis thaliana landsberg
  unsure (1)..(239): unsure at all n locations
gtgcgcggccaacgtatccngggccgggggggcatttaaactggaattgccacaatacccccacaaagtaccggtggagatgctcggagaaagcgccttcccgccaatcggtcaactgccgttcctgctgaccttgccaccctacacctactactggatcctgctggccatccacgaccgtatgcccaactgacacatccaggccaccgaagggttacccgaaatgaccacactggtat

SEQ ID NO: 80898 - DNA, 507 bp, Arabidopsis thaliana landsberg
  unsure (1)..(507): unsure at all n locations
cgccctttacatataatggcgcattggctggtatatctttgatctgcaagccattcaattcaattttaaccgtcctggcatcggggaagggggagtgggtagcaagggaaacctcataggaaagtgccgatagtacggttttccaattgaagaaatcgcccctggaaaatgcatcgttggcgaccaattgcggagccgccggtgctgagtcgatcttgttgctgagcgcgttttcggcaaaattcttcatcaatgcctggcacagcggatggaatgtaggcattgaattacaataactcatgatcgtcccttccttctttgccagcgatcccagcgcctagtcgtaacagttcccctcaatacctgcgcagaaatcgatcggnnnnnnnnnnnnnnnnnnnnnnnnnnnnnnnnnnngagccgaaattgtggccgatttcgtgcatgatcatttgcggtatacctaatacggacacattatacatgccaccgagataagccacgcct

SEQ ID NO: 80899 - DNA, 578 bp, Arabidopsis thaliana landsberg
agcaagagctgagaaaatggaggtcggattatgggaagaggagaacagacgaaggcagagagcctgagaaaagtccgacgaggtcaagcaccgaggggagaaacaaggagaatggattcgggcagtcgaaatcgtttgcatttggtgaacaaggaagcagcagcaacaacactggaggaagtactactactaataataataatctgactcctgaaacaaagaagaagaagaagaagaagctttctttgtttccaaaagttttcatgttcttgtcaagaaagaagtctcacagtcacaagtgaataatgtttcatacctttttcttttttcttcaaaacatttggtttggtttttcttttcttacaccaacaaacaatgcagactccttaagtttggacaattattttacaatgtatgattatgttaatttcactcataggaaataaaggtaatgaattgatacacacttgcaacagtaagatgttcaagagaagatcatattattaaacccataccatatttttgttcaagataaagagaatcaagttctttgagagacttattctgactagtgacta

SEQ ID NO: 80900 - DNA, 187 bp, Arabidopsis thaliana landsberg
aatctaattcaaattatggacatttatgttacaatggaaaatagtatatatttgtcatagtgagtttggtaaggaggtggggaggggtattcaaatgaccaaattaagtatattcaaatcaagataaagataaattcgttagaatttctaaagaaaaaagtagaacatgctagtatgataatctttt

SEQ ID NO: 80901 - DNA, 100 bp, Arabidopsis thaliana landsberg
gcatagctcatcacaattgcaggagtcgaactctaatatctgtaatataccttataataataatatgttggtccgagttggactagtgtaaaaaacgaca

SEQ ID NO: 80902 - DNA, 488 bp, Arabidopsis thaliana landsberg
acatacttcatttatatattgttgtgttactcaactcttcttctctgttttgcatagttatccaaaacaaagaggtgagactaatcccataaaaaaaatattagtatattgggtccataagctgttaccaagtgtatgattatattctaattacatatgaatatttaagtttttcttttttgaacaaagttgaatattttagtgtttaatcagcatttttttttcgtgtgtgacagtttttgttaaggactttggaaaaacttataattgaggatgacatggctctttcaatcaacgaacctcggttaatttctcattaatccttataattaaatatgttttattttgtttttatgttttaagaaacaaaactctgcttacttattcttttacctctatgacactctttgtacagtctattatgtcatcaacctccaatgattagtgctttctaaaatatatctttttttctctctaattttcttttc

SEQ ID NO: 80903 - DNA, 569 bp, Arabidopsis thaliana landsberg
  unsure (1)..(569): unsure at all n locations
tggnnnnnnnnnnnnnnnnnnnnnnnnnnnnnnncatgtgtgtcggtgtcgggtgcttgcgccggcggcggctaggaactgtcgctcggggccgagcacatcatgctgattgatgaccgccgctcggcggtgtcgctgccggagacgccgctgctcgcggtgctgcccggcaccggcggcctgacgcgcgtcaccgacaagcgcaaggtgcgccgcgaccgcgccgatttcttctgcgccaccgaggagggcctgcgcggcgccaaggcggtggactggaagctggtcgacgaggcggtgccgccgtcgaaatggcaggacgcggtcaaggcgcgcgccgccgaactcgccaagcagtcggatcgtccggcgaatgccaagggcatcacgctgacgccgctcgaccgcaagatcaacgacgcccgcgtgtcctacgcgcatgtcgagatcgagatcgagcgcgacacgtcgatcgccaccatcaccgtcaaggcgccgaatgaagccgcgccttcctcggtcgaagcggtgcacgaaaagggcgctgcgttctggccgctggcgatggc

SEQ ID NO: 80904 - DNA, 586 bp, Arabidopsis thaliana landsberg
ataaaacaaacgcatgagacatcacaattattaagaatataagattatgtagtatagagtctttaagttttgctacaactagctaagaagaaggaccggcccaatatgattctacagcgagaaggatcttctcaggattaaaaggacctctctcatgatccaaaatccgactcttccaccttattccattggttatgctttgtatcttcgtcaacatttccacagtgtctctaaacaccacggttccttctggtctcaaaattctatccatctcaagtagtattaatgtaacatcacacctttcatcaacaacaacaacaacaacaacattaggattcacgctagtgagaacgcaaacacaaatgcaagtgcacaatttctagtacattagaattttaagaacagaaaaaaaaaaagactactcagtctcttttcttttctttttttaaaaaaataaagatagtccatatctaaaagcccaagttttcgaaaatgtacatgttttttttatcatattagttaaatgataatatttgaaaatcatttttcataatataaattaattatatatcccttgaaatgattg

SEQ ID NO: 80905 - DNA, 221 bp, Arabidopsis thaliana landsberg
actaaatccccgcataccgcccaagcgaaagtaactggctccaatcctgatcgatctggaaaactgttaaagggtggactcttgctgaaatgtgaattgaagcgctagcaacagcaaagctacatgaagctacgaaaatcacacgatcgacaacaaaagagttgactatcgcgctatcgcaaagacattgatcacaactgatattcacctaggcaggggag

SEQ ID NO: 80906 - DNA, 541 bp, Arabidopsis thaliana landsberg
  unsure (1)..(541): unsure at all n locations
cttgacccctcttggtatcactcaaacgttgccttactctgtgttcacaaaccgtacctttatttttatgagcnnggcacgnngggggatgtttcttattggcaaaccgtttttcttatccaagcaagtagcgcgccgcaacaaggtgattctttagattggcttcgtcctggtttgagcaacttttctggcgcctatgttgacctttgttacggcaaacaagtgtcggggcttttgagttgggcgagagacaaaggactaccacatcaggacggcctgccgatgttaatcgaacaagcgcggaaggcgcatgagctttggtggggccaatcgcttgactatcaaactattgcaacacagctaggtatatgagcgcggatattttcgctgacattgctgcggctttggccaagcacaacctgctctatcttggatcggtagtccccgatcttgaagcnnnnnnnnnnnnnnnnnnnnnnnnnnnnnnnnagggacgnnnnnnnnnnnnnnnnnnnnnnnngcagcatgatgccgcgcgagc

SEQ ID NO: 80907 - DNA, 514 bp, Arabidopsis thaliana landsberg
  unsure (1)..(514): unsure at all n locations
agggattgcttctccgctagccagcggaacacaatgttgcgttttttttatttcaggtacaaagcttggggcggttaacttttacctttcgcctttcaccttaatacagcaacctgaacttaatagtatgttcaatnnnnnnnnnnnnnnnnnnnnnnngggtatcataacctgcggccacgtcggtaattacataaccaatctgcagattggttnnnnnnnnnnnnnnnnnnnnnnnnnnnttatgccgggcatatacctcattaattttagctaatatgcccggcacgtttttgtggatgtgaataaggcggtgggcattgttaatacggtgtggctgcaagtcggggaagttgcagctcatgtgncgtttcccttcgttcataaaggcaattaccctttttgggataaaatccaggttgtgcggattgttcttcgcatcgtcaaaaataatgatgccgttcttgcaagctgtttcccccacctgtcggctttgcaccttgccaaaacaacc

SEQ ID NO: 80908 - DNA, 565 bp, Arabidopsis thaliana landsberg
  unsure (1)..(565): unsure at all n locations
ctcgttcccagccgctgaggttcaggtgggtctcggcccttacatgatttgggnnccagcaggcggangcccagcgctttcttcggtcgcacccgtcatggcgatcaccaagcgcatgccggctcctactcgggccaggagttgtcgaggatgaggtcgacgaagtcgatcggcacgaattcagggtcgaaatgcccaaggacatcggcattcatcgtgccgaaggtggtgagtggacggtgcttcatcccgtcgttgaacgccgcgaggatctgcttcttgaagttcggacgcggatgggccgtcgtgaccgcggcgatgtcgtcgggggacaggttgtcgcgcccgataccgatcacgtcggtttcgacaccggcggtgaccagggcgatctccgggtccaggaactccggtatccccggcgtggtgtgcaaggcgatggccagccagaccttgtcggcgtcggctttgtcgaggccgcgttccagcaggaattcttgggccgcgttggcgccgtcgacctcgaagcgcacggtcgaggtgcggtagtgccgggtcaggccca

SEQ ID NO: 80909 - DNA, 512 bp, Arabidopsis thaliana landsberg
gccgatggccacaaacatcaggcctgatcggttcacggttctgcgtttcgctgcgttgtatttttgttcactggccagtgaaaacttgtcagcctgccggtgctcttggttgaatgcttgcacaatggtgatgttgttcagcacttcctgagcaatggcgctgctgtcggccagtttgtcttggctggttcttgacaatgaccgaacccgacgggcaagcacaatgaccggcaccagcacgaccaccaccaaaatgagcactgcaccagacagtttggggctggttaagatgagcatcaccaagccacccagcgtggtcaggccgttgcgcagtgcaaatgacatactgctgccaatcagggtttgaatcagcgtggtgtctgcggtcagtctggaaagcacttcgccaactttcaggtttttaaaaaacttcgggcgctgcaccaacaggtgtgaatacacccgtgtgcgcaggtcagttgacaccctgtcgcccaacgtggtcaccaggc

SEQ ID NO: 80910 - DNA, 549 bp, Arabidopsis thaliana landsberg
  unsure (1)..(549): unsure at all n locations
gggagagnngtattagatttgccgttttttttggccgacacgcgtttctnttattatttttangncggcnannaagagcgggacattgtttatgctaaatcacactaatcccctcccgcttactaatattctttgaatcaaccttcattatctattgtttattatgtctattgagagattatatgttggcaaccatgtacgctttttttttgaattattatatcccacaatttctaatgatttagacattattttccagttttgccataaaatattaaattaatccacagataatatttaaaaacttttaaaggttaacattgtcgttttttttttaaagattaacattgtcctttttttttgtaaatataaatgaactatcgcctattagcaacaaaaaagttgagtttggtctgagaatcgtttagaacttttggtttgttggatcgtacatatataggactgcaaaattattactatttgttaattaagtgaggctcttctcttcttatttatttatgagacgtaccaaataagtcataataagtg

SEQ ID NO: 80911 - DNA, 532 bp, Arabidopsis thaliana landsberg
tgcgaccaactgctcgccattcctgactgcaaatgtataatctgtaaagaaatttgtcctgcttccactgcctttctgtgcatagaggattacgtcatctacggtatacgggttgaccttccatttccaccaatcgccgcgttttctgccggaatgatactgtgaatccattttcttgagcataatgccctcgctgttgatcttacgtgatccttttctttgttcggccacatcatcccagccggcaaattcaaccaggggagaaagcaccacaacatttttagtttttagactgtttattgtcttggccagcaaagcccggcgcctttctagtgtttcttctctcatgtcacggcatttatattcgagaagatcgtaagcatagaaaccaatcggtgcatcattgagttgtgatttattgattgtttttctattcaatcgctgctgcaatatgttaaatgcaagtacattaccattttttactgaaagaatctctccatccagtacagtgccatcttcaagctcctcactc

SEQ ID NO: 80912 - DNA, 309 bp, Arabidopsis thaliana landsberg
  unsure (1)..(309): unsure at all n locations
tacaatcaaaccaaagcccacccaacagaaaaaagaactctagggggaagacaaaaccgaggcccagacgcctaaaacaactgtgcaccgaaacgcctagaaatgaataaacaaagaaacannnnnnnnnnnnnnnnnnnnnncaagatacacatctgattaacagaaaaggccgatcatgtaagagaaccgacaatgccaaaactaccaaaatacgcgaagagccaactagacaatagatccctgaccgaatcaaaagtgagagaccaacctaccaatcccgcactaccataaccatggcaaagaaca

SEQ ID NO: 80913 - DNA, 562 bp, Arabidopsis thaliana landsberg
  unsure (1)..(562): unsure at all n locations
atcttttggtttaatatctgattttggattcgttttgctaacattagtgttagataagcaatgacacgggggaggatggtcggcttaaagtgttgaagaaggaatggtttgaaggcaaagactgtcttgacattggctgcaacagcggcatcatgactattcatattggtatcttcttcttatcaatatcataatttgttcctatctatgtccatccattatagtaatagatatgttgttgtagctatacctgtccttatgagaatgctatagtaaagtgtgatnnnnnnnnnnnnnnnnnnnnnnnnnnnnnnnnnnnnnccataattttatatagtcgttagctgatattgtcttgctcttcttcagcaaaaaagtttcgttgccggagcattcttggagttgacattgatacaagtaagactattattggctgtcataatatcttccaacgtttgctttgtgtaggaactgaattatactcttaactacattatcattcaagcctgcactaaatgaactatgttttcttttgaatgaagggcgcattgaagatgctcac

SEQ ID NO: 80914 - DNA, 305 bp, Arabidopsis thaliana landsberg
tgaactattaaaatagattgcaagcgccttatcgatatccacaataattgacccaacaacgcacacaagggcctgtctgtgaggattccttagctacatacatcactccactaccacttcacacccatcgtaatgatcaacggctcgtctccacctgaccttccataccattctcaaaactaatgtcactccatccccacaggggcggataacccgccgctccctatgctatcctaccaaatgctctggttaaataaacatatgaaagcattcattttggagtgagcttactactcacatgcctt

SEQ ID NO: 80915 - DNA, 544 bp, Arabidopsis thaliana landsberg
accggccatgacggccgcgaaatcctcatccggcagaaatccggcgaacaggtcgtgatcgctcagccccagcttcggcaccgcctgcttctgcaaatacgccacccgccccaccggcgcgccggtaaaaaccagctttaatgcggactccggatgcttccggcgataaagggcgaacgccgtcagaagcatggcgtggtttttatgccgccagaaattggcgggataaaagagatattccccctgcttcagccccaggcgattgagcacgcgctccacccggtcggccggcggctgctcgatgcgcttgcccaggcagatgtggctggtcaccacccggccggggtcgggcacatgcttcagcaccgtctggcgcacatattcggagatgcagaccaggcgggcggccacacgggcggtctgctcgaaatgccgctgccggtaatacagctcgcgcggcgggaaaaagagcgggtaagtctgatttgccgatcgtaagcgtggagacgacgggaacgccgggtcgtaaaagtgggggtggtga

SEQ ID NO: 80916 - DNA, 585 bp, Arabidopsis thaliana landsberg
acgccacgttgcagaaagatttagtcggtacgcaaccgacgttggggcactcaccgccaattttaaagttttcggcttcagccacctttttgcctagcttgcgggccatgtgcgctggtacggcaccgcccgatcctgaaccgatcacaatcaggtcaaaatcaaaccgccggggacgcttgtgtttaagtttgtacattaccaaaccaccctatgatgcagatacatatacgctgcatctgagttaattacttgtaaatgtttatgcgctactctgcgaatatcattagctgtaacctcatgttttggtgttaaccaggcttcaacctgggagactattctttcggcagccagctcggcgctgccgggctgttcgcgcacactaagacaagctgcatagatactggcatagagcttgcgttgatcatacgcctcggagtgcccaccacgtttaacaatatgtttcatactagccgaagttaatagttccgttagcgattaagatcagaatccatcccaaggcggccagaagtaatcccataaagaggcgcatcgtacctttgccttcttctttccatttggata

SEQ ID NO: 80917 - DNA, 561 bp, Arabidopsis thaliana landsberg
gattaaattcacattaattaaatttaataattaaaaaaaattggtatcaataatgaacaatcaaagtaaggaaattgctattaaaacatataataaaacccaaaatgttagtaacgactggtatatcggttcaatcaccagaagtcaagcggaaaacatactgacaaacaatgttctcattgacggcctattcttaatccgtgagaacagcttttaaagaatttaaatgaaagtaatgagagcaccggtagttttattcttatcaaagatgattgcctgaaaaagacgtcctaaaccccgatcgaactaatcttctgcatcagtcagtgaccaacggacagaaaaatgtaatcattgatctcataaaagccgaaaacgagtcaaacttagaggccaggtatgagttgggtcggactgaactgcacatagctatgcatttggatgagtctcgaggctatcaaatattgagacaattgattaaatggggttttcatgtatatagtcgagactctgaatctataactgcattacagttgtgcgccgaaactcaataaaccgttt

SEQ ID NO: 80918 - DNA, 583 bp, Arabidopsis thaliana landsberg
  unsure (1)..(583): unsure at all n locations
ctttttgaggcaggaaagccggaaggcgaaaccgacatcgccgaaaatttcggcgttttgcgctcaggtgatgacggtgcgcgggctcatcacggtggaaagatcgccattgatgaaggcgttgcgggtcatgtcggcgacgcgcaccatggcggcgatggtcttgcggtcgaagctgggcaccttggccgccacgatctcttcctcggcgtcgtggctgagatagttcagcgtggtgacgatgctccagcggtccatctggccctggttgatctgctgggtgccatggtacagccccgtcgtatcgccaagaccgatcgtgttggtggtcgagaagaggcggaaggccggatgcgggcggatcaccttgttctggtccagcagggtcaggcggccgctggcttccagtacgcgctggatcacgaacatcacgtcggggcggccggcgtcgtattcgtcgaacaccagcgccaccggattctgcagcgcccagggcagcaggccttcgcggaattcggtcacctgcttgccgtcgcgcagcacgatgnnnnnnnnnnnnnnnnnnnnnnnnnnnnnnnnatgg

SEQ ID NO: 80919 - DNA, 521 bp, Arabidopsis thaliana landsberg
  unsure (1)..(521): unsure at all n locations
acagctcgacggcgtactcggcgaacgggcggatgtcggccgcggtccagttcgtttcgggcgggtacagcccggagaccttggcgcagaccagggggttggcggcggcggcgcgcaggagcgagcgccacggcttccagtcgccggcgccaaggggcggatgcgcgaggtggtccaggaccaaccgcaggcccgggtgcttctcggacaggacaaggacgtgctccaggtgccggggcaggacggccacgacgtcgaacgagatgccccgctgctcaaggagcgcgagcccctcgccgacctccgggcgcatcagccagtcggggtcgggctgatcatggatgagggcgcggacgccggccagcttcaggcggccggagaggccgtccagcgcggtggcggtctcgtccgggcggtcgagcggcacccacgcgaccacgcccgcgatctcgtcgtgcgcgtcnnnnnnnnnnnnnnnnnnnnnnnnnnnnnccgcgttgttgttgtctggacgagcaccg

SEQ ID NO: 80920 - DNA, 662 bp, Arabidopsis thaliana landsberg
  unsure (1)..(662): unsure at all n locations
ttatttattattcattactataggttgtcagctatctgacaccactgtctccaaaaaggtcaaaatgctaaaatatcaagacttttttttttggctcaaaaaaaatatatggtttgtgcctcgtgtttaagcaatgggccaaatttcttctaagttagaatattaaaagcccatgatttatttgtagcccatttcggtgacggacgggtgtaaatcaagcccatgctaatttattcttctttttcttattttcataaacgcagtttctcgtatcgagactagaacaacatgcattcgtcttcacgaatgaaacactgaatcttgaagagctgagaatagtgtgttatgaaatttcaattccggtaacaggttgcatatttcagggtaagatttgtgatccgttgcaaagtatatccataataagatatgtgacattaataaacaaaatatataaaagcataaattaagggcataatacattgcattttgatctctcgctctcgacctgctatttcaatgtcaacatgaacaagtaatctgtttacattgcaaatttaaccaaaaaaaagagttggacccgtcacgctcttttcatgagctntcatttcttaaaaggttgagcttntttttttccaatccaaaaaaaaaaacattctttacta

SEQ ID NO: 80921 - DNA, 449 bp, Arabidopsis thaliana landsberg
tgaacccatacggaagatcccgacaaagctttcataacccatgaggttttttttcttttcctacaaaatatctttttgtggttaaggtattgattaattatttttgttattagatttaataatgtatttttttcttacagatgagagaagtcgtaaaagacgtggcttcgaatttcccgactgctattgtcaccgggagatccattgagaaggtacattacatttttaccaaatattgactattttctatataacagatcatttaatttacatattaatggtaaagacgatatataacgtacgagtatgtttttgttataggttcgtagatttgtccaagtaaacgagatttactacgccggaagccacggcatggacattgaaggtccgaccaacgaaaatagtaacggccaggtgaggacacaatgcagaaaatcgacacacacaaa

SEQ ID NO: 80922 - DNA, 427 bp, Arabidopsis thaliana landsberg
  unsure (1)..(427): unsure at all n locations
gccaaacccaaacgaaaaaggacgaaacccaaacgcaccccaagatacagaccnaaaanccgaccagcngaccccggggcaacaccggcgacacgcacacacacaagcaancggcgaccagaaagaccacaacgaaaacgcaaccaacggaacccaaccaaacgaaaacgaacagagacaccccacggagcgcgacaggacaccaagaacgcccccagccacaggcccacaaccaggaagccccggcaaagcccccagacggcgcaccacccaaaacgaggcccacggcaacgggacaaaaagacnccnncccggacngaaacngaacaaaacnacaaaaaaccaaaaccgaaccaaaagacaaagaaaaaagacgggaaacacacnccacaaanggaaaacaaagagcaagaagaaacaacccccc

SEQ ID NO: 80923 - DNA, 232 bp, Arabidopsis thaliana landsberg
  unsure (1)..(232): unsure at all n locations
gccccccccgcgaccncncagcaggncgcggacaaaaacggcngaancgacgaggagaacgggcccgcccagcgagggccgccacaagcgccccgaggcgncagggcggcggcggaacaaaagagccggagaaaccgcagcagcgcccggacaaaaanagccgagcggccgagaagaangggcgcgccacgcgcgggccgacacggacccaacgaggcccaggggcggcgga

SEQ ID NO: 80924 - DNA, 489 bp, Arabidopsis thaliana landsberg
acgctatgataaatcaataagggtccatcaattgtgaaaaaaaaaaaaaaattatatgtcaattgtgaaagaatatatatactatatttttaatagtgaaagaatattaaacttctctatgtctctctactaaattttaaatacaatgtacatacaagtttcacccacttcaccaactagaactcaattcctttattattattcacatttcaatgtctgcggaatacctcaacaaactttcttctgtactcttcccatccttcacatgttaatgatccgttgccacagtaatgtatagcgacaaggatttttccgaaaagtacagagacacatatcattacaataacatgcaacagtattaattcttcgtgtatataatatagtccggcaaagaaataaataagagttaaactgtgactcctcatattttaaaatagacttgttcttttttccttttttttccaaattaaagggaaaaaaaaaaaaaat

SEQ ID NO: 80925 - DNA, 463 bp, Arabidopsis thaliana landsberg
  unsure (1)..(463): unsure at all n locations
ccgattaggtggagctgttctgtgtaaatcatttgataaactgttcgttggagtcaactgaggagttcattgccatggaattccggtttactctgagagacaatggaatgcaagcggcttttcagctgcttcacatggtgcttgaggtattagattataacaaataagatatagaatgctgtgcaacatttcagactcttgatctattgatttgctggtcaataatgttttcttttacctgcttgttcgttttcctttatttatttttttattttttttctctaatcttttgctgagaaagagtggtggttctctggtatgcagcgtagtgtctggttggaagatgcatttgatcgagcaaggcagctatatctttcgtattttcgatcaattcctaanagcttggagcgtgcgactgctcataacttatgatcgctattgctgacggtgatgagcgttttgt

SEQ ID NO: 80926 - DNA, 265 bp, Arabidopsis thaliana landsberg
  unsure (1)..(265): unsure at all n locations
cgaaaaacccacnacgcgggacaggggcggacnngccangcnngcccccacaaaccaacggcnccanacacgncccaagaaccacgaaccannccgagggagncaccaggccacgccacgccacaacaacgacaccccgaccaagccncaacgacgcncagacaccacccacagcgacaaagcccanccaganggaancaangcnccangccccncccaaagccgagcaaaagaaccacggaggaacgncgacacgagacancgc

SEQ ID NO: 80927 - DNA, 344 bp, Arabidopsis thaliana landsberg
  unsure (1)..(344): unsure at all n locations
attctcaaatgagacacacaactattaaaaaagatatcaaaaaaatctaccgtattcaatacaactaccaagtgcctttttatgggattaccatacaaatcacaagacaaaacaacttatatatcttttcctcatccaaacagattgcgtattcgttctctcattttttgaaacattctagcaggcagcatagcacaaggtttgggaataaggaggtagcattctattttaaactttccacggaataaattttaaaaataaccatataccgtaaaaaaangaatctttttaaaaattcagtgaaaaactagcaatactgcatcaccgtaaaatggaaaaacaac

SEQ ID NO: 80928 - DNA, 575 bp, Arabidopsis thaliana landsberg
cctctttattagatagttatgggaaaatagttttcgaagtattcttattgttggaccaaaaacaactggtccccgaagcaataattaggaaacaactttggttaaggggcaaacatatatacctctctctctctctctctctctctctctctctctctcttcgattcatcaatcatatatgaaaagaaattgatataaaaataatatatatgcgtggatatgtaaagttggaccacactatgaacatgtctgcaagaatgtataaagaggggagagtgagatcatgagtctgagaagcagtttctagtttcaagtttcaagaacacttaaaaaccctaaagctcaaaactgtgtactgtctccgacatttatcagatctatcagatttttcccttttttccacacttatgatctcattgtttttttctccttgtattcttttaacggttatgattgatttgttttattttatgtgccaccttagattatcatggatgctccttttacatgttagaaacattttgaatatatgttgatgacaataaatatttttctctaatctgttgctcttataa

SEQ ID NO: 80929 - DNA, 578 bp, Arabidopsis thaliana landsberg
cgagctcatgtccgactaaagcagccacagactttaacgaattttttcttcattttcgtttggttgttccgttcaaaatcgaagcctgttttgatctgtagacatgtttacagatattagaatcatcgttcttcaatatgttaaatcagggttttaaaaaactgcaaaaccggtttataaaattccgcaaaatacctttgctatttcaatccgttgactctcacgtttctgtttcaactcgtcttgtgccctcattcgttcagcaaccttagcagctctcatctcggcttcaattctagctttctctgcatattttgtgaaagaaacgtaagaggcaaacatcgaaaagtttgagactttattttactttcataagaacacgtagtagtgtaccttcacgttgtgctctttccatctgttccttttctatctgtattctaatcagatcagctttgttattctgtcaataaaaaaaaagaatcaatttcagtaaaacatcataagctgtcgaaagtctctgtttaggtaattgggattaagaaagtaatgaaacctggccaaggactattctggtttag

SEQ ID NO: 80930 - DNA, 429 bp, Arabidopsis thaliana landsberg
ctttttagtggtctcttaatgttttagatttatcagctaaaatttctttattattaatcagttttaggagaagggggtaaattttaaccattgggggggaaaaataaaaaagtttggtggaaccaattattaaaatggatggattctaaacttggttacttcacattggtattaattttctttcattaggcttcttattcttcaggtcggtcaactaaaaatattggcaaaggacctttttcacttggtttccccatcatcttccttattatctttgctttagggatttacttaccttaagtttttacatattcactttttcaccaaaatttaaacggtaattttgtaggatttattgtgactctagctttgggtatacacttacatttataattgtgactttttgtcgagctctatatatatatatat

SEQ ID NO: 80931 - DNA, 534 bp, Arabidopsis thaliana landsberg
cgattgcatagattgcgatatagtataagattcgactacatctttctatcatatttattaggtctatctctggcgttacacatcacacatggatattaaaatatactaatatcctttttataacgtttcttggtctaaaattacttttattattttgtaataagaacaaaattataaatggatattaaaacaagaacttgaaatccaaacaaaaagtaatattgtatacgatgagataattaatatgttatgattctaatgttttaaggaatatggtaaacaaaaaattcttaaaaattcattaaaacctatgtatatcagtatatttaattagttttttctaaatataatgataattataaatatagatcattagggtacgtatatatttataaaacccgatagtcagacactcaaatactcatttggttcaacaaatagggtacgtatatatttataaaaaaatcatttagtttatatattggctattatttgggttttattcttttttttcaattttaatattacttcaat

SEQ ID NO: 80932 - DNA, 345 bp, Arabidopsis thaliana landsberg
  unsure (1)..(345): unsure at all n locations
accccaaaaaggagaaagacaaggagaacaccgnanttgaacaaccacaacaaaacaagacgngagggcgcgaaaaagagagcgacacggcacaacccaacccaaaggaacgcaagacacagaccaggaaaaccagngaacgcacaagacaaagcaggaaaccaccacnggcagagggagcaggagaangcacggaagagcaaaccccgcaagcgagacaaagccgaggangagcgagaaaaggggaaangggcnngggcccgaacagaacagagaagcgaggacacagagagcacaaagccanggcnccgaagaagaggaagcgagagagaaggaaaccaaacg

SEQ ID NO: 80933 - DNA, 200 bp, Arabidopsis thaliana landsberg
actattacgacattgagaattctaggtaccgttgctaccagagtcttggaataacttgacagggaaaatatatggatacaggacatcgaaaaattatattagaagatttatccctaaaccgaacagtttggaaggaatgccacgtggcacacatgcgtgaggtgaaaagctactcaaattgcaagacagccaccgattga

SEQ ID NO: 80934 - DNA, 566 bp, Arabidopsis thaliana landsberg
  unsure (1)..(566): unsure at all n locations
gcctccagggcgttggccttttgcagttgcgccagcgcctcgctgtagcggtttgcgttttgcagcaccttgaccaggtcctgcgtgatgccgatgacgtaaggggtgttggcgtgccgctcggagaagtcgatggcctggcgcaaggtcgccacgctcgcgtcgaccttgccttgccggctgagcgcgatgccgatgttggccaatggtgccgcgcggccgatttcgctgccggcgtcgcgggccagcgcatcggcgcggagcgcatagtcgagtacgcgctgggtctggccgggctggctgaggtagtagtcggagaggttgttgagcgccaggatatggatgtccaactggcccgngtcgtgctcggagagggccagtgcgcgctccagtgcgacgcgctggtgcggtcggtcgtccagcagcgaataggcgtggcccacgtccagcgcaatggtgcccatgatggcgtggtagttcacggcgttggcgccggcgtatgccttcttgcccaccttcaccgngcggtgcacgttgtccaggtcggcatttaacggggtcatgcc

SEQ ID NO: 80935 - DNA, 200 bp, Arabidopsis thaliana landsberg
  unsure (1)..(200): unsure at all n locations
ccctaccccccnnggggaaaacagggnanncggccnnaaagcgnncgcaggcaaaaacaggagccacnagacnggggccgggcnccaggaanagaaacnggnngcaagggaacgccaagancncaaaaccngaaaacgagagagcacgaaanggcaaaaccaacaaaggagangagcnngcaacngcacaacaaaaaagg

SEQ ID NO: 80936 - DNA, 447 bp, Arabidopsis thaliana landsberg
catattgactctcctataacaagctgtttgaattttaaatgaccactgtggttggactcaacacacaatgatcatgtaaccacatgttatgagggattgatgtgtatacatatgataagtgacaaattataatacattatggtggaatcctaaattaataaaataacaagaaaacgtgatgaaaatgaaaggtcttggtataaacagacatagtaaaataaaagttggaaaaaacgtaaataaaacccacgtgaaccaaccttacagaaaacctccggtatgataaaaaagatatatagacagatttttgtgtatcattatacaaggagatacatatgtatcttattacctactatgatatggctgtatgacataaaacatgatctgttacataaacccccccccccacaaattaatacaatgttatgacattaaattgtgcttact

SEQ ID NO: 80937 - DNA, 465 bp, Arabidopsis thaliana landsberg
agctggggatacggctcgagcttgaaaaaagagatttagggtcattttggtttcatcctgcggcaggggacatggggggaggcaatgggcaaaaggcacagatggctcgcgagaagaacatcgagaagcagaaggccgcctcaaagggaagccagctggattcaaacaagaaagcaatgtcgatccagtgcaaggtgtgcatgcaaacatttatgtgcaccacatcggaagtgaagtgtagggagcatgctgaagccaaacaccctaaatctgatgtttatgcttgttttcctcatctcaaaaagtgaacatattggagagtgcaaatggagaaaaactttatatcatcatggcctcttccttaaacctattgacagagagcttccccattttctatctatataaaatgcgtttttctgtgtttgtgccttgcgaatttaggagggacaaggagaggaagactat

SEQ ID NO: 80938 - DNA, 320 bp, Arabidopsis thaliana landsberg
ctaacgaatgatatccccaatgtcctaatgtgaagggaactttatgtggcactggtgtaatcttgccatgggcctgtggttattgcacaagaccacatgtggatcatctgcctgcacgcgcgcacaaaaagcgatgacttccgcttcctcctgctgcttctttttctccagctggaggatccagctatgagcctgtgctcactgtaggttaatcctatacgacttcttcagcgaaaaaaaaaaatacttgggattgtgctttatctaagcaacgctcagtttcagctctgttctgaggcttggtattgtcgttcaaaggc

SEQ ID NO: 80939 - DNA, 476 bp, Arabidopsis thaliana landsberg
ctggtttgacaattcgatggatcaatgcaagcatcaggtcttaaactctttagagcagcggttagagcaaatattcccattccctatcaatgaaagacacttttggtttcggcttccgaatttactatatgaaaaatacgacaaaggaaaggaaaattactataaaagaggcgatggaaccgagtagaagagtccaaaatcttccaaggtaagcatcagagacaaaagcaccagcgagtgtaagaatgttgcaagaaccaaaccatatgttgatgacgttcaccaagaagacaccaccaagattatattttgtcatgagatacaccgatagattcccaattaagctcattgaggccagcttctcaaaagactcgtttgcttcacaaaaacgaatgaataaaacactatattataagattaaaccccaaaaaaacatcaattaagatagtaaaaacgaaccaataatgtacttgata

SEQ ID NO: 80940 - DNA, 222 bp, Arabidopsis thaliana landsberg
  unsure (1)..(222): unsure at all n locations
ccagccagcccggccacatanaaaccnaaggtttaattattgaggcattttataaagcgaggttttttgggaggttatcataaatgctatttttttaatgatatgagagcattccacccactctattttactttaagatacgaacacgctacgcggactatttaaatttaaaaatttgatggaaaaaaatataatgaaaattgaaatatatttaatatcact

SEQ ID NO: 80941 - DNA, 479 bp, Arabidopsis thaliana landsberg
tgtcttgccggctccgttcggcccgtgaatgccgaagaccttttttggccggacgcttaggctgacaccgttaacggcagtaaagtcgccgtagcgcttgacaagcccgtgaacggcaatggcgtagccatcataggttgcacgttgtttcgctgaaggggtgcgcacgagtgaatctatcacctcttcacactccatcctctcctcattcgtattcgcctgtcttctgccgtgagaacacggagtgtacttgaagccaccaccgctgaccaagacttgtccagagccgttgcttgcggacagaggccggatagcagcgcctacggctaatgcatcgagtttatgaaacgggcaaggcaccgccagcggtcgatcgacggaatagctcctgtccattgggacagctttcggtcagtccaggcagcccgatccggtattagcggcgccggtcaagccacttgcgccaggcggcgaggata

SEQ ID NO: 80942 - DNA, 522 bp, Arabidopsis thaliana landsberg
acggcgttgattgtcctttacctgatcctcttgtacctgtgccttttttcgatcgaagcgactaaacggcgatttggggggttactatctgccggccttacatttattgtagtgagccaggcattttcggccatggccgtaactgtctgactggtgccggtgacggagcatacactgtcattttttagtcagggagggacgtcgctgcttttcacaggcattgcaatgggtatgatcctcatcgtgagccggggcgaaattgtggaggaaaaacgcatttaacatggcaaaaaggatcattatcagcggaggtggcaccggtgggcatatttacccggccattgccattgccaatgcattgcagcacagggagccggatacggaaatcttgtttgtgggtgcattgggcaaaatggagatggaaaaagtccctcgcgcacgttataaaatcgtgggactccccattgcaagaattaaaaaaaagtctttcgctggaaaacctctcacttccgtttaaaatgc

SEQ ID NO: 80943 - DNA, 536 bp, Arabidopsis thaliana landsberg
  unsure (1)..(536): unsure at all n locations
aggattccttaaatctaatcctatactttttaaactaatccagtctctgcancttattcatttatagtgttttaacataatatttcagctaattctaaaatccaaccctaattattttataagaaatcaaacaaactctctttgatcttttttttgttaaacgaaaggtagtactaggagtcgagtatatttacattgaaacaaacaaaatttaattagaacacacccagcaaaaaaatccgagcacaaagtcaaaaccaacactttgaccaagtgtctgcatgacacgtgtatttgtctgctacatggacaacatctttaacaacactgtctcatcattccaccattttctttaattaaaaaaaaaacatatcagaaagaccatttcaatattattacttcttccttttaagctctaacaattaaatacaaatttccattttctatatattatacacacacgttcaaattatttatcacctggttttgattaaatccttgggagagtggaattggtaaaggaaattaaaaaaatg

SEQ ID NO: 80944 - DNA, 484 bp, Arabidopsis thaliana landsberg
ccgccgcgaccgcgccggctggtcctggtgcacggcctttttgcttgacaagcagcagggccaggagttccgcctcgttcagcttcgcccacgcggtctgcgcggcggtcgcggtggggagccagcgcagtgggaggaggacgagggcggcgaacggcgggtaggtgaacaggtcgccgcgggtggagcgcgtgtagagggcggcggaggacaggtcgcgggcgccttgcaggtagacgttgaagtcgtcttggtaggagtgggcgagccagaggcagaacacggtcacgatcgtgaccgacgcccctgcggccaggaacgcgcgctgcgcggtgacccgcggcctgctgctctcgatgacggtgtccacgttccataaccgtatgcatcagcgggcggtcggcaacagagggctaagccccgttttcgtggtggagcctgcccccgcggtcacgttcttacctctcgcacacctttaccattc

SEQ ID NO: 80945 - DNA, 489 bp, Arabidopsis thaliana landsberg
  unsure (1)..(489): unsure at all n locations
acagttaatgggactactactactaacattgaaaaacgaaaaggctcaaaaccaaaccgctttaaaaggaaggaacctctctaatatttttcgtattaactcataacgggcccacaacagttgcaatagtctttcaaaattctcctctctaatctcacaaaaacctctccgatctctcgctctctcagatctcctccatggatcccgcttcttcttcttcctcaaatcagcgcaaccgaatcgtctcttctggtacactcttttccccctcatttttcttttcgtatctcttcgatctccatgaacaaaatcccccaattgaacccaaaccctagaacattatagagcccgtgatgttctgtttctacttctgacgagatatgttgacttctctcgcaggggaaaagaccagtgatggctgataatggcgtccaacaggtaatttaattcaatcttcttcttcttcttcttctatttnggaatattgga

SEQ ID NO: 80946 - DNA, 525 bp, Arabidopsis thaliana landsberg
agctttgaatgtgtgctactacaagaggcccgattttgtgaagtcttaaatcacggaacagggctgtcaattttgtgaacatgtttacataaaatgacaaacccacatccggatgatgaccgccttgcattaatagctggtctcccccgtatttaaacgttacgtcaattttctgtctatatgtttcaatatctgcaactgtatgcctctttgtggcccggaatgcggaagaaattgcagaacttgcagatcgcagtacatacgtttgttgtatttacatttcggtcaatctgccaagtaaccttaccatccggctcttgtatttttcgaatctcattggcaacaaacatcaaatccgctgtggtagcgtctttaaaaaggaatacaccttctttcagtgttaacaattctaaatataaggcgcgctgtaatagctgattcttcattgagaaaccgttcattagttcatcggccattagcctatggctaaccgaaattgttattaaataaaccgtgcatgcctgc

SEQ ID NO: 80947 - DNA, 520 bp, Arabidopsis thaliana landsberg
gacagtaccttcatccatcacatcctgcttatgagcaggttttttattcattggctatgattgcccgtcataacctgttcctcttttagaagctcttcttagatggagggaaaggtgggtatattgttatttctctctcttaacaattagatggtatctgactcttgtctgtatgaaatacgtctagaagaccttgtctcccacgaggctattatttctacatcttgcattatttttaggtttgagtcattgatcttctatgtttcagtgtttcttttggactctttggtgcattatcataattcttatgtggattatcactttttcttcgtataggtgaatttattgactagatgttatctatgattgggtgaagccacttctctagaccattactaatattgtgtttgcttgtggcttgcagtgaatcacctaaaggtgcatatgatgcctcgactttccaaagaaaggtattttctttcgactcttcataagaacaattcctcggtgttttggtact

SEQ ID NO: 80948 - DNA, 430 bp, Arabidopsis thaliana landsberg
ataaacttttacaaatattttaaagagaattcattttttcatatactagatcttgaagttttaaaagtatatttaaacttctcatcaagactcaatttgatatataatttatcatgatttaatcaaaataacaataatgacgttatattatattgcggcattgtgagttacatttggcttaaaattaatttatttgtaaaccagcaaaaaaagtaatcatttagaagaattttttggtttttttttcacaagcaaaaacatctttaaaataaccacattcatgtataagaaaaactcataaaaacaaaaaatgttatttatctattaaatgatatactaaaaaatatacacacttaatatcctagttttttaacatcccaatttattatttattataaattacaaaactgtcatatataagatgttgatc

SEQ ID NO: 80949 - DNA, 153 bp, Arabidopsis thaliana landsberg
acgagcgccaggcggggcattcatgaggcgcgggaacttgggttcacgcaggataccggaagcattggtacgttaaagactccagattcttaggactacaggtaaagatcgtttccttcacgagtccgttcgccgaccaccaaagcggggcac

SEQ ID NO: 80950 - DNA, 436 bp, Arabidopsis thaliana landsberg
tacttaatcacctgtttagtcatagtcaccacgtcattttacatgattttaggaatatttgtattacttatatttatatattgaactaatcgacagtattcatttgttatgaattgtaaaaagagaaggaaaagttgtggaaaaataccaacatggtcctatcttctactataaggttatggttatcaacagtacactacttatcattgcagaaagattaagaagtactaatcaaaccaatatgtttagattgttttaagaaccaaatttcttgcttaggttgataacccagtcaagcaaataacatttgattccaactgtcgtatttaccttcaacctcttgcaataattgaactttcaaactttcacaaccaacttattttgacatttctttgccgacacaattcgctgtttctactatgtatcagttcattct

SEQ ID NO: 80951 - DNA, 152 bp, Arabidopsis thaliana landsberg
ttatgaggggcaccattttagcaagccctttgagccatatttactaagacacagggaattgcatatttcttacggtaatgaaatataaacctaaatggcaacctcccaagcgtacctgtgctacaaagtcaacactagctgatcactaacca

SEQ ID NO: 80952 - DNA, 428 bp, Arabidopsis thaliana landsberg
  unsure (1)..(428): unsure at all n locations
ccccgccagttggacgcgatcttcgtgccggtgggtggcggtggctttattttcggcattgctgcctacgtgaagtgggggcgcccggaaatcaaggtgattggcgtctagccggacgactccaactgcctgcaggcggtcatggcggccgacgagcgcgtggtgctgccgcaggtcgggctgttcgccgacggcgtggcggtggctcagatcgnnnnnnnnnnnnnnnnnnnnnnnnnnnntcatgtggatgaagtggtcaccgtcagtaccgacgagatctgcgcggctatcaaggatatctacgatgatacccgctcgatcaccgaacctgccggtgccctgggtgtggcggacatcaagaagtacgtctagctgtacggcgtggcccggtcaaccctggtggccatcgactccggtgccaacgt

SEQ ID NO: 80953 - DNA, 188 bp, Arabidopsis thaliana landsberg
  unsure (1)..(188): unsure at all n locations
gacaaaactcaccaagagaagggtgcttacgacaaccgacacganaagaaggccggagcacccataaaggcagggcccgcacgaaccaccccaagagagcanaagagnaacggagaccgccgagacacaacacaggaagagaggacaaaaaccgggacaccaaacaaccggacacaaacgccacaaaa

SEQ ID NO: 80954 - DNA, 563 bp, Arabidopsis thaliana landsberg
tatatatatatatatatatagatcaatgacctatatcttgttttcttgtaaacaaagaaagaagattaatagatcaaattcgacttaaagcaaacatctaccacataataaatgcaatgcaaaatcaacgaactgaatccaatcgacaatcaaatgcctatctctgcatctaccacatgatacgtactcaaaatcagatttttatggaaggtattaaaaaaatcagagttgtcaactgttattacatccaaaacatgatccgttatttggcttcaacattttttggtgttttcttgtaccatatgtcctacactcttttcatgatatagaccaccacactaaagaaaaataataattaatcttataaatgacagtgattttttttcttttcaccatcatgtttaggataacaatcatattattttcaaaaatatttggatgttacattactttaaaggtcaaacatgtgatgtgtgaagaacaaacctatacatgttccaaaaccattgaatttccaaaaaaatcaatgtaaaagtttgaaagaaaaaaaaaaatggaaaaaa

SEQ ID NO: 80955 - DNA, 323 bp, Arabidopsis thaliana landsberg
  unsure (1)..(323): unsure at all n locations
aggctgaatttaacactaggtcttccaatagcttttttttggcnagttgctctgggtatagcgcacgggtatctaagggatctcagagcgataattagcgcggtaacggacctgtcaattcgataaccaaacacttttgattcagcttggaacgcatggagtttagcgacatggttctagggttcgggcctccctcggcaggctaacaccgagctacctacagactcaaacgcatggtaagccataaacaccgcggactcatggctcactggaaggtcaacaccgtccgcaaagatcgaacgatgactaacttcagatatgca

SEQ ID NO: 80956 - DNA, 417 bp, Arabidopsis thaliana landsberg
aacccagaagaatgatcaaatgacattttctgaactacttttttaagaaggataaataaataaaatccagaataatctgttacctttgatgtcacatcttgctgccaaaattggttacttttttttcctatatcaaagattttgggaacaaaaacaaattgttaagtttgactgagaaaataaaacaattttagtcatctaaaaatacagcttttacaaaattccctaacaaaaagttgattaaaatttcttttctttctaggaaatctttttacgaaacatcttcacttcataattgaaatgctttttcacctttgttggcactactgatagagtgactaggtttatgttttccatggataatttatacttttcactggacaatgttagaaacaaacttatttaaagtgtgatcac

SEQ ID NO: 80957 - DNA, 451 bp, Arabidopsis thaliana landsberg
tgatactcaatctagtggtaactcttttatattaaagacattaatggattaatgtcctggatacactaatatttctataaaaccaaacattaaataactaatgataaatgaggtttttctttttctttcttccaacaaacggttatttttcttattcggtttagtttgttatgtacacagtacaatagaattcagtgttttcataattcaaatttaatttattgatgataaacccaatcacattgaagtttaaatgattttaaatcataattaagaaattaaaattacaacaaaagtttgtatattgtttctcttaatatatacaaaatccataattgtgaaaaattgaaaacaaaaccgagtttggttcatttcattagtctttgggtttttacttaaaccgaaccgaagtagaaacctaaacaaaatttggaaattgagattaaaaaaa

SEQ ID NO: 80958 - DNA, 470 bp, Arabidopsis thaliana landsberg
  unsure (1)..(470): unsure at all n locations
gcagggcgatgagcgccaccgagccgccgattanattttgataccgacgccgatggcggggggcggggcgacctgtacgaggaaatggaggaacacccgggcctgccgcgcgcccatcgagcgcaggatggcgatgaccggggcgcgcttggaaatataggccgacatgccttgccacaccgaaacgccgtcgatcagcagttaggcgagcccgacgatgacgaggaagcgcatgaacatgttgtaatatcgcaccatgggcccgagcccgtcgcgcgccgtgcgcacggtccaggccggatcgttgagctccctctctaccgcgggcttgccggcatctgtgtctatccctccccagaacactaccttgtatcggaataggtgcctgagccgggcaatggcgaagtgcggtctgagaggatggaaaagcccttggtggtgatcaaccgccgcaggccgaggcggaagcc

SEQ ID NO: 80959 - DNA, 471 bp, Arabidopsis thaliana landsberg
  unsure (1)..(471): unsure at all n locations
taaaaacattacaagtcaataagcaagagtgtacttatcttttttctatgcatggctcggaacaagggcgaggtccctcttgatgctgaatcctacgacatcatctgtaagataggcgttgnnnnnnnnnnnnnnnnnnnnnnnnnnntatgcattccgatgaactcaatggtagttgctatcaaagccatcgatcttgatcagtcgcgggctgactttgacagtcttcgccgtgaaaccaagacgatgtctctgctttctcatccgaatattctcaatgcttattgttcattcaccgttgatcgatgtctctgggtggttatgccattcatgtcttgtggctctcttcattcgatcgtctcttcttcttttccaagtggtgtaccagaaaactgcattttcgtcttccttaagggaactctgaatgcaatctcgtttctttacgatcagggtcatttgaaccgtgacatc

SEQ ID NO: 80960 - DNA, 642 bp, Arabidopsis thaliana landsberg
  unsure (1)..(642): unsure at all n locations
catagcaccagaaacaaaatcgtcgcaaattaggttttctccgatcacacccagatacaatactcactcaaattcaagtcaatttaaaaaggaatcaagcaatttcggagtgattaaaaagttgtatcaaacccaaaagtgatgaaatcgagtaaactaaaaacaaaacccagtaacttgaaaataagcttaagaaattttcgaagtttttaaagtagtgattacagcagtatcagcttaagagatattacccgtagaagcttgaccagagaatccttgttgggacgagataattgaagcaaccgagaacataattcggaaactatctgcgtcggagttttctccattcaggtgtaccgctacttgtaaatcgatatgaatatggagacgaaacgaacccaaacaaaaaaaaacctagaacaccttagtggagtggagaagagaaagcgaatctaaaatccaacagtgagagtctgcaatgaaaacggagagggaagctttgggcgggactgaccctattttccttttttattntcgntaattaattattctctgtgtgttgttcattgcccatcggagactgtaccangctcangagaatataactaactttaaatacacatgccgacatanaaaaaaaaa

SEQ ID NO: 80961 - DNA, 244 bp, Arabidopsis thaliana landsberg
tctggcaccggtgtctactcatacattaccatgtctggtggttccattatggaaaagggcttttatgctatataggggggcgtatgcccatgcagtctgtacataacccatgaaaccctccatacctattatgacttgggtacgcgatcgtgcgaagttacacgatcactacctattaatgacctaccgtccacccccccgaattatcactacaaaactttttcagcaacttttacggagaaca

SEQ ID NO: 80962 - DNA, 627 bp, Arabidopsis thaliana landsberg
  unsure (1)..(627): unsure at all n locations
gagccgtcatggctgctcaaatcccaattatgtttcttcttgtgttcgaaattctgaaagcatgtcaatggcctcatgtgagaaaagaaaaagacaacatgtagaagtagaaacacatcagagagacaaacaaacaaaactcaatgtgtgttttgatagagatatagagaaacagaccctccattgtcgcttgtgacccatgtggtgaagaatggactcaagtcgtttaatgatctctctgaaagttggtcgctttgcaggtttctcatgccagcattcttctatcaacctatgggattcaaaaatcggattaatgacatgaaccaaaccaatcaatgatgcaaaactgttcataagtatttagtttcttggtgaaagagagaagaaagactcacgttttaagacnnnnnnnnnnnnnnnnnnnnnnnnnnnnnnnnnnnnnnnnnnnnnnnnnnnnnnnnnnnnnngaagcttcactgtcttccttttcagcaaacggcattcggccttcgatcatctagagaatccgacattggaatcaatgacatgaaaaaaaatacttgagaaagtcacaaagttttagtctttacttacctnnctgacgatcaaatgcaatgagaaaacatc

SEQ ID NO: 80963 - DNA, 577 bp, Arabidopsis thaliana landsberg
ggctggcgcccacgatgtccatgttcagcgcgacggtcaggtcgctcttgttcatcgctttgaagcgtttggcgatgaggttggtcgcgccgtggatgttcagcttgccgctgaagctcacctggtcgccatcgatcaacagcttgccgctgactgcggttttatccgtcactttcaacgtgatgaaaccggagctgttctggcggttttcatccgtttcagcgaacagaccgttgtagctgccttgatagatgcggaacttgttggtcacgaagttggctttcaacaccatgttcgagcgcatcacgtaatccaggatcaacgtattggtttccgtgtaggattgcaggatggtatccggatcgacgttttccgcagtatacgtccaattggtgaagatgtaaccattggtgtagttctgcacgatggtcaaccggtaagtacggccgacgagcaacggatgatccaccgcgccatcgttggtgcccatgctcttgctggccaccgacttgatgatgaagttatcggccgagatgctcggagtcgaacccgtttgcagggtgaggagctccagaca

SEQ ID NO: 80964 - DNA, 353 bp, Arabidopsis thaliana landsberg
taactaattttgttttttacttttatgacttaattcaattttcccctattatatcataaaatgttcaatatttagataagagttaaatacaataacctatgacgtaatttatgttttgtgtttgcctccatgcggccattttttttgtgttcgtttttcctttttggctaaatcgtctggggttttaggagaaaattttttttagattaaatgctctttataactttcaacgcaaaattaattatatttttattgggttagagaattaatattttgccgattgttttactattagtcaaatcgcgcttatttaaataaaaatgatgtttgaatttataaattcaaaatatcga

SEQ ID NO: 80965 - DNA, 477 bp, Arabidopsis thaliana landsberg
  unsure (1)..(477): unsure at all n locations
tctattgaaatttaacatgattacgattgaacattttatctttatttttatttgaagatatttttagggatagtctattttatggggtttttgttatggaaactttggatgtatagaatcacgaatttcttgatataattgatgagatattgtagtgatctaatttgggatagatnnnnnnnnnnnnnnnnnnnnnnnnnnnnnnnnnnnnnnnnnnnnnnnnnnnnnnnnnnnnnnnatactaaggaagtctggttgtcaaagttctagaaatgtcgtttatggaaatatcatagttaggaatatttggtttgaaagaggttaattacttattgtgatccattatctctcagtggaagattgactcttcttttttgtgcaaaggcagattgctntatttaggggaaaataccatgataaacaaagaatatccaggtaacaaaaaaaagccagatcaacctcaattttttttttaaa

SEQ ID NO: 80966 - DNA, 567 bp, Arabidopsis thaliana landsberg
ctatggctttttccgattagaacctagtagtattattttttaccatacaatttctcgttttgtaccaataagattgccataaataaacgaaataaacactatttgttttctgagtaatgttttaacgtcaatgacccgatttctttcatagagaatctctctatttttatatcagtattacaaaactaaactaaacttccactagctttgagaggatcagctgattacaaattattattaccaaattaagactgaaatatttgctaataagaataacatcttttagtttctgatttattgttcaaaaaataaaataaaaagtttctgataaaactaaaatatatgacttgtacgttttccataaatccattatgtaattttctatcatatcggcccctactccctaatcaaaacaaatctttctaaaaaaaagaaaaaaaaaaagaaaatcatacaataccgttgtaactaacgagtaacgacggcaataacctaaaacaataacccattattctaaataaatagataggcatataaaaacattttttgctaaacacgtaacacttt

SEQ ID NO: 80967 - DNA, 572 bp, Arabidopsis thaliana landsberg
gacaagatccgagaagaagaagaagctgattcagtacctcaacaagacctttagaattaccaaattgataccaacaaaaaaaagagaaacaccaaaagagctcgaatttcaacaagggtttgaaaaagcttgagcctttgtgtgctctctcaccacgtgtgtgaagttttgttgttgttaagccgaagatgaagaagaagctgcgaaaagagagaagagagagagaatgtcagaagaagaagaacatcagcatcaccatcagttgggtttgaagaatttcagcagccacaaactcttgttttatttttgttagtgcctcttttttattaataacacgcttttatgcaagcatcactcttaagcgataataaagtttttactttttactttttagtattagtttctctttttgtgtcgacagtggaaagctttttctctatggtgtgttagatatttcagtttgagtctaataagataaacgaaattgaataattgatggaggtctctaatgctcttttcattgactaatctatggatggtgccatgtcacctaatcggagttaaaagtctaa

SEQ ID NO: 80968 - DNA, 555 bp, Arabidopsis thaliana landsberg
tgacccttggcaatcattgcatgaaaaatttaagatgaagaaaagtatcaattaataacaggtgaacctggtgtatgtcgtatatgtcgcaaatggaaagtgaatcgattggcatgctactgctctagttgagatactaaaatgaggctgaatgcatgcctaatagaatgaatatgttatctggacccttatgcttaccaacaaatacaatcataaaagaagcagcagaaattgcttcgacagacatgatgaacctgcaacaataatatactcattagcttttccgaccttgccaaaactaaagttacttcaccaagtagttccaaaataaaaatacgcaagacattgttcggtttcaaatactatttctagtcattggcatcaatactaaacttcctgtaagcattcaaatttagctaagatgttggtaaatacgttaagtcaaatctgtcaacctgagtgaatgaaaacagattctcattaacttagacgtttcactatgtgatgtgcaatatttttcttagcgaaacaagttaaaggattgagtcagaatct

SEQ ID NO: 80969 - DNA, 527 bp, Arabidopsis thaliana landsberg
atggccaggtagatttcgccatcgggataatcggctatttcatgatttccctgaaaaaattcacttcatttttggacattgagatcacgcagactggcgctggggctcacgtcgattttggtcttaatgccgatctcgcccagttcggcctgcacaaattcgatcaggtctttataggttgtggttgtgctcagtgtgacctggggcattccccttccatttggaaagccgacttctgcaagcaggctggctgccttttttggattgtagagataaccctttactgcggtgctgacaaaaccgggcatcccttttgggataaagcctgaagtggccggtatcccgactccattgcgcaggtatctgataagtttctctttgcctattgcataattgatggcctggcgcacttttttataacgcaggtgagaattttttgtgatggttatattggtgtctaccaaaatgcccacgtattcagtgcataaataaagttccttgcgcaatatgaacctgcctttatactt

SEQ ID NO: 80970 - DNA, 570 bp, Arabidopsis thaliana landsberg
tcggtactcctgcaggaccgaccaagttcagtaagcgtgtcggaaagttctgcgtcttctccgttttctgcatcgtcatataactcgtaacctagtccgggcgcagcgcctaaactctcaagttcgtgcgcgtcagtgtgagggttttgttgcggataagcttcaatctgagtgcttaaagccgcataatcacggaaggtcctgctttgaaccctatttaataagtcctgattctggttcctcaggaactcgatctccttgttcttctccgtcagaattgtcttctgagtcaggtgctgtaagaccaagactactaagaacagtaacgtaagaatcgataaggcgatgtaaacgatcattatcaaattcgctttctgctagagccgtttcgagacgctcaagtcggtcatttactaattctgtagattgcggcggaaggcaaccaagtaatgcagcgaccttccggtcgcaatcctcacagatgtaaataacaccaagagcctcgttaggaacttcaatataaagcggatctttcctatccaaactaagtccgaagtcaatgaacttaac

SEQ ID NO: 80971 - DNA, 504 bp, Arabidopsis thaliana landsberg
ctgctgatccaatcgcttctctgattgatactgcttttgtcgggcgtttaggagcggttcagctggcgggggttggagtttccattgccatattcaatcaagcttctagaattacgatattcccacttgtgagcctcacaacttcatttgtggcagaggaagacacgatggagaagatgaaagaagaagcaaacaaagccaatcttgttcatgcagaaactatacttgttcaagattctttggaaaagggcatttcttcacctacaagtaatgataccaaccagccacagcaacctccaggtaaatttcgcatatctcactcgacattgataacttttattaaagtttcgattggttttttactgttgcgttcttctctcgatctcttttgtttcaatttgttgtttctttggatgtattaaacttagctccggatacaaagtcaaataacggaaacaaattgaataaaaaggagaagaggaccattagaacagcatcaacagc

SEQ ID NO: 80972 - DNA, 514 bp, Arabidopsis thaliana landsberg
cgatcagcgccgtgcggatgttgattttgctttttgcctgtccgagaacgtttctcatggctggtgacatgaggatttgcccaaccttgttggaaatcggagacactgtttccatcatgaattttgagttatacgacccaaactcccgctcccaaaacaactggagaagcgggtctttgacctggcgcactacccaatctcgataatgtgagtcggtgagcaagcggttgatgccgataaagctggtgttttggcaatgggcaagggaggccaccgctgcaaacaggatatattcaaggcgtggcccccacgaatctcgccagacatatttgagcgcgccgacgatgcttgaagcgatgagctcgggagtgaggggtgattgcaggatgttgagggcgtttgaaaactcgggatcagcaggattgaaatacataacatcatttaccctccggggagggattaaatccaacaggtccaacgccagatcgccgtgcggatcaagaatgcctactcc

SEQ ID NO: 80973 - DNA, 387 bp, Arabidopsis thaliana landsberg
tattgtaggcgcgggaggttcactggatatcgaagttggtgctagctctggcatttttaatggctttgccattgactttcaaggaggcaactcacagaggggcgtcggtggcgtagtctcagtgtccggtggtaactcagccaatgcaaacgccggccctgtatacatccagggtggacgctctacacacagtgcatgaggcgacgcaatcttcactggcggtgcgagcgaggtgggtacgtcgggttccgtgacagtttcttccccaaatgccaaacttgactctggttcactggctttcgcagcgggcttggcaacggcacaagttggcaacattcacttggacagtttcagcaatattggcatactttccgctgtcggagatgt

SEQ ID NO: 80974 - DNA, 285 bp, Arabidopsis thaliana landsberg
  unsure (1)..(285): unsure at all n locations
ttggagaaccaaagatgatgtgagaagttngaagaaggttatttgggaaattaaaggtaaatntgaagagatggggagtaaaagaaggaaaagaaaagaaggtgagtgtggtaaaataaattaaaagaaaaaaggaaaaagaaagtatgaaaatgataatgagggttaagagagtattaagaagtaggatgtaggaaatggatatantggaggaggaaagaaaagaaagaaaggaagaaaagaagagaaataaaaggtggaaaaagtaaaattaagagaaaaaag

SEQ ID NO: 80975 - DNA, 391 bp, Arabidopsis thaliana landsberg
atgactgtgttgcagctcaaaaacacagctggtttctaagcaccacaacgacacagcgattttgactctttcggctggtttgagccggatgctcgacttccgtgctccgttgctggggatatctcagcggaacttgcataaaatgcaacgcttcgacgagatccaaacgagagagatggaaagcaatactattagatgttctgtgcgacggctttcctccgaagcaacaaaagtaatcacatgctgaacagttaagtccttgactgtgtaatatatacgactggtagttcccgttttgcggggtcagccgcagtctggggaaatagatgagaccgtcttgtcgggagtagacccacgagacaacaaaggcaatatgtacattgatgaagag

SEQ ID NO: 80976 - DNA, 378 bp, Arabidopsis thaliana landsberg
gcatggatccgccgattatggtgatgtctggacgcagcgcatggatttttccgctgtttatgtgacggggattgcaataaacacaactggacagaaaatagccattataacccaacagcaaggtgtttggcggagccgtgactttggtctcacgtggcagtagctggccaatgcgcctgtgcatttaacatacaattctattgcctcggatgcgagcggagaactgttggccgcgactgcggagagtatcgatcagggagtgcatctgtataatgggtccatcgcttttgttcagcctacactactgccgactgttgctccctcctgccctaccgtgcggccgaccagtggacgaccctcttacttacccagcgcccc

SEQ ID NO: 80977 - DNA, 463 bp, Arabidopsis thaliana landsberg
atcttcatcttcaaagccccattcccatttgtttacttctctctatacattatgcacagactgtaatatagtattattattagatggatgagatcaaatagatcctctaagagatagtgaacttgttcgtacaattgaggacctaatcctactaagatccacatgaaatctatcgggcatggtggatcacgtgttaaccctttttcgggttccccccacctaagtgacctcctaaaactgttcttcattttttttcttgttaacaactttttcttattaaaagaaacttcatttaacatcccatatttcttactcacttaaaaacaacaatttccaatatatttattaatggttgagaaaaggccactttttaaccatgaagaaagtcaatgtagttttgcgttattggattcgaatatagtgattcatgtttttagctagagatctttataatatacattct

SEQ ID NO: 80978 - DNA, 371 bp, Arabidopsis thaliana landsberg
  unsure (1)..(371): unsure at all n locations
aaccagaccccacgacgggaagggatccgtatcctttttctttatctcgaccgcaacttccttcaatcaatcggtccgaaatatcttctcgaggcgctttaactttccccgaccggaatatctgcggatgccgcggcccaagcaacattgcgctcgttctcaagcgaaatcataggctatttcctatggaaaccgtttcgttctgttacagacacgnnnnnnnnnnnnnnnnnnnnnnnnnnnnnnnncggcgcgttcgatcctaactctcatggagtcactaagcgccctctcatggccagctcttgtccatctattaaaaaaccgcgaacagttctaacgcatggcgcacaccgattcgttaaccgatt

SEQ ID NO: 80979 - DNA, 393 bp, Arabidopsis thaliana landsberg
acattccaccacagagaaccgagagtttggtagtcatcattatttttagacaattttattatattgttgaaattagagttgttcttgacaataattatggggtagactaaaaaccaataataaagatatttgactcctatatttaaacaaaaccatgttaaaaatggacaaggatgggaagtcctataatggttatcaaattcggagaaagaagataatcttccagaaccatgcactggaaaattagttgatgttgctttaactcttattccttatttttggagaattgcacgacataatctaaaaactagtataatcaaggtaataaatcattgagctttcagttatgaaaaagatgaactactataaaacagaatttttaaaattgaccca

SEQ ID NO: 80980 - DNA, 320 bp, Arabidopsis thaliana landsberg
  unsure (1)..(320): unsure at all n locations
ggactggagaagcgagtgatggttgctttatattaaggaatttgaatttgtaagnccagccccccncctatttaggggcatgtttaatgaggtgggaagactnnnnnnnnnnnnnnnnnnnnnnnnnntctagccattagaattgtctacagggaatatctcttttttggaacgagataaataagaacttctagtgatctgcttagaatgatttgaaactgataaaggtaggtacacgaagagttatgtaatcagctatgaccttgggtgtacaatatattgttcaaggatgaaaacttagctttatattggtctcgagg

SEQ ID NO: 80981 - DNA, 659 bp, Arabidopsis thaliana landsberg
catcttaatctggggatcttctaaaaaatattttccattgtcttttacatatacttttttattttagatatacctcaaaacaaaggtgatgctgtaaaatttagttcaaaacgtgcaattgcctagctttatagataacttggtagtgttttattacctagtataaactactaaattttacaattaattaatttttagttcttttttatcttaaaatataataataaataaaaatctttgattcatcatcaacgcatacattaaaataacacaaatttggtaatccaagaaaaaaatgtaacactaacttatagggtctggggacatgcattcgcttttaaacgagcaaattcaaaatttacattttatttttggatcaaaattcaaaatttacattattccgagaattgagaagacaggcatctcagctttggtgggctcctaatagtactctagctcacgacgtatcgtgcttttaatattaggcccataataactacacaaagcccaagccccaccaaggcgttgactttgaaatacggagactataatttattggagaggggcatggctcacgttagccaagcgttaagtactagtttcaagcgtggattttgagtgtttaaacaaaatgagtttattaagaagccaaaactgaa

SEQ ID NO: 80982 - DNA, 319 bp, Arabidopsis thaliana landsberg
acaacctaatttatgactagatgccttgtggtaaatcttgactattatgctcttatctaccgctaatgggttctctcctcactggatcaaaactaccaccatggggtaatatttcatgtgtcacagtcgttcgtatctataaacataaattcacgaactcttattatcatgattttttattcttttatgttcgatcacacaatttgaagtttgaaaatattttcagtcaaattatcttatataaactattactttaaaattagttctttttttcttttccatatttagtaatcgactagtagtaaatagtggataggtt

SEQ ID NO: 80983 - DNA, 190 bp, Arabidopsis thaliana landsberg
tgtatatccaattattccgacatttttgttacttctacggttaacatttattggacaaacattttatcgctctatttggcgacgcattgggggagcactctcaacaaaaatgagacaaagtatgaccgtggacaggttcgatgcggaccccattgcgctgattgacaagaccacgcatgacaagcgttcg

SEQ ID NO: 80984 - DNA, 575 bp, Arabidopsis thaliana landsberg
atgctcgcatgaatatttttgtgtatgtgccaactaccatatcttatttaccatttatatttctattttctccatataaaattattaatcatagtcaattatttaaagatgtatattattatatctttattaacaaaattaccagataaatagttatttttcaagtatattcaattaaatagtgtgacaaactttacccaattttgctgcatgtcaatactcttttcgcaatgtctaatatccactttttgtaactgaaatttatctaattaaaatcttctacatgattaaataaagaagttataaaaactgcgtacaaagattaagtgatggagacagttcaagtttgattacaagacagttcaatctgatggctatgagttttgttggcagacatgccaaaaaaaattaggttgtcgtcgatttcatttgttctttaggagaaaaacattgataatcgaagaaaaaaagtttgtaactccgttttaatgattcaaataacttatatgtgtagaggattttgaaaaaacaaaatttcatatatttaatacgaaattacgtgtggtttttaaatg

SEQ ID NO: 80985 - DNA, 461 bp, Arabidopsis thaliana landsberg
tgtgcttctcagatctcggagcttttgctccctgtgagagttttttttataattgagcgatcgggagcgagggcgagggggagaaatatatcattttgcacggacagatgaggagcagatgcgattccataatgcataccattcgatgtatttctattctatggaacaaattgttctgcggtactcgggtctaccttcaccgtctcagctaatgtctctaccgatacgttcttttgcaatctctcttccttgggttgctaaaacaaacccagtagccctgtgatgttcagcaaaatccgctggatttcgcttgcaattcattcacttagcaatatccttatctttcaagaatcacccagaactctccatccctgcaaatatcgacgcattgagagcaatccaaccttcgaccttcacgttccgatggtaaacaaacttgtgaatatttgccaaccacctag

SEQ ID NO: 80986 - DNA, 536 bp, Arabidopsis thaliana landsberg
  unsure (1)..(536): unsure at all n locations
gggatgatcatctcgcgctcggcgtacagttcccagcgctcgagcgtttcctgcactttcgcttcgcgggtgcggaagggccaataggagctgcccttggtgacgccgagctggcgggccagtgcctcgaccgccaccgcnnnnnnnnnnnnnnnnnnnnnnnnnnnnnnnnnnncctcttcccagtcctcggcgctgaggcgggtccgttcggatttggcgtttgcattcatcggcgtatggtagccggcgcccccctcattgcaatgtgcagcgcgccacgtgcgccatggtgcggcgcgagttgacgtcggtgctcatcgcaacccatactcgtgcgtnnnnnnnnnnnnnnnnnnnnnnnnnnnnnnnnnnnnnnnnnnnnnnnnnnnnnnnnnnnnnnnnnnnnncgccacccggcaggcgacccggtgctgctgttcgccnnnnnnnnnnnnnnnnnnnnnggagcctgtgccgccagcgcggatgcgctcgctggcgcatgttgtcgctgcgtgagcttcgacagccgt

SEQ ID NO: 80987 - DNA, 555 bp, Arabidopsis thaliana landsberg
tctataaaagtgcaatatccggttctacttcagcatacctcgtcaaatacaccaaaaccaattcacggatcttttgattggaagtagttatatttttgacaacatcggcaaagtaaggcaaaccgtcttcaccacgagaaataaccgatatgacgcatttcatcccattcaacacatctctctcaacacgggaattcaactgcttggtgatctcttttggtgctagtgcagttgtcgattctgtcaaccttgcggaagctgatactgctgcctcaattgtaaggtcttttgccgattcaatcatcgacgagagtcgggccaatgagtcagtcatcgcaatatcgagggaaacgtttctgaatttcaatcttcagctagcactatttctattgtatttggcgtacactgagaatgcatacaattctagtacggcagagtaccggagagcttagtactagtacgcttcatcacgggagccggcaaatggttcatgagcagataggtctaacagctggatcactccaataaaacaattgattcgttctagcttctaca

SEQ ID NO: 80988 - DNA, 461 bp, Arabidopsis thaliana landsberg
  unsure (1)..(461): unsure at all n locations
atcgctatctcgtgcgttttgaccggttatggatagttcgttttgctgatgtctgtagcgattgagctggtagcgatcagacctggccaattacgccgtcattgttaccttttggaacctgggcctgacgattggactggttttattggttgccggcacctgcagttacctgggtattcgcaaagtgctgcgggtggagccgttcgagatttttcggtcttgaggcatggtccatgaccgttgccgggacgtgagatcttcattacctgcattgttgacctaggatagactttgccgcctttcagatcgtcacgttgcacgtgcagtgatagcgttggtacatacgctatggatccggaggcgtggccatgtatcagaacctggctnnnnnnnnnnnnnnnnnnnnnnnnnnnnnnnnnnnnnnnnnnnnnnnnnnnnnnnnnnnnnnnnnnnnnnnnatg

SEQ ID NO: 80989 - DNA, 573 bp, Arabidopsis thaliana landsberg
  unsure (1)..(573): unsure at all n locations
agatgttatttttggtgttcttgctacaggtttatttttttctatatgcaaattgattcgattttattcatttatgcttcttataatttatctaaacctttctataatacaacaatcaggaataacgccagtctcagagagtttcctagaccatggtctaggacctcctccggctaaatggaaaggatcttgtggaccttataaaaatttcnnnnnnnnnnnnnnnnnnacaatttatctcttaccatgtgctacttaaatcgaatgtaaatacaaactgtgatcactagaaaatcttgatctctaagcaacatgaacttttgagcaattgttaaagaaaatgtcattgctagaaaaacaaataaggagttagttgatgaatttaagagtttagggagcaaattagaattatgcgttaacataaggagttagttgatcaatttaagagtttagggagcaaattagaattatgcgttaacataagggttctgattgaaataataaatatttaattaatgtaacttcaacagcaaaataatcggcgccaagtacttcaagcacgacggcaatgtg

SEQ ID NO: 80990 - DNA, 506 bp, Arabidopsis thaliana landsberg
acatagtttcatccaggacccgtaattttttttgggttttttaaaccagattcaaggaatgtgtcatcctggaattctaggaacgtccaaaactctacattctggatggtcaaagtattgaatgtgacttttttttactatttaagtttaagatattagcaacgggattttatgagtaaaaatcatagtcgtagaattctattcccatttttttttttaatattttgtcatcattcgtattcaacagtttattttaccattggttgaatgttgaggtgaaacataaagtaaactttaaaagtaagagcattacatctgtattatattaaatgatagttcaaaatgatgttttcaacttttcaatgcaaaattaattatttcgtatttgctgtcattctttatatattatatagcctgttttagtattggttaaatgtggaggtggatcataaatatggtttcagtttataatctatctgacacaattcttaaaacattttggagag

SEQ ID NO: 80991 - DNA, 610 bp, Arabidopsis thaliana landsberg
tttgggagcgatttcaacaatatagactggtacctgatattagttttttggagttaatgacaaaaaatactggaaggggtttcttggagtaaaagtcaataaacagtaattaccaggcgacctatttaactacgtaccacataagaagctacgccagctgcgaccccgagaaaaagtcttccgatatcaagggaccaagtcgcctatatatgataaacaatacttaagaaacagcaaacaattaactattcgtataaacttttgattttgaaagatctttttttgtctagaataatagtcgagggaactctaaaccagagtttttctttggtaaaacttgaaacattcaaacgcttaagcttatgtcatacgtgacacacaaacactatttaaataagtattgagatatataaaatgatcgttagaaacctgagagaaggcaatcataagccagccggccatgcataacgagtttgaaacccccaaagcctgcgtatagtcattcatgaaaccgctatatatctcttggttggaatatatgtgtaaagaaactccctaatggaattgtaattttagtcctgatgattataagagattaaaaattttaaaa

SEQ ID NO: 80992 - DNA, 465 bp, Arabidopsis thaliana landsberg
ttgataatgtaattgatgatgacttcatcaaagtgttttatataaataatgaaagtagacatatatggcggggtttgtgaaactaaaaaatactcctttttactcaataatatacttttgtattcctatagttgtatagactaaaattctgatagtttatgtcttgtttaaaccttataaaatgtatttaaagttatacatatcttgagtcaaaataattaaagttatagatttaattaaaaaactatactgacatattcttattcttattcttatccttattaacaaaattgagatatatacaaaattgtttaacaaacaaaagagttcttgagatttataaatttgttgcaaaacaattattgaaacatgtaaaattttaactaaaggttgtagattgttaacattgggtatgtctttcaaattcacatataagacgtgatatttatgcatttacagaaagtg

SEQ ID NO: 80993 - DNA, 223 bp, Arabidopsis thaliana landsberg
caagagatggtagtggtggaaacggagaggaagatggaagaatgatgaaaacctggcatatggatgtgacatttgggaagcaacaacatagacgttcaagaaattacccatgggatgaagatcatagcggatgctttttgggttagacagattaagaaaagaaggtcactgacgctgtacatttgctggtgagagaagacgcgagatgctatataagtatgcc

SEQ ID NO: 80994 - DNA, 538 bp, Arabidopsis thaliana landsberg
agaccacgtttaagaactttcatgtctttattgataataattttggatttttggatataatccttacaccacatgtaaaatgagaatggaggtattacatacctagactagagtaaccttggcaaaaaataaaataaaaaacaaggtcagaatacatggaactcatgaaaaagatactatcggatccaaagaagcatttagaggtctccaaagcttcctagagcgtcttccggtgattgtgttgcggatttctcgataaatcatcttaaagagagtagaaggatgaatcctttggtcgttgtgtaacacattgttcctttgacgccaaatttggtatgaagatccaccaatgtggactcctttgtcgagtcgaatctagtgagaaagacacaacaaacccaagtaagttacatcaacgtcgagagtgttggctttcttaaggctcctataattttaacttgattccacggatcatgtatgtaagagagctctaccctttcattacttcttagcttcaatatttaatcaactgtttgat

SEQ ID NO: 80995 - DNA, 499 bp, Arabidopsis thaliana landsberg
cctaatgacccaaccacatgtgcaccttattataaaattgtataatttcgaagtttaaccatctgtattctgtaatttctggctaaagaccgacagaaactgcttaaactaatgaattgcacaggtatgttccgtcagcttctccaaattgtatgaattatttatggttctaacaacgtcttttcctctatcaacgacaggtttcacccatatgtcgtctccgccttttgatttatttgagtcctttactgaacctggaagtgggcctaaaattttctctctaattttattcttcacgttgacgacctccattgccgcagaattcactagggagtggataattttaagttacccttacatgaagtgttatttaaagcgtcgtaggcaacacagtaaacttgaaggaataaaactcttcgcaaaaaaaaactagtactcatcatccaggtggcactcctatctatggtagctgatcttatgctctctttgtttaaagagc

SEQ ID NO: 80996 - DNA, 557 bp, Arabidopsis thaliana landsberg
ccggcaaaaaaagtggcgatggcactaagtgaactcatcaccactatatatcccaaagacacgctggacattgtggtcgttggcaatgatgcctggagtattgagatcaaagacctgccttacctgcaggtggggccttatcataccaatacggtggcgggactggagctggccatggacctgctgcgcaggagaaagaacccgaacaagcagatattcatgatcacggatggcaagcccacctgtttgaagatcggcaaaaaatattacaagaacagttttggcctcgaccgtaaagtggtgaaccgctgtattaaccttgcagcacaatgtaaaaagctgaagatacccatcactactttcatgatcgcatcagacccatacctgcagagctttgtacaggaatttacggagatgaacaatggcaaagcattctttgcctccctcgacaaactcggcgccttcatctttcgcgacttcgaaagcggcaaaaagaaaacagtgtattaactggtgagtagtgagtggtgattagtgagtaactactcactactcac

SEQ ID NO: 80997 - DNA, 598 bp, Arabidopsis thaliana landsberg
cttttctccggaacggcatggtcatttgttgcctaaacttttactaatataaaaaaaggacacataatcataaaaactggtagcatatggagacagcaataatttggtgatataagaaaacatacgacagatataagcaatcaaacatgtcgtctattctttggtgcgctctctaaaattcaaaatagttaagtattatagtatcgactttaaaattctgttcttttacaatcacaagattaccacttataatcaaaatggtaatcttgaggatttgtgatttaactattggtgttacttgtcattggtgtgtcatcacctgaattcataaaatttctattgtatgttattgacaaaacaaattattgtatattgaagtcttttatcttcttttttttatcttctttttattggtataaaacatgatgtctttaaaattttactaatagtgattctcatatttaatcaaatcactagtgatcgttagaaaaatgattatgaattttgtatttgtaagaatataaataatttggtgctataataagatattagcgtaaaacatgatgttatttgcaaatcatagcgatatatctaatta

SEQ ID NO: 80998 - DNA, 467 bp, Arabidopsis thaliana landsberg
ccgcacatccaggtccgatttctatggttcaatcacaatcttactaaacttgattcacttaaccggttaaaatttttgttgattggggcaattttggttttggatgttgttgcagaggaaattgagaaattattccctaatttatttggacaaccatcagctttattggttcctaaccaatctaatgaagtttcatcggatcaaaagcttaagattggtgttgtgttgtctggtggtcaagcacctggaggacacaatgttatatgtggaatctttggttagtagacatttgttcctttgtgcaaatttttcattttcaggctttaaaaacttgatttgtgattgtatttttgttgttggtttgatagattacttgcaagaatatgcaagaggaagtagtctgtttggttttcgtggcggtccagctggaatcatgaaggggaaatatattgagcttacttctgagt

SEQ ID NO: 80999 - DNA, 401 bp, Arabidopsis thaliana landsberg
  unsure (1)..(401): unsure at all n locations
atgagccaacagcgatcgcccgttcgtgcatgtcgattgcgctaactagcctttggaccttatcgcgagcgagttgaccgaacacgagaagggcgcctttacctgggcccaaggtgcgaggcccggactgaacgaagacgcagaagaaggtaccaccgtcctggaaaaactgggcgagaagccccaggccttacagnnnnnnnnnnnnnnnnnnnnnnaacgacgtgaagagagacaggctaggaacgacacgtgaacgggttgtgccggcacggacagaggccgcgaccaaccgagacctgtattagatggagctcgatgggaaatcccgaactgaaatttactaccggcacaacgaatagaccatccttaagccgccgatgcgtgaacgggggggcgaa

SEQ ID NO: 81000 - DNA, 220 bp, Arabidopsis thaliana landsberg
accatataagaatccaatagttttcatattcattggattgttaattatttgacttctctataacaacacttttaaaaaggctgaatagagatacaataaagaaggacccggagcctccatgggttatgaccgggggatatttcatatgatggagaaagatgggtaattattcttggtatatcgcccttccataatacaaactcgaagtccaaccttcttc

SEQ ID NO: 81001 - DNA, 472 bp, Arabidopsis thaliana landsberg
  unsure (1)..(472): unsure at all n locations
gtcaaaccgagcagacggcggcgacgacccagacgcttacccattgcagatcgatatcggtggccatgagtggaaccggtaacagacttgttgtggcgctgtatcaaagtgaaacagctcgccttataggtttcacaactcgtgcnnnnnnnnnnnnnnnnnnnnnnnnnnnnnnnnnnnnngggaatttggagacgcgcgcacgaaaaaggcgtgacccggaaggtcacgcctttttcgtgtatttagaaaggcttatgcttactggccgctgaaggtttcgctggcgaaggcgttttgcatcatggccatctgtttcatgaccggattgaccgcaatctcttcggcctctccatcgatgaacatgcgtttgtccatatgcgagatgcgctcataaagaccattggtacggtccatcaggttcagcaggcctccgggcagggcctggggcttttccgcgccatccgcattc

SEQ ID NO: 81002 - DNA, 493 bp, Arabidopsis thaliana landsberg
tccgagaaaattttgataaaattgttggttggggtgaaattgtttaggagtataacgttcgtgctgttgcacctacggataagaactacttcattggtggatttgtgactggtcttcctaatttcaagaaaggttctgagaataaaaggtctcttcgtaaagatataccgcaaggtcgttagtttacagatgcacatcgggtaattctgtgtttgttttggatcattaccaatcattttgatggcttttacaatgagttttgtgtggattctaatttttgtaggagaagttaaagaacataccttggatcttggaagatgaaactggacagtttcagtaccagggacatcttgaaggctctcagtctgctacttactatctcttagtgatgcagaacaaagagtttgttgcgattcctgctggatcttggtatggagaatcaaaataccgttgcttcttctgttgatgtattacccgaattctgattattttt

SEQ ID NO: 81003 - DNA, 208 bp, Arabidopsis thaliana landsberg
aaaaaaaaaataaaaaaacaacacacaaaccaaaaaaccaaaacaaacacacaaacaaacaacccacaaacaaaaaaaaaaaaaaaacgcaacacgcaacaaacacaaacaccaacacccataaatacaaaaaaaaaaaaccacaaaaaacaaaaaaccaaacaaaaaaaaaaaaaacaaacaatccccccaacaacttaaaaaaaac

SEQ ID NO: 81004 - DNA, 448 bp, Arabidopsis thaliana landsberg
ttatgtgtgattatgaggttgtgagtgaagatctatacaacttcttcagacacacttgaggacactccaccatcatatatatggatcgacctgaaatccagggaagttacaagtttgtcaaatgggtctaatataggtgctgactttacgtctaagatgattgttaatggatctgttgcggtatctgctacacgatccccacagagagcttataattattctaatggagttgttggagatcaaattccccttaactgatttggggatatcctaagatgagtttattactgccgggttgtcatacaataaggcagacgattcttactattggtttggcattagaatcttggatgaaaattataacttggggtatagactttataaatctgtaggggatttggagcattttgtggtccaaaatgctgatctagatagtcggtacatccct

SEQ ID NO: 81005 - DNA, 590 bp, Arabidopsis thaliana landsberg
  unsure (1)..(590): unsure at all n locations
ctctgtggcctctggcccaggggcgagtcggcgtccgttacaatttctctggatgctgctgctgctgctccgggtcttggtggtgctggacacttctcattggcnnnnnnnnnnnnnnnnnnnnnnnnnnnnnnnnnnnnnnnnnnnnnnnnnnnnnaaccgctggtggctgcccctcgtgcaccttcctccgaccgccatctaacatttgcttcctcggtcttggccaatgtcaagcagtggatcagacgatcatcgcggcatggcactcactcgatccctcgggtgcactcatcagcagccaggttatggactcaacgttgtcgctctgtgctgctctacataatggcggcgcttacagcggaaccagtgatggacgcgaacgccgtgattgcccacctctgtgcgttatggatactacctggcgaagtatttgcaatcccatcccgtggtggcggtgcgcaaaagcggaatagaagttggatcaatggagtgcatcgacggctttgagacaggagtttggtcactcgtatgcttacccagatatgtgagccgacaacatgatcgtctgattcgccactggagcaggg

SEQ ID NO: 81006 - DNA, 623 bp, Arabidopsis thaliana landsberg
ctccctgcatccaattagtttcagataaagacaatattatttaatatttataaactagattttctactttgattgtgaggttcggccattttgcatatgagaaccgggtcttgatccgtggattaggcagttccaatctgtgtacttaacctacggcgtgtgtccccttgtaggagttcttcattgccgatggggagggacttcctcgttcactagttgagcaagaagcgaaacaggcgaaagagatcctcgacttgtactctctcgaggtaaatatattttgctcacttgcaaattgcaaacttagttcctttcttagaaattatgagataccaaagtgttacggattatgtccgttgtggcagagcgatatgctaattcagatgctaatgactgcgagcgagctcatcaacatgggggtgagttcagagcagcggcgcttggaggatgcacaaactcttgttagagttctttgccacaagaaagatcgtaacgcctccaaattcttaaagcgccagtacgagcttcctatgtcaacaggtaaaaacacacacacacacgagaacttggaccatctttaaataagagataaatttcattaagatcattacaagtcagagagc

SEQ ID NO: 81007 - DNA, 562 bp, Arabidopsis thaliana landsberg
  unsure (1)..(562): unsure at all n locations
agtgtcgccaaccgcggccagcacggtttttacagtctccatcgattttttattgccgggagctgcataaaatccattggcgccgtaggtattatttacataacctgccattacattgaactggtgtagcgaatcgtnnnnnnnnnnnnnnnnnnnnnnnnnnctgtaattatcgtaagcggtattataccggtatccgttcccctggttgcggccagcagagagggtttgactggcaccaccgttcacaatggaacnnnnnnnnnnnnnnnnnnnnnnnnnnnnnnnnnnnnnnnnnnnnnnnnnnnnnnnnnnnnnnnnnnnnnnnnnnnnnnnnnnnnnnnnnnnnnnnnnnnnnnnnnnnnnnnnnnnnnnnnnnnnnncattcagcgcattaatgccatataccctggctgctgcacctctcagcacttcaatatgatctatatctgccagggaaacaggcaggttcataatattatggccggtctgcggatccgtgattttcacaccattcagcagaatgagggtctgatcanaagtacctccgtcgatgctgata

SEQ ID NO: 81008 - DNA, 524 bp, Arabidopsis thaliana landsberg
gcggactattacgacgaaaattatctttcatccagagccgtaaaatttcatgtttcgacagatgtgggctataatgccgggtttgtcgacggctacaatgcagcgaattttaatagcccttattacggcgggataggctcctattggcctggcagctatgcaggcttatcgctcaacttcggttacggggggttcagaatgcgatcttctttcggattcggctttcgatcgaagatgggatattcaccgtggggatattcgccctggggctactgcagcatgctgagctatggttatgatccttaatacagcccctggggatacagtacgtggggatctaacaccatgtacggctggcgtggaagctactacgatggcttctatggcgggtaccgctattcactcatgggcttacagccgtgcggtgatcgcgattaacagctctgacagaagctatacgagaacctacggaccgtgagtggcttatgccagcagaaaccgcagtagcgaacgttacaactcta

SEQ ID NO: 81009 - DNA, 404 bp, Arabidopsis thaliana landsberg
  unsure (1)..(404): unsure at all n locations
agaggacatggggaccttctacttcaactggctctattgcggtttcgcgctttaggtttcaattgccgggagcaatgacgtgtacaccatcggggtgtnnnnnnnnnnnnnnnnnnnnnnnnnnnnnnnnnnnnncaaatacctgctggtttgcggcctttgtcgctaggacgtaaaaggccgttatctaccgaggacgacgttcatcttcatcgacgcctccagacggttcatcaacaatctaacagcgtagctggtgcattatggtgctggagcgggtgagctttcgctaggatcatgactttatttactccgattcgactgccatgaccgataaagacactgtggtcttccgcctggagctcgtgaagatagtcgtcgaatacacgaagcacgccgaatag

SEQ ID NO: 81010 - DNA, 551 bp, Arabidopsis thaliana landsberg
atatcacttcatgcttatgttttaagtcttctttggccttgttactagcatgatgtcaaacatactagtggtggcagaggaaggcgaggtagaggccgcggacgaagtagtggaagaacaggaagtgggctgtctctaaaatttgaagaagatttagaagacggttctcccgaaagcagcaggaccccgtctcccgaaaacgggagcctttctcacgacgatacatcttggaagaaagttgcatcacacaacaatcatcatagtagtaactcagaggtaaaagtaaggaacttcgatcttaatgttgaattagatgagaatggagacactgctacatggctggaaacacagctagagagaagtccagattacccgttggagattaacgaaatgaaaatagatcctgatgatcaacaacaggctagtgctagtgacgaggaagattatgatgaagaaagcatagaccaagagtgaaagagtttcagtttaggtgaaatgacttaaagctaaaggtaggagaaagaaaacaacaacttatgaattgacacact

SEQ ID NO: 81011 - DNA, 293 bp, Arabidopsis thaliana landsberg
ttgggggtacgctcatttagcaaacgagtgccttcattctctctttcacgtctccgttatggctgagttagcgtattcgtttttaaaaggcaacgccgttcacaaaaaaggtacacaggtttacgcggcggccatcaaatcattcccgcgcgagccatttaggcgcgaaaaccagcctcttccggatctaacttggcaccctgtaaccgtcccgtccgcacccggaccagaaaaaaataaggaaatcgtcgcctgttaactgacgcctaagccaaatgccgaaacctcatcgc

SEQ ID NO: 81012 - DNA, 408 bp, Arabidopsis thaliana landsberg
taacaactaacaaccaacagagatagaatggaaacacatcagattcaaggtgttaatgataaaccatctcacctgaagcttgactggactggagtaaacacgaacggtgttggattcagtcaattttgtaaccaaagggaatttattactgttcagaaattccactatcttctcggcttgacaaggtccatctgcatggccagtacataagattcataatttggacaatagtataccacacaataggtttctattactgttcacaatacgtttttgcatactccaaaacaaaattgacaaataaccactttttcatacttataaccaattcttaggatgtaaataagaggggaaagtttatgatgataacacgaacctattaacatgtaggagcttaccatatgaagt

SEQ ID NO: 81013 - DNA, 499 bp, Arabidopsis thaliana landsberg
cgacaaatttaatgaacatgggttccttttcttaaaggaaatctttccttcaaaaccgtaaagtatgttcatatccctaaagtaatatcctcgaggcataaagggtacatttgagtttattggtaaaaaccgtaaaaaatcatatgtctagctagaaacatgtttttttcattttattaacgtaccaataaaagctgataaacatatcatgattgatagaaaccaatagctacaagagaggactaacgtattttctagtccaaagatttgaagttctaaagatccaaaacacaaaaagcttggattggattgaaatgtatgtgaaagtaacatcgtaatcttgaatctatatgacataaaacaatcttataattaaagataatatatgctcttagatcttgtacccttaagaatagacacactcttaacaacttgtcactttctacaatttatttcccttagtcaatgcatttttttattttatcccacgttttttttt

SEQ ID NO: 81014 - DNA, 467 bp, Arabidopsis thaliana landsberg
agttgcattgctttgtggtgttttgaatcctttcagttaaagcacactaatagagtgtgcgggcgcggtgaatgatagcactctgcatcctggtggcattcagatgacttcacttagtattatgaaagtgggaagggtctttattggggtttggatatggtaatggctattcctggtggtcacgttgactatatctggaataaaccaaaatccagaattggagggctcacctgtgatccacatcttgaggctggaagacacaagtttctgacctggatcttggcatggagatcttgatgcaaagtgactatgaaaagattaggctaagacaagatagtacacacctttaatcccaggagactaaagccaagagatctctgagttcaaggtcagcctgagataaatccctgttccagggattgtagtacacacctttaatcttggccacaccttctgagggagaccta

SEQ ID NO: 81015 - DNA, 611 bp, Arabidopsis thaliana landsberg
  unsure (1)..(611): unsure at all n locations
agctcttcttcaatcccaactgataaacctgatcccatattttctaagcttggttaaagcgacccaataacaaagtacggttaaacgttttgattgggctaacttgggcttttcaaaacaaagcccatattttaaatagacaaatttggcccactttagtcggttgaaaaatcttttcccctatcgaagcgtgtctctgatttttcgctctcgatcgattctcgtctctctctctttcatcgcagcgaataatccaaatcgaaagcaatttctctcgacgaagaaaagagaagcaatcggagtctgtggaggtaaagaagtacacgatcaaatttcaagtcagagtttcggggaaaaaaaaggaatgggggatcatctggtgagagctgaggaattcgagaagaaagctgagaaaaagctcaatggatggggaatattcggatctaagtacgaggatgnnnnnnnnnnnnnnnnnnnnnnnnnnnnnnnnnnnnnnnnnnnnnnnnnatgtaatttccataaataaaatttctttgcttttgattattgnnnnnnnnnnnnnnnnnnnnnttttttttattggtgtctttgggatgatgaggaagaaaaaa

SEQ ID NO: 81016 - DNA, 535 bp, Arabidopsis thaliana landsberg
  unsure (1)..(535): unsure at all n locations
aaaggtttcagttatttgtagaagtttaattgttatttcttgtttaaacgcgctgatgtgagcattattcaaagtgtagggttccgaatgttgaatatcatttatgctttgcaattacaacactgtaaactacacgtgtcgttttctaaataagaaaataagattgtcatgtacccaaaatataaaatcgtcacggaacaagaagctnnnnnnnnnnnnnnnnnnnnnnnnnnnnnnnnnnnnnnnnnnnnnnnnnnnnnnnnnncagggctgtctctatcatcatcatcatcatcatctctattttcttattccatacaataatttaataaataaccacanaaattcaatgaacgcacataaaatatcttataatctatctataaaaaccaatctctgtgtacaatcctttatctttttctttggtcatcacctgcaagcataaaaattctcctgaatatcatcggtatatactttttttcattaatagtttaattaattattctaaggggggtttcccctcaaattctagtag

SEQ ID NO: 81017 - DNA, 559 bp, Arabidopsis thaliana landsberg
  unsure (1)..(559): unsure at all n locations
tttttatattatatgcttataatattttattatttatcattttatgtggtaactcgggcagcagctaatctggggagggaaaaatttgtaggtacaaatttaaacacattaaactaaagatttgaagtaaaatcgagagataaataatccaacagaagtaaaaatttaactagaagactaacaaattttacacattgctattagtcagctaccacctctccaccaccgctgaatatatatttagaaaacgtcgtactctttgtatatagaaaacgtcatactccaccaaactatggtataggagggagttttatctggactatttaaaacaacgaaattacctacaacttcatatatatgctgttatatctccagatcaccgattgaattacgactgaacaaagaaaataactatggtgtacatattttctaagggtggccacgggacgtgtacttttgaattttgagctatcctttatttaatacgatctttatgggtactaattgtttttacttttacnttatccgtaaattacagatacttcgtaaaaatagtgat

SEQ ID NO: 81018 - DNA, 588 bp, Arabidopsis thaliana landsberg
  unsure (1)..(588): unsure at all n locations
cttatatataacttgaagagacgacatattaagaattggttttttttagtcccaccacctcatgcttcattccggggtggttcaaaatgaatatgaaaataaaaacgatttttttatgaacaaagaacaaagaattgagaccagaggtaactattggaagcactatatattaatcttagcagcttcagtggagcgtataaaaccgcaagtataggctaggcaccttaacaatgtcgaaaaagtccctcagaaaaatctcttgggttgccttggattggtagccacagtccaatactttgagcatgtttctaactgcaacatcatgcatcccaacaattgcataccacctgaacagataaaattatagcaagttttagaccacaaatatctaaacttcacatcttatgagacttaaattgaccatatccaaaacttactgtccaatatgaaaatataaatgatctttgatatggctccatgtagttgatttataaacagagattgcacttttgtatgtacgaattgcatggttaacctggaaaaaggcanacaatatgtgttctaaagaatgcaacgcatgtacaaagc

SEQ ID NO: 81019 - DNA, 450 bp, Arabidopsis thaliana landsberg
  unsure (1)..(450): unsure at all n locations
tgccgctggcgacgatgcgacagctgcggccatgcatgctttctttcacgcgcgcacgcgccatcgcttcggcagggcggcgacgcaatcgggtcgccactgcgcatggnnnnnnnnnnnnnnnnnnnnnnnnnnnnnnnatccatccatcgcgccagtagcgtttccacagcgccggctcttccttgatgcgccacagccattccatgccgatgcgtcccacccaggaaggcgcgcggctgaccgtgccggcaacgaaattgacaaccgcaccgagatgactgacgaccggcacttgcaggtgcgacagattgcgttctatccatgcctgcccctttttcgcgccgagcgcgacgacgaggaaatcngcatcgctggcgttgatcgcatctatcgtttccgcatcgctcattttctcgacgctggcaaagccagcgaacgatagccgac

SEQ ID NO: 81020 - DNA, 547 bp, Arabidopsis thaliana landsberg
  unsure (1)..(547): unsure at all n locations
ctgcctcagcatcggctctcttccactgcgtttcagagccacctcnnnnnnnnnnnnnnnnnnnnnnnnnnnnnnnnnnnnnnnnnnnnnnnnnnnnnnnnnaggtggcgaccgggctatagtatactgatacggtatgaaaaacaaacaatattacatgatcgcttccattatcttctcggtagtggcgatcgctcatcttggacgcatattcttcatgctcgatgcgacgatcggaggctactcagtgccattctggatgagcggagttgcagtagtactcgcgggctaccttgccacgcgaggattcatggcagcacgcaagctctaagcggctgcacgggttcttatcctggaacggtggatataattcggcttctttggtatcctctctcttgccgtagtggaacggtatcagaaaggaagccatcttagctcagctggtagagcaccaccatggtaaggtggggggtccccggttcaatcccgggagatggctcacgacataaaaaaacaacacctgcgtgttggttttttatgtcgtgag

SEQ ID NO: 81021 - DNA, 540 bp, Arabidopsis thaliana landsberg
  unsure (1)..(540): unsure at all n locations
gatagcggcagctttgaaaaagtagtatcctccnnnnnnnnnnnnnnnnnnnnnnnnnnnnnnnnnnnnnnnnnnnnnnnnnnnnnnnnnnnnnnnnnnnnnnnnncatcgatgatcaccgatgtgtcctgggctgctgcatatccacaccacaaaagcgctatgaaaaaatagctcctgcgcattatttcgggaacaccattttataatccactttcacttttcctttgctgatatcattcagcttgccctgcagcatcttgcggcgcaggggtttcaggtagtcgatgaacagcttgccttcaatatgatcatattcatgttgtatgatgcgcgccgtaataccatggaaggtttccgtatgcgcaacaaactgttcatccacgtaacggatagtaaccgcagacggcctgtacacatcttccctgatcctgggaatactcaggcatccttcattatatccccattcctcaccatcgagttcttcaatatgtgcgttgatgaagactttctttacgcccggcgcatcggggtatacat

SEQ ID NO: 81022 - DNA, 421 bp, Arabidopsis thaliana landsberg
aaattactaagaaaatgcactgtcagagtcgccaaggaatatgtctgctactagaaagatttcaaacctctaagacaagattttttgcattctgtataaacttcattaaagcattgctgtgatggctgtcattctttaaggaaccttaaaagcaaattccacatgcggagaatgtgggtgactgacctatattccttccgcattaatacgatatctattagggaatgtatcattgaagacaaatgaactacaaaagatttttgtgcgctgttacttttcatagcccaagtaagacttgtaaagctctaacgtatgttgcagtggttcattactgcaccacataatttgggtatgcggttagatatgaggttcgcgtacattgtgttaaggctcactgccaaggtagcctccattgatactt

SEQ ID NO: 81023 - DNA, 595 bp, Arabidopsis thaliana landsberg
tttacatgcttaccattggtctccaattgcttcgaataaattgtatgataacattttgtttttgtttaaattatatactactagagtactaggggtgttttctttgatttcagacttttgtttatgatttgttacttgtttcacataagaataattggtcaaatttatttggtctctctttctcgcaaatcatatacaatatacaactctaatcttctccaccaaactctaatcttgttcatctttttttattcaaatagtttagaaagttcaaatatactaatctttatcaaagaataatctttagtcaaattttaataatgaaatcaaatatcttacaaaatggaaaaacaaaaatatgggtgtttgatttttacaaaacaaagatggaagagcaagtcagaagtcaaaatagctcgaagatgtaagtgacggcgcctgaatactcttggctggtagatttcacctacctcatttttttcatatatctcaaacgtggaatcgctgttactcagtttttatatataaaaataaacactcgctcttcttcattcaaactcatttccaaaatttcacaaagtttttcaaatggcga

SEQ ID NO: 81024 - DNA, 458 bp, Arabidopsis thaliana landsberg
aaaatctttcttgtaaaacatctaaaaattattcttgtagaatctatgaggaatatcattgaagataatagtgtgaaattatatatatatatatagaaatatataaagtaggatttttttctgtatacaaatatacgtttccaattttatcaaaaactgtaaagatttttttctttgtcagtacctgctaaacttgttaattttatttaaaaaaaatcaaattacaattcttctataatcattttaaattccatttctttataccacaaaagattatattgcctttatcgtctttggtgtgtatgcgtgaatatatttatttattttcttttctttcattctctttttaaagaactctatacatgaaataaggaacaaacaatatacacatgtactaacgtatataaataatatcatcaatatctatccaaaaattggatttcatggttgacggggcc

SEQ ID NO: 81025 - DNA, 541 bp, Arabidopsis thaliana landsberg
  unsure (1)..(541): unsure at all n locations
ccccacgatgacgcccagcgacgaggcgatggcgtcgtttgcgttggagatgggggcgttggcgacgtttcggctggcgccggtcggcgtcttcttcggcgagccgggggagaccgtcgacgacccgtatttcgggggcgccggaccggcccgcagcggctgcctcgagtgcggtgagtgcatgaccggctgccggcacaacgcgaagaacacgctgccgaagaactacctccacctcgcggagagcgccggcgccgtcgtgcttccgctcacgacagtcacgcgggtcgccccgcgcgactccggcgggtacgacgtcactgtggtgccgactcgtgccaaggtcgcgcggggccggcggtcgcgggtgctcagcgccgaccaggtcgtgctcgccgcgtccgccctcggcacgcagcggctgctgcaccgcatgcgcgacgagggcgctctgcccggtctctccgaccggctcggncacctcacccgcacgaactctgagtcgatcatcggcgcggtcgcccacgagcgacgtgccgac

SEQ ID NO: 81026 - DNA, 617 bp, Arabidopsis thaliana landsberg
  unsure (1)..(617): unsure at all n locations
ggccgacaccagcgatgctttctggcgtacctaaaagtaaggagcacaaaaatagttgattgataccgacatccagtaatgaaccaccgccgagagagggattaaataacctgcctccaggatcgaagggggctgggaacccgaagtctgctttgacatatcggagctcgcccaaaatgccactttgaacattttccagaatagaaaccgtcatggggataaaccgggtccaaagggcttccattaaaaatacctgcttattttgggataaggcgagtaaaatctgggtctgtttggcgtcaagtgtaagcggtttttctgaaaggacgggcttattattttccaggcatgccttagctaattcaaaatggtatgcgtggggtgtggcaatatagataacatctacaagcggatcctgcatcaggcttagataatcgctgtaatacttttctgctttaaatgtctgggcaaagtcctgggcacggactntatctctggaagctacgccgtataacctggagtctgttgtaagcgctaaggccgcggcgaactctntagcaattctacctggtccaagtatgccccaattataaaatttctttgccatataagtctgt

SEQ ID NO: 81027 - DNA, 584 bp, Arabidopsis thaliana landsberg
accgcgtgccgtctagcgccttgcagatctcgccggacagcttcaccgaatcgatcagatccttgccggttatttcataatcgacgccgagcgcgcaccagcgcatcgcccagtccggcttccactgcagcttgcagcgtccgccggtgaccggcgtcgtcacgctctctttggtctccggatcttcgtaggtgatggtgcccgctttcgcgtcatgcgccgtcaccggcacctgcagcacgatgcccgtcttcggatcgatcggcaggaacggcgaataggtcgaggcgcgttcctcgcgcaacgacggcagcatgatcgccatcaccttgtcgaagcgcgcgagcagcgtcagcaacgccgcgtcgaagcggcccgaggtgtagcactgggtcgaggacaggaattcgtagtcgaagccgaaatgatcgaggaaggcacgcagccgcgcattgttgtgctcgccgaagctcggatgggtgccgaacgggtcgcgcaccttggtcagcggcttgccgagatcgagcgccagcatctccttgttccgcacgttgtccgggactatccgcaatccgtccatgtcg

SEQ ID NO: 81028 - DNA, 338 bp, Arabidopsis thaliana landsberg
gaccgcccgcacgcggtgcggatggacgactacatgatcggagggaagacgaggttccgcgtggaccgaaagggcgtgggcggcgccatgaggggcgagccgacgctcaccgtggacaccctggccaaccggtcctttatgagccgctgcgtttaccggctggactgagaccacggggagagagagaaccaggacgagggcaccggcgattctactcccgcgaacacgcacgagaacgcgcacggcgtcgacccggcgtaccgggtcgtctacttaaacagcgacccgatcatgctgacgcacgagagtgcgctgatgaccaggagacgctagggcga

SEQ ID NO: 81029 - DNA, 571 bp, Arabidopsis thaliana landsberg
ccgcgacacttctcaggtttccagatttgccaaacaacgaagcatcgaaagaatttgtttcaaagaccgcggccaggccaggccccagcgttttcaaaacattttcctgtgaattagaagtcacaatcgccaggagaaaccctgcctgtttcagcctcagcagcatttcaggtatgccagggaataacttgatctggccgcaatcgcgagcggccagctgccgcatgcgccgggcaacccagggaagcttccaggcggacaatttgatgaactcgaacaattcgcgcgtgggaagcgcccgcgctcgttcgcggtccgactccgggatggcgttgaagccgaactcgccggaaatctcgttcatggcgcgccagcaccactcgccggaatcagccagcgttccgtcaaagtcgaagatggcaagcttgcaactcaagcggcgcaaccatagctcaaaagagaaagcccgaaaatgaaaacgtgccatggagggcaaagcgcgaggcacccaacgattaaacgagcttctaaggcttgggaatgcttatgcgctttagagtggtctggaacc

SEQ ID NO: 81030 - DNA, 428 bp, Arabidopsis thaliana landsberg
  unsure (1)..(428): unsure at all n locations
aataaaggacttttgtccggattagtgacctgtctcgtactctattgnggagagccttcaatcctatggataactgtgaggattaaattcaatggatctactttcaccgtattttgatcctggctgaacgcaaatatgacttcagtatcactgaccctatgtacgctgaactcgaagtcccttgcataaccatgtctcgacaaatggtattgctgtccatccagatagcaagaattgtctttcagaccgccaacgatgggaaataataccggactatgtctagcccaatactgaaggtcgtcgctcnnnnnnnnnnnnnnnnnnnnnnnnntatttttaaagctttgtaattaaacgcccctaactgaaaacatggctgtgacatgttcattttcaaatgatatcatatgttttactcaaatgcctaa

SEQ ID NO: 81031 - DNA, 581 bp, Arabidopsis thaliana landsberg
  unsure (1)..(581): unsure at all n locations
aggcaagccatggtaatagataccctttgtgaccgaaaattggaagttagatttgacanaaacagagccgcttgatgggagtctactannnnnnnnnnnnnnnnnnnnnnnnnnnntctcacaaaagaaaaggtnnnnnnnnnnnnnnnnnnnnnnnnnnnnnnnnnnnnnnnnnnnnnnnnnnnnnnnnnnnnnnnnnnnnnnnnnnnnnnnnnnnnnnnnnnnnnnnnnnnnnnnnnnnnnnnnnnnnnnnnnnnnnnnnnnnnnnnnnnnnnnnnnnnnnnnnnnnnnnnnnnnnnnnnnnnnnnnnnnnnnnnnnnnnnnnnnnnnnnnnnnnnnnnnnnnnnnnnnnnnnnnnnnnnnnnnnnnnnnnnnnnnnnnnnnnnnnnnnnnnnnnnnnnnnnnnnnnnnnnnnnnnnnnnnnnnnnnnnnnnnnnnnnnnnnnnnnnnnnnnnnnnnnnnnnnnnnnnnnnnnnnnnnnnnnnnnnnnnnnnnnnnnnnnnnnnnnnnnnnnnnnnnnnnnnnnnnnnnnnnnnnnnnnnnnnnnnnnnnnnnnnnnnnnnnnnnnnnnnnnnnnnnnn

SEQ ID NO: 81032 - DNA, 135 bp, Arabidopsis thaliana landsberg
  unsure (1)..(135): unsure at all n locations
caaaaaaagtcatctaagcatcctgaacaaatcccaagcacacattttttttttttttaaaacaaaaaaaacaaatnacgatcagggttcaattataacctccatatcccccccataccttattctaaatcatac

SEQ ID NO: 81033 - DNA, 551 bp, Arabidopsis thaliana landsberg
  unsure (1)..(551): unsure at all n locations
tccgtaaaaaggcacggcttaacattaccgcgatagctgtagtaagaacgggctgcaaattctggaagatcgcgagcttattagtctccaacttctttaacccgaaaaaccaaagaaggtaattgactacagaggcaatgataccaagataaagcacttccagccaaatagccgtactgaacccggcaatgggttgcgtattcgtaattgtaagtgcaataggtagatagagaacggtgcccaggatcatgttcaatcctgttgttcgaagtgcaccgtacttctccactagtccttttccgagcagcgtatataaggaccacgcaatcaccgcaaggaagatcaaaatatttccgtgtgtgtgatcggaagcaagcgtagctccacgttcgaacataataatagaaactccgacaaaggccatgaggatacctaagatctttttccaggatggccttccctcttttgaaccgagtgtaaataggaataccaaggccggngtcattgcatacaagagtgcactattagtcggagtagtataacggagccct

SEQ ID NO: 81034 - DNA, 572 bp, Arabidopsis thaliana landsberg
  unsure (1)..(572): unsure at all n locations
taggggtctacttgttttaactatatggcgttataatattcagacataagtcaataatgtaaaagcaaacacgcgaatacattagcagacaaatgacaatgatgaaagtaatgttcatattaaattatgtctaacaatgttattagagaattggtcatcattaatattccacgtttttttaggttcttttcgctccccactaannnnnnnnnnnnnnnnnnnnnnnnnnnnnnnnnnnnnnnnnnnnnnnnnnnnnnnnnnnnacctgaagaataaattcttagcaaatttaactctctctttttttcattatatttttttgtttcaaattcatttttttgtataaataccccattatcgtaggtatttcttttgtatttatttaaatgtttccattgcaaaaaaaaaacgaaacaaaatggaattttagatttattagcgtaaaaataatcgataactggcaattgtaaggtgggggtgtttgcgagttgactacgaaccttgcaatagagagcaatatgattgatacaaatacggattaaaatacaaaaagaagatgaaatggaacaatc

SEQ ID NO: 81035 - DNA, 554 bp, Arabidopsis thaliana landsberg
gtttttggtcagactaatctggcacatgtgggtaaagcttctggtatagttctccaaagcatgtatttatttttggaatgataggaagtttccacatcttgttgttcaactctacctatccggaaggtgctgatggcttgatttgaaaatcagttggatcatgagtgagtaaccaataccttaaattaaccgtataatcccctcatgttgtataatttcacgatagtctatcatggattttcttgtgtgagagatgaatactctttatatgaatgtgatcatcatgatttattaaacgggatattagggtttcattccaaaagcggtatattccgttaatagaaatgaacttctctactttgttgatttgtgcaggggtaaggagactgatcggtctaggtggatgggttgctataacattattatgtatctgcttcctttttttatcacattcaaacccgcgagtagtgaagaccaaccataagattgtctctttcgagctttggcatataagatagattcctcactaaagtatctcgccttcataacccgag

SEQ ID NO: 81036 - DNA, 556 bp, Arabidopsis thaliana landsberg
ggcttgggttgtagctcaacagcatgttatggatcgctgagtttgagtttcatcactgccaataactatatacccgatcaggcaagtgaatgaatgagtagccccgggcagggtgctgctaatgaagggtaatgctctgtcatcttgggcaactgggtctgcctcttccagccaaggacaatcatgatattgcctactgcactgctggttctcacagattgttatggtagtctacagtttaaaaaattatatacaagaagtgccattcaatgtaaaggtgtgacattgtcaccaccaaaatttctctggctggtggtactggattctagagtctcctatcagtctcttgagaagatttttaaatcccgtacctagacaccaatttgggtcaattatgtaaattcagcttgataggccacaaaagggcaggatgtgagagcctggtgcgtgacgagggtggagatctattttctggggtcttcccgatcttctgataccttgatgctaccactggccttgcctgtgagggaggcacatgcatccagctggcaatatt

SEQ ID NO: 81037 - DNA, 483 bp, Arabidopsis thaliana landsberg
cctggacatcgacgccgcgccgctgatcgacaccggcgctatcgaccgccccatctaacccctcttgcacagcgcaacggccacggcgtaaaaatatatcgtggagcgatattcttttcacactttcaggttagcttaaggcttcgaccagactctggtcgcacccacaaacctccatctagggaaccgcctccgggcggcgctatcctttgcaaccagccttgcgccggctcgcacaggcatgtggacaatgcctggtcgccctcacgctcgccctcgtcgcaacccccgtccaggccgcgccggccgaacggttcgcggccatcgtcgtggacgccgaaaccggcgagacgctctacgcgcgacacgcggacgccaaacgctacccggcgtccctgaccaaggtcatgaccctcttcctggccttcgacgccatcgacgcgggtcgcgtgcgcctgaacgatcccgtgcgcatctctcccc

SEQ ID NO: 81038 - DNA, 546 bp, Arabidopsis thaliana landsberg
  unsure (1)..(546): unsure at all n locations
ggttcttatccatgcgtgccctttgatcaacgcttttttttttggtcaaagacnntccgttttttcactctggggaatatggtctcattatacatggagctgtgacatcacaacccactgtttnngaattgaaattgagaataccctgatgcaangncctcttctcttttctgaanntcggatagaattcattnnttctgaaagaaagtttgaccaatacctgttcttatnncaaaattgacttctttttgtcccttctattangnnaggtgttaccagaaaaatgtctnnngcaatcgagtataattagcttctaccgaacnnnnnnnnnnnnnnnnnnnnnnnnnnnnnnnnnnnnnnnnnnnnnnnnnnnnnnnnnnnnnnnnnnnnnnnnnnnnnnnnnnnnnnnnnnnnnnnnnnnnnnnnnnnnnnnnnnnnnnnnnnnnnnnnnnnnnnnnngacgaaggggtgataatagtattcttctcttanccaaaaaaagcatgtntttttttcttaccccaccgnncacgaaagaaaatgttt

SEQ ID NO: 81039 - DNA, 511 bp, Arabidopsis thaliana landsberg
  unsure (1)..(511): unsure at all n locations
annnnnnnnnnnnnnnnnnnnnnnnnnnacgtcgtcacaatataatagagaggagaaagatagtgccggaatnggtatatttttcgcatcaactgccttcttcacgcacgagccggcgttcatatacggggtaggtatggttgctcatgttttagctttgcgttccgtgtcgaggaccacgtaagttaagagatgcctaaacatcgatttttgactgaccaaaggatatcagaaactgaaaaaagccatcataccccacgcggacgtcgatgtgcttgacaatatccttgtcgctaagtcttggggaagaccattgctccaagaatggctgcgtgattctccggagtcaaccttgtctaacctaggcctgctggttcgatcgggagccaatatagatgcgaggaactctcatggacaaacatgtctgcatctttgtattgagtatgccgacaaaccgaacatggcccagcacctaccccgtgccatgnnnnnnnnnnnnnnnnntggagcc

SEQ ID NO: 81040 - DNA, 388 bp, Arabidopsis thaliana landsberg
  unsure (1)..(388): unsure at all n locations
tggtcatgtacagtttttactgttctaacgttggatactgtaaatacgaggatctagatgcaatttcaggatcttccccacccccccccccgctgcttntgttgaaccctgaaagtcatatcatctctcgctcgagtaaaagaagtggttgagagataagagaatcatgcaatgcacctgcactcagagatagatggagagagataccaaaaccttattggctaaagtaggcaagaggtcggaagaattaaccacaaaagacgtgctgaacatatttgcggataaagcttttccaaggggcagcttatcaccagtgaaaagtattgttacagaacaagaacctgtttctctgcataacttgtcagggagatctttgtaaaaaagaaat

SEQ ID NO: 81041 - DNA, 191 bp, Arabidopsis thaliana landsberg
ggatatagatatccatattatatcagagttatgaaagtatatctttgcattttttttttttatataatccattttttatgagaacaatattttctaaaactatggaggatatattatataaatttcgggagagaccatatcttacgactttaaagattaagatctctggattttcatgttcatatctatca

SEQ ID NO: 81042 - DNA, 360 bp, Arabidopsis thaliana landsberg
agagagttataatgtaaaaattcgctttcctattctttttactttttttttattttttttttatttttcatgttgcccaaggaaagtaatttttaaaacgacaatggttttatgatttggccttctattaaatttctggccattggttttaggttacatcagtatggatatggattatagtaatcaattcagcaaaataaaatttcattttctgtggtaatgggagatttggaaaaggagcgcaccactttacactattcaatatttataactctatatatgacatggctctatacatctccacattaactatatatatatatattatttacttctacatattattttctctatatatcc

SEQ ID NO: 81043 - DNA, 127 bp, Arabidopsis thaliana landsberg
  unsure (1)..(127): unsure at all n locations
gaaaaaaacaaccccaaaagggaagacaaacgaaaccaaaacaagnggaaaaacagacaccgaaaaggaaaaagcaaaacgaagcaaacacccaaagaaaggagacggcacgggaccaacaaaaaag

SEQ ID NO: 81044 - DNA, 176 bp, Arabidopsis thaliana landsberg
ggtagtatattacgttggggtccttaagaaatctatcattgtacttgtaaaatcaatatataatatcacattccatgatcaaactcaatttaggggagccattttaaaaccccataggggcatttcaactcttgaatcaagcactagtagagttttctcctgattaaccaaaatat

SEQ ID NO: 81045 - DNA, 679 bp, Arabidopsis thaliana landsberg
  unsure (1)..(679): unsure at all n locations
nnnnnnnnnnnnnnnnnnnnnnnnnnnnnnnnnnnnnnnnnnnnnnnnnnnnnnnnnnnnnnnnnnnnnnnnnnnnnnnnnnnnnnnnnnnnnnnnnnnnnnnnnnnnnnnnnnnnnnnnnnnnnnnnnnnnnnnnnnnnnnnnnnnnnnnnnnnnnnnnnnnnnnnnnnnnnnnnnnnnnnnnnnnnnnnnnnnnnnnnnnnnnnnnnnnnnnnnnnnnnnnnnnnnnnnnnnnnnnnnnnnnnnnnnnnnnnnnnnnnnnnnnnnnnnnnnnnnnnnnnnnnnnnnnnnnnnnnnnnnnnnnnnnnnnnnnnnnnnnnnnnnnnnnnnnnnnnnnnnnnnnnnnnnnnnnnnnnnnnnnnnnnnnnnnnnnnnnnnnnnnnnnnnnnnnnnnnnnnnnnnnnnnnnnnnnnnnnnnnnnnnnnnnnnnnnnnnnnnnnnnnnnnnnnnnnnnnnnnnnnnnnnnnnnnnnnnnnnnnnnnnnnnnnnnnnnnnnnnnnnnnnnnnnnnnnnnnnnnnnnnnnnnnnnnnnnnnnnnnnnnnnnnnnnnnnnnnnnnnnnnnnnntttttgcgttcctgctaaaaaaatatctttttgcaagaataacaaagggcgttcatattttttgattaaaaaataacgacctcttttttgattaaaccattttttaaaaacaa

SEQ ID NO: 81046 - DNA, 146 bp, Arabidopsis thaliana landsberg
gtgtaaatatataaacagcattattagcattgaagaccacgtttctagtacaaaataacagagattcagtttcaactaaactaagacgtttgagacggtattgactcattaccaacataactcattatcacacggcggcgtacttt

SEQ ID NO: 81047 - DNA, 331 bp, Arabidopsis thaliana landsberg
  unsure (1)..(331): unsure at all n locations
gcgcggctggcgctggcggtccggtgtaccacacattgnctacgtcccggctcatcccagcattcggtgtggtcgagcgagtaggtgccggtgatctcgccgatggcctcggttgagtgcgtgaccaggttcagcgtgccgaacgccagagcgagcgagcacacgatcagagatgtgaccagcgcgagagcgcggagcgagttcgtcatgcccgtagtaaacacgtgttgtgagtttccgtcaaggggttgcacaacacgtgttgatgtgtttaaatggtcgtatcacagataccgcttaggaacttacgaaggttgcaatggtcaaggtt

SEQ ID NO: 81048 - DNA, 369 bp, Arabidopsis thaliana landsberg
gaaagctaatgatccccccacagacttgattgaatttttaaatcttaaattaaggtgacggtgattaatgataaaacgcaaaaccatttcgattataactcgtaacggtgatgatcgttaaaatatcaaaatttgcttttttttttgatattacaaaaatgcattatacatgaaagataaaagtattatcagaaacttaaaatcgaaaagatcattatcattcgtataagtaataaacaaaaaaggtagcagttagttctattctttaaagaaatcaaaagcaggacatgttacttataatacatatatagcttcaaagttgtacataaattattcatctgaacaaaaaacataaaaaagaaaaaagct

SEQ ID NO: 81049 - DNA, 228 bp, Arabidopsis thaliana landsberg
  unsure (1)..(228): unsure at all n locations
ggaaaanaaacccccccacaaagcaacaaaagacattattaaaaaaggaaaaaagaaagagccaaaaggaggcgaacaagcacagaccccgaaaagaaaaacacaacagacccaaggaagcacactcaaagccacacacgcgaaaacagaaggcgccacccaaacagaaaaagacaaaaaaagcccgaacaggggaagggcgaccccgaagaaaagagacaagaacga

SEQ ID NO: 81050 - DNA, 105 bp, Arabidopsis thaliana landsberg
aacgtatagaagttagttactaattctaaattaaaaattgttttattttattatcttaagaaaattatacaaggtattgctaattctaaaagaaaatgtcccccc

SEQ ID NO: 81051 - DNA, 604 bp, Arabidopsis thaliana landsberg
gactaattacataatcgagttcatggaattaataatatgaatcttgttagtgaaaaggcgtattcaaaagcttgttttgtttgtttgttttttcttcttcctacctttcatatgtatgcagagataaccaatcgtgccacgtaaaaacgtgtttcttcttcttcggaaaatttaaattaacttttcattatgctataaaagaaatacttttgtagacagaaaagtatgagcaaatgtcaatattttataactatcacgtgaaatccattaattgggcgaagcttcacacacgttttacaattggagggaaaacgaccgaactcaacatgactcataattaaacatagctagtggtgtgatcacatgataaagacaatgtaatgatgtattataggaccattggtattattattggtcaattctaattcgcctactagtaaacagagtagaatacctgaaatgaaatgcattaaaaacattgtgtctactagaaatataaagaataaaaccctattttcacacattaaatcgtttcgtataacaatatatacaaacgtttacctactttttttcaataaacacgacaaatttgacatctacaaac

SEQ ID NO: 81052 - DNA, 608 bp, Arabidopsis thaliana landsberg
cgaatgttagcaaaaaaaaaaaaaaaaaaaacgtttcttcttatgtattttcaatgctacccataatgcgcaacgttgggtttgtctataattatgtcggcatacaacttgtgacaagtgaaaaaggtaagatcgtaagagaatgcattatgcatgccgtctttctccattttcattacatttttgacctgtcactttcttttttgggcgaaatgttttcacgctaaactcaaagtatggcgcaattctttttcattaacgttacttatatagtacttgtttttagaattacgggttaaacttcatttagtaaatgagtttattatcgatttgactgctagaacctgcaaataagaatcgaattcaatcctaccacgtggagttcttttttttcagtctactttttctctcaatgaagtttaatgcgttagttgagagtatctataaaataattgaccctttttcattttaggataatgttttaatttaaataagttataccactctaaaatcagcaaaaaaaattgactaaaaaataaccgcacatacgaataataaacatttcggaacacacattccaagaccatgcagtgcaactaacaaatgtt

SEQ ID NO: 81053 - DNA, 549 bp, Arabidopsis thaliana landsberg
  unsure (1)..(549): unsure at all n locations
caatggcttttttctgacacaaaatttgatattgtgtggtaggtaaatctaacgggtattccacatggacttagcttcgaagagacaaaagagctatgggtccgagctgatcttgatggaaatggtgtcttcgactatgaagaacttaaggtaaataaaactaaaccaattggtacataacagaaatcacaaaccggtagctttgtttaaaacgtcaatcaagactctgatgtgttgtgttatgtaatgtcagaaaatttggaacatgacgatggtaaatcaacctggaaactgcaaagagagtgtgatggagagtaagaaagaagaaggagaagatgaagcaatcggattgaaagtgaataaagcaattttgtttccacatgaagcagagaaaggattgtggccggagaattacaatatatccgatcatgcttgtctcaccgtacaattctctccagtcaaaatgctttgtagctaaatttntgttaattacggctcttgtaaatgtaaagaagcaatgagattgagatttgcaatgagacatcttta

SEQ ID NO: 81054 - DNA, 469 bp, Arabidopsis thaliana landsberg
caccggcgaactcacttaaggaaaaaaaaggcttgatttttcttcttctcctctcattttttttgtcttcttcttcttctttgacaagctcattgctttgtctttgatcctgcttgtatcacgaattcggaggacaacccatttcgattctcgtatcgaatttcttgaatcaaagagacggcgggaatctcaaattcagaattttgctgggttgtcgtaaatccaaatgcggtctgagagaagactacaaattataagaagagcgaatcggagtctaacatcatcggatttgggagctacgactagatcgagaatcgaaaagcaatcatcgagatcggagaagaagaggaatcgcgtagggaggtgatgttgtttggtggggattgggggataaggcggttttattgggattcgattgatcttgatacaacagcggggctcgacgatcaaggatgcagccttacatatt

SEQ ID NO: 81055 - DNA, 684 bp, Arabidopsis thaliana landsberg
  unsure (1)..(684): unsure at all n locations
tgattaaactcaagaattataaccctctcgataaaggtacagagtcttatgaaaattttatttactatttttacctccagtcatctaactttgcttatataaaatagttattactcaatatgctccagtcacttaatttacaaaaacaaactgaaaattgtgcttttaattggaaaaagttcagactaaaattttaattgagacatcatatttgaaatatattagatactatttcaaagaatttataatttgtgctcttggttcaaccagattaaagatttgaatactgaaaaaatgcaaagttttcagcatttgcattctgcttcttttatccaaaagtggtggaagttttaaaaatggtgcaaaccatataggttttagaaaattatgactatgtttttattcaagtaacttcaacaaagtaacttacataaaattatttctaaaaataacttataatacaactacaataagcaataaattgaaaacacatacagatttatgattcaatggcaataaatagaaaattgacgaattaatttgttcttctctaacacaccaggtatttgttagctagctaggtggnttagattttgcttcttttcttttgaattntagggtttttatttctctgtcgatatgtttttcagatttctttaagataaaatatttatatatatttat

SEQ ID NO: 81056 - DNA, 577 bp, Arabidopsis thaliana landsberg
  unsure (1)..(577): unsure at all n locations
tcgggcctgcccgcagcaacgctgggcagttcaaaggattttcatgttggcgaatgggtcttggccgtaggcaagccattgtggcttgcctcaacagttaccgcgggaattgtaagcgcaaaaggcagacgcattggaattctggaagacaagtttccgatnnnnnnnnnnnnnnnnnnnnnnnnnnnnnnnnnnnnnnnnnnnnncggcggagcgctcgtaaacaaaaatggtgatcttgtaggaatcaattctgccattctcagtcgcacaggctcatacacaggatacgctttcgccattcctgtcgacatcgcccgcaaggtgtttgatgacctggtgaagtacggtatcgtgcagcaaggcttcatcggcggcggtatcgttgaatacaactacgagaatgccaagaagtacaacctcactacgaacgtgaagcaatataacggcgtgttgcttgaaagcgttgaaaagagcggacctnnnnnnnnnnnnnnnnnnnnnnnnnnnnnnnnnnnnnnnnnnnnnnnnnnnnnnnnnnnnnnntcccaaagcgcattcgaagaggaaatgagct

SEQ ID NO: 81057 - DNA, 586 bp, Arabidopsis thaliana landsberg
  unsure (1)..(586): unsure at all n locations
tggagtttaccnnnnnnnnnnnnnnnnnnggcgaaaaaatcaaaataaaagcaggtccgtttaaagtgtgcttgttggcgaaatgatatcatatcgttcaaataaacaactgattttgcgtttggacaacctggggtattcaatagttgtttacatggcaacgtcggtgatagaccggttttaaagaatgagggtactaatcttgttaggtgtatacctaaacaaggtttatataaaatattgataattaataagttgcgaccggttgatgtgacttacgtggcgaagctgtgagtaaacacaaattatgtgcaggattgccggaataatttccgaaaaattatctccagacgagatcagggaaaatgttgctgttatgtgtaatgccatgaagcatggggggccggacgataatggtatttacgcggacgaacaggctggcattgtactagggcaccgaaggctttcaataatagatttgagtgataaagggcatcagccgatgcctgatgtcggcaaacgggtatggataagttntaatggagaaatctacaattatcgtgagctaaaggaggaattgattaaa

SEQ ID NO: 81058 - DNA, 600 bp, Arabidopsis thaliana landsberg
  unsure (1)..(600): unsure at all n locations
ggatttattatcctcctttaactgcttatcaaagttacatccatggaatcttcctccgtttcttctttcctgaatctgttgctcttctaagctctcgtggtcacgaatcttatcttgggtaaatgatctgattcttcaattggttgcttgttgtgtaatnnnnnnnnnnnnnnnnnnnnnnnnnnnnnnnnnnnnnnnnnnnnnnnnnnnnnnnnnnnatcgtctgatgctttcatatttttcccagctgctctgtttttcgtgttggtgtaccataggaatcgaactaggggtggtaagagtgaagtggcttggcatattgctatgattctcttaaacccttgcttgatcctcattgatcacggtcattttcaggtttgtattgaccgctacctctattggtgttgtgattatgtatcctttttctatggttgtaagatgattctcattagaatttttatttgttatagtacaattgtatcagcttgngacttacagttggtgctattgctgcggtactatgtgagagcgaggatctcacttgtgtcttgttcagtctagccctcagccataaacaggtgagcttgggattncatttct

SEQ ID NO: 81059 - DNA, 454 bp, Arabidopsis thaliana landsberg
gctgtgtgtttgttatgtgcttgttttgtgtttcgcgtgttgattgctatgttacacatatgcagacaatgtgacgcgtgatgtgaagattgaaattgtgaaaggcaaagaggaccaatatgcacgatgtgttttcaatggtttgagctttccgtttgttttgctgttgttgcgttgatgatgtctgtatgtacagcgttttttccgtgatcgtatcaaagcgcagctggtacaaaaagcattagaaaagaaaacttgggctccactgctgccgtctgaacccctggtctgtctggtgtgttgggttgtgtctcattgtctgtatgattttgaggaattggacgagttgttgaacacgaaacctaacacgcatataagaaagggcacaatgcacaggtacacaatgatcaagagtgttttgtcatcgtcaaacaatgcacgtcatttcatggat

SEQ ID NO: 81060 - DNA, 484 bp, Arabidopsis thaliana landsberg
  unsure (1)..(484): unsure at all n locations
acaggaattaacttggcaaannnnnnnnnnnnnnnnnnnnnnnnnnnnnnnnnnnnnnnnnnnnnnnnnnnnnnnnnnnnnnnnnnnnnnnnnnnnnnnnnnnnnnnnnnnnnnnnnnnnnnnnnnnnnnnnnnnnnnnnnnnnnnnnnnnnnnnnnnnnnnnnnnnnnnnnnnnnnnnnnnnnnnnnnnnnnnnnnnnnnnnnnnnnnnnnnnnnnnnnnnnnnnnnnnnnnnnnnnnnnnnnnnnnnnnnnnnnnnnnnnnnnnnnnnnnnnnnnnnnnnnnnnnnnnnnnnnnnnnnnnnnnnnnnnnnnnnnnnnnnnnnnnnnnnnnnnnnnnnnnnnnnnnnnnnaagttcaaacttgatccacttttgactaccacctcactgaactacatgaatttgtgaaactcgatatttattatccttccaagcgaaaagtttttttttctacggagaattcagacccttaactccaccttaa

SEQ ID NO: 81061 - DNA, 537 bp, Arabidopsis thaliana landsberg
gcagctcgagcacgtcaatgatacatacgttggtttgatttttcgtcgtaaaatttcatgttcgtggaccgactgtaagggcgttatgagtgacctcagatagtggcgcatgtccgctaccatgaaggtgcgatattgaatccgaaagtcggtatgcgggaagtagggcagaaccgctacaacctgatcctggtaacggaaggctgtaatcaagggacatacggatttgcatcctcgaagatcatggagaagctccaattcgttctggatacgaattgggctgcttgtgacatacatcttcttcagcgccacaaagcgcgccttcttacttactccaaaagccccgtctaccctgcgccgcttggatggaggattatcccattcttcttgttcttgttctcgatcttgcgcctgaccgaaaatgtcccagccgttgtggtagtggttgtaaagtatgtcctcggccttgtacacggtagagaaagtcccttgattggacacaaatgtcagtcatcacatcacctatacagtgagata

SEQ ID NO: 81062 - DNA, 602 bp, Arabidopsis thaliana landsberg
aacttttgtacagataatatgaaacagaggatatatttgatgctttgttcccttgttgatatacttctcgagcagaagggggggtcacatatcagagatgctcttcattgtcttccttctgatccacaagatttgctgtttttgctcgggcaagctagttccaataatcaggaattggcttcttgccagtccgcagctctgctgattttccatacaagttcgatatacaatgacaggtgaattagctttttgataaacgcactaaggatcctgatttctttctcttccttatattattcttcattttttgcaggcttgcagatgataagctggttttagcttctttggagcaatacattattctaaacaagacaagtttaatatgtgcgatctctgattctccagctctgctcaacctagtgaatctttatggtctttgcaggagtcttcaaaacgagagataccagatatcctacagtcttgaagctgagagaataatcttccatctactaaacgaatatgagtgggactggggtccataatattcatctagaatctcggagtggctttttcaacaagaagtatcagcaaaagtttattta

SEQ ID NO: 81063 - DNA, 635 bp, Arabidopsis thaliana landsberg
  unsure (1)..(635): unsure at all n locations
gctttcctttaaaaatagtgccccttttttatctgcctgatctgttttgtccattgacacagtcaatgtaaggtgccggttccttcatgcctttacgcatgatttgcgcatttcgagagtgctcgctaaaccgtatgccatccttatgatagagttggaatcacacgaaaaaactgaacttggacagctctgcaaaatatctgacaagcgaacaatacatgttcattgcttgaggtaattcaacaaagattttgcagctgctccattctccatataaacctgctacttactgttaattctcacnnnnnnnnnnnnnnnnnnnnnnnnnnnnnnnnnnnnnnnnnnnnnnnnnncgagaaatcaatatgttccgaaacttcttttcgccgcaaacaagcagtctctctccggaggaaatacttgacctcgcgaataaacgcctagaacttgcccgcaaagaggatgacccttcgaagaggttggagatcatcaacggcgtcaaacgactgttgaaagacgccgaatatattttttcccccaagaaagacaaggatccagctctcagcgagggtattggctattgctaccacgaacacngaggacttttggacgatctgggtcaccatgacaaagca

SEQ ID NO: 81064 - DNA, 426 bp, Arabidopsis thaliana landsberg
ccaattggttctaatcgattaaaaaaagaaaactaattaatatgatctcaaatcaagaggctgctttccagtgggtctggtaatttcaatgcatgctgtctagttattatctcttggatagtaaaatgaaacccccccccccccactctacttgcgcttgcgacctatatataggcctataaccctactacaattagcgctatcaatcagtgaatttacaccacttttcatcaaatcattaatttcactttctaaaattaacattgagtgggtaaaaaaacaaataaacctagggtgaaacaaattgaactttttatttataaggctattatttatctttctttatataactattctgggttatgaaatcgatttaatgaagaaattttttaaaattatgagatgttaattgatctttctttgaaa

SEQ ID NO: 81065 - DNA, 471 bp, Arabidopsis thaliana landsberg
attgccatgaagctgttttataagaaactttagttttatctgtttgagaagatgctgtcacttgttaggggagtttgtggcccatccagagatctttttatgacaattatccatatttgataatatcctattcctatgtatgatatgacgatatacgtccaaagcattacgtcatatctcacatatcttaaaattgttatcatcttcatacgaactcatgcattatagagtaattctgcaagattttccgaatagttctatatagttacatcaataatttggttgattatggagatcttatcaagatcaaatctaaacttgaaacattatgagctatgacgatgatatattgatatcggtttgtcggcctattaaagctaagtatcataactaattgctgattattgatatggaatattatctaaattattgctctaattcctcactgatcggatcccaatgatacatacg

SEQ ID NO: 81066 - DNA, 259 bp, Arabidopsis thaliana landsberg
atatgaatatactcacacaacatgcattattcatgcaaaagattgacttaaaagaacaaaatttagtgagagagtgaaaaacttaagatttgaaatattcattactacgggatgagaacgcggaatccaaggctgttgaccaagtcggggtggagggatcagaagttaaatgttgggaggaaccgggacagtgtatccgaaagaaagttcaagccgatcaccctttttaccggaggattgggagaccactcaatagaca

SEQ ID NO: 81067 - DNA, 417 bp, Arabidopsis thaliana landsberg
aggttaatggcatcggcgcgggcgttgccggtttgcaggcgatcgcgaccgcgcgccggtttggcgtgatggtggaaggtttcgacgtgcggccggaaacgcgcgagcagatcgaatcactcggcgcgaaattcctcgaccttggcgtcaatgcggcgggcgagggcggttacgcgcgtgaactgaccgccgaagagcgcgccgcgcagcaggcgaaactggccgagcacgtcaagaccgtcgacgtgatcgtcaccaccgcggcggtgccgggacggccagcgccgaagatcattccgctggcgatggtggacggcatgaaggcgggtgcggtaatcgtcgacctggcagccgaaggcggcggtaactgcgaagccacccagccccgcgagcgcgtcgggcgccatggcgtgacca

SEQ ID NO: 81068 - DNA, 338 bp, Arabidopsis thaliana landsberg
ctggttttatcgatctcttcctatctactattatgagagcaacacaaactttggaagaggaatgggtgtagacttacaattagaaacgagagtattaagaggaagatcgaagtagcttgctttggtacttgggatgaattgaatggagaggatgagccaatttgagagagaacaatcagacgaatatctttaagttctttagagcgtttttagacaaaagaaaaacacagagaaaacacgttatatattaaccgtaaaatcgaaccggaaccaaaccttaaaccggattgtccactactaataaaacttaacaacacttcttcagctatgctaggtaa

SEQ ID NO: 81069 - DNA, 421 bp, Arabidopsis thaliana landsberg
  unsure (1)..(421): unsure at all n locations
ggggggtgttagtaacagggctatatattttttatgagcaacatagtgacattatatgacangggggtctctctttggggnaatgtttgatttgttcattggacccactagttaactatacataagatactaacagtattgaatcttgtagaacgatattgatatatatataagtattgttacccgaaagggtcttgagcaaggtgaagagagtttctggatatttcatcaacaagcttctcatgttgctccccaaccgagtatgaaacacagcgttgtagcacacaacatccatgtttagtagtccaaatctctatgcagaacttaggagcagcccacaaaatgaactgtcacaagcacaaatatcataatgagttttgaaagaacattttcaagaacatgattgaactttttaaggaag

SEQ ID NO: 81070 - DNA, 474 bp, Arabidopsis thaliana landsberg
gatcaaacgacacagcgatcaatgtcaaagttttagcccaacattcgtcaccaatatcgtcctggggtgcttcacaagggccgccttggccaagtcgcgcatgtacgactgctgcatcgtcggcaccggccaggcaggtatcatggccgccgtcaacatcctcagtagcaagtacacgttgccatatttgacaagggcaacggcgccctggacaacgacacatagctcacgagggtgcctattcctgatgaaatgagaccaccggacatattgaatcccttcatgttgaagagctttgatggctacgataatgtgaatcactatatcggtgaggtcgacaatattaaacgctccaagcctggacgtcatggacattacgtgattgaggttaacgggaggaaggtccgcaccaggaaaatacccctggttcctggttataagatgatatatccgaggattccttggtacaaggag

SEQ ID NO: 81071 - DNA, 106 bp, Arabidopsis thaliana landsberg
gggggatttattgtttgaaataataatctttataaccactttttcaacacagaacatcaaggggcccctttcgggggatcttcaacatcaatctctgtaccaacca

SEQ ID NO: 81072 - DNA, 189 bp, Arabidopsis thaliana landsberg
gtatgatttatcaaaagtaacaaacccaatccggccatcacgcaacagccataagtttcctgcatgtacactagtttggaagctttcacaagcaagtaagcttgcaaacctgcatgttacatcacatgaagattcattttactaacagctacatttaggagggagaacaattttaatcataatattgaa

SEQ ID NO: 81073 - DNA, 513 bp, Arabidopsis thaliana landsberg
  unsure (1)..(513): unsure at all n locations
ctacaaccgggttgccggtatgcggatgctttttcttactggcaccccgtcatgcccaccgccaccgatgccaccgatgaagcactgatgctcggttatcgcgacggcgatgcggcggcttttgatgtgctctacagtcgccatnnnnnnnnnnnnnnnnnnnnnnnnnnnnnnnnnnnnnnnnnnnnnnnnnnnnnnnnnnnnnnnnnnnnnnnnnnnnnnnnnnnnnnnnnccgcgcccgcgccggctacacggtgcaggcgaaattctcgacctggctctaccggattgcccacaaccggctgatggaccactttcgccgcgacgatgccggcgtgtctctggatgacgagtcggtgtcgatcgccgaaccggtggcgccgcgcagcatcgagcctgaagtcagcgccgagtcacgacagcaggcggcgcaactgctggtgctgctcgatgatttgccggaagagcagcgcgaggctcttgtgctgcagcaggaaggcgggctgagtatc

SEQ ID NO: 81074 - DNA, 397 bp, Arabidopsis thaliana landsberg
attcaaacctaaaagcaagaaaagacacaccacaacgattttttccaccacaagagccactcaccgctacgacccctggctagaaacaatagcacctcagacagacactgacgctccagacaagatcgaaccagattctacccatcatccacccaaatggaatgcggcaaacaaaacatgtctaaggatctatcataaggacaacaagaattcaaagctcccaagatctaaatattgacctcaagtcacagtaaatacctgaccatacccttccgcaaccgaagccatcacacacaggaaattcgataagcatgaaccatcaattatctgccaacaacaacaacaaaataaaaaccaaaactctgacagcaaaccacaagaaaggccgagaacccac

SEQ ID NO: 81075 - DNA, 513 bp, Arabidopsis thaliana landsberg
gtttttattatccagggaaagcgtggcacgttggaaaagcttctgttttttttaacgtgtgatgatagatcttctgggggggcttagccagggctgccttcaacaaagccattgatttttctttataagatacgtgccggaaatcggtagcagaagaaatatagatagttgcagcatctgcatctttaatttgaaaagcagtatcgccggggatcagctggccgccgacatgtttgatcctgaccctggacagataccgtatgcccttcccgtccgtgccgttattcaattgccctgccatatccagatcattaccatgtactgcggtggtatatctttccgggcggcttaaggatagctaaaaatttatttatcccggctgaccggcagtaaggcggatgataatgacatcatcggagaagctggcaaaatattcacggcggatagtcaccccgtttacttcataactgcatcttgccactgcactggccagtgataattcccgaaaataat

SEQ ID NO: 81076 - DNA, 479 bp, Arabidopsis thaliana landsberg
atcacggatgggggcgcccggggccgagacgacgtgtccgccggtgattctgacttggtagccgtcggggtactgcagggccggtgccgagatctcggtttgggtgccggcgccgaagtggccggagccgtcggccatctcggtggagtagctgaaccggaagatgccgtcggcgaaggaccaggactccggggtcccggcgatcgcctgggggtatggctcggcgagtgtcgtcaggacggggttgtcgatctgatcgtcgatcgcaccgtcgacgcggttcgggcccatcgcgagttcgtagttccagtacatccagccgaaacgctggttgttggcctccgtgaggaagtcgttgaggccaccgatgagcctgctgttgccgaattcggtgatcagcgccggaatgttgtgggcattcgcgtattccgcccccatgttctgggcgaacatttggcacagcgagcaccccgagtcac

SEQ ID NO: 81077 - DNA, 456 bp, Arabidopsis thaliana landsberg
caacggccaccggctgcaggtgactgtcgccgacaacggcatcggtttgttttctggagacaagcgcaagccgcgatcgtggggcggggtcggcatcaaggaaaggctgcatgcactggacggcaccttccatatccatagcacgccaggctccggcaccaagctcacattttcgattccgatcccgctgggaggaatgcaaccgcgataaacggagacggcagcggtcgaaccggactacacttgttcgatgaatgcgagcgaccgcaatgcccccgccttgcagccgcgccgctgttctgacgaaatgggatacctgatgcattgcgtccgcatgcttggtctgctgctgtgtctggcgttgcccgtgcgggccgccgaggcgccgcgcatcctgcgcctggcgagccctgaatggcttgcgtatgtcggcagcccagtgcagcagcacggact

SEQ ID NO: 81078 - DNA, 582 bp, Arabidopsis thaliana landsberg
agcccttgaccccggcctccagggcggcgcgcatttcccatttttgcttgttgacgcccgagaacaccactttggcgggatcggggcccactgccagggcgcgcgccagttcgccgcccgagacgatgtcgaagcctgctcccagcgcccggaactcgtccaggacggcaagattggaattggccttcatgccatagcagaccagcacgttgcgcccgtgcgcggctttctcgtaggcgctccaggcctcgcgcaacgcgttgcgcgagtagacgaatgtcggggtgccgtattcctgggcaatcagcggcaatggcacgccttctgcgtgcaggacggtatcccggtaggggaaatgcgaaagtggtgtcatggacgttggcggtggcgaattacttcacggcggaaggggtggccgcatcggggctggcagatgtcgacgaaggcgtgtcggccggcaaggaggtcggtgtgggcggcttggtcagcgattcgggcggcggcgatggcttgggcatgtacagcggccctttgtagccacaggcgccgagcgttgccagcaacagggcgcccgcagcaatg

SEQ ID NO: 81079 - DNA, 560 bp, Arabidopsis thaliana landsberg
gcgacagcgccacggcggcaatgatcatcatgccctggacggtctgctttcatagttcgagacgccgagcaggatcatgcgggtgctgggcacggtgacgatcagcacgccgaccagcgtattgatgaccccaccttcgccgccagtcagcgccgttccgccaacgacgacggcggtcacggcggcaaacaggcggccgtcggcgatgaccgcatccgaacggccaagctgggcggcggccagcacgccggcaacgccgaagaagaagccggcgagcccgaaggccatgatgcggacacggcgcagattgatgcccgaaagctcggccacatcctcaccgccgccgatcgccatgatgtggcgtccaaggcgggtataatactgaacggtgcaggcaatcaggaaggcggcaagcgccacccagactgccaccggcaatccgagaaagcgcgccagcgccagatcgcggatcgacggatccatcaggcgcacggccgaaccgtcgagcatatagacggagatcccgagcccgatgaaccaaacgccgagcgtcgccatga

SEQ ID NO: 81080 - DNA, 590 bp, Arabidopsis thaliana landsberg
tatcgtcataacataatatatatagagataaaaattgaacttttcgatttataaaatcacattttatttgagtgaggacacgtgtgtgataaccctatctaatacatattcagaatttaggttaatgaataatattatacataatataatatttaaaatttcagatattttagttttaaaaattaagattcattccattacttcaaaaattttagtcaggttagattaaatttattttggttctgatttagttaagttttggaatgacaaaccggcataaaacaaaaaaattggctattttttcacccaaactattcgaaaaataactcaaaatacttgaaaatgccaaaaaaatctaaattgttttgaaaatatttggaatatccaaaaatgcacaaaatatttgtttgcttttttgtttttgtttttaatttcagtcttaaaataactacatatccttgtttataattgtaattatgggtatctgagttatttcaaatctaaatttttgtgcaactatttcaaatctaaatatgattaatgttttggtatagaatcatagttatgatatctatttggttttcggttat

SEQ ID NO: 81081 - DNA, 406 bp, Arabidopsis thaliana landsberg
  unsure (1)..(406): unsure at all n locations
catcccatcctttctataccaaaacnnntaaaaagttaacattataacagtactaccagagaaacagtctggaaccccttagtataacaatacagtacactctttacaataccagaaacaataagcacccttgagaaaacagtatatacaactgacggtccatacancgttctgatttaagctgtaatgtntggtaccgtccataagatactcatccgtccaaccacatcactacttaaccactacgaaatttccatcttattattcttctttatcatttcttattaaattcaatttaacttcttattttaataaccaaataaaacagtttcaacaagaataaaaaaaaagtaacgtgttattcatatattcgacagtgacgaaaaccagatactccaatcaaacc

SEQ ID NO: 81082 - DNA, 554 bp, Arabidopsis thaliana landsberg
  unsure (1)..(554): unsure at all n locations
gcggttatggccaacaggccgtgatgggcgacagcgccctccagcagcaactgtccacttcgcgtttgcagcaggcgcaatattgctccgggggagcgggctgacccccaagccgttggtagccgttgccgcgctcggcgcaccctggattggctgcgcgccgggccgggcgcccctgggaagcaaacgcacgcgatccgtgtcgtcgcaatggacgcccggccggccgtgcgcgtttggccaagccatgctgtcgccgtggcggcgcgcgccgaaacaccgggattacactccgcnnnnnnnnnnnnnnnnnnnnnnnnnnnnnnnnnnntgaagcgnnnnnnnnnnnnnnnnnnnnnnnnnnnnnnnnnnnnnnnnnnnnnnnnnnnnnnnnnnnnnnnnnnnnnnnnnnnnnnnnnnnnnnnnnnnnnnnnnnnnnnnnnnnnnnnnnnnnnnnnnnnnnnnnnnnnnnnnnnnnnnnnnnnnnnnnnnnnnnnnnnnnnnnnnnnnnnnnnnnnnnnnnnnnnnnnnnnnnnnnnnnnnnnnnnnnnnca

SEQ ID NO: 81083 - DNA, 551 bp, Arabidopsis thaliana landsberg
atggagcgaaaaaggcctctgccatatagccaaaaatttcccagttgctcttaaaaggtttacggttcctaagtgatttaacgggggcgactgctctttgcttagtgatagaatccagtggttcccaaagcgccttgggagcccggataaaggcctggacataataagccgtatctacaataggctgcatttcctttgtaaagttcaaacagtctttagcctcaggattcaccgaattagccagacctttgacggctgcctccctgagtcttttgcgcagttgcccttctttggaattatcttccggcagttccagccagggtgcgactccggccagggtgcgtccgactgcttccaggtaggtcacatcaatggtcctgctgtcaaaggtgggcgattttctgaccaccatatttttgcgcagttcatccttttcaagattcagtaaaacaggcgccgccattttatagagcaattctacccagtaggcgcggacagctgtcccgttttccaataatccatccggagccggcacacccggcgcttcacgc

SEQ ID NO: 81084 - DNA, 602 bp, Arabidopsis thaliana landsberg
  unsure (1)..(602): unsure at all n locations
taggtatagcccgaatcacaagacttgtaaatgccactgaagtttgtaacagaggattatcaattgagatcaaaaagtctaaacctttggaatgaaggaacaaaaatggtgaaaacaaaacacgagcaaactccttttaccgtgcaaacgatgaaggccaagagaagaaatgcctgatcactcaaactcagctttgctaatggattgattgaatgcagagaaattggactgcccacttgcatnnnnnnnnnnnnnnnnnnngtacctccgaagacactaatcgatgccctagacattccaccattggaattcaacaattcctcagagctcgacgggtttgaaatgctgcatcttgttggatgagatacatagagagaagctggaattttaagggtaaatcgattcaagcttgttggagaaagatcaagaaatggaggcgaacgaatcaatggagctgtagaaatgaagcagagagatttcatttctttcggaattcagaaagctgtacagtcttctcttttcaggagccaagtccagttttcttttattcggttcaggccggtgtatctgccgtaactaaaccaccgaaccatctatttgat

SEQ ID NO: 81085 - DNA, 573 bp, Arabidopsis thaliana landsberg
aaaaggcaggggtgggtccaaatctagtgacttacactattctgatgaaattttatattgaagcaggtgatatcgagtctgctatgcatttgtttgagggaacaaagggctagccggatcaagttatgtacagtactctgcttaagggcctatgtgattttaaaagacctcttgatgctttggctctgatgttagaaatgcagaagagtgggattaatcctaataaagactcttatgagaagctgcttcaatgtctctgttactctagattgaccatggaagcggttaaggtggttaaagacatggctgctcttgatatctggcctcgttcaataaaccacacttggttgatttatattttgtgtgaagagaagaagttgagagaggctcgtgctttgtttgctattatggttcaatctggaagatctttgttgaattgtactaaacctggtttgttgaaaatgcttaaccagaatcaacaactttagttttttttttcttcttacaatatattgtaaatttcttgtaaatgttatgtagtataatgaattacacttatcttctttcttatag

SEQ ID NO: 81086 - DNA, 440 bp, Arabidopsis thaliana landsberg
cttatggcgtctgaagaagcgccagcccaccaagtctgtcggttcttcggagtcaaacatttagggaaacgacctttcaatgcctgtctcaccagtaccggcgtataactccctacgatcgagtgagaagcccaacgccaagtctcattcgattcaatagatgttacataagcagacttcagtggaactatcggctgagcagcgacacgcgataggattgatgagcgacttgggcaagactcagcgtactattcggggctgtcaccgtgctgttggaaaggataggactcacactttataggcagcaggcacctggtgcatatatgagcaagcctgcttgatcaagaaagcttgtctaccttgttgcttttgttacttgctgagctttagggttagctgtgttccgaagtgagttgagaggaagggagttgggcgtttgc

SEQ ID NO: 81087 - DNA, 597 bp, Arabidopsis thaliana landsberg
agcatttaaccgactaaccgaaccaaacccaaacttttccgatctaaatcctttagctaaagattacggcctagcatttttttgaataactatacttattcttactttttctttttgttaaaaactatacttaattcattctctttttttttatcattcaaatttttgttttcattatcttttttttttaatatcaagtataacatatgtaaaacatgatatataatctaaccgaataaattgatttttttatgttagaatttatatatattactatctcttcgatgaataaagatcattctcgtcatcaaaacagttgtttccaataatagtcaaaaaaaaaaaaaaaagttgtttccaatagtcttagatcagaaatacagtatgagatttccatcataaaataagcaagaaaacatgatgaaagatgtacgagaaatgtggtgattgcgtgagagtgtgtgcatggacactcgaaggatcacatgggtcattttttacgtattaattagagaagacgaacatgccattcttctcgacaagttgaatattgttcataaccacataaaattatttattactcataatgcgtatagt

SEQ ID NO: 81088 - DNA, 451 bp, Arabidopsis thaliana landsberg
ggcggtagctgaggagatacggtggagagtagagttttagatgttaaacacttgatcgacatatgcaagggcattggggttgtttatcatggaggtgagtttgatggattcagcgtcatctttggttttgaataatacgatgtgttctatgatctgactctgtggggttgaataagacatgacggagaaggagcggcgagggagtaatcggagatcgattctggagtgtttggttgctgagatagtgaaagctagtggtgacgacattagcggtcggattcttgcgcatatcatcttttaagatcgtgagcggtggctgagagtgaagtgaccattggagccacttaataaacgtttctctccttaagttttatcgattgtggatacctagtgatgtcacagaaatcatcgtaactatgcattatataataatcgtataaatcgtatacta

SEQ ID NO: 81089 - DNA, 457 bp, Arabidopsis thaliana landsberg
aaaaaaccaaaaacatgttggtccatcccatcctaaattctgtctttccgttttatgatcctcggcccgatccatgggtctaggggtggttaaaattggcaatcgtttttttttttgtcctttttttttgactttgcaatcttttcccttttatacactgttctctttaagaaacccgctataacacttcccgaatcattcatgcgggagaattcaaaggtaccttattattaccaccttcaaaccaattcgcacatggttcaaattggaaatgcataaccaatttatttacctatcactatcaaattccaacatttgggcgtaatgcatcatacatttgcaaatgtccaacatggaaatcctaatcatgtaaaccctatatatactctatttttcatgccttaaaagggctaaaccctttctttaagaaactgaaccttctttaaaaacattgata

SEQ ID NO: 81090 - DNA, 603 bp, Arabidopsis thaliana landsberg
  unsure (1)..(603): unsure at all n locations
gacgccaacccccaaccaacgaagaagcgccggacgccctgcgcgtcgccgtgatctttcggcccaacgtcggcaaatcgtcgttgggcagtcgcattttgggcgaagagcggttggtcgtctccgacatcgcgggcaccacgcgcgacgcgatcgacacgccatttcgctatcacggccgcaccctcgtcttcgtcgacaccgccggcttgcgacgtcaggcgcgcatcgacgaagggatcgaattttattcgtcgctccggacgcgtcgcgcgatcgagcgcgcgcacatctgcatcctggtgatcgacgcggtcgaagggctgcacaaccaggatctcaagatcgcgacgctggcctgggacgcggggcgcgggctcatcatcgtggtcaacaagtgggacgtcaaggacaaagacgacaagacggccgccaaatttcagaaggacgccgccgaaaaagcgccgttcctgggcttcgtgccgttcatcttcacgtncgcgatcaccggccaacgcgtcaaccaaattctggacgtgattctcgacgtctaggccgagcgggagaagcgtatcttcacgttcaacatcaacgacacgttgc

SEQ ID NO: 81091 - DNA, 546 bp, Arabidopsis thaliana landsberg
  unsure (1)..(546): unsure at all n locations
gggggacgacatcggggaactaacgcctcaacacatatttcttttaggcgcagagaagccaaacgcagggggcggggctgtttataacaaacaataaagccnaaaccaactctaagctctgcaaaacccatttttttaagctgaacctagaaatcctaagacctgagctaaacgaattcagtggagaaataaaaaggtataaagcggaagaacctgaacaggcttgctactgtaattaggctgcgtaggaagagatatccatctcgcggcggaggcaaaaccgatgatttctctcgtatccatctactccggtgacgaatacaaaaatggaggtaaagagagaaaaagcgtggttggtgttggcgagagtgataaaaccagtctagggctccgttgagccttctcgggagggaagacgaagagaggaaacactgttgaatgaatttcttctcaaacgggccaagtcggaattgttaattcgggtcaaattataaataagggccttactttttgaaagacttgtggaatcctgtcattgtctgggcc

SEQ ID NO: 81092 - DNA, 568 bp, Arabidopsis thaliana landsberg
  unsure (1)..(568): unsure at all n locations
aaaatcacactatgtgaaaatggaaaaaataataataagaaggaaatagtactctttttaaagcaaatagtaaatctagaaacggcggagaaatcactttgatgcaaagtctttcgtagtttgtgaagatttgtatttttcctcgtcatagtcaaattagattatgagactgaaagtgtgccgtatttgtaatgggacaagtcaccacttttgcaccagttacattgttctttttctgtctattttccacatattgacatacttaaagaaaaggatttaaagttacaatgttagtatttactttttcatctaataatattgatagagcataattaaaagcaatccattactatatcatttaatttatttcttttaagatttctcttattattgactaagagaaaaatttaatgagtaaaaagtaaatatgatccctcgagtcaatccaaatctccagcttaattaatttgtacaaccatttatgaaaataagagacattaagaattagaaaaattcatctanaagtagataaatttcctgataatacnttaagagtaggaattcaagt

SEQ ID NO: 81093 - DNA, 331 bp, Arabidopsis thaliana landsberg
tgggtttgttctcctctattaattatcctacacccattttcttatttttagaagcacatagttttgttggggtagagcaaatttgaacttgttagtggtaagaattagatggtgaatcttgaacctaggcgtctgtgtgaaacaaacaccatagacaatgcagattagattagtttgaacaagtatgaaaagataatgataaagcaaatgggttaattggggattacagggaagcatattgggatgaaacaaaggaacaaggaacaaaggaacaaacagaagtaggtggtataggtatggggaccaagagggaaagcaatacacttttgtg

SEQ ID NO: 81094 - DNA, 621 bp, Arabidopsis thaliana landsberg
ggtgtttgttccgttattagatgaatgagatagctgatgaagaggagaatcaagagtgtttattatctatgtttggagatcaggttaggctgattatttctcccatgttttaatgttgttttagagtaagtgatagttgtaaaaatttgtactttgttaatgttactatacagaaaactccaataccttcactgcttgttgatctcgatagttgctgcttgttgaaagagtttatgaataatcagttaaatttggtggtgggtcttaccgttgatgaaggtttgttttctatgacctcatcgccttttgatcggtttttaaagtcagtctctctggcttttaaagtaataggtttcctgtacaatccaggaacaacttttattgaaggcttgctggttaacggctggctcacaagactgatcatgacttgtggacgtgtggaaaagttcatttgcaagtggacgcttaatatatgtatgtgttctagctctctctttaactttgtttattctatggagtcccttggcttacattatggttttgatgtttgggacttactagtgttgtattcatctaagaagatctaagatcatctgcttgtgacttttgtgttccatactg

SEQ ID NO: 81095 - DNA, 532 bp, Arabidopsis thaliana landsberg
  unsure (1)..(532): unsure at all n locations
cccccaaatgaaagcctcggatatgtcgaatcatggcttatacctgtttagaccaagaagaaggtcaagcgcgtgnnnnnnnnnnnnnnnnnnnnnnnnnnnnnnnnnnnnnnnnnnnnnnnnnnnnnnnnnnnnnnnnnnnnnnnnnnnnnnnnnnnnnnnnnnnnnnnnnnnnnnnnnnnnnnnnnnnnnnnnnnnnnnnnnnnnnnnnnnnnnnnnnnnnnnnnnnnnnnnnnnnnnnnnnnnnnnnnnnnnnnnnnnnnnnnnnnnnnnnnnnnnnnnnnnnnnnnnnnnnnnnnnnnnnnnnnnnnnnnnnnnnnnnnnnnnnnnnnnnnnnnnnnnnnnnnnnnnnnnnnnnnnnnnnnnnnnnnnnnnnnnnnnnnnnnnnnnnnnnnnnnnnnnnnnnnnnnnnnnnnnnnnnnnnnnnnnnnnnnnccgttatcgtggnnnnnnnnnnnnnnnnnnnnnncgcgagggcgcggacctgagccttgagagcccggcgcgtgcgctggacttcaagtgcaagctg

SEQ ID NO: 81096 - DNA, 566 bp, Arabidopsis thaliana landsberg
tacgcggggtgcccgggcaggccgaccagggcgtgcaccgacgaggtgagttcaatgctttcccgatcacgtcgcagcggtccgatgagtgtccgcacgccgtgccacgctgcggtcagtgataccgcgagctgcgcttgccattcctgctcggtgaactcgtgcgcgggcttgacgacgatggcccggccggcgttgctgtgcagcaggcccagccgtccccaggtctggccgatgtgcgcggccagggcatcccagtccgcgccgttcccggcgtcgaggtgccagcggctggcgctgccgcccgccgcggcgatctgcccgacgacgtggtcggcgccgtcgtcgttgatgtcggcgacgatcacgtgggcgccctcgctggccagccgcgcggccgtggcggcgccgatgccggcggcggcgccggtcacgacggcgacgcggccgtgaaaccgctgcccgcccggttcgcggtcagccgctgaactcgtcatgcccgggatctagcatagaacaatattatattaaaatatgctggacgcccggtcgggggggccgttacg

SEQ ID NO: 81097 - DNA, 489 bp, Arabidopsis thaliana landsberg
ccgctaacccggctcggatccagctccgcctcgtcctggacctgcttgtccgacatttgcgggttgcgcagggccagggcaaagccaatcatgggcacgcagacgcacaggccggcgacgcacagaataccctggacgtagctgtagctgctgatgatggcggtgcggatctcggtgccgacggggtagccggcgacaacctcaaaggggttgttgtacatggcctgggccagcgtcgcgttgggctgaaaggcgaggtttgactccaggacggggtacagcgtctgcgtccagatggccccggacagacaggtgcccagcgcgctgccgacgttgtaaaaggagaggtagagcccggtgaggatggcgacgtggtcgcggctggccgacgcctggatcgaggcttgcgtgggataggcaaacagaccacccgccagacccaggaggatctggccgcagatgattcccgtgcgtgagttgctcgtcgcg

SEQ ID NO: 81098 - DNA, 542 bp, Arabidopsis thaliana landsberg
tggtcacgtacttcgatcgcgacacggcgtcgctcaagttcgcggcgaaggtcggcggcgtgtggcaatcgcacatcgtcgatcagggcacgagccaaatcgatcccggttcgggcggctcgctcgtcggcatgtacacgtcgctatcgctgcgcaccgacgacggtcgtcccggcgtcgcgtatctcgcgcatgtcgcggaccaaaacggtgagcgcgcagaagtgcgttacgctgccgcgcagaaccagttcccgacgagctcggcggattggcagacgtgggtcgtcgacaccgcgccgatcccggagaacccggacgaggtctacccgctgccgggcggcctcggcctcttcatcgacagcacgcgcaatccgatgaaccaagcgcctgtcgtcgcgtactacgatcgcacgaacggcgacctcaaggtctcgaagttcgatcccgcgaccggcatgtttgccgcccccgtcatcatggacggcacgaacggtgtcgacgcatgttggtcgccgagcgttcaagtcgacccgaacggc

SEQ ID NO: 81099 - DNA, 608 bp, Arabidopsis thaliana landsberg
tttatgtatcaaatgattgatggtacaagaacttaaagaattacttttcaataccaatattttgtagtaataatacttagaagttaattaaaagctaatttttcgttctacgtaattttgcatgagaatatatagtcttatagtaatacagcaccagtgcaccacccactccgtttgccttatgtcttcctaaacatgtattgtttggctgtaaacatgctcgaaagatgttgtttaattaaaatctgataacaaaagttgcaaacaaaatcccaaccgtagctatttttatccttacaaatggataaataagccaaaaataacagtttcaagtcttacactaaactgatctgattggatcatcgaaaacaaattgagcaaaacttggatttcttcagacttttgagattattcaaccgaataaaccttattcatagaccaatacaataattatctacatcaaagttatcactcccgtgaaattttacgagagatcaatagctttaaatattgatgctctgtttcatctacatgaagtattacttttatctcaaaaaccaaattaagatcagtttttgccgggctgaagctcgacaagaactcgagaa

SEQ ID NO: 81100 - DNA, 585 bp, Arabidopsis thaliana landsberg
aacagaccagagagtgttctaaagtgaagtcttacttaaacacttggtttatgataataattcaagagcatctttattgttagctgggaagatttagatataatggtttaaaaatagaaaacaagatcaagatcgccacatattacgatcaaaatgaagaaaatgtcagaacttttctgacagatccataaacatcgaagtgagtcgtaacacaagtcaaaaagacataactaccctttaaacctttccactaaaaaaaccttaaaaaacgaagcagagcatcgaacctgagtctctcagtggcgaagaaaacaaagaagaaaattgtcagaggatttacgatcaatcaaatacaaatatggatcagtaacagtttttttgtttgaaattcaaaatagagaaaccaaaaaatcgatggagttatgaagtttaccgtataaacagagagattgattcctcataatcggaaatcgaggagatatggagggaaactcaatcaaaaatcaaaaccgatgttatcaaagctgagttttttacggcgtttagtttaacggagagacttttcttacaagaaggaagaaagcg

SEQ ID NO: 81101 - DNA, 379 bp, Arabidopsis thaliana landsberg
  unsure (1)..(379): unsure at all n locations
nnnnnnnnnnnnnnnnnnnnnnnnnnnnnnnnnnnnnnnnnnnnnnnnnnnnnnnnnnnnnnnnnnnnnnnnnnnnnnnnntagaaccgtatagtatggggacctcttatgcttacaagaaagtctgttatgatcaaaaggggatcactcttatgaaatacaacgccgttgaggtcttgtgcttgttaagctgaagaggcnnnnnnnnnnnnnnnnnnnnnnnnnnnnnnnnnnnnnnnnnnnnnnnnnnnnnnnnnnnnnnnnnnnnnnnnnnnnnnnnnnnnnnnnnnnnnnnnnnnnnncgcttagaagaagccatttttataacgattaaggacgacacctctcattattaggagatgtcttggcgaagtgcttc

SEQ ID NO: 81102 - DNA, 588 bp, Arabidopsis thaliana landsberg
tatgcatatgtaactatcaaacatgtgtatcccaaaagtatttaaagatttacaaatatgcaggaagcagtcatttgagccaactcttgatgtatagtcataaacatagatctatttgagccaagccaacaactttttcttccatttatttttatcacatccagcaacaatcttggattaccttctcaacataattagaaccattcttttggactatcactttaacttacataaccaattgaaaccacacacttgaccaatgtgactttggcgcttctgttccttttaagtttgttattgacattgtttctttcacacatattccttgccttgcctttgtgtcttgcaaattttgcagaagcccattcctgtcctttgaaacccaattttattagtgggccttactaaatatatatttgaaacgtccgtcctttaaaaaggcacataattttagtgtatttagggtgtgacagtgacaatttcagcggaattaacaagaacaattaggaaaaaaaacatatgcacttttaagaaaattattatttttattttttcaagtttgtagagggaagttttctcaactttttt

SEQ ID NO: 81103 - DNA, 386 bp, Arabidopsis thaliana landsberg
ataagtagttgccaaaacatttgatctggaaagtggaaatgtatagaagaagaaaaaagtgtcctctaaatgttcggcggtagtggacaaagtagaccaaaaaatttctcatattcattattatgactcaaaagttgatcccactttattcagaggagaaaatggaacatatttgatgatcttaatgtcatgatttgtgtatctgacatcagcttaatataccatgaagggctactatactaaatgatttctacctagaaacttaagataaggttcagactttaccaaattttaaagaagcatcgaaatgaaacaatcgaactgattataacgagaactttaaggctttaaccaagatagattcacatatgttaaagttctagttg

SEQ ID NO: 81104 - DNA, 570 bp, Arabidopsis thaliana landsberg
gacaggggaaaacgatatcgcgaagcttggtccttcattattatgtgtagccacaacgataggtatcacgagacatggggtggcttcacgcttgtgttctccttctaggcgagccaacagacgacggctgaaactaacacgtccatccagccccggccattctcagcataataaaggcaggaggtaaatctaatccaatatcaaactgatattgaatcggacatgatagaatcatctatacaagcagtgttttactcatcacatttgtgacgctcggccaccctttgagtttcgactttggtttcaacgtcgaggcgatgaacctatagctaccagcataagtctacctatcattgattgaaatgccccagcctcatggagggtgtatctattcgtcatcttgatcacaatgctctccttcaccatctcgctccagacgtgaagctccgctctaactacattcacaaaagcacatgtgcgacttcttttcctcttaggaggaagtgccaactccaaagcatcatggcttacagaagctcagccacgctgccttcgggccattgagcaacg

SEQ ID NO: 81105 - DNA, 608 bp, Arabidopsis thaliana landsberg
cacgaggatgggcacgggagatgtgagtaccatattcacttattgcaacatggcatcaactatgtaggggaagggacgcagtgatgagcacactaaagagacaggttgatgatgccaatgatgcatgcaagagttccttacttgatgtagcaggtttacttggttgtaataatcgaccatcggccatacatgtattcataattaattttgcatcagcatatccaatcttatcagcaggggttactggacctgtagtgagagtagcaactattggaggagggaggacggacacgagaaatcaattcccaaacgaatgaattgtggaataataccaatggcttgtgatcgagggcaatgttcaattaaaccatatggattatctggctgagtttgggttgaccaccaagaatctaggtcatcacacatagggggaatgcctcactttggggcacaacactgctcacctttgaacggtgccaatccaacagcatgagccaagatacttgatgttcccaatcggcattggtcattactgggatggtaatcatcacttgctctgacttgagtcacagcaggcactttaacactttgaagaacatgtcgaggat

SEQ ID NO: 81106 - DNA, 457 bp, Arabidopsis thaliana landsberg
  unsure (1)..(457): unsure at all n locations
aaagacaacaatttaatttttagaaatcaaagccttcttttccactaaaccggnaatagccggggagggtttctttacttccggggcgataagcataactggacaccggcagacaaatcacatcaaataaataatagtaatatatttaattcctcagacaaaaaggctcttccacttcttatcgaattacaaacatttcatgttattgtttggttatatatatagagagacaaagctcttaactcctttttaattgcttgaacaaaaagcaaaactcaaaggaattttctctgtatttttttctatctgcagaaaaaaagagaaaactcaaaaacccactttttccctctgtttccagcttttctttatctttggagtctggtttctggagaagacataagttgctgtcctttttaagagttcgagatcctgcagaaattaaaagggctcttccccg

SEQ ID NO: 81107 - DNA, 571 bp, Arabidopsis thaliana landsberg
  unsure (1)..(571): unsure at all n locations
gaggcggaagacaagcctaaagaggcttgttctcagccccagccggacgatttaaaattgaagaagcttaagcagtggttctcattgatagatgcgacaactttttcgaataagaaattacctgcaaagaaactacagagctctttgtatctgaaaaagcaactgcacaagaccttgtatggtttcatcgtgtttgagattgaatgggctaatgtgaggggtatcaactacttaaatgagctacaggtacttcttgcaactgtccactttttttttggtctgacattgtgtgttattcttgtttcttacttgatctatatctttatgtagacagacacatctcttgctatagaagctaagttgatgcgaaggtgggagtttgagagtatcgatcaagctgtgaaaaacatgtctcagtggttctctggatcaaaagctgaaaagtcttgcttgagggaatatctcgactcaactataggtattatagtttttcataaagaatatctattctgatttaactntgaaattccttttaacaaacaactttgctatagtggtgatacatcttatg

SEQ ID NO: 81108 - DNA, 588 bp, Arabidopsis thaliana landsberg
ttaaaactatccattccccaaacttgcattacaagaaatatatatattcgttgtgtatattagattagctagtagttaagatctctagatgggaggaagaatcaaatcggccatatatatatgcaagcatgtgcgcatatgcatattcattaatatgcatattcacttctcttaactagatagacttatggcatttcttatctttaatattctatacgttgactgcatcgtatagtttgacttgaatcataaacactaaatctttataagttgtattatttataccaaattctgtagtaaatacttttctttcaaaagtagttacgaaaacgaattaaataaacatttatcgagataataaatatatcaaaaagcaccttccatataaattacagaatttttgtttttggaatagaaaagttggtgaataattcatcgtacaattaaggtgtttttggcaccatgcatttttcttttaacataaatttaatgcatttactgcaggtaacttcactagtagtagatatgagtaatgtgtattctatattaaattagtattcatgagttatgaactatggactaataact

SEQ ID NO: 81109 - DNA, 493 bp, Arabidopsis thaliana landsberg
  unsure (1)..(493): unsure at all n locations
ggtcgatcgcttncatggatgcagacgtgatcacttacgatttctcgcgctccgacatggagctggtggatggtttcgattacttcaggtacccgaacgacatcggccccggcgtctacgacatccattcgccgaacatcccgacccaagagcacatcgtgcagctcatgcgccaggcctccgagcgcatcccggccgaacgctnnnnnnnnnnnnnnnnnnnnnnnnnnnnaacgcgcgcctgggcggaagtgatcccggcgctgaagaacatggtggcggcagccaggacattgcgcgagcgctgaccgccggggccgccccgggtaaagcgcggtatgctcggacctttnnnnnnnnnnnnnnnnnnnnnnnnnnnnnnnnnnnnnnnnnnnnnnnnnnnnnnnnnnnnnnnnnnnnnnnnnnnnnnnnnnnnnnnnnnnnnnnnnnnnnnnnnnnnnnnnnnnnnnnnnnnnnnnnnnnnnnncgtgcc

SEQ ID NO: 81110 - DNA, 550 bp, Arabidopsis thaliana landsberg
ctgttaatgacatctgtgaagttcatggctgagaactgaaaatatactattttgtattgggtcccgttaatatttatcctggggtgtatggatgcgggcaggttgagcatatcataagctaaatttcttgactaattaaatttctttgataattttacaatttaaatacatggggttggagagatggctcagtgattaagagcactggctgtccttccagaggagcaatgttcaattccctatacctacaaggcagctcacacctgtaagtccaatctcagggccacctgacacccttgtctggcctctatcagcaccaggcatgcactgtggtgcacatacatacattctgccaagaaacctatacacatcaaaggaaagacaggtggcactgaggtaagcatgccggtctgcaccctacacagcattccagattcctaggagggccctattcctcacgtcccactgttcacgtttgctgtccccttcattcccagctgaagatccttggacatgggcaaaataaaggagtctcactgtgctttctgac

SEQ ID NO: 81111 - DNA, 520 bp, Arabidopsis thaliana landsberg
  unsure (1)..(520): unsure at all n locations
agaacggagattgcatagcaaagagaaagcaccttttgtgtatttattttgggttaaaaaaaaaagatgttttagaggagacgtgtaggttgtcccttttattagatagttgatatgattgtcttatttaagacgttaaaaaaaaagacctttaaaaaaagacgtttagaggttgtccttttatactcttattagatcgttaatatgattgcacgtcaaaaaaaaaaaaaaaagatcgttgatatgattgtcttaacattttagaaacacttatgtaaactttagtatttacaatatatgtaactcatatttcgagctgaaaaaatcgataatacagttaccattttacaactctccaatccattaaaatcatatttcgtgggttcagaaaaatcataaaacagttacaactttacaactttccggtatatttaactcatatcgtgagaaaaagaaaaaagtacacttttacccctnttggatatattttacttatatgtaaaacctagataatcgattt

SEQ ID NO: 81112 - DNA, 482 bp, Arabidopsis thaliana landsberg
acgtgggatcggctgatctggtcggccgacctcgctgtctttgcgcttcacgccgcggacgactgggaccggggggagcgtttgtcctacgacagtgactgccccgtcgcgctcgctgttgcgctcgcgcaagcgacccgtctcgggctcgacgctccaacgaagctggcgactccgccgtcgcgtcggcaggccgcgctcgccgacgtcatgggcgaggactggccggtgacctctcgtgacccgctggtgcgcgatcggcttcggtacgcgctggtggacaactggcggtacgcggcgcgcgttgcgttgggcgaagccttcaattggggtccgggcgaggcgccgctacttacgttaccagtcctgaagcgcggcgcgcgccggctgatcgaaagccactcgtagtcgctcgcgccattccggcttacgcggcagacggaggcggtgcaccccgacgcgactggccagcgcactcaaac

SEQ ID NO: 81113 - DNA, 494 bp, Arabidopsis thaliana landsberg
tccgactgtctcaagcacatgctaggatgcaccttaggcaatatgtcacagaagaggatgtttatatggccattcgagtcctacttgagtctggcatatcaacccagaaatttggtgtccagagaactctaagagaggtattaaagaacatttgagtcagttgtggtgagagcttgtatctatggaattctgatgtctgaattgatgaaaactcggttattcctgtgcagagtttcaaacggtacattacatacaaaaaggacttcaactcattgctgctcgttcttctcaaagagctcgtaaagaacgccttgaagtttgaagaaatcatttcaggatcgaactcaggactacctacaatcgacgttaagatagaggaactgcagacaaaggtcagttatcatatgggtaggctaaatttagaagtatgattcttaatacctttttaacaactcttatgttctacatttgccgggcagggaatacgacattgc

SEQ ID NO: 81114 - DNA, 550 bp, Arabidopsis thaliana landsberg
aattgtaatgacggtaaccaaatccaattaaattctattctgggcaaaaacgaatcgatatttggtttaaagtgttattttagttaggacaagacttgtgatagtgatcgcataagacttttaggggttttattactggacctattctagcatcatcctattttaaatccttaaattcttgttctcgaacccgctttaaatttttcctcgtttcatattataattgatttaagcaaaagtatgatcggtaggaaattcttacagctattatgcacttttataacatttgtttttcaatcagactcaagtgtatatagcgtgtcccttctaaaattcacaacttctataactatattatattttctcaccacgttttgtatctttccttttttgttttggtttaaagcaatatgagaattttacatgctttaggtgttttttttttctttttacagcaagataaaatgaagagtacaacccaaatgttacaaagttatgtgtcaacaattaccagacgaattatttttttacagcttggttaaatcaattg

SEQ ID NO: 81115 - DNA, 596 bp, Arabidopsis thaliana landsberg
  unsure (1)..(596): unsure at all n locations
nnnnnnnnnnnnnnnnnnnnnnnnnnnnnnnnnnnnnnnnnnnnnnnnnnnnnnnnnnnnnnnnnnnnnnnnnnnnnnnnnnnnnnnnnnnnnnnnnnnnnnnnnnnnnnnnnnnnnnnnnnnnnnnnnnnnnnnnnnnnnnnnnnnnnnnnnnnnnnnnnnnnnnnnnnnnnnnnnnnnnnnnnnnnnnnnnnnnnnnnnnnnnnnnnnnnnnnnnnnnnnnnnnnnnnnnnnnnnnnnnnnnnnnnnnnnnnnnnnnnnnnnnnnnnnnnnnnnnnnnnnnnnnnnnnnnnnnnnnnnnnnnnnnnnnnnnnnnnnnnnnnnnnnnnnnnnnnnnnnnnnnnnnnnnnnnnnnnnnnnnnnnnnnnnnnnnnnnnnnnnnnnnnnnnnnnnnnnnnnnnnnnnnnnnnnnnnnnnnnnnnnnnnnnnnnnnnnnnnnnnnnnnnnnnnnnnnnnnnnnnnnngtcgacataaagcaatggaaagttccattgtcctgttctttcgtcgagggctgttttgggcttccgaaaggtttacatgcaagtttgccttacggctaaaagtatggagcataaagtttaccaaaaaaaaag

SEQ ID NO: 81116 - DNA, 433 bp, Arabidopsis thaliana landsberg
  unsure (1)..(433): unsure at all n locations
gtgaggttgtggcccggcggcgagtagccatagcggtcctgtcggtggtagtcgcgcactgcttccagaagtggtgcctcgtcctgatccatggggcgcgcgtacccggtacgcaccggttcatgcccgttgcgccaccgacgcgccggctcagtcgtggaagtgctcgaacgaccagccgatgagcgcgaacgtggcgagcggcacgtcgagcagcaccagccaccagccgatggcgacaccgaacatcgcgatggaggccgtgatcgccagcaggaacggccagatgctgtgcggagcgaagtagccgtaatctccttccacctcgtcgatctcgccgctcgggtcatcctcgggacgttcgtcgnnnnnnnnnnnnnnnnnnnnnnnnnnnnnnnnnnnnnnnnnnnagatcattgccgtcacagtcagc

SEQ ID NO: 81117 - DNA, 443 bp, Arabidopsis thaliana landsberg
  unsure (1)..(443): unsure at all n locations
tccgccctcatggcatggactggtgggactacctggatcatatctggttcgcctacgagaaggccgaagaactggacgtctgggttcttccggctctccaagtacgcactcgcatgctgaaggcgatccagaagccatagcttatgcaagcctgccgctgctgtccgccacgagtgccaacggggatccgaggggttcatttagggcacaacttgcttgcctcgtaagcgcgagtcgatgcccagttagtcacctaggcggatagctatttaagcttgcggcattctcggtctcattatctcctgggatctctggaatatcggngaccgaatctaggtcgggcaacgtatattctgagatatggtcgatcacgcaggcttgaaaatactcgcgatcattattcgattcgggctggttgagggcccagctgcgccccggatgca

SEQ ID NO: 81118 - DNA, 538 bp, Arabidopsis thaliana landsberg
  unsure (1)..(538): unsure at all n locations
ttaaagaaattacaatgattaaattttcaagcaaaactatcaatttcctttttaggtctgatagttggattttatctgaattttggtacttgaactctggaatttacacatgaatgtacttcctccggctttacagactctaatcgaggacctcggttcactacctggggtcggtccgcgcacggcagaacgctacgcatattttttactaaaagcagacaagaatattgctgatcggttgagcgcaagtgtctcaaaaattcatgacagcataggttactgcaaaaagacctttgccatagtggcaaaaggcaaggaattgtcagatctatatacggatccatcccgcgacaagcatctagtggctgtagttggcgaaccatttgatattgttgcccttgaaaaaacaggccaatatcgtggcacttatcacgtccttggtgggttggtttcaccgatagacggcgtanggcccgagcagctccacatcgcagaactaatgactcgtattcatgaagataggtcaaagagataatcc

SEQ ID NO: 81119 - DNA, 553 bp, Arabidopsis thaliana landsberg
  unsure (1)..(553): unsure at all n locations
gttgccagaacatctaaggcaaaattcacgtccggcaattcttattgaagcatcttgccatcagagtaccgtttgttggattattatctatgaattgtggaagattatccttgccactgattttcaccttgtcggcctcgatggctaggttttgtcctaaacacacctacagcaaccttcctgcagcttcgccacttgcagaggtgtcctctccggtggccagagaatagcttctaatcattgactttgactgtgacggcactactgagacagtgtccctacatcctgtataccagctcctaatgggggcgggacgtgaaataattgacttgtctgtgtgttctatttttctcctacctcaaatcagagttcacgcacaggaggactgaaggcacaggttaactcttctattctccgcgtcatagtacactagccctctataggagctatgtgacaccgtctatcatgtagctaggtgatgcaggaggatttagcctgcatgcataggcgttatataagacttgcctgcccgtaagntagctaaactcgtaat

SEQ ID NO: 81120 - DNA, 561 bp, Arabidopsis thaliana landsberg
  unsure (1)..(561): unsure at all n locations
agtttggatattacacatgactcaatttattcgggatttctttttttcgtgtatgattcatgaaaaagaagggatgggtttacaagaatatgatagttttgtacgttatcatcttaaatgtattttgaggaaattcgaagtgacaaaatatgccttttttttatcacagaaataatatctatggtttaaacaaatcctaggttataaaactaggttataaataaaacaattaaaattttcaaaatcacaaatgtattaaacgtataaagaaagttgatatgatcaaaatttgctttactccttttgcttctttgcattaatcaaaaatatcaaagagagtatacaagatttgtagcatggaaagttttctcacaaaactgcaaaagttttttattttatatttttaactcctacaaaaaaaaaaagatggcnnnnnnnnnnnnnnnnnnnnnnnnnnnnnnnnnnnnnnnnnnnnnnnnnnnnnnnnnnnnnnnnnnnnnnnnnnnnnnnnnnnnnnnnnnnnnnnnnnnnnnnnnnnnnnnnnnnnnnnnnnnnnnatca

SEQ ID NO: 81121 - DNA, 530 bp, Arabidopsis thaliana landsberg
tgtccttgttgttgcttctgcttctgctgtgttgggactttctctttattagcaactactttctcaacactcttgtcatgctcattacttctgtttctcttcttcttattcttcttctgatcgttgtcccgacccatttttttctcacacgcgttgatgaacaaagctcgcgaagttagggtttcttctatgttatcgctatcagctagattcttagaatcgaaacaaaacgattaagtctaaacagagagattcgacgaagctagctcctagagaggtttttcttcgaggttaagcggcgcagagcgaggaggaagaagaagaagaagaaccgaaccgcctttgaaagtccaaaagggtttaacgagtctcatatttaagtaatcctctcttttttagttaatacattctttaaacctatttatgtaaatatacgaaagtttccttttctttcaccgacgtggccaaattaatcttagagaattaacttttgtttttttttggtcaatatgcatcaaatctagaacaat

SEQ ID NO: 81122 - DNA, 249 bp, Arabidopsis thaliana landsberg
attgttaattaggtaaaaattcgtgattgtattaggatgaagcaatgggattggtgttgagtgcagcttcggttaaaggatggacaaccggttccggtatggaaggaccgtctctaccggctaaaaccgatacagacacggtttcaacatttccatggtcattattcactaaatcgcctcgtaggcgaatgcgtgttgctttcacttgtaacgtatgtgggcaaagaactacaagagctattaatcctc

SEQ ID NO: 81123 - DNA, 259 bp, Arabidopsis thaliana landsberg
cgtgcactcataaactacatcaacatttaattctgcccatggtaatttttttggatcacgctcagcgactacgcgaattttatcaccgttgataataagatcattaccttcaactgttacctctccaccgaacttgccatgtgtagtatcgtagcgagttaaatgcgcattcgtttccacatcgcctaaatcatttatcgcaacaatttttatttcagggtgacgttttgattcgtatagcgcacgcaaaatattacgg

SEQ ID NO: 81124 - DNA, 426 bp, Arabidopsis thaliana landsberg
tatatattttctcttctaatcattgatatctaaaaacgatgtgtttctagaagatcgacaaatttgtctatctatctataataatatatatattgcatttctaccaaactctctttctcatctttgttttttgaggtgtttgttgaaatgtaaatttctatgatttttcattcgttttcttaagtttgaccaaactattttgttgactatgttgttgcttggagaagaagggaaagagaggagtgttaatcttctagaatcgtaatattttaagttgactctttctaaataatattatcgcttatcaaattatttgtagataggcatgatgacattagaattttagctgttgatctattgttatatatgtttagcttgttagtagttcatccccataaactaaagattgcaaaccttaaaccaaaa

SEQ ID NO: 81125 - DNA, 550 bp, Arabidopsis thaliana landsberg
acatgaccgaaataaacctcgaacaattgctccggtaatgtatgtaaaattggtgtcgatacatatacagtatatctacacattatataggagtgagggattcgtgatatattaactagagttgcatcatcagatagttatttttatattggcaactactattttatgcttgtaaaaatacacagagatggttcttggttacaacaaggaatatttcatatgtgaaatctgaaaggcgacaatattagactaatatagcaaataacatgatatcaacgtatgggagtgtaaatgtctgaatgttccatttgagaaatgtcctcatcatgtgacacaccgtttattaggctactcaagttagcttagaattaagaagctagaacatgtgaaaataaatagaaaacagaagagaggaaacataaactaataacagaacgagaagttgaaccctttggatccaattaaatgaatattgtggaatttcaaaatgtagttcatgtgtaattgttgagatctagtacatttgaatacatttgaaatcattttggtt

SEQ ID NO: 81126 - DNA, 246 bp, Arabidopsis thaliana landsberg
taatcagaatactaatattacttaatatgttggtacaaattgaatcatatgatcaggtgggaccttaatagcacgaagagtggcggcacgtgaggcacacgacatagagagatactgcattatgagaaattgtgactatctctcccacaaatgacgcacaagccactctatttaataaatctcgagaacctccctgattttctatcttctatcctcaataaataattctctgctgattgtggacat

SEQ ID NO: 81127 - DNA, 599 bp, Arabidopsis thaliana landsberg
  unsure (1)..(599): unsure at all n locations
gaaaccgcacgtgcatagcgcaaggttgcgttagaaccggctgttcccatattaaccatgactaccggcttatctgcgggtatagcaaactcctgtttcaagcaacaggtatgttgcttatgcaagaattgcgtacgaacggggaagcccacatagcgtacctgctcttgcggaatttctgcatcgcgaatagtgtcttctatttttttatcatgaaatgaaagcccaaagaagaacttcttatatgcaggcttatgcaaaccattgatatagttgcttgcatctaaatcacaggtaataatagcaaaggggacatttaaccgttcagcagcnnnnnnnnnnnnnnnnnnnnnnnnnnnnnnnnnnnnnnnnnnnnnnnnnngcttttgtgtttccacaaacagctctaccgtcgattctatctgagaagttaacatacgcatgctaaagcgtcccaaagcacaccaagcctgagcacaccaaatcgactgcgtttgcaagaaaaaatcatacactttttcgccgccataggtcccggtgcttaccttgtgaatagggtcaagcgccatatcatcgcagtgaacacgttgacgatagca

SEQ ID NO: 81128 - DNA, 581 bp, Arabidopsis thaliana landsberg
aagttggttttatattattacccaaaaacccatgacaatcatttctttcaatttgatgaataatcttatagtttgggagggagaactaacgactccaaatcaaattataataatagaattactagatatatgatctacatactatgtgtggctatgttttattgaaaatattaacattttggaaaaagatacataaaactgttttaaattttaaacaatgagttaactacaaaaaaatagtgaaatgtataatatagtttatgataaatactagataacttgatttatataaaatataagttccaaaaaagaaaacatataaaatgaaatacaagctagataactattgtatcaatgacataatattgtatatttcttgttcggtaatcatattttaattatcgctattttctcaagactaattatttttcattcaaactttgttccgcttattttgcaccatatgttatgtttgtccgtgcatctaacactagccacatttatcaataatttaatatcatgtgtacaccctgagagtttttttattcacatgactttggtacatacaacaattacacaca

SEQ ID NO: 81129 - DNA, 567 bp, Arabidopsis thaliana landsberg
  unsure (1)..(567): unsure at all n locations
aaactctcctcctttttatcactaaaccaacaagtaatgaaaaagaacctttatatatcatacacatctatatctagataaagtgtataagtagagtgtgtagagtgtatatatagatcttgtctcaaaaggattctggttcttaatctagggcatgaattggtttccggtgactaggtggtggtggtggaggaggagattgtggtagtggtggtggtggaccaactgtgtacaggttctacgtttggtgtactgattgttaagagaatatagcttttgtgttggcatagcagagatgccaagccagtctaggccaaacaaatgctgccaaactcatatccattcttatagactgttctttggagcgaattaatataaattgttttcaatccgcaaaagtatatttgtgactttacatcaatgctagtcatgctacagcanggaatctctactattattaattggctgtaacacccctgtttttgcagaatataaaaattgattcctagttccttttctagggagagtcttgatctttttttttcttttcttaggccaaagaaatgc

SEQ ID NO: 81130 - DNA, 558 bp, Arabidopsis thaliana landsberg
gtgttatagctgtagttgactaaaggattcggttttaaaggacacgtttgtgtggtatgtctgaaacggggttcctgcagctgctccattggcatcggcttgcctgtgtactctaccttcaaggcaattgagagtggagatgagaatgaacaacaaaagatgcttatttactgggcaggtgggatattgttactgcaattgttatgacctttctaattgctttccttattctttgactgtttatcttcaatagttttttttcaatctcccttggccttctttcacatggaatttgatggggttttttctctatcttcaccttctttgcagcttatggttctttcagccttgttgaagtgttcacggacaagatcatttcctggtatgattgacatcttgaaactatatacaatatcttgatggttttgctgttatgttagacaaataagatatttcttctaatggactttatcgagagatatggcttgattatctcgataaactcgcaaagtattgatactcaataacctcgattatttgcacgttcccgctgtacta

SEQ ID NO: 81131 - DNA, 538 bp, Arabidopsis thaliana landsberg
gtatcaaattgacaaatcacttttggccgatataacgcttgatttctaaagtcaactatttttaaccttgaccggaggagatgaatggtcatcaaccttgagcagaggctcaaaagggttcttttatcctaaagccgatctggcttatgtattttcaaatctgttaaaagatcagcaaaccattacttatggaaaagtacgggtggcctattcaaatgtaggtattccgccgttaccatataggaatcagttgttttataccgttccttttatagctgatggctataccagtggtttaagtttcccttattcaggacaaaatggctatgccattaattcaagggtgcctgcccaacaattaacacctgaaaggaacgaaggctgggaggctggtttagaaatgagattcctggatgatcgcttagggttcgatttaacactttatcagcaaactgctcatgatctattgataaatcaacctgttgctccatcgtccggctttcaaacttattttcataatatagctaaagatagaaat

SEQ ID NO: 81132 - DNA, 216 bp, Arabidopsis thaliana landsberg
agtttactacacttttattccaatttagtccctaaaactttaagtttcccaaacaatttcccaacactttaagataggggagtcagcatcgtgcttgaacacaatgcaccgcaccatcaaaactgaaagttcactggaccaaaactcagctaaaaagttcctgtaatattcagtttcttaatcgttccttgggcgagtttgaaaacaaaaaatgta

SEQ ID NO: 81133 - DNA, 540 bp, Arabidopsis thaliana landsberg
aaggcaacgtcgcagaaagtgaagcgggtgcccaacttgttccattaaattgcagaacctgattcgaagttggggttgaagctgccgctgcaaagccctgaattttttgaactgtgaatgagcccgtgtccgtcattgaaacgtcgccaccggccgatacttcagtcggaacgttggaaccattcccaacccagagtttggtgtcagttaaagaaggcaaagtggcagaaagtgaagccggtgcccagcttgtgccattaaattgcagaacctgatttgttgttggagtgctggccgcaacaccaatattttgaatggctgtgactttcaatgcacccgcatttgaaagagttccgtcaccactcatggtgacaggctgagcggtgttacccgcattcccaacccagatattggctgaagttaaagactgcccaacgggtgaggtcgagatcgtcgccggcgcccagcttgtgccattgtcattgtagaacctggcttgttgtcggagctgaagttgcaacactgacattttgaatggcc

SEQ ID NO: 81134 - DNA, 511 bp, Arabidopsis thaliana landsberg
atcgccctatcttattatactttcctgccacggtttctttctcttgtgacgaaattaatcaaatctatttagcgcggttacgcgaatacctcttcatattttcatggcaaagtgttttttttttaaccacaatatttatattttatgccggcacaatttatattatattcgtttaaaattgaacaaatcaattatgtgcataatgatatttacaagaatttacctgaaaatgattagtcggcgaattttgaaataaagtgagttaaatatcaaaatatttgttttaattgattccttttagtcgttgaaacttgaaccccaacaaaaatcgaacgtagaaagataaggtcgccaaaaaaatgagataagcacaaattttagcgttcaagtgtatggaaacaaaagatgctaattactatgcaatacaataattacataactaatattattaccaatgaagataattggctattggcgtgatatggtgtcatgttgatgatcagaagatata

SEQ ID NO: 81135 - DNA, 374 bp, Arabidopsis thaliana landsberg
gaattgcggctgctcgcgagcgtgctgcccgaccagggttttgccttttaccgcggacgtgctgctccgggtgaacctgtacgtcctggtgcccgccagcgcgggcctgctgatgggcggtgcggggccgttcgggatggattccgccgggctggccgaatgcgcggagatcctggcgcgcgggggcggcgggccgcggggcttgcgactgcgggggctgcacgcgcacctggccagcgggctcgacgcggacggcgcgctgcgcgccgcgaccggggtgctgcggttcgcgcgcgagtggtgcgccctgcgggaggtgcgggatccggagatcacgctcggcggcggtatgactgtcgactaccggctgactt

SEQ ID NO: 81136 - DNA, 434 bp, Arabidopsis thaliana landsberg
  unsure (1)..(434): unsure at all n locations
agcattnctggatcgnggcaacaaccatttcgaggtcactcccttcgtttcccggtataccgggtttatcgtctcatcttgcgcttcggtaccgtgggatgtggaatcatgccggtctatcgggagagagtcgagcttttccatctcaggattggcaatatacagtttaccttcgcttccggttatctttccggcaagcttcacatacatcccatccgtgagcatcttggcaagatacggctggttgaaccacatgaccttcatgcgcgcagagccgtcctcgatccatccttcagcgatcggagtgcgccgcttccatgctttgcgtgtcttgaggcctccgatgacgccgaagacgatcgcatcctggcctttcgtgaggccaccgaccgactgtatatccgatatatcctccgagcgttcgggaagatgat

SEQ ID NO: 81137 - DNA, 378 bp, Arabidopsis thaliana landsberg
  unsure (1)..(378): unsure at all n locations
cttcgaccagttaccatcttcaaaccgaacctnggaatcaaccannatcaaaaacttcaagctttgtcctctcgcttttcgaacgttattagtgcttctcgttgcgtctcgttagctacccgatacatctccgnntcgtgcggtctnggcttatagccccggtgagcccaacacgactttggaagaggggacaatcgaatgcgcattctcgaaaggggaaacgcggttcttactgtgatggctatcggttcggtcanagctcgtnnttcgtggcacggtcctaattggcgttgggaattggttggacctctgtctacatctcgtattcgagccgtcgtctgtcgaatagtcgatcangntagtcattaccgctggccg

SEQ ID NO: 81138 - DNA, 405 bp, Arabidopsis thaliana landsberg
tcttttcgatcattatatacacattgcacaatttaatatagatatagagaatgaaggaacacattcatttgggttagagaataggcactgatcatttgaaagtgttgggggaatgagaagcacagtatgcacatgcctcttcttaaaaaaaatgctaagagataaaaagctaaaacctttttttgtgttgcacgttccattgttcttccttttctatattttaattcgttacaacttcctaacctaactttgtattatagatgatccgagccatataattattaatctatttcttttggtttgaagcaatttccattgataattctcacagtatgcttattgcatgcatatagcgacataactaatcgtttttataccttataacatttttacatggaattcctt

SEQ ID NO: 81139 - DNA, 322 bp, Arabidopsis thaliana landsberg
gaggaaaacccgattattcgtttttcacattatgagtattctttcaaacacttacatttacttttttttttttttttctaatttaagcaggggaacctttttgatttctcttgtcctttcagggctatgaagatgttaaagccataaacttggacacttctaacttacccttcaaaggtcatatcgcgtttcagcatatgtataacctaagatatctgacgatttacagctccattaatcctacgaaggatcctgacttgttccttccaggggaccctcaatttctgccgcctgagctaagacttctccactggacatgtta

SEQ ID NO: 81140 - DNA, 378 bp, Arabidopsis thaliana landsberg
  unsure (1)..(378): unsure at all n locations
cattggcgccgagccattgcccgaccnnnnnnnnnnnnnnnnnnnnnnnnnnnnnnnnnnnnncgatcttcagcgcgggggggatggctatgacgtcgcggccgaagcgctccatcgaataggggccgggcggcgagccggactggccgtggccgcggcggtcgtagcgcacaacgcggaagtgctgcgaccacgctgccacctgatcgtcccacatatgcaaattggggccgagcgagttcgacagcatcagcgccggggcattgtcgggccggtgacctcgacattgacggcagccatcggcatcattttcggcatcggcgtttcctcaggcgagtcaatggcgcacttagggtgatgtgcgcactgagcttgcgg

SEQ ID NO: 81141 - DNA, 558 bp, Arabidopsis thaliana landsberg
  unsure (1)..(558): unsure at all n locations
tttaccttttactttaatggttacacctaccagcgggttgccggtagtagaatccgtgacggtacctgaaatatgtaggggaggcggtagtggtacctcctgctgtttaatatcagagcttattttccgtcttacgataatagtgttgttaaaaatgttatacgtcagcggctgacctttgaatacatcatccaatacttcttttatgggcacccctttcaggttgatatcgactttccggctgtgggaannnnnnnnnnnnnnnnnnagaaaattgtaaccggtttgcctttgaatatcgcgaaagacttttcccagggagatgttttgccgggaaatggtcactgtctgagcagtgcctttggcactgnnnnnnnnnnnnnnnnnnnnnnnnnnnnnnnnnnnnnnnnnnnnnnnnnnnnnnnnnnnnnnnnnnnnnnnnnnnnnnnntttcctgcccggaagaatcccgctttggggtaaagctgtaaatctcatacctttgtatggtttaagtgaaaaataaattgttaacgcaggttgaattttgcctgattt

SEQ ID NO: 81142 - DNA, 261 bp, Arabidopsis thaliana landsberg
ttatctgcatttcatacccagataaagtgtcgtagggagagcccggatccatccacacgggtgcgagagctgtgaagcaggagaaggctcgcatcgcacttaagagcagcccgctcaacagcgtggtatgcccgcatccactaacaacttgatgtcccgggcagccaatccagccataccctgccattcgcaatcagctgtccgcacaacctgaaggatgagctcatgctcaattctgggtcctactcaccttcagagcaa

SEQ ID NO: 81143 - DNA, 616 bp, Arabidopsis thaliana landsberg
  unsure (1)..(616): unsure at all n locations
catgcaaaaatgcagctgaatcattggacctattgatgaaagctttgcttcaggaaccagttcctgaaaggcagaaggggttgattaaaggaggcaggggaaagattgatgaagcaggtaaatttatggatgaaaatactttgacggaagtaaagggagtaatggatggtttgatcaggcatatnnnnnnnnnnnnnnnnnnnnnnnnnnnnnnnnnnnnnnnnnnnnnnnnnnnnnnnnnnnnnnnnnnnnnnnnnnnnggaaggacatggcactttccctttcgggaaaaggcatagacgtgatactcacctatcattcaaggaaacaggaagcggaggaagtagtttctgaaattaaagcaaatggccaaaaggcagcggccctgcagcttgatacgggtgatctgaaatcatcagacggtttcgttgaccgtctttctgcctccttgcaggaaacctggcaaaccgatcagtttgatttcctggtgaataatgccggcatcggcaaatccatccccatcgctgaggttacggaagaagactttgacccannnnnnnnnnnnnnnnnnnnnnnnnnnnnnnnnnnnnnnnaaactgcttcaagataaatgatc

SEQ ID NO: 81144 - DNA, 553 bp, Arabidopsis thaliana landsberg
accatttcatttagttgtcatttcagctaatgtaaactttataatgttcaattgaacaatttacatactaaggggagactgggcttttcaatattcattttaagttttagtattttctattgccatgttacacatatgtgacattaatcccaccgacgtcaaccgttccaactttcaagtttcaatttcttcattaattgtcattgtctcatgatacttggagttctctgagttcattgtcaactgatggtgacttaatcttcaacttcgacatttactaaagagattcctacactaatcttttctatcttagcaggtgatcacttcagccatgtgttggtttcggatcggctctttggagcttagatttagatatcgacgtccattgatacgtatggctttcaatgtgagattaaaaataggttttgttggtggaaccatttttcaacagtttttcccaaattctatacgcatattcaacataaaaaacactctgaccagtggtcattcagacataattcacgtgtcgagaacgtattacatcataacatgc

SEQ ID NO: 81145 - DNA, 567 bp, Arabidopsis thaliana landsberg
  unsure (1)..(567): unsure at all n locations
gactttattccggctgtccagcgtggttttccagaaagcatcaaaatcggccgggcgttgcaactcgctatgtatcttttccgggctaaccccaaacacccgtttcagggtatcatcgttagaggtggtattgatcttgacgataagcttgtagaaacctgccggctttttagggatggtcagattataatcttcacctgaatgatacttcagcctgatggggaacttattcgttgaaagcggtttaccatcatccgtaagtacatcataggtaagcgtaccttcctgtgtttctttataggtacttttcagctttaccttgtagccaacagtattatcatcgctgaaaataccattcttgtttttggcattcacttcaaaaagtacctgttcctcctcggtactatctttagccatgcgcatggctttcacgctataactgctgaacagcagcataaccgaggccagtaaaatgaagtatggtttgtatcccttcagcattatcagatatttattctttcgttaatttcaatttaattcattcttcanaacctacttacagtatct

SEQ ID NO: 81146 - DNA, 569 bp, Arabidopsis thaliana landsberg
atgaacaccaacccaaaacctgagaaagtgagctctgccgcatactcgggatatgcttcttttctggaactcggaagccggtcgcaaacactcgagatcggcgtgcttgaggtgcagtgtccaaggcactttgccattgaacagtttttgctcgaagcccaccatcatggtgcccgtgtaaagccccttggacatccactgcttgaagttgcgtgcacgataaagctcatcaaacagccaggaatcatggaatgccttgggataggcgtccagctcatcgtgtgatctgttgttggtgactgcatcgaacactgcttcggcgcacaacatgccactcttgatggccgcgtggctgcccttgatgcgtgatgcattcaaaaagcctgcgtcgaaacccaccaatgcgccaaccgggaacaccaagtttggcaggcttattaaagccgccagcagcgatggccgcggcgccgtaagcaatgcgcttgccggcttcgaaatatttgcgaatggcggggtgcgttttgaaacgctgaaattcttcaacggagacaggtaggggttttgtaggc

SEQ ID NO: 81147 - DNA, 551 bp, Arabidopsis thaliana landsberg
agacacttgggaaaccgatgatgccaattactatgaaatttttacgtttgatgtaatgaagcaagccaaaactggtgggaggagattgttggaaacctatttggggaaagtagtagagaaaccagagctgagatggatgagagctttggcatacattgtcaatatagtcggtgaatcttcccaatactggttcgtagtttaatctctatgcatggatgtcatcatcaacattgattatttttagtcctgaaaattattatgcaggactctcagattgtatgagacatatgatctcattcaggatacagtattaagattagctatcgatataacttcattacgtagctgttatagtaatccatttgattggagacgaattttttttcccaaatcttgacagggttgacagagcgaagatgattgagaagactgttgtggatgtctcacatcaaatgaatatctttggatcaaatgacgctggtttattgttcatttaccaggaagaggagaacatggaaaactttaagagaaacgtatacgatgagatgaac

SEQ ID NO: 81148 - DNA, 147 bp, Arabidopsis thaliana landsberg
aagcgccaaacaaaccgaaacggagccagcacacaaagaccaaaggccagctcagcaaccaacacgccaaaacaaagcacgaggccaacgcagcagctccatcgacagcacccaccaagaaaaaggccaggccgggaagagaaacca

SEQ ID NO: 81149 - DNA, 549 bp, Arabidopsis thaliana landsberg
  unsure (1)..(549): unsure at all n locations
gagtccttcgttatatcaattctcctctcactagagttttcttcctctcggtctcacccacacactacaagtatgtgaccactctctcttaatcttaaaatgaattattcaaccactaaactatcataaattagtttttctttgtttttaacactacacgagactttgggagctatgtgatgaatgatgataattagcattatacgagacatatataagcacgtgtagtgttgataattgataaattaattatcttgatattaacgacgcaaattaataaataggaaacatatgcgttggattgatagtttttgctagatgttgccaaactatattaaataaattggcttgctagttgctaccaagctactctctctagtctttagtaacccaccattgtgcatggcctttgctagctatagctagaaagggtagacgtgatgaaaatacgtgtgtatataattgtactagttnttctttaaatggtaataatgtttcaacaaaagtagttgcttatgagttataatatgtcatttcaaaacgaaaatt

SEQ ID NO: 81150 - DNA, 507 bp, Arabidopsis thaliana landsberg
cagctgttcctcggtcagctcaacgaggtgaccgagttccgcttgtacttgcgtcgatccgggctgcgtccggcgggcggtggcgccacatcgccacttccacctcagtcatcaccgtcgctggatacagatggatgacgccttcttcgtcgacctccaccaggtagcgcccctttggacgggcgtacttccgcagcggtgccctgcctcggtcgtccaactcgatgatgtctgctgtcatcggctccaagccctcgctcagccaccagaaccccttcagggtactacctcaacggggtaatgccactttggggcgaattgacggcaagacagttcatgaaatggccagatgctgagccaacaactcggcctggcccgtggcggaagctactcgggctgttcgcccgccgcaccgtgcgggcccgtcccgggtggctcgtcgtcggcgagcaatgcgtcgtcatagtgcattcggtcttgcggcatggcagattttgccagcacccc

SEQ ID NO: 81151 - DNA, 583 bp, Arabidopsis thaliana landsberg
  unsure (1)..(583): unsure at all n locations
aggaacaaagaccgatagtaatccttgtagtgctccgggaataggaacaggaggtagttttgtagctacggttaatgcaaatggtggcaatgggacctcggctcctgcatcacaatgttgcccgggaaccggaggaaatggaggaggaccaggtggtggattaggtggggctccgaatatgccaggtatgcttccgggaggaggtgctggaggcggaagtaataatatcctggctaaagacggggcagacggacttataaaaatcagctggcagttgggaagcacgctgtcaattgttggagatactcttatttgttccggtgacagtaccactttgacagtaccaggaggcagtacttattcgtggagcannnnnnnnnnnnnnnnnnnnnnnnnnnnnnnnnnnnnnnnnnctactatgtatacagntattgcaagcaataatgccggctgtaccgatacgcttacggtacaggtggctgtaaaccatattcccattgccaatgcaggagccaacagcagctactgttcaggaangtatactgntataggggcagcagccaccacaggntatacctattca

SEQ ID NO: 81152 - DNA, 291 bp, Arabidopsis thaliana landsberg
ttaaaccttcaacctccaaaatattctacaagcctaagatgtagccttcgttggagaagaaacaaagacaaacactgctattgacttcctgataaacatccaagctttaagaagcaataaaaaacttgctaagtgtgataggtactcgaataatactttatcgtatgtgaaacactgagaataaaaacttaaaccgtaatcttaatctaaaagcccaaatctagcatactttgtaaaagataccaaggttaagacccatttcgtcttaggctaaaacctctcagcttttac

SEQ ID NO: 81153 - DNA, 533 bp, Arabidopsis thaliana landsberg
  unsure (1)..(533): unsure at all n locations
tgcgacagataagcacgctgacacccggcggcttcagccaatgtcgctcgataaccccgttgcccctcatggtcgactacgtaaccggcgatcacatcgcgataactcttgtaggagaagatgttcatcgttgtttattttttctaaattattatcgatataatttataacagtcatgttgagaaaacaaggtgcctgatcgatacttgctttaacaaggctggccagcctcccaagtcccgtttttgtcacatctttgggagagaagtttatgcgtttaccttttgcattatttgcctgtctcagcctggccggctgcagcacaggtcatgatgacaatgacaatcagaccgcgccgcaaacgaaaccggagcccaatccggaaggcactacctcagcggtggtgcgatacgctccgggaattgtatcgctgntatgcccatgtggcggatggcggntacgtggttaaaggtgctgattccgtctgatctgacgccgaatacgactgatgtctcgttatggcctcgctcgat

SEQ ID NO: 81154 - DNA, 602 bp, Arabidopsis thaliana landsberg
  unsure (1)..(602): unsure at all n locations
tgccgataccaatgataaagttatcaaatcattttctgatgcctggacagtagaattaggcgacaagattcaatccgcggcaggtggacggtaagttcttagcaattagaactcgtgcgaaagtaaatgagataaaggggggattcgatgttcttcggcacactctacccgtctggccagatttttcaaaatgggttgaagaaaagcctaaagataaggataaagtctctcgctttgagagcctttcctttttctctgtcgaagctcagcgagatattcaccaagagttaaaggaaaagaactctttcgtcgggaaggtgttgtctaaaatcgagtacgaccctaccgagataaaagagctagaggatgccataaaaagcgtaaatgaaaatgcggttaataagagcaaggaacttaaaaatctaaaggcgcagctgaataagctcaaccaatcctttgatggacatggaaatactgaaataacgccatttcccaaaaaagttcgcgatctagcaaagcacttctcggttcattttggggatactcctgaaaatactttctcaatgcagtatcatggaatgggaacctgcagntgggcatcg

SEQ ID NO: 81155 - DNA, 541 bp, Arabidopsis thaliana landsberg
acgcaggaccgcgtaagcacccggcgcagcgaagaagaaacgaaaaccgtagttggcatcgccctgccgggaccggccgaggaaaaaccaaaccgcggcgaaggcgccgccgacggcaccggtcgcatcctggacaacggcgaagggcgcgcactggccgagaaagtgggcgacaaagtggttttcggccctaactcgggcagcaacaccgtgaaagccgaaggcgaagacctgctggtcatggccgagaacgaaatcctcgccgatatcgaaggctgatttccccgacttcccgttactccaaagaattccaaggaacaaacgaccagggctgctaaagacgaaaaattcggcgattccgctcgaaagaaaaagctggctggagtcaacgttccggctgacgcggaaaaagcgaccctgggcccgaaaggcacgaacgtggagccggccaagagcttcggcgctccgaccatcaccaaggacggcgtcaccgtcgccaaggaaatcgagctgaaagacgcctaagagaacatgggcgccc

SEQ ID NO: 81156 - DNA, 666 bp, Arabidopsis thaliana landsberg
  unsure (1)..(666): unsure at all n locations
cggaaattcattcagttttccatcatggatgcaatctttaccatcaggcaaaagcatggaatttgtctatttccactcagcttctccggcagatgtcttggtgttctaactattctttggaatgatcagtagaagtgtttcggtgtgtgtaaccggtttactaacttgtaaactaattcacctgcttttgaaaatattgggtctagttttaccggttggttagatttttgggaggatgagaaagaagaattctttagcttgtacacatagcgagagatttgagactatgacattaggattaatctgtttcttgtaatccaagaaagcctttgcacctttttagtttttatttttctattactataaatcaataatttatacgttataaatagattcagtttaactcagtaatggtagatccatgatttttatttttttatattgtacataaagtaaaaggatatgtttgattcatacttcaagtatagcatctacaatataactaacgccaaaaatataaccgttatttgcatttcacaaaacattttctcaactacaataatattaattttcacagaatatgcgtcaacatataataataccgtatgcaattactttattncaaagtttttttgctatataaatacattaggtagtaattatcac

SEQ ID NO: 81157 - DNA, 568 bp, Arabidopsis thaliana landsberg
  unsure (1)..(568): unsure at all n locations
cgtgcgagaacttgtattgacaattcgccttgcacgggaagattaatgccactttttgttttctcttccttttgctgctgggcagtgcctgtcaacaaaacagggggcaagaagtgctttctatctatatttacagaaacaaggttgccaagagccaagatcgcatcagatggtagttcaacaacaaattgttgtttttgtgatttatcgacatgcttctgcggaggttgtactttcaacgcaccagacgaagaagtggtttgggtaacaggaattgttggtaaaggtggcttagctagcatggctcgagagtaaattcagatgagtttgtaaatcgatgagattttgttgttcgttgtagagtactagtacgagtttagaccgcaacacatagatccttgctgttgtaatttataaataaataagggacacaggcataacgagctgagattgaattaattctacgaagaataaaatcgtatgtacatacagttcanaagtgggttggttggtcgttcagtaaaatatttaaaatattattctagggaatgaatactaatgaaaagaa

SEQ ID NO: 81158 - DNA, 436 bp, Arabidopsis thaliana landsberg
taattttaaaggtgtctgagcgattattcacttatgttttttctgacacaaattaatggaggggcggttttatcaaataacaaacccaaaaatgcatttttctttaaatattttttatcatatctgtactactagtaaccttatacaagctaaaagtgaattttttggggggaagttcaatagactaacaaaaaaaaaagttcattttctcttgctgcttgtatgatattcaattagatgagccatctataagagcttcatttttgctttccgaaattccctgtgtagatcaatctaacatttgagaaattgaatgaagaaaattttcttataatgacttaactttatagaattagacaaaagaatataatctacaggtgatatgatcatctatttagtgatttgaagatataatccattattagttgctttttga

SEQ ID NO: 81159 - DNA, 492 bp, Arabidopsis thaliana landsberg
tggtccatttggattaggctggtgagtgttaaagcagcctccttttgttaaaaactattgcctgttacacaatgagctgagctacttggatagaaagcttgacgatgtgtaatactcgcgactggtccctctgttgttctacgaacaatatcctaggttatagagactacccgctgagctctctacctgtggatgaggcgtctctctgtacagctctcataggcttatacctgatttggactgtaccgaactatctgacatgtctcaactactgactgtgtcacctatccctgcacatgagtgaatggttgaaccctaatggattaataagcaggacttttctagctcgagagggctctgaaacggatgattttatttacagtttttatttgcgagtgtgcacatgtgcttgcgcataatgatggatgctatagatataataggtatcgctatatcccattggacaatgcggcccatgacataaattacccc

SEQ ID NO: 81160 - DNA, 618 bp, Arabidopsis thaliana landsberg
agaattatcggagagggcgggccaaagggccctataaaaaaaacataaaccaaaagttgaccaatgttacttacttgcggtttacgaagccttatggaaacctgtacaatatataatttcggccaaaaattgaaatagtataagatattaagataccttgagcaaaagcccattatagatgtaaattcttattttctacttcaacgacatacttgtccatggtagagatatagcacagaaccgattttcgatgatgatccaaaacaataaaatgcatagataaattggcttttaaccatatgaatattccatagtttcaaaaatccaaaaagacaatattaccacctgaggttttaattcccaagttaaacctaaaccaccttgtctataaatgcaactttcttaagaatatagaaactgagattaaagcaagaaaagttgaataatttgacctttaagcattataagatcaaaacatgacacccacgacatcgttttgttgatgtaagaagctgcatgtacaatcttgactcttggttggtcatgggagaatttatgaaacttaaagttcagttcttgaggactgctgaatctcaagaaagaatttaccaatttaat

SEQ ID NO: 81161 - DNA, 576 bp, Arabidopsis thaliana landsberg
  unsure (1)..(576): unsure at all n locations
tcattttagttatagtagataaaataaattaaaacgcgcatttggccggttcggatatctttaaacaattttgacttgtttttttataacatgttttatttatctatgaatattcgaattattgaatgaactttcatctccaacatatcctcattcgaatatcattgattattcgaatatgtcacttgtacttatatgaggaaaattgatgttcatttcatagggtatgactgattagtatagatatataaaaagaaatgcaaagtaaaataaatattttcaattattctacttttaatttgttgtccaaataaaacaattaaagaaaaatctcaattcatctacttttagtagaaacaagtgacaatattcaccccacaaatacatgaaagaattttgtttcctctaactttcattttcatttttttcctgttttcttttcatttctttcctttcattttcttctaattactcccaatcacatgcatagttttcttatccacatgtaaataaacttatccaacaagatttagaanaataccaaattaaaaaggttctaaatcaaatagtcaaaga

SEQ ID NO: 81162 - DNA, 594 bp, Arabidopsis thaliana landsberg
gggacgatgctctgcatataattgggcaccattcttgcatgctccaatttgttccatttaccctttttcaactttttttccttttgagcatggatcacaataattatgaattgcaccctcctttggttattttatctaagtggggtaggggacgacaacaaaaaagaaactattgaaaccattggcaaactaacagtggtttatataaaacataaatcaatgcatcaacctctggatatcgaataacgactacgggtataagttaagaaaccaatcttctatattctcttattaaaatatgattatttcaacaatttacgcagaattttacagttttgaaacactagaattttcccagcgttgaaaccttatttgtgtagcaactagcaagagaaagtattatatatcatatatggaaaagtaggcatcgctgtattaatattatagactttctaatataaatgatctcaagagtaaatataaatggaaaacaaccatcattcaaagtgaaaattccgaaaaatcaatgcacgtgcataccaattatgggtcgatacatagtttcttggatagaacctttagcagaattatggt

SEQ ID NO: 81163 - DNA, 562 bp, Arabidopsis thaliana landsberg
  unsure (1)..(562): unsure at all n locations
aataggtttagaaacaactatatttaatcgcatgtatttgctctttactactagtttatttcgacggccaggacgagtttaggctactgattacagattttacacagttggttagtctttgtaatttttattttcttttcgcgtctaaacaatcgttataaaaatttaaacgattttgaaaaatctacagtaagttatggtataaatattttatttctaaataacagccaactcctttctagtttttcataattattttatctaattttaattggttggtatgagtctggcattacatgtgacatagcttccaagttaggattaaccaaaagatcttatttctacaaaaccggatccaacccactctttcgcttgctttacttcacttgcaggttgttgttttcctctcaattcccataacagatagtataattctatcttagtttatatgtggctcttataaaaaaatcatttattagttgtaacctaatgatanatcanacttnanatatataaagtcatctaaaataccattgcttgatttgtcaaaagcaaaaagctt

SEQ ID NO: 81164 - DNA, 324 bp, Arabidopsis thaliana landsberg
caaaaggcacacggcagacaggccagcaaagggacgccgttctttgaacgcacgaagaggagcagagccaacacagcgaggcagagcccagccagagcgggagcgaccacccaccacccgggaacgggagcggggccgagaccgtcgcgagacaagggaacaggaccgtagcgaagcccaggcagggacagcaagacaaggggagccgaaaggaaccgaacaaacgaacactcggacaaagagcccgggcgaaacgccagcggagacaagatgccagaccgctgagaaaagacagaacccagaagagtcagaagcccgggcaga

SEQ ID NO: 81165 - DNA, 199 bp, Arabidopsis thaliana landsberg
tgaagaaatctaacccttacactggagacattaacaacatttctactgatgctcaccaatttttcttattaaaaacgaaacttgttccagattcaatactacaagttatggaaagactcatacaccacaaacactaatcttggcataatgagatatatatactatgagattgatccgggcgcgataagtaaccatataa

SEQ ID NO: 81166 - DNA, 532 bp, Arabidopsis thaliana landsberg
  unsure (1)..(532): unsure at all n locations
gtggatgcaagccgcattcgcaccatcagctactgtaaagagaatcagttctgtaccgaggagaatgaggcctgctgggggcagaaccggcgcgcccagttcactttggatcagtaagactggcattgacgaagaatcgcacataaaccgggagcacaggcatacgcatccatgccgtgctgccgtacactttcatcaggattaaaatccggcgcgttttgcgctttttagcaggtgccgtatgcgtaatttcttacgaataccccttgtctcgatttgtgccctcggactgatcggcgcgcccagcgcatttgccgccaacagggacatcatcgctctgcaggcacaannnnnnnnnnnnnnnnnnnnnntggtgaccgcgcaacagtcaaacgacgagcgttacgcaagcatgcacacgctgctgcaacagacggcggaaagcgtcaacaagattggcgccgaagcggactcgatgcagaaagcagtccatggccagcacggcgaacagggaaattcactgcagcagctc

SEQ ID NO: 81167 - DNA, 684 bp, Arabidopsis thaliana landsberg
cgctccgtccatcatacaaggctccctgtgttggagtgtatcttctccgatcggcactagcaaggaacaggtctatagctatgtcttgctgcaacggcctatgagcaaccttttatcacatgtttaatgcctctctagacatttggatttgttcgttcgaggaccagctgaaccattgcccaggtatcctatagattccacgatgtcatatgcgtacgggtacgctgtcagcgatatcattgctgtactgggtctcttcgaacgaatagcaatcgaattgcggaactttaagaatgcaccggcgcatttccaacaactcggtgcagaaattgatcttctgcaaaatgcgatgaggcatgcccttcgcctgattccacaaaatgacgctcatcgcgaaaccctcgaacgcgtcagagccattgttatgcactgcctgacacctctacaagcgctgattaataaaatgcggaccaaggaatccaacctgggacactttcgcacatcgaagagtttgagccacattgggactcgaattcattggtcaatgatagccaagcatgatattgacgaggttcgcattactataacgtcagaaacagtggccatcaacatgctccttattgcccagtcattgtacgaacgttcatccatacgttgtcaaatgcaagctgatattatggcaga

SEQ ID NO: 81168 - DNA, 571 bp, Arabidopsis thaliana landsberg
gcatcaggcggctggcgaaactggcccccgtcatattgacgatcttattggccatcacggtggcgatgatctcgcggtgcagccggtgttcgcggatcgcgcgcccgtagccatgcagggccgccgggaaatagttggtcagcacgtcgccgaaggccgggtcgtcgggcgcggtcgaggcgatcatgtcgtcgaacagggtcagcttggcgtaggcggtcgccaccgccagctcaggccggtaaagacccagcccctgcgcgcgccgcgtcgccatcagggcgttggacggcaggccctcaaccttgcgatcgagccgtccgcgtttctccagcccggtcataaaggcctgaatcgcctcattatcctcgcctgcgcgcatctcctgcaaggacagggcgagggtctgatcgtaattatgccgcagcacatgctgcgcaacatcgtcggtcatcgaggccagcagggcggtgcgtttctccgccttcagttcgcccgacgcgatcagcgatccgagcagaatcttgatattgacctcatgatccgagcagtccacgcccgccgaattgtc

SEQ ID NO: 81169 - DNA, 285 bp, Arabidopsis thaliana landsberg
acccatcggcttctggttgttgcccatgtcccagcccaccatcttgatgagccgtttttagggcttttatttctttatcctcccccaacaccacgatctttaagtcccattccagtgtcttcagcgcgttgcagtcttcactagagatgttcttctgcgggatacgtgcgatcttggcaaagatgtcctcgatctccttgttgccgatgaccttcttctgccgccacttcggcaggatgcgttgcgccccgccaacttcatcgatgacgtcgatgatcttgtccc

SEQ ID NO: 81170 - DNA, 614 bp, Arabidopsis thaliana landsberg
  unsure (1)..(614): unsure at all n locations
caatgtagctcagacattataataaaacatatacaatttccatatattcctagatattataattctaagggaatcttgggagtgaactaatgtacatcagaatgttgattgacaattagttagattagatttgtataagagttgaagagatttcgatgcgaattgtataatgatcctattaaaaggttaacaaacaaagtagtaaatgttacctgaaagccaatagagtagagatgtggaaatgataacatggcttctagttcaccttttaaagatgtccataacaacaaaaatgggatgcaaattattcctgttatgtgagagatgagatcagtttaaacatattacaagatttttctctaataattctgtaaannnnnnnnnnnnnnnnnnnccacattatttcaaagatgttgaggccactagatttccctaagaatatgaaaaaaccaaaattaaatgagaatgcctttaaagttgaactttattgactagactaagatgtgagaaaattttaccaatacttgaaatcaaaagcaaggttaagttgcgggtccatatattttgctggggaatacaagttcccttccccatttactttttaaacgataagg

SEQ ID NO: 81171 - DNA, 520 bp, Arabidopsis thaliana landsberg
caaaaactttattttgtggaaaattgtgtattaaattttgaggtttgaagtgatggaaaaaaaaaaaaaaagaataggggggttgtaagaattgtatggcattgctatatcttgagtgatttaaagccaatgaaaagtttgactatgtccattgataacatagatttgccaaactctataacaaggaaaatgtagatttcgtaccaaactgaggagtccactttctttaataagaggtcccccacgtgagaagtttagaagatgatacggtaaaaaggcatttgaagttaaaagaaggttgaaatacaattgcaatcaattatgttcaagtcttcctatatcacttacataagaatagagctatatatttacgttacaaagtccacatgtagacatgactcttttgggtttatgtacatattaaggtgttattacacattgatcaacatatcacaaaatagactattcattgtctttcaccacacatctgactcgagactaaaaagattcacaaagagat

SEQ ID NO: 81172 - DNA, 485 bp, Arabidopsis thaliana landsberg
  unsure (1)..(485): unsure at all n locations
gccgcgcaggcaattggcctcgatgaaatccagcgcctgcncgttttgccatgcggcaagggcgttgcgccggcgcggggcggaccggccgagcttcatcgcgtcgatgatcagcgccatcgccagcccgtcgccgtagagannnnnnnnnnnnnnnnnnnnnnnnnnnnnngcggcgatgagctcaccgagtgcgacgatcccgggatcgttgaagagcaggtgcggatcgtccagcttcttcgggtcgaggtcctcgccgaggcgcctgaggatcacctgcgtatcgaaatgaaggtccagatggcgcatggagcgcacgccgatcacgtcgacccacaggtccatgccggccggcacgaaggagatcggccgctgcccggtatcatgcggcgtggcggcgccgtctgcggtcatcttcaggagcggacgcccctcgccttccgcctcgagcaggatgaacagccgcggatcggcggcgatat

SEQ ID NO: 81173 - DNA, 483 bp, Arabidopsis thaliana landsberg
cgtctcaatgaaggtattgtggtgccaatactccaaatttgaatgtttggttttttgaatgatcgggggaagggtatcgtggcgcctgcgttccagaagattcccgatgactatatatgtggaaatcttggtactgacttgttgattgccgattcgcaactgatcggcagaaatggcaggattgtaaatcgcgattccattgatggatttgaagacattggtagcgggttggtgatcgtgaacacgaaggattgtccgaggcttttccataaagcggggttctacatagaggactgcatcagtcaggctaaaatattgggaagccgttttgtggctgttcaaaaaaataatgcgtgggctttatatacgcttgcaggaaaacccctgactttttttgattgggtcgatatctcggtgttcggcaatttgttggttttcaagagttccggggcatataactcacgacaatttgagtttgatcac

SEQ ID NO: 81174 - DNA, 400 bp, Arabidopsis thaliana landsberg
ccccgcttgtccaccggtaccaccgatgccgatagccgttgtaccttttgcaccaccagcaccaccgataccgcgggcgcgggggctaccgtcattgccacccgcgttgccggtcaccgtggcgtcatcggccgtgtcacccttggccgccgtgcccgttggtgccgtcggtgccacccacgccgcccgtgcccgagttggtaccgccggcaccaccggtgccgtccgtaccgccggcaccacccgtgccacccgtagtgccgttgccattgctatcggtgacgccgttctcgtcggtcgcgccccggtcaccggctccgtcggtaccaccgttaccatcggtaccggcgtttccaccgttaccgccctggacaccggtctgtaccgtgccgtcgtcaag

SEQ ID NO: 81175 - DNA, 333 bp, Arabidopsis thaliana landsberg
aataaacctcataaaaacaactatatttttccttttcatatccagaatatcatatatatgggggacggttaacgttttatacggcatatgtgtattgacacaagttgtccactcctaatcccaaacctgagcgcggcaactgatctgttgtttccaccgaaaaagtgcataaagtacaactgacctgcaccgacactgttgacagaccatgccgacaaataatcctttactgctcaataacatgaggctgtgattccacgactttcctatctcaaaaagctggcatgcaattcacatgacctgtctgcaccactatcaatgagcattttgaca

SEQ ID NO: 81176 - DNA, 462 bp, Arabidopsis thaliana landsberg
aacgttagaggaaatttcggtttacgttactttatgagctttggtaaaaaacaattaacatgctatttcagtgaggattggccaagctatttcatcatcgtagtacttgccacactgaagcagcttatggataactgcattagctctctcgttttctccgtaatcatagagcccgcatatcaatgttctgcaatccatcaattccggtgtcagtacacttctaatcatatgatccccaacttgtgaagctgctccatacttttcaggagatgagcttaggcacatagcaagcgataacaagcttagttaaaacgtcgaggagtgatacaaagccatacacacttttgtggatattgggatcgagatgatcaagatgataaagcgaggagacgtcagaaaagcgaatgttttgaggaaagaaactttgctgctgttgcgttgtgcccttgaggctgcttgggg

SEQ ID NO: 81177 - DNA, 516 bp, Arabidopsis thaliana landsberg
gagacaaaaaccatattgaaatttaacacagaaatatttttattgatcactgaattaacttttcttttattagcatcttacataattggttagggttagaaaaaaacattgtaaatgcattattctaatttttgctgtattttacggtaaaatggaaaatctatattaatgaataattattttcatttctgatatataatcttctatttcgttttaaactttctatttctgccattaaaacgtttcctttataacatatgtacgaatatttattacacaaacacttttttgcttcttcaccaaacactagtttgcttcttctccaagcatcttaaaacctcaatcttcctcttcttttaaaacactaaaccaaactccttcttgttccaattcatcttctctcctccttcgttctcgctcccctatatgcctgtgcgcactttagctcacgttcctctctcagttcttttcttttccggccatactttttcatcggagtttccggaaacggtataa

SEQ ID NO: 81178 - DNA, 330 bp, Arabidopsis thaliana landsberg
  unsure (1)..(330): unsure at all n locations
agggtttattgagcaccggagtctacaacagcctcactccgtttatcacgacggngatgatcacgcnngggtggggttaaaatcaacagtgggtggcggcccccctcggggtctcccggctgactgtgggagaccagacccactgcgcgcgggtggcggtgatcggccccggccaggctggccgggggcatgacggcggagcggactctcgggatgccctgccgggcactgactcgctggtgacgaacctgccgggagttgcgctggccaccattgtggcggactgctccccggtggtgctgttttacccttttcttctgacctttcttc

SEQ ID NO: 81179 - DNA, 470 bp, Arabidopsis thaliana landsberg
  unsure (1)..(470): unsure at all n locations
tctcagatctccggtttggaatcggttttgaatgacaaaggggtcngttatctcaacacttgcgaacaagtttgggaatagtgagttgggtttaacatcaagaatccaacatttgaaatgccaactaaaaaatttagaacaagaaatcggtttccttcgtgctcgaaatgcgggtttggctggaaatttagaagttacgaaagttgaagagaaagaacgcgttaagggattaatggatcaggtaaatggtatgaaacatgagcttgaatcattgcggagccagaaagacgaatctgaagcaaagttggagaagaaagtagaagaagttacagagacgaagatgcaattgaaaagtctgcaagaagaaacagaggaagagaggaatagactgcttgaagagattgaccaacttaaaggagacaatcagatgctgcatagaagaatcttagagctttgatccttacatatgg

SEQ ID NO: 81180 - DNA, 549 bp, Arabidopsis thaliana landsberg
atttgataccgttatccccaacaaagaggatatcatttttaatgttcttcttctggataagctgcgtagggcctcttggagaatctcgcgaatcccattctatattcctggtgagcgtatctcctgccagcgaccaggtacctccccatgagcccatgaattttttgccgggtgcatcgtaccgtgccactgcaaatacattatctgcaacaatcatcacggtcctgtctgtaagcgtaccatatccccatgcgccggtgaaagaaggcgcaacagatgccggcttatacgataccagtggtatgatggcgcaaatggccagccatgttccgatgatctttttcatagcgtgtggtttatttaaaactaaccaaaaaatatatgccgcatggtacaagtcatcttgccatcctttttatactgccggaaaaacagtatattgttgaaacgggaatgaagttcgctggcatatgatctttatgatttggtgatacgtttttttctaacccttaatgttatagcgtatgcagttgtaccgtatttacattt

SEQ ID NO: 81181 - DNA, 542 bp, Arabidopsis thaliana landsberg
  unsure (1)..(542): unsure at all n locations
gccaacaagtactttgaatcttattgagaaaaaattatattttagtttcacagagggaaaataaaaaaaaaggaggttgggtcatgattatgatcgatctcacggcggatattttccttgtagggccaatgaagtaggggccctgaggtgcatcttacttcaagtggaggttcttctacttgattatacacaccactcttcacaaattgtaatcatctaaatttattactaataaatttcactatcccactaaaacagtcaaacctctctaaattatttcttttggaactataatacttaattttttatataataattataaataatttaatatttattaatggctaattatagatttacgttacaatgttttaattttattgttgcgaacagaattgtcgttgagtattatttgtaggtttatttagaaaaacttaattagttggaaagtttaggaagaaataaaaaacgtggagattttagttgggaaaaggtttaatttgatacttattgcaacatcanatgcttgcagcaatgaattt

SEQ ID NO: 81182 - DNA, 396 bp, Arabidopsis thaliana landsberg
  unsure (1)..(396): unsure at all n locations
nnnnnnnnnnnnnnnnnnnnnnnnnnnnnnnnnnnnnnnnnnnttttggaatttttacagacccaaaagcattacacgggataatgggtgaacaaatatcgctatcaatatgtaaatcactacacatacaataaatccctattgctatagcctacatattcctgaataatagagcacaactactcacccctccattaaacaaactcactctccgtcttcttttcacgaccttccacacaaacaaactcaatgcacgttccctatctctaacactttcatacagtctggttcaaatacattaaaataccaaagactgattctcgaacacccgctttaaaagaatcgacatattgtatggtactaaaacctacacgataaaaacatgaaccttttatt

SEQ ID NO: 81183 - DNA, 523 bp, Arabidopsis thaliana landsberg
ctgtggccaggccaaggtgacccgctatctgcgctatatttccttgcagcgtttccacatctttaaatgcctcttggggatcgcgggagatatctatacctacttccactaccgcctggtgcatctctgccttcaccttatccttaagcactttctggccttcctgcacgatgcgttgttcatggctcttcaactccctggttaccgggtccatcaccatgtactcttcttcaacgcccagggtaaaatgcttatagtctgtcatagggaggcggttagcgattagctgttagcggttagcattcatcatctgcgatgatgtttatggatatagtttttttccgctgctgctcctcttcacgtactctccccaggtaaggttatcggcgccgggtttgagtgactgtgctttttcgatggcataggtggcggctgtttccactacccattcgaagtttttctggccccacttttcaggtcggcatcaggtgcaagattacagatgtcaatagcatagggaacg

SEQ ID NO: 81184 - DNA, 528 bp, Arabidopsis thaliana landsberg
tatgtgttatatatacacacatatgattttttagtgtttatgtttatgaaagtactcttgggtatgtggatagttattagggtaatcacattggactacatgtcaatggaataaaaagatattttgttgggaaaaggtaactaaagtgctgctgatgtgggtatcaacagaaaagaaaagagaaatggggagaaatcaaaagttttgtacaatgtctatgatttactttttgaaactagcaatgtctaacagttaaaaaaagaacagacatgcatgagaggagcttcaggctaaagatggcatctttcttcttttaatcaacaccaagtgatgaccactaacaaagcaacatttattataacataatcatggaattagttatggacaattacatcaatcaagaaagatgcattaaggtgacatctaatactatacagagaaggccgtacaaatacttctggaaaaatggacttgattatttattggcaacctgaattatcatttgggggtctttggaaaatgctgtaa

SEQ ID NO: 81185 - DNA, 435 bp, Arabidopsis thaliana landsberg
  unsure (1)..(435): unsure at all n locations
gatataacaaaatnaagttaaanaggaataatttatggtttttaacagagananttcctgcgtgttttgcgtgaggaaattgaattcaaaacctcaatttcataatgtttcttctggactactacaagtaagaaactttttgctcataagctataaccaaatcttaatctccacacacaaaaaaacctttattaaaaaaaaaaaaagtcgatagtcttactgcataacatatataaaactcaaatcgtctcctttcgataacaaaaacagttcgttgttcctttaatccgtaaaaaaaaacaaaaaaagttttgatttctctctgtcagtttgagtagtagtgattaatacaaacaatggaagttgattcaagcaaggatccgaaagtctaacgggtcaaaaccaaaaaatcccggatggagtcagcactacttg

SEQ ID NO: 81186 - DNA, 493 bp, Arabidopsis thaliana landsberg
  unsure (1)..(493): unsure at all n locations
cggccgctgacgcgatgctttcaattgagcaccaacgttcaggcggttaaacttcctgcgaaatgcatttacgcgcagggcacggcagctgaaaaaatgctgtgtcccgggtggnggngggagccccgcgtcggtgggctcaccgtcggagcccatttccttcgctagactccgaaagaaaaagnggagtgtccccgatggnggagtgtccccggnggtagaagaaaatgtggaaagaaaaagtggagtgtcgttggtggagtgtccccggtggtggaagaaaatgtggagtgtccccggtggtgcaggacgcgatcgtgtcgttgtgttggcannnnnnnnnnnnnnnnnnnnnnnnnnnnnnnnnnnnnnnnnnnnnnnnnnnnnnnnnnnnnnnnnnnnnnnnnnnnnnnnnnnnnnnnnnnnnnnnnnnnnnnnnnnnnnnngaccagagcgaccgtcgcgtctaccggtcgatcaccggcaaaaagtc

SEQ ID NO: 81187 - DNA, 296 bp, Arabidopsis thaliana landsberg
accggagatccaatgttaacctttaactgtgtttttttgcagcaacacctcggggaggctttataccagagaaaagaacaaacattccatacgcagcgaaggacacctaaccggaaacggtgggagagcaaaactctctgtgcaacgggatgccgcaccctaagcaagtcataccaagcatactctatgctctgaccagtcatgggccgtgaatccctgtgaatacggccaccttgaggtaatactcgggaccatgcaatatccggggaagtgaaaaacccccatggaggaaataa

SEQ ID NO: 81188 - DNA, 242 bp, Arabidopsis thaliana landsberg
ggtattttacgacaaaaactcagcgtccttttttcgacgtgaaatatcaaccgggagactggttcgtctttggtcgggaaaccaacggtttggatccggccttgctgcataaatatgccgcgcagaccgtcaccattccacattggggccccgtgcgcagtctgaatctggccactggcggccgccatggccatttacgaggtgagtccgccagtttttcctaacgttttgcattgaaaggc

SEQ ID NO: 81189 - DNA, 658 bp, Arabidopsis thaliana landsberg
  unsure (1)..(658): unsure at all n locations
atgatgattaacgaatgaggaagaaagcctagccaccataaatttcaaatggggaaaatgacaagatttatatgagggtgggaaggtgagaaaaggaaagaagagtgacttttagagtagagaagagacaagacaaaagaaaagaaaaataactgaatagcttattcatagaagaagccccgacactttcctttcttttcccaaagattcattcattcttttatgtctctttgtacgattcagtgagacccttttctttattaatagttttaggagaaagatcgtgggtaattttatttgtttgtactgcttattttgatatattatcattccctatctattcctctctttgtatttgctttatttctttttcatgatgattgtgtgtttgtgattcttgcgagcatggaagtaagcaaaaacatcactttaataaattttatatgaaaaaagtcaaaagcaagaagagaaaatattaatgggtaagcgtacagtcaacagattaccacacgaacgatcctatgaactataaacaatagatattgttggtaggaaataaagaaacatgaatcttctcgtgaattgtnacgaagataatttgtaagtctaatcgtacggaataatcttttggtatttatttcccggatcatgatttttt

SEQ ID NO: 81190 - DNA, 260 bp, Arabidopsis thaliana landsberg
  unsure (1)..(260): unsure at all n locations
ggggggaacagagaagggagnatgctacccaaaggggtttttgtttcaacaacaaggacaacagccccgggccnggcggcgaccacatcagggcccgggcaataacaccatatactaacaaacataaacacgtatggaaatagcattagataatcaaaagaataggcaatggtattatacagccctaacaggaaaagcattatacacaaatctggaccaagcaaaagcagccacgagatataactcctaccgaaaaaaaa

SEQ ID NO: 81191 - DNA, 529 bp, Arabidopsis thaliana landsberg
ggagcgctcatccggccctccacgacgtggcgtgcgacgtttttgttttccgtatccggcagccgccggaacgggtggggcgtgatcgtcgcgacgatcgggaacatctgccgggtcaggtccgggccaccggtcgccgagtcatcatcggcggcgtcgtacagggcctgcacgcaggcgagcacggcgtcctgcacgggcaggtcatcctggtaaagcttcttcagggagctcttcgcgtacaccgaaccagagccgatggagtggtaccggtgctcctcgtacggcccgccgatcgggtcgtagctgaagatgcggccgaccccggactcatcgtcatacccggcgaacagcgggaccacgatcagtccctgcatggcaccggcgaggttttcgcggaccatggaggccagccggttcgccttgccctccagcgacagctggcggccttccatcttcttgtagtgctcaggctcgaccttgaacagccgggccatcttgaccccgactgacgcccggccggcgatgc

SEQ ID NO: 81192 - DNA, 597 bp, Arabidopsis thaliana landsberg
  unsure (1)..(597): unsure at all n locations
gagaataaatatatataaaatatatagttctacgcttttgtttttatggtttttcatttatgtttgtgggtgcaggtaaaattacctaaacatgcaagtgtacactgatgtgaaattagggttaatagcaacttatgcatatgataatataattaggtgtttgannnnnnnnnnnnnnnnnnnnnnnnnnnnnnnnnnnnnnttgtttttgtccaaattgaatttaccgactaatattcatattcaccctgataaaagatcggtagcaatattcatcgtgttccttgacgaacacttaggattggagcaacatattcatgttatatatcataaatttttttaattaacattatattaaaacatatcttatatatataacgtggatcatttatctctttcttttgtcaacgattggaactatttatcaaaattaacattttttacacagattgctatggataatacatgtaagcgtacttatataaattttagctaagatatggtagttttgatgatatggaagtgtaatttacatatattgtacttgacgaaattttttctttttagaactgctatacatgtatgtaaatattgaat

SEQ ID NO: 81193 - DNA, 571 bp, Arabidopsis thaliana landsberg
  unsure (1)..(571): unsure at all n locations
aacaccacgaataccgacaattcagaccattcggtgacgactatctacgttaacgcgttcaacacccagaccggggccgggggcaatgtcgatgcttccaacaacagcacgttcggggctgatgcgttggtagcgaacgccacgctgtccaattacgtcagcggggtgcacgtcagcttcggctcgacggcgggggagcaaggctcgcccgacaacagcctgacgaccggcgacaatgccttccagaacttcgccggcatgcaggccatcaacctgaacaccggggcggctgcatcgcaatcgtccaacgtcagcgtcgcgatcggcatgaacaatgtcgatctcggcggcggctacagccactgacggtcggtgcggcggggccggtttcgaccggtcccgtcgcttcttttcgctcccctgggnnnnnnnnnnnnnnnnnnnnnnnnnnnnnnnnnnnnnnnnnnnnnccactgccgtcacgctccaggcaggcgcggcgcatggctcaagcgtcgcagtggctcaaccttccgaacaagtggctgcagcgcacgatcaggatgctttc

SEQ ID NO: 81194 - DNA, 388 bp, Arabidopsis thaliana landsberg
ctcataaccaactaaacggtcggtactgctacttgatgttgggccgggaccattatacaaggacccgctgtaggcgtaacccattacctactgggtggaattgccacaacatgggcgtgacttcttaggcaagacatgaattgctgcaatgatacacgcaattggtaggaatttgcgctgggattattcgtattatacatagagcacggtattatcccaatgccttagcgtcaggactcgaactactcgtcccagcacagcatggcattgctaccgcacatgacttagagagaaatgatgatattactgaagaacgtcttgatcacaatattgttgcttctcatttcgggcaattagccataactcttctgtggacttccggaaattt

SEQ ID NO: 81195 - DNA, 359 bp, Arabidopsis thaliana landsberg
ttttcaaaagcacaacacctcatccaaaagatgcctattgagcctgatgtagtgacatggggttcactgctttctgcttgcagagttcacaagaacatcgatcttgggaaagttgcaacatagagattgcttcttctcgagccaaagaacagcggggcatactcatccttggctaacttatactcagcttgtggaaaatgggaagaatctgctaagataataaaatcaatgaaagatggaagagtaaacaacgaacatgggtttagctggattgaagtgaagcatatagtccatgtctttggagtggaagactgcacttattcagagaagaacgagatctacatgaccatgaagaatat

SEQ ID NO: 81196 - DNA, 135 bp, Arabidopsis thaliana landsberg
  unsure (1)..(135): unsure at all n locations
cgagcgagccncngggagcaccagaaaacccccacgaagngggaaagggaggacaaaaggggaagcagcgagaggagacccccccgcggagagccggaagaggggagaccnccacgnccggaacggagggcgggg

SEQ ID NO: 81197 - DNA, 523 bp, Arabidopsis thaliana landsberg
acgacgagctttcgtgtgggaggaaaggtagtggagaaggtttttttatttaggaagaaacaattggtgtggcgctgggacggttggccatttgcgattctgtatactgtatggttgactacgatcgttcctagcatagacttcagtgatgcttgcattgcgcttggtggtctttctgctttccacatcttagtcttgcttttcactacgtggtccgtggatttcaagtgttttgtccagtttagcaaggtaaacaggcagtccaatggctgttacctattttcttttacagatgaatcttgagttactggtattgaccggtcctgtgtctgtgtctgtttactcacaggttaacagtatcgaccaggcagatgcatgtaaagttacaccagccaaattttctggttttaaagaagttgtgcctcttcattttgcgagcccagtaagttcattcaagattatctgttaatagtgaagttgtcagtaaagtagtctccatgaatgggttttatgtttctaggtt

SEQ ID NO: 81198 - DNA, 614 bp, Arabidopsis thaliana landsberg
agactttttgaggtctctagcgaatactactactagactagacaattaggtgttgttaaagtgggccgactaagaacgactgttaggcccgtttaagcccgtgccatacaagaaaacagaacaaaatttatagtattctttgctagtcttgcattgcaggtgaccaagtaaaagttttatcaaaacaacaggaataaacagtcttgcaaaatctcacaatcctaccaaattgacagtagtacaaccaaacatgagtttatttctgcagttgagattgctcattttcatcactgtcttcgcgcaaatcatgctcatcatcaccaacattgtcatcctcatctgattcaggtccactagcatcatcatgggcatgatcaggcacactaccatgaccaataatcccgctaactcttccggacttgtttgcatattcttcaagggaagttgagggaaacacatcaccaaccttgctgctttcactccttgtcgctttttcatttgattatttggtttgtatttttgttcatctatggcaagaaaatccccacttcaggaccaaatacacaaacattccattaccaatcttaaaactttttaaaggaactgagaagttt

SEQ ID NO: 81199 - DNA, 566 bp, Arabidopsis thaliana landsberg
  unsure (1)..(566): unsure at all n locations
gcgacggggggtggtcgacctaccttgccgaccgctcacccggcgagtttttttttttctatgtgcagccgtcaagcgggggccggccgtccggcgacccggacacgccgatgatcatgatcggtcccggtaccggtatagcacccttccgcggcttcctgcaggaacgtcgcgcgctcggccacaccggccccaactggctgttcttcggggaacggcacgccgaannnnnnnnnnnnnnnnnnnacgagatcgagcggatgcgtgacgacgggttgctcaccgagctggatctggcgttctcgcgggaccaacgcgacaaggtctacgtgcagcacctgatgcgcaatcggggggcccagctgtggcactggctgcaggacggcgcgcaactgtacgtctgcggtaaccccgaccccatggccaaggacgtacatcgcaccctctgcgatatcgccgccgaacacggtaaccttcgacccggacgccgggacgggctacgttcattcgctcagcgacgaacagcgctaccaacgggacgtctactgacgcgttgatcgcggaaa

SEQ ID NO: 81200 - DNA, 279 bp, Arabidopsis thaliana landsberg
agcaacaagccaactggacttttatttctagaattttgaatctggtctgctttaaacctcctaagagagggggggagaatgcaaccttgcgtctacacttctcaaactatggctatcctatgcacaagcaggttgtctactgtcatgatgaacttgatcaacactaccttagggatagcattgttcacgtcttctccgatgaccttgaccttgcaactctcaaaggattattgcgagcttgctcacaacagaatggacattgttacgtaaccgaccact

SEQ ID NO: 81201 - DNA, 374 bp, Arabidopsis thaliana landsberg
  unsure (1)..(374): unsure at all n locations
ggctgaatacgataagactgtaaaggaagtacacgcaagtggagttgtgttaataagctgatattttggtttttggggggcgtgagaaagaagtcgtcgttggtttgttcaaactgaaaagtgctctgttgtcgtgttagcctttacaatgctatggctaatgttttgcttctggctatggagattcgtgaactttgcagtattcgatgaacaacctgtgtggctgatgatgagaatgattnnnnnnnnnnnnnnnnnnnnnnnnnnnnnnnnnnnnnnnnnnaatactcgtgttaatgagagtttagtttccgaaaagatgcatgtctttgatttttggatgtcgtattgagctattgtttcggtccatatca

SEQ ID NO: 81202 - DNA, 568 bp, Arabidopsis thaliana landsberg
  unsure (1)..(568): unsure at all n locations
agatcggcctcgagttccgccactttgttggccacctggcgctgctcggcccgcaactcattgaagccggcgataatctgttcgttcgacgtctggacgttcggcttcggcttcgctttggccgccattcgggtttcaattctcgagtcttttgagagaaagtcttcaaaacgaaagaaaggtttttctcttcaaaaagcgttcatttgttgtgatgaaagcgtcgctccacaggtggcgctcctaaactgcagccgacaggtggcgactccggtccgaagtggcgccgaatttgaacgaaaaaagaagtgaaagatatttcttattatcggaaataaagacgaaaaagattttccgaaaaaaaaaacatttatttcaagagtttctctcaattaattcaaagccaataactctctccgcgctcttccgtcttccgtccggacgaacgcctncccctccaccttcagacgcacgactgccgcgcactcggcgaacacgcgctccacgaaagcgtccgcagagtcgggcggcgtttgggagttggagaaacgcgcgaatcgcaaattcc

SEQ ID NO: 81203 - DNA, 586 bp, Arabidopsis thaliana landsberg
  unsure (1)..(586): unsure at all n locations
atccaaagccgctgcagccaacgagggtctggcgcgcatcgtagcatttctgaccgaggccgagcaggcgcgggatagggaccgcaaactcgccggcagcatgaagggcgccgnnnnnnnnnnnnnnnnnnnnnnnnnnnnnnnnnnnnnnnagcctcagggcaatcccgacaaaccgctgccgacgtatgtgctggccagcggcatgcccggaccgcgcggtgtggatacgctgccgccgccgggggtgtttccactgtatccggtggccgaactcggaccggcggttgccggcattggtcatctgaacgtcgatatcgatgtcgacngcgcattgnnnnnnnnnnnnnnnnnnnnnnnnnnnnnnnnnnnnnnnnnnnnnnngttgtcggtggtggtcgcagcgcgcagccttaatctcggcatcgccgatatcaagccggcctggggtgaggcgttgcacatcggcaagctgcgggtgcgcacggatgccgaactgcgcatgcatacgtttttttatgccgaccgcgacggtcgcccggcgtttccgtggattccttttttgacgtgctgagcggcaaggtgc

SEQ ID NO: 81204 - DNA, 575 bp, Arabidopsis thaliana landsberg
  unsure (1)..(575): unsure at all n locations
catgtataaatatgaaaacactatgtcaataataattatcagtttattctcaggtttcgatcttgggacatatgagttggtgagcccaccacgattcctttttccaatgtatctgctttaatacaactcatatttgcaactcacactcttgttatcgtgttcaatattggcataaatacttccattacaatttttagaggtaaattaagtaaaacaaattgaataaaaactattataaatgaaaagaataaaaagaagaatttataaataaatacaaaaataaaattaaaaagttattatagatcaaaatatgaggatatgcaaaattttgtctataaattctatcattgattttttataaagatttcatcaaaaatattatttttctggcaataattcaaaatttatgttgacttgaaatgaagtgatcaatattgattagttaatttagaaacaaattaatgtattattggatgattgactttaaaatatttcttaaattttaatgttatttatttgataatatctaaaaggataagctntctgtagctatggcatttgaaaatgttaatact

SEQ ID NO: 81205 - DNA, 368 bp, Arabidopsis thaliana landsberg
tgataaaatgtgtcgttctctgatatattggccaaatggtttgactaatcaccatgtcctggtatagagctgacttgaactataatggatattgtctggctatagaaaccccgctcatgttgaccgagacgatatttatgacaccagagcagcttgtggagaaacagacattggtgcagagcatgcaaaggcacacttactagaaaggaccagtggccaagatcacttctgttactaagcctattgccttggctgcatgatctctctacaagaatggcagtgcatttccttgctggtatgacaaaaccgagcatactctcacgacatcctgggtagaccttgagacagtacttccatattgaacgaat

SEQ ID NO: 81206 - DNA, 514 bp, Arabidopsis thaliana landsberg
tcttttattgattattttaatcacctacaagttaatgaaatatgtttactgtgtgcgtgtgttgtaattgattactatagtaggaagacaacaagccctggatctttaaaacttattgaacagagaaagaaatatcgagatatagttaaattattaatgacaagaaataccgaaaatacatgaaacctaaataaataaataaacactttggcctttcatttaaggcaagaaattttcaaaaataaaactttcagtttatttgttagagttcacacacgttcaaaaatagaaattttcaaaaagttcgttttcattcctaattatggcttgtaactattaagtattaaccataccgaacttatcttaaaattcggagatagaagctctatacacaaagctatgtcaagggtttttgttgcatatcccaagtcccaacactatatcaagttttccagacgggttgctctaattttgtaaaactacttaatcattctaatggcttactttttatata

SEQ ID NO: 81207 - DNA, 586 bp, Arabidopsis thaliana landsberg
  unsure (1)..(586): unsure at all n locations
gctacggagctcgcttgaccagcccgattcccagcgccttcttgcgcattaaatcgtggttgtcgtccatgccctcgccatccatgttgggaacggccgtgatcaacgcggcctgcgcggtctcgatatcctggagcgtgcccgcgacctcggcgaccttcatcatcgtcttgacggttttgtcacggcgcgtggtggtggcctcggtcacatccgagatgaccttgtacgcaccatgctcaagatcattnnnnnnnnnnnnnnnnnncgtattttcgtcggttcgggattcgagtagaacggcattgccctcctcgccatcctcgccgagcgtctcgaccgtgcggccttcctcgacatagatctcgcgcgccatgccgagatagatttcaccgcagcgctgcatagactggcggaagttgtccatgtacgtgaacgacttcgcgtcgacgcgcgtcgcggcgatgtccatcgcatcggccgacacgttcgccttgacctcgtcggcgccatccgacgcgttggtgatttcctgaatatcggccgncgtcacctggaccagcgctgccaggacaggaggcacgac

SEQ ID NO: 81208 - DNA, 362 bp, Arabidopsis thaliana landsberg
  unsure (1)..(362): unsure at all n locations
aaacagacgaatccatagagcanagatctctccatccttttttttctagacatgcgcgatacaaccaggggggtctggcggtgaggtaaccagcattaattgggtacctttacccgctatatgtgccagtaactggtgaaagaatgcccgcatggctgtatccagaccggtcaaaggattgtcaagcacaatcagaaaaggctgatgaagcaactcctgtacgatcagcaatctgcgtgtttctccattggaaagttcgatcaatgtttttgataaaaggctttttaaattcagattgtagattacccaatccagcggacagcgtgtttcttctgatttgatcaatgaaccggcactactga

SEQ ID NO: 81209 - DNA, 567 bp, Arabidopsis thaliana landsberg
  unsure (1)..(567): unsure at all n locations
tactgttcccccaattcttctagacaagggtggtgcaacccattacaaattggttttaaaacagccgcaaggactgctgactgagaccaagagaggattctcttgggggttgcgcatatataaatagggcacagattggggattgacattcaagattaaactacaaaaggaaatccccaacaaatataaagcatctatagggcctaatcccaagttacaccaccctatattcccaagcaatcctcaactcccaggtacctgccccactgttcctgccccaaatgatacctttttggcatgttccacgggccttacatggtacattattatacaagattttatatgannnnnnnnnnnnnnnnnnnnnnnnnnnnnnnnnnnnnnnnnnnnnnnnnnnnnnnnnnnnnnnnnnnnnnnnnnnnnnnnnnnnnnnnnnnnnnnnnnnnnnnnnnnnnnnnnnnnnnnnnnnnnnnnnnntggatgtgcttttctgcttccctgccgttttatgagggcatagccttaattggaaactttaccctgctttcagatgctaggcagcttccc

SEQ ID NO: 81210 - DNA, 578 bp, Arabidopsis thaliana landsberg
tcttgatcaagatagagctgaagctagcagagatgaagcaacaggtttacagatcggtttccacggattatgagtcgttttccaagggagaaaggtttgatagtttgctaagaataaagctcatgaatagggtcattgctgataacagatttgggagatcagtgattggatcttacttactagagatatggcagtctctgtttcaagcagaggcattacaggagctgtgaatgattagaagcatgattctggatttctactgttcttggaccagagatttttttgtagactttgattggtaaatttcgtgtaaagttttttgttctctagaaataaaaacaatgtaggttcttacacacgcttcatacgaatgctaagaattttcgcatattgtatccatcaactgtatctgcaagaaatgtggaaaccgtgtgtaacaccgtgttactaacacgaatccaatttgtggcatatatagatatattaattttaaaataccggtcatgtttgaagcaaatttctatattaaacagtcttaaagtctcataagctgagagaaccgaacaattaccgacatg

SEQ ID NO: 81211 - DNA, 494 bp, Arabidopsis thaliana landsberg
aagaaactatagcttcagtagtttaccattcaaagtcggtgacgacggcgaagagattttcccggcggtggtttctctaatcggatggcgttgcacgaacatcgtactctgtagaagaagagaaaaactcagagagatattttttttctggagaatcaaaaattgttataaggaataatgaaaaaatcggtttgttgttgttgctgctgcctggagagaatatatttgaaaaaacctgactctgcgagtataacaagaaacacacacgcgctttctggtacgcgcgtgggagacactaaggaaacagaatcaagcggtgatgagttttatttttctcatcatgagactgatagtgactgagccatttatatcacagcaaaaaaaaaaaaaatctgagagcgagagagatcttacactcatgatttttgctctcgataatcttcgttcctcctcttcactggataaaaaaaatcaaaatcagcaacggagaaaaa

SEQ ID NO: 81212 - DNA, 171 bp, Arabidopsis thaliana landsberg
gctaatatattctaatttgaaccacaagtttaatttctttcaggaaacataacctatcatgggttgagttttaatgttaaatctgcacaccattcactgctattgcaagccataacttgcttcggttttttcttttcaatgcacactattcttttaacgtacgccttgatg

SEQ ID NO: 81213 - DNA, 544 bp, Arabidopsis thaliana landsberg
  unsure (1)..(544): unsure at all n locations
agagacccccccaagaccgtgaaggagttcttcaaggtcgcctcgatcaagcaggcgccgtacgtgccgtcggagaagctgccgggcggggaactcctctattgggacacgaagacaaacctgacgtgcgtcgtcgaaacggagaaaccgcaaggcgaacgcacgcgacactcgcgcaagtacgtcgagggcaacctcggctcgcactcgttcgcgttccgtggtcccgagggcaagctgaacctcaaggcatcgaacctgatgctgttcctcatgctcgccgacggcgtcgacgaagacacgtggaacttccacctgcggcgcggcgagtactcgacctggttccgtacgtacgtgaaggaccccgagctcgccgccatcgcgcagcagatcgagaccgacacgtcgctgaacgcgcaagcaagtcgcgcgcgcattcgcgacgagatctcgaagcgctacacgctgccggccgacgaagcgagcggngtgatcgacgcggaggactcgtngactctctcgacgcgaccgtcggcgtgacgcg

SEQ ID NO: 81214 - DNA, 540 bp, Arabidopsis thaliana landsberg
  unsure (1)..(540): unsure at all n locations
actcccccaaggttcccaacgagagaatcgcgttgacgcccgactggatcagcttctcgtccactctgctggtctcgtccagatggaccgggttggccgatttccaactgctggcatcggacttggccggcgtcggcatgatcgcccacgcgccttgtacgtcgtcgaccgtgagaagttttttcgccatggctggagcaggtctctgagtaatcgcgactgcgcggagcgcaatccaccgtgtcattcgatgctcgcccatcctccggacgctgcgaatgtcgcggccctgatacccgctatcaccgctctgaatgtcagccgccgctaggctttcgacatcacgacaaggcgctcgcgcgctgcggctgggaggagtggcctggatgaccacgcgacgggattttctcgccgggattgcgaatggtgtcggcgccgttgcgatgccccaggcgattgcgggtggcacgtcgccgaccggtcccgcgtctccgcttncggcgcatgtgacgcgagaggccttgagcgcgttcctcgaga

SEQ ID NO: 81215 - DNA, 490 bp, Arabidopsis thaliana landsberg
  unsure (1)..(490): unsure at all n locations
acagggagcaacgcaagatgatttttaacacttctgtaaataaacctttgtgggcgaccgttttccagcgcaaccgcaccatggaattttgcagacggcgcgacgcctattgtcccgacaccttaagctttctcacgaaggccctgtaatctgggggcctttataaggcgtctagtacgaagcgactgcagggcgttattttacgcttcggagcacaatagacttcgctatttcaattaagaatcctgtacctacctcttccgaacctgttcaaaagcatatcccgtcttcaacagcgtggcctcgctccatctggggccgataaagctcaggcccaccggcaggccctggacaacacccatcgggacggtcaggtgcggatagccggaggtggccggcaattgcgtggccgagggccggtgtattggtcgccatagaccagatcggacagccaggcccgaccgtaggtcggngccacaagcaccgtcac

SEQ ID NO: 81216 - DNA, 529 bp, Arabidopsis thaliana landsberg
gcgagggcgtgacgcgggcgcggtgatcctcgccaaggccattttgttttagtgggcgaacttccggtcgacggccagggggagcggttggtcgacgctcggcgggcaaaccgccaacccgtacgcactggaccgcagcccgtcgggctcgagttccggctccggcgccggcgtatcggccggcttcgcgccgctcgcgatcggcaccgagacggacggctcgatcgtgtcgccggcgagcgcctgcggcgtggtgggcatcaagccgacggccggcctggtgagccgcaccgggatcgtccccctgtcaccggtgcaggacaccgccggtcccatgacgacctggggggccgacgccgccgacctgctgtcggtgctggtcggcgccgatccgcgcgacccgttcccggaacgggagcgggccgacgactacacgacgttcctcgaccccgccgccctggagggcgcccgcatcggcatctggcacgtgtccgacggcgcgggcgccaagatcgaggccgtgcttgac

SEQ ID NO: 81217 - DNA, 450 bp, Arabidopsis thaliana landsberg
cgccacttcatcttcgctgatagaatgccttgatctgcttggtctcagcgccgaggagtgcggcgtcatttccgttttctcgaggatggcggcgctgccggcggcgatcgccgacaccagcgggccaaggctcaggttgaccggatagttccagggcgaaatgatcagcgagcggcccttggcttcgtactggatgtaggccttggtgcccatcatcatgcgcgtcggccacacgccggtcggcttcatccacttgcggatgttacgcatggcgtcgttggcttcggccaccaccggcagcacttcggtgagatcgacttctgcgggcggcttcttgaaatccttgaagccggcttcgcggaaggctttctggtgcgtcaggaaggtgtcgcgcaagcgcttgatcttgacgatgcgtttcgcggcggtgctggagcgcaaacgcagcgc

SEQ ID NO: 81218 - DNA, 265 bp, Arabidopsis thaliana landsberg
aaatggggatcaaaatgccaaaactatagctagttttacccttttgtgcaccagctcaagactataggagatatgatggtcttttattagttgagcttcgccattgacacaactccttctatcattatcttgaacgagtagcttaacaaccattgttaaatggaagagcatgcggtaataaaccacgacttaccttattctctcttgtgcagacaaataaataaagatgtgacctttaattaacacgtacttacgtcttcaagat

SEQ ID NO: 81219 - DNA, 446 bp, Arabidopsis thaliana landsberg
  unsure (1)..(446): unsure at all n locations
ggcggccaatcccctcgacggcctccccacactccgaaaatcgngtgcgtgatggccaaccgtcattggtggtcggggttggacctgcaaaagatgctcacccacctcgctgccggatacagggcggtctcaaactatcggctgtgtccgttgctcgcatgcgtacgtgctgtccgccatgtgtccgcagacacccgcgcggggacggctgtctcccgcaagcgcttgatcgggcttgctgatactgttccagccggcgtggcacggcacatgcacccttgatggtggccttgcgttgtggactgctgacgggctgcgtgcggcccattcgcgggcccgggatcttctgcagaagcacaggatgttctgttactacctcgacttgacatggcgcaacctcatgcgttcgcccggactcaccgagctgatggtgctctccatcggca

SEQ ID NO: 81220 - DNA, 528 bp, Arabidopsis thaliana landsberg
gtgtcgcgctggaagagccacgttccgggcaagccccactttccttttagcctgtgcctggagccgttcggggggggggtgtgtatggcggtcagcacgcatcactccgcggtgttcgcgacctgccacgtttccgccttcccgcccgtgctcgccgccaagcaggcggtgaccatcgaccagatgtgcgggggccggttcgggctcaacgtcgtggccgggtggaacgccatcgagccgggcctcttcggcgccggcatgctgcccaccgaccagcgctacgcgcaggcgtccgagtggatggagatcgtggagcgcatctgggagtccgaggaggagttcgaccacgatggcgactggtacaaggtcaccggcggctacaccgcgccgcgcccggcccaggccccgcggcccgtggtcatgaacgcgggcggctccgagtacggtcgcgacttttccgcacgcttctcggacatggcgttcatcgccatccagagcgacgagcctgccgccgtgcgccgtgaattt

SEQ ID NO: 81221 - DNA, 529 bp, Arabidopsis thaliana landsberg
cgaaagaggtaaactagacatatatagatttttttgtagtctcctagaaatcatgaataaatttaatatggattgggatctaattaccgaaacaaaaaattcatgaaaagaatgcaattggtcgtgaatcatggattttggaggtctactaggaatgtggtagctaaaataaatgatcgtattctattcaggtaactaagaagaagaatataggattaactgatctattaacgaatacaactttccatcaaaaggctcgtgtaacttccggttttgtatttataacatttcatataaactaagttttgtacctggcagggttattaaaaccgggttttggtaaaggggttggggaaacctcaactcccgtcccaatattgggtttttttccccacgtttttgggaaatatattaccccttagaaaaaaaaaaaaaaaagaaaaaagaggggaggaaaatttttttttgggagggccttttttcttaaaaaaaaaaaaatttttcctctttttatttttctggggggccc

SEQ ID NO: 81222 - DNA, 366 bp, Arabidopsis thaliana landsberg
  unsure (1)..(366): unsure at all n locations
gcgtgttgaacccgacgagagcatcagcgtcaggcagatctggggtctggnnnnnnnnnnnnnnnnnnnnnnnttcatcgggcagcagtgtcgcagcggtgacagcacccgccgaagagtggggttaggatcgcgccgaagttgcagtagtgaggagatatcaatgcgtactctaaagcgcatgaagttaatggcttcaggattggttgttgttacgaatttcatcgtcgccccgcaggtgcttgcacaggatcagtcgcaggctgcgccgtcgagtgccgagcaggatccattgggcgcattgctggattccgctccggcatcggacagttcgtcctcgacgcccgcaagtgcagggcattccgc

SEQ ID NO: 81223 - DNA, 507 bp, Arabidopsis thaliana landsberg
  unsure (1)..(507): unsure at all n locations
ttgtaatcgacctgcgagtaaatgaagtcgcggaaccccttgcgggccaatgtgcggtaactcttgagcgtctgttcgccggcggggctctcgaaagcggagtactcaagaaccgccatgcagaccgcgtccggcacggcatggtgaacggtgccatccttaatgaccgagacaaaggcgacagtgtccgccgcgccctgggatcgaactagctcgcgaattcgtgcgaggcgaggacgatcaaggccactggcccactcatctgtcaggcgcacgatagcggtgtggtcaaccccgcacatgcgagcgaggccgcgaatagtaagaaacggagcaccgttgctcagcacccccatctgaacgccgtcgatttcgcgctcggtggcaatctccaggctgaacgaaagctgcttgggggtggtgaccggattgtgactttggataaaattggtctttctcatcaatgcattanggcggggacaaaaaacgcgattttgcgcccttaca

SEQ ID NO: 81224 - DNA, 571 bp, Arabidopsis thaliana landsberg
  unsure (1)..(571): unsure at all n locations
cgaaagtctaaacatttacgagaggtaaagaagtacgaaccttgagagaatctagggttgtctgaagatcttcgttgtctgacgattgagcaatgctttaagaagaaaacaaaactcacccatatcgttgtacttgtcatatcttggaagggattgaagaaattgtggttctctgttttgagagtgtccatatcaatgacaagtcctaaatatttannnnnnnnnnnnnnnnnnnnnnnnnnnnnnnnnnnnnnnnnnnnnatgtcaaacactgatactgctttttggggttttgtgaggtttttttctctctttccaatcattggtgatgaaaccttatccagagatccaagctttacaactgttgacccgactttgatcgaagcttttgttcaaagacttcaaatttccaaaaccatgtttcaaatcgacaatggcaacgacaaaaacaaaacagagatacaaacattgcacattttattagaaccgtgctaacgatgacctaactttacgaaaaaactacaactttagaacaagctgtgattaaagcagagttcagaccatgagaaat

SEQ ID NO: 81225 - DNA, 364 bp, Arabidopsis thaliana landsberg
caataaaagaatttaaactcatcagtttatttatttgcatacctataagcttgttattatgaacaacctcacttcctcgtcagtatccttgtgaatgccatcttctaggatctgttgatctttaaatgatcatttatatattttatacatgagctcttctgaaaactataaccatgagtctaaccacttcttgcggtctcataatgtcttgtgccaatctgttcccaggaatgatctgaataaagatcttccggttcatgaacagaaaatggtcatggtgtcatgtaccccaaccatacttgcttgatttaacactctgaaatctttgcattcgtgtctgtacgtctaaaaccttatgtcaacc

SEQ ID NO: 81226 - DNA, 464 bp, Arabidopsis thaliana landsberg
tcgcgacatttacgttccgaaataatcgtgtactattatgatgtttgttgtgctatataataaattctgtttagttcgttttgcgtcttaaagaggttaaattagataactggtcccatgtgaacgaccattgtggccattgctttgtggtaagaactccttgtgcttggaacctcaaggtcacggcttcgaacaatggtcatgaccctctcgcttctgcttcttcttctctttgtttcaacaacatataaggcattcataaatgcctcgtctttttttgttttctttcctttcaatacgtagttcgatttcgatttcgatttgtagatctcagcaaaatccatgtcttgagagaatgattaatgggcctttttaataactccactgatcaagacgagccccgaaaaccgcggataccgacataggcgctcatccttggactaaattttaaatcgactttacta

SEQ ID NO: 81227 - DNA, 447 bp, Arabidopsis thaliana landsberg
tcgtgatagcttgctgaccaacttaatgtattcgcttatcaagaataaaatttgaggacggtgcagggtttgatttctggaatcatgacattcccgctcctgccgtctttgacttaagatccgtaaagcttttgggatattttctatccttgacatagtaacaaggtccattaacaaccttacttcattctcctctttacttttagagcctccatttcattttgagttgcagataatacattcgcatgacagggaaggaaaatgtaatcacagctgtgtggtggctcttaaaaataacgcactgttctccaatgttgcatgtcatgtgataatcctacatccatgtctgacctttatgtggaattatcatgcacctcaaaataataatcgattttgtgatctcatgtggatttattataaggttttagtcattcgccttttggcatt

SEQ ID NO: 81228 - DNA, 369 bp, Arabidopsis thaliana landsberg
tttttttttgactcacaacaacgaacaagagggcgccgggcttactgatccagtgtgtttaaaccaaccaaaattgtataattagaattcctctgtctatctgaagcagtatttgcttccatgcaggaagatggtgaaaagaacgcacaatggaaatcaaactctctctttgaacatgataaaagtgtaatgggccataaaactttgattccttctccaatcttgcgtttatcttattctctattgctctaagttactaatgatgtatatttctacatgacttcctgtgacaggtgggagcacgtgtagttggactacaccccaacattaactactataagcttcagaaagatggattactattgcatg

SEQ ID NO: 81229 - DNA, 614 bp, Arabidopsis thaliana landsberg
cgaaggtgataagagcctgttcattttttcggatgttaaaatgggtttggaacctgacgccgtatcattctgtaccctaatggatgcattctgcaagcatatgaagccaactattgggcttcagctgtttgatcttatgcagaggaataaaatctctgcagatattgcggtatgcaatgtcttcattcatttgcttttcaaatgtcaccgcatggaggatgcttctaagttcttcaataatcttattgaaggaaagatggagcctgatattgtgacatataacacagtgatatgtggctactgctctttgagaaggttagatgaagcagctaggattttcgagctgctaaaatttacaccttttggtcccaatgccgttactttgactatacttatccatgcactctgtaaaaataatgatatggatggtgctataaggatgttctccataatggcggataagggccctaaaccgaatgttgtcacatacggttgtctatgggattggttttcaaaatccggcgatatcgaaggttctttcaagcttttcgaggaaatgcaagagaaaggtatttttccaagcataataggtatagcattataattgacggtct

SEQ ID NO: 81230 - DNA, 245 bp, Arabidopsis thaliana landsberg
tttaaaacccatatataaactgttgcatatctacagaatccgtcttcattcaaaaaaattccgtcatgaatacctcaggaccattctggttcccatattggtgaaaatgcctatcggatgccaatgattgaaaaaccacttggtcggctgcataactagaaatgggtttacatactgccttttgcttaggttacagctgcaacaacacgcaatcatcgaagctacgactagctgtctattggccc

SEQ ID NO: 81231 - DNA, 355 bp, Arabidopsis thaliana landsberg
cggcacatggataattattaagagccagcggcctacacagctttttttttttattccaccattaactaataaatggggaggcctaactgactggcccgcgggaggaatacgacaagccctacccaatcaaaagaggaagcaatccaaacgcatgacctgcagatgaacgaaagcaagacctgtagaccccttggcttactcagacatccgcacctatctaacagatggctggcctgcatgaccataagggaaccgccatattcgcatttctcctaaacaactacgatagcgacatcgtattacggcccccacagtgcttatatgaaaccaagctggctaaaaccttgacctagat

SEQ ID NO: 81232 - DNA, 349 bp, Arabidopsis thaliana landsberg
aaattcatagctgcgcattgaggtattggttaaaactttcgtgcgtactttaattttgctcgatccaatacagaggaatcatgcttagccaggtaactggtgcgatgagtataactgctgtcggtattgtaacgaagattattgaaataattaagctgaaaggggttcaggttcatattgaagcgtatcctttccttcagctcttttcgtgaattaaggtcttctgttatcgcgtttctttattcctggtaaattgttttttttttgatataaatattaatagttataatcattctttattaatcttttaattaaattcttttctatttattatatattatttcatttt

SEQ ID NO: 81233 - DNA, 553 bp, Arabidopsis thaliana landsberg
  unsure (1)..(553): unsure at all n locations
cggcgcgcattcgcagcgtaccgtcctggttgaccgtgccgccggtgagcgcatcgccggccgccttggccaccggcatcggctcgccagtgagcatggcctcgtggacgtggctctcgccgtcgagcaccacgccgtccaccggcaccttctcgcccggcctcacgcgcagcgtgtcgccgggctgcaccttatccagcgaaacgtcagcctcgcggccgtcggcatcgacccgatgcgcgatcttgggcgccagcccgagcagcgccttcagcgcctcgccggtgcgccggcgcgcgcgcagttcgaggaagtcgcccagcatcaccagcgtcacaatcaccgccgccgattcgaagtacaccgtcacgcggccgtgcatgtcccggaagctggctgggaacacgcccggcgcgagaaaagccacggtgcttgacacccacgccacgccggtacccagcgcgatcagcgtgtacatgttccggtgaccacggccgaagcgagttccaaccgcgcctgaagacggngcgccggcccacaagaccactacgct

SEQ ID NO: 81234 - DNA, 302 bp, Arabidopsis thaliana landsberg
  unsure (1)..(302): unsure at all n locations
attatattttcttatggccanaccccttctttaaatacttattccattttaataaacatttctactcttcttctttatatatttatgcatcattactctccacatttctcttttccaaaaaaaaaacaattctctaattcctaaccatttattaaccaaatatttttcttttaaaaaaaaatttttatttaaaaactttcattccttaaaaataaatattctccaatctctaaccatttatccaccaattttctttctttaaaactttctaccaatatatcattcatttcacattttcatct

SEQ ID NO: 81235 - DNA, 343 bp, Arabidopsis thaliana landsberg
  unsure (1)..(343): unsure at all n locations
ttttttattttcaaaaacttattctttatacccacaaaatattatatatcatttttgggttgggtttttaaatttaaaaaattcacaacccttcccacacccttttcaaaaactataaacctttataatnaccttttacaatattaaattacttttaaatacttttattataatcttaacattttataaaatatttaacactttataaaaacattcaaacattataaataattattaataatcatacaactatactacattctaaatttctacattctaacaattctttatacaattttttaaccttttctatcttatattataaacaatttaattcttctaa

SEQ ID NO: 81236 - DNA, 372 bp, Arabidopsis thaliana landsberg
ccctccctaatcctcctaatgacattaatatcctctccctatatatattctcaaccattactaaaactaaatcttttatgaaataatcccatttccaacatcttcctacttactcaatttcaatatatagtccacccattccctaagcaaatccttaaaatgctaccatcataatatatttcatctcaaacccattcacagtataactcaactaaacaaattacatcacaactaacattatacatatttttatccaaaaaatatcccacctcttatccatataatttataaaaaacatcctttccctcaccttaaatttttaaatatttactataatctttctttcccttaaaactcctttttttcatttta

SEQ ID NO: 81237 - DNA, 491 bp, Arabidopsis thaliana landsberg
acttctgtcgtacataatgtattcctgtagctgaaatagtgaattatattacttccgatagagaacgtatcgtatcgttcaaaagtatttttgtttgattgagattgtttttattaatgttggtgatgcctacattttattcaatactgcagaagctctgattcatatgttcaggtaactttatttacccaaacattaatcgtaatcagatgctaaagtttgtaaatgattgacgtgactcaaaaaagcatgccctacgtaaatagtgagtgtataggtaaaaactttccaaagtccatatatattacatatacgcatctatatgaatatatctacaagacatggcaaaataatgaaattccggatataataatagagtttgtgtctttcttgagtttcttctatgatgccaacgaaatcaaataatgttgataatacgtatgacgtgtgctttttataagtattattctctgatgataatcaagttatgt

SEQ ID NO: 81238 - DNA, 398 bp, Arabidopsis thaliana landsberg
  unsure (1)..(398): unsure at all n locations
gaggaangcgggaccacaagaaacaagggccgcggaaaagagagttatcaagaggacaggggaacaggggaggaaacggggaagcaggcccgagaccagaccagggcgaggacgagggggggccgaggaggaggcgacaaccaccgaccgggagggaggacgagacgaccaggacaggaggaaggcgcgagcaggacgatgaaggggcgaggaaaaagaggggggcgagaggaatggagaaccagaagagggaaccgaggaccggaacagaaaagcgggcgacgaggacgaggagagaccacggagcaggagaccaggagtagaaagcgcggagcggaggcgagaacacgaagccaggacgagagaaccacggaacagaaagaaaaggggcgatgaaa

SEQ ID NO: 81239 - DNA, 417 bp, Arabidopsis thaliana landsberg
  unsure (1)..(417): unsure at all n locations
cttcctatatatcatttctccccccaatggatttttttcttataggaacaacccctttcaactggggnggttttaattaaaccatccgggccaccccaatacaatatataaggtccccttctacaaatattactacacccttcatccttaaatatctattgcttctttaacccttttaattgctcaaaagtatgatactaaaaatcctatcctccaatacttttctaaaactttctttctttaaaaaaatattaattaaacatcccacttaatttaattctttccatgaatctaaaaaatagttaacattcttcatctctctcactatttctctcaatttcaaaatccaaaattttaatctatctcctttcattcattcctcctacatttccttcatttatcctaaacatttcattt

SEQ ID NO: 81240 - DNA, 221 bp, Arabidopsis thaliana landsberg
  unsure (1)..(221): unsure at all n locations
ctatctcaacatcnccacatttttcctcttactaactcctcctcaaatatcccacctcctctcttctctctgtaaatcttcttaacccatcccacaatcttcttttcttcaccaaactcctctccatctatccctttctttccttacaacacctccacaactataactccttacctatacacatctccttttcctttacatcccaaactctcctaatactc

SEQ ID NO: 81241 - DNA, 200 bp, Arabidopsis thaliana landsberg
ccaaaaaagccaaaagaaaaaaagaacaaaaaacaccacaaaacccaaattttacaatttcaacaaccaacaaacacaccaggggcccatggaaaaaataaaaaaaaaaccacacccaaaaaacacacaaaaaaccgaaaaacccagcaaaacacccaaaacaaagccagcccagcaacaaaccacacaaaacacaaaac

SEQ ID NO: 81242 - DNA, 309 bp, Arabidopsis thaliana landsberg
ttatattaccaccccggaacacccacccaaacacctgttgaccaaactgatccttgccatacttgatcaactgtcagataacctgtttgcccgttgtcttaaaccctgtgaagccgcattgaaagatgcatgatattccacttcacagatagatgaagtgatactgttgggtggttctacccgtattcccaaagtgcagtacatcctatagaaattctttggtaaaaaacccaacaaatgggttaacccccatgaagtggtagccgtacgttcaaccatacaattcgctgtacttaccggtgaagtaaa

SEQ ID NO: 81243 - DNA, 487 bp, Arabidopsis thaliana landsberg
ccgggtatttccgcaccgcgtccgacaggcgggtatttttaagattttacggcccgaatgccaggccggggctgggggggccctcggccggtcgatgctggcgaccgtttcgcccgccagcgtcatgcgctcgccgggcgacagccgccggacctcattgttgagattgaccgagacctggcccgaaaacagcaggacgcaggcgttccggccgccgcaacgcacgtcgaagttcgaggcgtcggcgaggatgcggccctcggccgcctcgacgatgaaagggcggtcctggtccggcaccacggtgaaattggcgcggccataacgcagcgtgaccatccgccggtcgcggtctaacaatacgtccatccgggaatcggcgttgagcagggcgcggctgtagtcgggcagaacgacggtctgctgctcgccgatccgggttatgtaggtatgggcttgggccccccgcagcatggtcaggtaggcg

SEQ ID NO: 81244 - DNA, 241 bp, Arabidopsis thaliana landsberg
cgcggatgtcggaaaaaagagttgcaataactttcaaatattgattatcaatgttggacaatcttaatacatataaaagttagagtaagttgataaattccacgaccccactagactaaaatcatgttgttcagtaagacctctgagggtaaaaaatatgaataccaaatagattattcttatgatgctgccaaagatttaattcagtttcttttttggcccggttctaacatttatgcgt

SEQ ID NO: 81245 - DNA, 248 bp, Arabidopsis thaliana landsberg
ttttgaaaagctaagcctgtagggcaatttaacatttgatatattagtagccgaccgttaatatttatttatgctttatttacatgatgctttaaacggtctggtaatccacaaacaaccatactaaaccaatttatttgggttcgttatatgtgagctacatgttggtcatggattttactatatgatatagtgacacattactagatgtttatgcctaatactagaccaaacctatctgtattgct

SEQ ID NO: 81246 - DNA, 231 bp, Arabidopsis thaliana landsberg
agaagaatattgttgtttatagtaataactaaacctcatcacaacacacatgtattataaaggctttttgtccccatgtcaaaccataagacattgtaatttctaaagacatgttgcaaagtggaggttgatcaaaaaaagtattaaaaccaaaaaaagtaggaataaactgagacaatatcaacggctggcaagtgaggatgagtttactcttgtcttttttgcttttat

SEQ ID NO: 81247 - DNA, 325 bp, Arabidopsis thaliana landsberg
acttgttgaccttgagactttcagtgcgggctacatcgcggacggggcttctacctattgcacagaccggttggctggcttgacggcatgaaccacatggtttattcactcttatctgtatatcatattcttatataagagtatatcatattcttatataaagacaattcgccttaatatcaatcgatacccgccaagaaacttcgcgggggaccaagtcttttagcgtccggagaggtccggcgtcaaatgacctaactactgaatagacttcgtctttttgtaacacaaaatcattctgcgggggaaaaagctaaagcatgtc
